United States Patent Application Publication US 2013/0031665 A1 - sequence listing, part 3

SEQ ID NO: 9632 - DNA, 1129 bp, Glycine max
  Gm_smallRNAprecursor_2465
tgagccatccactcaggaatctcccaaaccggcaaccgccaaacaaacatcggctgactatgcatggccaattgaaacccttcaggcccttcaagacatgggtctgaccaaatttccaaaaataatcaaaaaatcttgggcagacattgcctcagaatctgatgatgaatctgaatcaaatttacaaactgatccaaaatgcgtcaatgaccaaaacagccaccaatactaaaggaaaactacctttagccaaagctcaaacaccacctaccaaacaaactaacaattatatttataaaaataaattgttaactgttttgcagatggaacctgaattttgggacaaaaatcccttcaaggcgacggccaaggctttcccaccaggatttcactacaaaccaaccaccatcctgaagacaagaactttttatgaattgattttggtagattcaaactcagtatctatcaaacatttcaaagatccaaaagaccaaaccttaaacacccactcaaccatccaaatactaaaagttcttcaaccaagacactttggttcggacttgaacaaaggaaagagattttcagttccatttgatccggtaggttatacctattgggattacgttgatgcttggactaaggtgttttggcaccaaaatacccgcttcaagcattcatggctgatatatttcaagaccaaaacaatttacaattttcccaattggtttttgcaatggtgggacttctttggaccaatcccagagatattcccagaaacggtccaacaaggattttcccaatttaagaaacaatacaattcgcaggaatcacgaattccagcagatcttaaatacttttcaagctttgcactgtcatggatattctcatggcaatatcgttacagcaagactgaaaagacaaaccaatatccatcactacaaagacacgcatttgtaaaatggtggacacaatttgactcatccaaagcggatccagaacaagtaaaactatggttccaatcccatccagaattcctcaaaacagctgatccagagacttctgtgtttttgaaccaaaagtctcatctggcagcatttttagcaggatcgacatcaaaggaggtcttagc

SEQ ID NO: 9633 - DNA, 1107 bp, Glycine max
  Gm_smallRNAprecursor_2466
caaaccggcaaccgccaaacaaacatcggctgactatgcatggccaattgaaacccttcaggcccttcaagacatgggtctgaccaaatttccaaaaataatcaaaaaatcttgggcagacattgcctcagaatctgatgatgaatctgaatcaaatttacaaactgatccaaaatgcgtcaatgaccaaaacagccaccaatactaaaggaaaactacctttagccaaagctcaaacaccacctaccaaacaaactaacaattatatttataaaaataaattgttaactgttttgcagatggaacctgaattttgggacaaaaatcccttcaaggcgacggccaaggctttcccaccaggatttcactacaaaccaaccaccatcctgaagacaagaactttttatgaattgattttggtagattcaaactcagtatctatcaaacatttcaaagatccaaaagaccaaaccttaaacacccactcaaccatccaaatactaaaagttcttcaaccaagacactttggttcggacttgaacaaaggaaagagattttcagttccatttgatccggtaggttatacctattgggattacgttgatgcttggactaaggtgttttggcaccaaaatacccgcttcaagcattcatggctgatatatttcaagaccaaaacaatttacaattttcccaattggtttttgcaatggtgggacttctttggaccaatcccagagatattcccagaaacggtccaacaaggattttcccaatttaagaaacaatacaattcgcaggaatcacgaattccagcagatcttaaatacttttcaagctttgcactgtcatggatattctcatggcaatatcgttacagcaagactgaaaagacaaaccaatatccatcactacaaagacacgcatttgtaaaatggtggacacaatttgactcatccaaagcggatccagaacaagtaaaactatggttccaatcccatccagaattcctcaaaacagctgatccagagacttctgtgtttttgaaccaaaagtctcatctggcagcatttttagcaggatcgacatcaaaggaggtcttagcta

SEQ ID NO: 9634 - DNA, 1107 bp, Glycine max; identical to SEQ ID NO: 9633
  Gm_smallRNAprecursor_2467

SEQ ID NO: 9635 - DNA, 1108 bp, Glycine max
  Gm_smallRNAprecursor_2468
caaaccggcaaccgccaaacaaacatcggctgactatgcatggccaattgaaacccttcaggcccttcaagacatgggtctgaccaaatttccaaaaataatcaaaaaatcttgggcagacattgcctcagaatctgatgatgaatctgaatcaaatttacaaactgatccaaaatgcgtcaatgaccaaaacagccaccaatactaaaggaaaactacctttagccaaagctcaaacaccacctaccaaacaaactaacaattatatttataaaaataaattgttaactgttttgcagatggaacctgaattttgggacaaaaatcccttcaaggcgacggccaaggctttcccaccaggatttcactacaaaccaaccaccatcctgaagacaagaactttttatgaattgattttggtagattcaaactcagtatctatcaaacatttcaaagatccaaaagaccaaaccttaaacacccactcaaccatccaaatactaaaagttcttcaaccaagacactttggttcggacttgaacaaaggaaagagattttcagttccatttgatccggtaggttatacctattgggattacgttgatgcttggactaaggtgttttggcaccaaaatacccgcttcaagcattcatggctgatatatttcaagaccaaaacaatttacaattttcccaattggtttttgcaatggtgggacttctttggaccaatcccagagatattcccagaaacggtccaacaaggattttcccaatttaagaaacaatacaattcgcaggaatcacgaattccagcagatcttaaatacttttcaagctttgcactgtcatggatattctcatggcaatatcgttacagcaagactgaaaagacaaaccaatatccatcactacaaagacacgcatttgtaaaatggtggacacaatttgactcatccaaagcggatccagaacaagtaaaactatggttccaatcccatccagaattcctcaaaacagctgatccagagacttctgtgtttttgaaccaaaagtctcatctggcagcatttttagcaggatcgacatcaaaggaggtcttagctaa

SEQ ID NO: 9636 - DNA, 1108 bp, Glycine max; identical to SEQ ID NO: 9635
  Gm_smallRNAprecursor_2469

SEQ ID NO: 9637 - DNA, 1102 bp, Glycine max
  Gm_smallRNAprecursor_2470
accggcaaccgccaaacaaacatcggctgactatgcatggccaattgaaacccttcaggcccttcaagacatgggtctgaccaaatttccaaaaataatcaaaaaatcttgggcagacattgcctcagaatctgatgatgaatctgaatcaaatttacaaactgatccaaaatgcgtcaatgaccaaaacagccaccaatactaaaggaaaactacctttagccaaagctcaaacaccacctaccaaacaaactaacaattatatttataaaaataaattgttaactgttttgcagatggaacctgaattttgggacaaaaatcccttcaaggcgacggccaaggctttcccaccaggatttcactacaaaccaaccaccatcctgaagacaagaactttttatgaattgattttggtagattcaaactcagtatctatcaaacatttcaaagatccaaaagaccaaaccttaaacacccactcaaccatccaaatactaaaagttcttcaaccaagacactttggttcggacttgaacaaaggaaagagattttcagttccatttgatccggtaggttatacctattgggattacgttgatgcttggactaaggtgttttggcaccaaaatacccgcttcaagcattcatggctgatatatttcaagaccaaaacaatttacaattttcccaattggtttttgcaatggtgggacttctttggaccaatcccagagatattcccagaaacggtccaacaaggattttcccaatttaagaaacaatacaattcgcaggaatcacgaattccagcagatcttaaatacttttcaagctttgcactgtcatggatattctcatggcaatatcgttacagcaagactgaaaagacaaaccaatatccatcactacaaagacacgcatttgtaaaatggtggacacaatttgactcatccaaagcggatccagaacaagtaaaactatggttccaatcccatccagaattcctcaaaacagctgatccagagacttctgtgtttttgaaccaaaagtctcatctggcagcatttttagcaggatcgacatcaaaggaggtcttagc

SEQ ID NO: 9638 - DNA, 1244 bp, Glycine max
  Gm_smallRNAprecursor_2471
ttcaagacatgggtctgaccaaatttccaaaaataatcaaaaaatcttgggcagacattgcctcagaatctgatgatgaatctgaatcaaatttacaaactgatccaaaatgcgtcaatgaccaaaacagccaccaatactaaaggaaaactacctttagccaaagctcaaacaccacctaccaaacaaactaacaattatatttataaaaataaattgttaactgttttgcagatggaacctgaattttgggacaaaaatcccttcaaggcgacggccaaggctttcccaccaggatttcactacaaaccaaccaccatcctgaagacaagaactttttatgaattgattttggtagattcaaactcagtatctatcaaacatttcaaagatccaaaagaccaaaccttaaacacccactcaaccatccaaatactaaaagttcttcaaccaagacactttggttcggacttgaacaaaggaaagagattttcagttccatttgatccggtaggttatacctattgggattacgttgatgcttggactaaggtgttttggcaccaaaatacccgcttcaagcattcatggctgatatatttcaagaccaaaacaatttacaattttcccaattggtttttgcaatggtgggacttctttggaccaatcccagagatattcccagaaacggtccaacaaggattttcccaatttaagaaacaatacaattcgcaggaatcacgaattccagcagatcttaaatacttttcaagctttgcactgtcatggatattctcatggcaatatcgttacagcaagactgaaaagacaaaccaatatccatcactacaaagacacgcatttgtaaaatggtggacacaatttgactcatccaaagcggatccagaacaagtaaaactatggttccaatcccatccagaattcctcaaaacagctgatccagagacttctgtgtttttgaaccaaaagtctcatctggcagcatttttagcaggatcgacatcaaaggaggtcttagctaaaaatctgaaggaagttctacaaatgttacaacaggaagaagaagcttcatcctcaaagaaggaagaaacaagttctgctgaagacgaagaagatcccttttaccaaaacgaagatgattgttttggtatctgtttagattaaatttaatttcggtcacaaaactgtctgtttgtaatttatgtgtaattaatgctggacaa

SEQ ID NO: 9639 - DNA, 1058 bp, Glycine max
  Gm_smallRNAprecursor_2472
accttaaacacccactcaaccatccaaatactaaaagttcttcaaccaagacactttggttcggacttgaacaaaggaaagagattttcagttccatttgatccggtaggttatacctattgggattacgttgatgcttggactaaggtgttttggcaccaaaatacccgcttcaagcattcatggctgatatatttcaagaccaaaacaatttacaattttcccaattggtttttgcaatggtgggacttctttggaccaatcccagagatattcccagaaacggtccaacaaggattttcccaatttaagaaacaatacaattcgcaggaatcacgaattccagcagatcttaaatacttttcaagctttgcactgtcatggatattctcatggcaatatcgttacagcaagactgaaaagacaaaccaatatccatcactacaaagacacgcatttgtaaaatggtggacacaatttgactcatccaaagcggatccagaacaagtaaaactatggttccaatcccatccagaattcctcaaaacagctgatccagagacttctgtgtttttgaaccaaaagtctcatctggcagcatttttagcaggatcgacatcaaaggaggtcttagctaaaaatctgaaggaagttctacaaatgttacaacaggaagaagaagcttcatcctcaaagaaggaagaaacaagttctgctgaagacgaagaagatcccttttaccaaaacgaagatgattgttttggtatctgtttagattaaatttaatttcggtcacaaaactgtctgtttgtaatttatgtgtaattaatgctggacaatactacctgtcctgtagccattaaagtcctggtcaaaactacttgtcttgtaacaaacagtcaaatagtctcggtcaaaactaccggcaactaccggtcttagatttttggctatataaggagtcctcaagtatgttgtgaggcaccctttcatttagccattttttcaggttttggaagagaggtgctctgaaacaagatttttgtaagcgcttcttt

SEQ ID NO: 9640 - DNA, 1036 bp, Glycine max
  Gm_smallRNAprecursor_2473
tccaaatactaaaagttcttcaaccaagacactttggttcggacttgaacaaaggaaagagattttcagttccatttgatccggtaggttatacctattgggattacgttgatgcttggactaaggtgttttggcaccaaaatacccgcttcaagcattcatggctgatatatttcaagaccaaaacaatttacaattttcccaattggtttttgcaatggtgggacttctttggaccaatcccagagatattcccagaaacggtccaacaaggattttcccaatttaagaaacaatacaattcgcaggaatcacgaattccagcagatcttaaatacttttcaagctttgcactgtcatggatattctcatggcaatatcgttacagcaagactgaaaagacaaaccaatatccatcactacaaagacacgcatttgtaaaatggtggacacaatttgactcatccaaagcggatccagaacaagtaaaactatggttccaatcccatccagaattcctcaaaacagctgatccagagacttctgtgtttttgaaccaaaagtctcatctggcagcatttttagcaggatcgacatcaaaggaggtcttagctaaaaatctgaaggaagttctacaaatgttacaacaggaagaagaagcttcatcctcaaagaaggaagaaacaagttctgctgaagacgaagaagatcccttttaccaaaacgaagatgattgttttggtatctgtttagattaaatttaatttcggtcacaaaactgtctgtttgtaatttatgtgtaattaatgctggacaatactacctgtcctgtagccattaaagtcctggtcaaaactacttgtcttgtaacaaacagtcaaatagtctcggtcaaaactaccggcaactaccggtcttagatttttggctatataaggagtcctcaagtatgttgtgaggcaccctttcatttagccattttttcaggttttggaagagaggtgctctgaaacaagatttttgtaagcgcttcttt

SEQ ID NO: 9641 - DNA, 1031 bp, Glycine max
  Gm_smallRNAprecursor_2474
gacactttggttcggacttgaacaaaggaaagagattttcagttccatttgatccggtaggttatacctattgggattacgttgatgcttggactaaggtgttttggcaccaaaatacccgcttcaagcattcatggctgatatatttcaagaccaaaacaatttacaattttcccaattggtttttgcaatggtgggacttctttggaccaatcccagagatattcccagaaacggtccaacaaggattttcccaatttaagaaacaatacaattcgcaggaatcacgaattccagcagatcttaaatacttttcaagctttgcactgtcatggatattctcatggcaatatcgttacagcaagactgaaaagacaaaccaatatccatcactacaaagacacgcatttgtaaaatggtggacacaatttgactcatccaaagcggatccagaacaagtaaaactatggttccaatcccatccagaattcctcaaaacagctgatccagagacttctgtgtttttgaaccaaaagtctcatctggcagcatttttagcaggatcgacatcaaaggaggtcttagctaaaaatctgaaggaagttctacaaatgttacaacaggaagaagaagcttcatcctcaaagaaggaagaaacaagttctgctgaagacgaagaagatcccttttaccaaaacgaagatgattgttttggtatctgtttagattaaatttaatttcggtcacaaaactgtctgtttgtaatttatgtgtaattaatgctggacaatactacctgtcctgtagccattaaagtcctggtcaaaactacttgtcttgtaacaaacagtcaaatagtctcggtcaaaactaccggcaactaccggtcttagatttttggctatataaggagtcctcaagtatgttgtgaggcaccctttcatttagccattttttcaggttttggaagagaggtgctctgaaacaagatttttgtaagcgcttctttctagattcaataaatttctatt

SEQ ID NO: 9642 - DNA, 1138 bp, Glycine max
  Gm_smallRNAprecursor_2475
ggttcggacttgaacaaaggaaagagattttcagttccatttgatccggtaggttatacctattgggattacgttgatgcttggactaaggtgttttggcaccaaaatacccgcttcaagcattcatggctgatatatttcaagaccaaaacaatttacaattttcccaattggtttttgcaatggtgggacttctttggaccaatcccagagatattcccagaaacggtccaacaaggattttcccaatttaagaaacaatacaattcgcaggaatcacgaattccagcagatcttaaatacttttcaagctttgcactgtcatggatattctcatggcaatatcgttacagcaagactgaaaagacaaaccaatatccatcactacaaagacacgcatttgtaaaatggtggacacaatttgactcatccaaagcggatccagaacaagtaaaactatggttccaatcccatccagaattcctcaaaacagctgatccagagacttctgtgtttttgaaccaaaagtctcatctggcagcatttttagcaggatcgacatcaaaggaggtcttagctaaaaatctgaaggaagttctacaaatgttacaacaggaagaagaagcttcatcctcaaagaaggaagaaacaagttctgctgaagacgaagaagatcccttttaccaaaacgaagatgattgttttggtatctgtttagattaaatttaatttcggtcacaaaactgtctgtttgtaatttatgtgtaattaatgctggacaatactacctgtcctgtagccattaaagtcctggtcaaaactacttgtcttgtaacaaacagtcaaatagtctcggtcaaaactaccggcaactaccggtcttagatttttggctatataaggagtcctcaagtatgttgtgaggcaccctttcatttagccattttttcaggttttggaagagaggtgctctgaaacaagatttttgtaagcgcttctttctagattcaataaatttctatttttcatccttctctcttctcccttcaccgatcctgtgcggctctgccgccgcttcggtttctttgtttatgaaaacctggggtttgtaagccggtctccggtgtgcccttgatat

SEQ ID NO: 9643 - DNA, 1139 bp, Glycine max
  Gm_smallRNAprecursor_2476
ggttcggacttgaacaaaggaaagagattttcagttccatttgatccggtaggttatacctattgggattacgttgatgcttggactaaggtgttttggcaccaaaatacccgcttcaagcattcatggctgatatatttcaagaccaaaacaatttacaattttcccaattggtttttgcaatggtgggacttctttggaccaatcccagagatattcccagaaacggtccaacaaggattttcccaatttaagaaacaatacaattcgcaggaatcacgaattccagcagatcttaaatacttttcaagctttgcactgtcatggatattctcatggcaatatcgttacagcaagactgaaaagacaaaccaatatccatcactacaaagacacgcatttgtaaaatggtggacacaatttgactcatccaaagcggatccagaacaagtaaaactatggttccaatcccatccagaattcctcaaaacagctgatccagagacttctgtgtttttgaaccaaaagtctcatctggcagcatttttagcaggatcgacatcaaaggaggtcttagctaaaaatctgaaggaagttctacaaatgttacaacaggaagaagaagcttcatcctcaaagaaggaagaaacaagttctgctgaagacgaagaagatcccttttaccaaaacgaagatgattgttttggtatctgtttagattaaatttaatttcggtcacaaaactgtctgtttgtaatttatgtgtaattaatgctggacaatactacctgtcctgtagccattaaagtcctggtcaaaactacttgtcttgtaacaaacagtcaaatagtctcggtcaaaactaccggcaactaccggtcttagatttttggctatataaggagtcctcaagtatgttgtgaggcaccctttcatttagccattttttcaggttttggaagagaggtgctctgaaacaagatttttgtaagcgcttctttctagattcaataaatttctatttttcatccttctctcttctcccttcaccgatcctgtgcggctctgccgccgcttcggtttctttgtttatgaaaacctggggtttgtaagccggtctccggtgtgcccttgatatc

SEQ ID NO: 9644 - DNA, 1141 bp, Glycine max
  Gm_smallRNAprecursor_2477
ggttcggacttgaacaaaggaaagagattttcagttccatttgatccggtaggttatacctattgggattacgttgatgcttggactaaggtgttttggcaccaaaatacccgcttcaagcattcatggctgatatatttcaagaccaaaacaatttacaattttcccaattggtttttgcaatggtgggacttctttggaccaatcccagagatattcccagaaacggtccaacaaggattttcccaatttaagaaacaatacaattcgcaggaatcacgaattccagcagatcttaaatacttttcaagctttgcactgtcatggatattctcatggcaatatcgttacagcaagactgaaaagacaaaccaatatccatcactacaaagacacgcatttgtaaaatggtggacacaatttgactcatccaaagcggatccagaacaagtaaaactatggttccaatcccatccagaattcctcaaaacagctgatccagagacttctgtgtttttgaaccaaaagtctcatctggcagcatttttagcaggatcgacatcaaaggaggtcttagctaaaaatctgaaggaagttctacaaatgttacaacaggaagaagaagcttcatcctcaaagaaggaagaaacaagttctgctgaagacgaagaagatcccttttaccaaaacgaagatgattgttttggtatctgtttagattaaatttaatttcggtcacaaaactgtctgtttgtaatttatgtgtaattaatgctggacaatactacctgtcctgtagccattaaagtcctggtcaaaactacttgtcttgtaacaaacagtcaaatagtctcggtcaaaactaccggcaactaccggtcttagatttttggctatataaggagtcctcaagtatgttgtgaggcaccctttcatttagccattttttcaggttttggaagagaggtgctctgaaacaagatttttgtaagcgcttctttctagattcaataaatttctatttttcatccttctctcttctcccttcaccgatcctgtgcggctctgccgccgcttcggtttctttgtttatgaaaacctggggtttgtaagccggtctccggtgtgcccttgatatctg

SEQ ID NO: 9645 - DNA, 1184 bp, Glycine max
  Gm_smallRNAprecursor_2478
ggttcggacttgaacaaaggaaagagattttcagttccatttgatccggtaggttatacctattgggattacgttgatgcttggactaaggtgttttggcaccaaaatacccgcttcaagcattcatggctgatatatttcaagaccaaaacaatttacaattttcccaattggtttttgcaatggtgggacttctttggaccaatcccagagatattcccagaaacggtccaacaaggattttcccaatttaagaaacaatacaattcgcaggaatcacgaattccagcagatcttaaatacttttcaagctttgcactgtcatggatattctcatggcaatatcgttacagcaagactgaaaagacaaaccaatatccatcactacaaagacacgcatttgtaaaatggtggacacaatttgactcatccaaagcggatccagaacaagtaaaactatggttccaatcccatccagaattcctcaaaacagctgatccagagacttctgtgtttttgaaccaaaagtctcatctggcagcatttttagcaggatcgacatcaaaggaggtcttagctaaaaatctgaaggaagttctacaaatgttacaacaggaagaagaagcttcatcctcaaagaaggaagaaacaagttctgctgaagacgaagaagatcccttttaccaaaacgaagatgattgttttggtatctgtttagattaaatttaatttcggtcacaaaactgtctgtttgtaatttatgtgtaattaatgctggacaatactacctgtcctgtagccattaaagtcctggtcaaaactacttgtcttgtaacaaacagtcaaatagtctcggtcaaaactaccggcaactaccggtcttagatttttggctatataaggagtcctcaagtatgttgtgaggcaccctttcatttagccattttttcaggttttggaagagaggtgctctgaaacaagatttttgtaagcgcttctttctagattcaataaatttctatttttcatccttctctcttctcccttcaccgatcctgtgcggctctgccgccgcttcggtttctttgtttatgaaaacctggggtttgtaagccggtctccggtgtgcccttgatatctgttttcaagtttatattttcatttcaatcatactgcattcttac

SEQ ID NO: 9646 - DNA, 1077 bp, Glycine max
  Gm_smallRNAprecursor_2479
tcaagcattcatggctgatatatttcaagaccaaaacaatttacaattttcccaattggtttttgcaatggtgggacttctttggaccaatcccagagatattcccagaaacggtccaacaaggattttcccaatttaagaaacaatacaattcgcaggaatcacgaattccagcagatcttaaatacttttcaagctttgcactgtcatggatattctcatggcaatatcgttacagcaagactgaaaagacaaaccaatatccatcactacaaagacacgcatttgtaaaatggtggacacaatttgactcatccaaagcggatccagaacaagtaaaactatggttccaatcccatccagaattcctcaaaacagctgatccagagacttctgtgtttttgaaccaaaagtctcatctggcagcatttttagcaggatcgacatcaaaggaggtcttagctaaaaatctgaaggaagttctacaaatgttacaacaggaagaagaagcttcatcctcaaagaaggaagaaacaagttctgctgaagacgaagaagatcccttttaccaaaacgaagatgattgttttggtatctgtttagattaaatttaatttcggtcacaaaactgtctgtttgtaatttatgtgtaattaatgctggacaatactacctgtcctgtagccattaaagtcctggtcaaaactacttgtcttgtaacaaacagtcaaatagtctcggtcaaaactaccggcaactaccggtcttagatttttggctatataaggagtcctcaagtatgttgtgaggcaccctttcatttagccattttttcaggttttggaagagaggtgctctgaaacaagatttttgtaagcgcttctttctagattcaataaatttctatttttcatccttctctcttctcccttcaccgatcctgtgcggctctgccgccgcttcggtttctttgtttatgaaaacctggggtttgtaagccggtctccggtgtgcccttgatatctgttttcaagtttatattttcatttcaatcatactgcattcttacttcctatc

SEQ ID NO: 9647 - DNA, 1078 bp, Glycine max
  Gm_smallRNAprecursor_2480
tcaagcattcatggctgatatatttcaagaccaaaacaatttacaattttcccaattggtttttgcaatggtgggacttctttggaccaatcccagagatattcccagaaacggtccaacaaggattttcccaatttaagaaacaatacaattcgcaggaatcacgaattccagcagatcttaaatacttttcaagctttgcactgtcatggatattctcatggcaatatcgttacagcaagactgaaaagacaaaccaatatccatcactacaaagacacgcatttgtaaaatggtggacacaatttgactcatccaaagcggatccagaacaagtaaaactatggttccaatcccatccagaattcctcaaaacagctgatccagagacttctgtgtttttgaaccaaaagtctcatctggcagcatttttagcaggatcgacatcaaaggaggtcttagctaaaaatctgaaggaagttctacaaatgttacaacaggaagaagaagcttcatcctcaaagaaggaagaaacaagttctgctgaagacgaagaagatcccttttaccaaaacgaagatgattgttttggtatctgtttagattaaatttaatttcggtcacaaaactgtctgtttgtaatttatgtgtaattaatgctggacaatactacctgtcctgtagccattaaagtcctggtcaaaactacttgtcttgtaacaaacagtcaaatagtctcggtcaaaactaccggcaactaccggtcttagatttttggctatataaggagtcctcaagtatgttgtgaggcaccctttcatttagccattttttcaggttttggaagagaggtgctctgaaacaagatttttgtaagcgcttctttctagattcaataaatttctatttttcatccttctctcttctcccttcaccgatcctgtgcggctctgccgccgcttcggtttctttgtttatgaaaacctggggtttgtaagccggtctccggtgtgcccttgatatctgttttcaagtttatattttcatttcaatcatactgcattcttacttcctatct

SEQ ID NO: 9648 - DNA, 1079 bp, Glycine max
  Gm_smallRNAprecursor_2481
tcaagcattcatggctgatatatttcaagaccaaaacaatttacaattttcccaattggtttttgcaatggtgggacttctttggaccaatcccagagatattcccagaaacggtccaacaaggattttcccaatttaagaaacaatacaattcgcaggaatcacgaattccagcagatcttaaatacttttcaagctttgcactgtcatggatattctcatggcaatatcgttacagcaagactgaaaagacaaaccaatatccatcactacaaagacacgcatttgtaaaatggtggacacaatttgactcatccaaagcggatccagaacaagtaaaactatggttccaatcccatccagaattcctcaaaacagctgatccagagacttctgtgtttttgaaccaaaagtctcatctggcagcatttttagcaggatcgacatcaaaggaggtcttagctaaaaatctgaaggaagttctacaaatgttacaacaggaagaagaagcttcatcctcaaagaaggaagaaacaagttctgctgaagacgaagaagatcccttttaccaaaacgaagatgattgttttggtatctgtttagattaaatttaatttcggtcacaaaactgtctgtttgtaatttatgtgtaattaatgctggacaatactacctgtcctgtagccattaaagtcctggtcaaaactacttgtcttgtaacaaacagtcaaatagtctcggtcaaaactaccggcaactaccggtcttagatttttggctatataaggagtcctcaagtatgttgtgaggcaccctttcatttagccattttttcaggttttggaagagaggtgctctgaaacaagatttttgtaagcgcttctttctagattcaataaatttctatttttcatccttctctcttctcccttcaccgatcctgtgcggctctgccgccgcttcggtttctttgtttatgaaaacctggggtttgtaagccggtctccggtgtgcccttgatatctgttttcaagtttatattttcatttcaatcatactgcattcttacttcctatctg

SEQ ID NO: 9649 - DNA, 1054 bp, Glycine max
  Gm_smallRNAprecursor_2482
atttcaagaccaaaacaatttacaattttcccaattggtttttgcaatggtgggacttctttggaccaatcccagagatattcccagaaacggtccaacaaggattttcccaatttaagaaacaatacaattcgcaggaatcacgaattccagcagatcttaaatacttttcaagctttgcactgtcatggatattctcatggcaatatcgttacagcaagactgaaaagacaaaccaatatccatcactacaaagacacgcatttgtaaaatggtggacacaatttgactcatccaaagcggatccagaacaagtaaaactatggttccaatcccatccagaattcctcaaaacagctgatccagagacttctgtgtttttgaaccaaaagtctcatctggcagcatttttagcaggatcgacatcaaaggaggtcttagctaaaaatctgaaggaagttctacaaatgttacaacaggaagaagaagcttcatcctcaaagaaggaagaaacaagttctgctgaagacgaagaagatcccttttaccaaaacgaagatgattgttttggtatctgtttagattaaatttaatttcggtcacaaaactgtctgtttgtaatttatgtgtaattaatgctggacaatactacctgtcctgtagccattaaagtcctggtcaaaactacttgtcttgtaacaaacagtcaaatagtctcggtcaaaactaccggcaactaccggtcttagatttttggctatataaggagtcctcaagtatgttgtgaggcaccctttcatttagccattttttcaggttttggaagagaggtgctctgaaacaagatttttgtaagcgcttctttctagattcaataaatttctatttttcatccttctctcttctcccttcaccgatcctgtgcggctctgccgccgcttcggtttctttgtttatgaaaacctggggtttgtaagccggtctccggtgtgcccttgatatctgttttcaagtttatattttcatttcaatcatactgcattcttacttccta

SEQ ID NO: 9650 - DNA, 1061 bp, Glycine max
  Gm_smallRNAprecursor_2483
atttcaagaccaaaacaatttacaattttcccaattggtttttgcaatggtgggacttctttggaccaatcccagagatattcccagaaacggtccaacaaggattttcccaatttaagaaacaatacaattcgcaggaatcacgaattccagcagatcttaaatacttttcaagctttgcactgtcatggatattctcatggcaatatcgttacagcaagactgaaaagacaaaccaatatccatcactacaaagacacgcatttgtaaaatggtggacacaatttgactcatccaaagcggatccagaacaagtaaaactatggttccaatcccatccagaattcctcaaaacagctgatccagagacttctgtgtttttgaaccaaaagtctcatctggcagcatttttagcaggatcgacatcaaaggaggtcttagctaaaaatctgaaggaagttctacaaatgttacaacaggaagaagaagcttcatcctcaaagaaggaagaaacaagttctgctgaagacgaagaagatcccttttaccaaaacgaagatgattgttttggtatctgtttagattaaatttaatttcggtcacaaaactgtctgtttgtaatttatgtgtaattaatgctggacaatactacctgtcctgtagccattaaagtcctggtcaaaactacttgtcttgtaacaaacagtcaaatagtctcggtcaaaactaccggcaactaccggtcttagatttttggctatataaggagtcctcaagtatgttgtgaggcaccctttcatttagccattttttcaggttttggaagagaggtgctctgaaacaagatttttgtaagcgcttctttctagattcaataaatttctatttttcatccttctctcttctcccttcaccgatcctgtgcggctctgccgccgcttcggtttctttgtttatgaaaacctggggtttgtaagccggtctccggtgtgcccttgatatctgttttcaagtttatattttcatttcaatcatactgcattcttacttcctatctgtcc

SEQ ID NO: 9651 - DNA, 1056 bp, Glycine max
  Gm_smallRNAprecursor_2484
tttcaagaccaaaacaatttacaattttcccaattggtttttgcaatggtgggacttctttggaccaatcccagagatattcccagaaacggtccaacaaggattttcccaatttaagaaacaatacaattcgcaggaatcacgaattccagcagatcttaaatacttttcaagctttgcactgtcatggatattctcatggcaatatcgttacagcaagactgaaaagacaaaccaatatccatcactacaaagacacgcatttgtaaaatggtggacacaatttgactcatccaaagcggatccagaacaagtaaaactatggttccaatcccatccagaattcctcaaaacagctgatccagagacttctgtgtttttgaaccaaaagtctcatctggcagcatttttagcaggatcgacatcaaaggaggtcttagctaaaaatctgaaggaagttctacaaatgttacaacaggaagaagaagcttcatcctcaaagaaggaagaaacaagttctgctgaagacgaagaagatcccttttaccaaaacgaagatgattgttttggtatctgtttagattaaatttaatttcggtcacaaaactgtctgtttgtaatttatgtgtaattaatgctggacaatactacctgtcctgtagccattaaagtcctggtcaaaactacttgtcttgtaacaaacagtcaaatagtctcggtcaaaactaccggcaactaccggtcttagatttttggctatataaggagtcctcaagtatgttgtgaggcaccctttcatttagccattttttcaggttttggaagagaggtgctctgaaacaagatttttgtaagcgcttctttctagattcaataaatttctatttttcatccttctctcttctcccttcaccgatcctgtgcggctctgccgccgcttcggtttctttgtttatgaaaacctggggtttgtaagccggtctccggtgtgcccttgatatctgttttcaagtttatattttcatttcaatcatactgcattcttacttcctatct

SEQ ID NO: 9652 - DNA, 1057 bp, Glycine max
  Gm_smallRNAprecursor_2485
tttcaagaccaaaacaatttacaattttcccaattggtttttgcaatggtgggacttctttggaccaatcccagagatattcccagaaacggtccaacaaggattttcccaatttaagaaacaatacaattcgcaggaatcacgaattccagcagatcttaaatacttttcaagctttgcactgtcatggatattctcatggcaatatcgttacagcaagactgaaaagacaaaccaatatccatcactacaaagacacgcatttgtaaaatggtggacacaatttgactcatccaaagcggatccagaacaagtaaaactatggttccaatcccatccagaattcctcaaaacagctgatccagagacttctgtgtttttgaaccaaaagtctcatctggcagcatttttagcaggatcgacatcaaaggaggtcttagctaaaaatctgaaggaagttctacaaatgttacaacaggaagaagaagcttcatcctcaaagaaggaagaaacaagttctgctgaagacgaagaagatcccttttaccaaaacgaagatgattgttttggtatctgtttagattaaatttaatttcggtcacaaaactgtctgtttgtaatttatgtgtaattaatgctggacaatactacctgtcctgtagccattaaagtcctggtcaaaactacttgtcttgtaacaaacagtcaaatagtctcggtcaaaactaccggcaactaccggtcttagatttttggctatataaggagtcctcaagtatgttgtgaggcaccctttcatttagccattttttcaggttttggaagagaggtgctctgaaacaagatttttgtaagcgcttctttctagattcaataaatttctatttttcatccttctctcttctcccttcaccgatcctgtgcggctctgccgccgcttcggtttctttgtttatgaaaacctggggtttgtaagccggtctccggtgtgcccttgatatctgttttcaagtttatattttcatttcaatcatactgcattcttacttcctatctg

SEQ ID NO: 9653 - DNA, 1057 bp, Glycine max; identical to SEQ ID NO: 9652
  Gm_smallRNAprecursor_2486

SEQ ID NO: 9654 - DNA, 1060 bp, Glycine max
  Gm_smallRNAprecursor_2487
tttcaagaccaaaacaatttacaattttcccaattggtttttgcaatggtgggacttctttggaccaatcccagagatattcccagaaacggtccaacaaggattttcccaatttaagaaacaatacaattcgcaggaatcacgaattccagcagatcttaaatacttttcaagctttgcactgtcatggatattctcatggcaatatcgttacagcaagactgaaaagacaaaccaatatccatcactacaaagacacgcatttgtaaaatggtggacacaatttgactcatccaaagcggatccagaacaagtaaaactatggttccaatcccatccagaattcctcaaaacagctgatccagagacttctgtgtttttgaaccaaaagtctcatctggcagcatttttagcaggatcgacatcaaaggaggtcttagctaaaaatctgaaggaagttctacaaatgttacaacaggaagaagaagcttcatcctcaaagaaggaagaaacaagttctgctgaagacgaagaagatcccttttaccaaaacgaagatgattgttttggtatctgtttagattaaatttaatttcggtcacaaaactgtctgtttgtaatttatgtgtaattaatgctggacaatactacctgtcctgtagccattaaagtcctggtcaaaactacttgtcttgtaacaaacagtcaaatagtctcggtcaaaactaccggcaactaccggtcttagatttttggctatataaggagtcctcaagtatgttgtgaggcaccctttcatttagccattttttcaggttttggaagagaggtgctctgaaacaagatttttgtaagcgcttctttctagattcaataaatttctatttttcatccttctctcttctcccttcaccgatcctgtgcggctctgccgccgcttcggtttctttgtttatgaaaacctggggtttgtaagccggtctccggtgtgcccttgatatctgttttcaagtttatattttcatttcaatcatactgcattcttacttcctatctgtcc

SEQ ID NO: 9655 - DNA, 1053 bp, Glycine max
  Gm_smallRNAprecursor_2488
caagaccaaaacaatttacaattttcccaattggtttttgcaatggtgggacttctttggaccaatcccagagatattcccagaaacggtccaacaaggattttcccaatttaagaaacaatacaattcgcaggaatcacgaattccagcagatcttaaatacttttcaagctttgcactgtcatggatattctcatggcaatatcgttacagcaagactgaaaagacaaaccaatatccatcactacaaagacacgcatttgtaaaatggtggacacaatttgactcatccaaagcggatccagaacaagtaaaactatggttccaatcccatccagaattcctcaaaacagctgatccagagacttctgtgtttttgaaccaaaagtctcatctggcagcatttttagcaggatcgacatcaaaggaggtcttagctaaaaatctgaaggaagttctacaaatgttacaacaggaagaagaagcttcatcctcaaagaaggaagaaacaagttctgctgaagacgaagaagatcccttttaccaaaacgaagatgattgttttggtatctgtttagattaaatttaatttcggtcacaaaactgtctgtttgtaatttatgtgtaattaatgctggacaatactacctgtcctgtagccattaaagtcctggtcaaaactacttgtcttgtaacaaacagtcaaatagtctcggtcaaaactaccggcaactaccggtcttagatttttggctatataaggagtcctcaagtatgttgtgaggcaccctttcatttagccattttttcaggttttggaagagaggtgctctgaaacaagatttttgtaagcgcttctttctagattcaataaatttctatttttcatccttctctcttctcccttcaccgatcctgtgcggctctgccgccgcttcggtttctttgtttatgaaaacctggggtttgtaagccggtctccggtgtgcccttgatatctgttttcaagtttatattttcatttcaatcatactgcattcttacttcctatct

SEQ ID NO: 9656 - DNA, 1053 bp, Glycine max; identical to SEQ ID NO: 9655
  Gm_smallRNAprecursor_2489

SEQ ID NO: 9657 - DNA, 1054 bp, Glycine max
  Gm_smallRNAprecursor_2490
caagaccaaaacaatttacaattttcccaattggtttttgcaatggtgggacttctttggaccaatcccagagatattcccagaaacggtccaacaaggattttcccaatttaagaaacaatacaattcgcaggaatcacgaattccagcagatcttaaatacttttcaagctttgcactgtcatggatattctcatggcaatatcgttacagcaagactgaaaagacaaaccaatatccatcactacaaagacacgcatttgtaaaatggtggacacaatttgactcatccaaagcggatccagaacaagtaaaactatggttccaatcccatccagaattcctcaaaacagctgatccagagacttctgtgtttttgaaccaaaagtctcatctggcagcatttttagcaggatcgacatcaaaggaggtcttagctaaaaatctgaaggaagttctacaaatgttacaacaggaagaagaagcttcatcctcaaagaaggaagaaacaagttctgctgaagacgaagaagatcccttttaccaaaacgaagatgattgttttggtatctgtttagattaaatttaatttcggtcacaaaactgtctgtttgtaatttatgtgtaattaatgctggacaatactacctgtcctgtagccattaaagtcctggtcaaaactacttgtcttgtaacaaacagtcaaatagtctcggtcaaaactaccggcaactaccggtcttagatttttggctatataaggagtcctcaagtatgttgtgaggcaccctttcatttagccattttttcaggttttggaagagaggtgctctgaaacaagatttttgtaagcgcttctttctagattcaataaatttctatttttcatccttctctcttctcccttcaccgatcctgtgcggctctgccgccgcttcggtttctttgtttatgaaaacctggggtttgtaagccggtctccggtgtgcccttgatatctgttttcaagtttatattttcatttcaatcatactgcattcttacttcctatctg

SEQ ID NO: 9658 - DNA, 1054 bp, Glycine max; identical to SEQ ID NO: 9657
  Gm_smallRNAprecursor_2491

SEQ ID NO: 9659 - DNA, 1054 bp, Glycine max; identical to SEQ ID NO: 9657
  Gm_smallRNAprecursor_2492

SEQ ID NO: 9660 - DNA, 1054 bp, Glycine max; identical to SEQ ID NO: 9657
  Gm_smallRNAprecursor_2493

SEQ ID NO: 9661 - DNA, 1198 bp, Glycine max
  Gm_smallRNAprecursor_2494
agaaacggtccaacaaggattttcccaatttaagaaacaatacaattcgcaggaatcacgaattccagcagatcttaaatacttttcaagctttgcactgtcatggatattctcatggcaatatcgttacagcaagactgaaaagacaaaccaatatccatcactacaaagacacgcatttgtaaaatggtggacacaatttgactcatccaaagcggatccagaacaagtaaaactatggttccaatcccatccagaattcctcaaaacagctgatccagagacttctgtgtttttgaaccaaaagtctcatctggcagcatttttagcaggatcgacatcaaaggaggtcttagctaaaaatctgaaggaagttctacaaatgttacaacaggaagaagaagcttcatcctcaaagaaggaagaaacaagttctgctgaagacgaagaagatcccttttaccaaaacgaagatgattgttttggtatctgtttagattaaatttaatttcggtcacaaaactgtctgtttgtaatttatgtgtaattaatgctggacaatactacctgtcctgtagccattaaagtcctggtcaaaactacttgtcttgtaacaaacagtcaaatagtctcggtcaaaactaccggcaactaccggtcttagatttttggctatataaggagtcctcaagtatgttgtgaggcaccctttcatttagccattttttcaggttttggaagagaggtgctctgaaacaagatttttgtaagcgcttctttctagattcaataaatttctatttttcatccttctctcttctcccttcaccgatcctgtgcggctctgccgccgcttcggtttctttgtttatgaaaacctggggtttgtaagccggtctccggtgtgcccttgatatctgttttcaagtttatattttcatttcaatcatactgcattcttacttcctatctgtccgtttgatcctactccgctgacctatatatatatatatatatatatatatatatatatatatatatatatatatatatatatatatatatatatatatatatatatatatatatatatatatatatatatatatatatgtatgtatgtattcttacttcctatttgtccgtttgatccctctccactgatctctagtatcagagcctaatggggaagtaggaa

SEQ ID NO: 9662 - DNA, 1077 bp, Glycine max
  Gm_smallRNAprecursor_2495
gtgtatgcgtaacctgtaaatattcaatcaatctattatgttataaaatttgattgaaagaaaagtttaacgaataaataaaatagattctcaccaaccaacatgagtgatttctttaaatgtttgcagtttgagttacagcgaagaaagttttttgcaatgtggcgtaggcaaaagaaatgggatatgtcctggacccataagttactagggttgttgtaggcacttataattgaggggtgtcggtctgaaatgagagaaatgttaatttgcggagtaacatgtcttctcaaattctttagaaaaaaaccccaagctgaagttgtctccccttctacaatggcgtagacaatcggaaagatatggttagcttcatcttgtgcggtagctatcaacagtgtgtcagtatacttcccataaagccatgtaccatctacttgtactataggtttgcaatatgcaaagccattaatgcatggaccaaatgaccaaaagatacgtttaaacaatcttttgcccggtactatttctcctccctcatacacggatttcgtttgagcagcgaccacaatcccaggaacacaagattgcaaagctcccaaaagttttggcaatttggtgtatgattcttcccagtttccatgaatcatctccaacgctttttgctttgctaaccatgtcttcttgtaggatggggtatcattcatgaacgttttgatctctgcaatcaacgtcttgatggagacggttgggtttgttttgacaattggttggatgatctgtgttatgacgtgtttgtcaagttggcgatgatcttgtttgagcattggcacgagacaagtgtgatgacctctgatactcttgataatccatttgttatgcctcttagaattgcatgcgcccaagctccatgtacaatcattttcatgtaatttacccacaaagcttatccttttctggtcagagtaaattgttctgcaatcaaaatgatttctaatgttgtattctttgactgctcgaatacattgtactttttcatcgaatgtcatgccaacctcgagttcaccaattggtggt

SEQ ID NO: 9663 - DNA, 1078 bp, Glycine max
  Gm_smallRNAprecursor_2496
gtgtatgcgtaacctgtaaatattcaatcaatctattatgttataaaatttgattgaaagaaaagtttaacgaataaataaaatagattctcaccaaccaacatgagtgatttctttaaatgtttgcagtttgagttacagcgaagaaagttttttgcaatgtggcgtaggcaaaagaaatgggatatgtcctggacccataagttactagggttgttgtaggcacttataattgaggggtgtcggtctgaaatgagagaaatgttaatttgcggagtaacatgtcttctcaaattctttagaaaaaaaccccaagctgaagttgtctccccttctacaatggcgtagacaatcggaaagatatggttagcttcatcttgtgcggtagctatcaacagtgtgtcagtatacttcccataaagccatgtaccatctacttgtactataggtttgcaatatgcaaagccattaatgcatggaccaaatgaccaaaagatacgtttaaacaatcttttgcccggtactatttctcctccctcatacacggatttcgtttgagcagcgaccacaatcccaggaacacaagattgcaaagctcccaaaagttttggcaatttggtgtatgattcttcccagtttccatgaatcatctccaacgctttttgctttgctaaccatgtcttcttgtaggatggggtatcattcatgaacgttttgatctctgcaatcaacgtcttgatggagacggttgggtttgttttgacaattggttggatgatctgtgttatgacgtgtttgtcaagttggcgatgatcttgtttgagcattggcacgagacaagtgtgatgacctctgatactcttgataatccatttgttatgcctcttagaattgcatgcgcccaagctccatgtacaatcattttcatgtaatttacccacaaagcttatccttttctggtcagagtaaattgttctgcaatcaaaatgatttctaatgttgtattctttgactgctcgaatacattgtactttttcatcgaatgtcatgccaacctcgagttcaccaattggtggtt

SEQ ID NO: 9664 - DNA, 1069 bp, Glycine max
  Gm_smallRNAprecursor_2497
tgtcggtaatgtttaccgaaactgttacaaattacattattaccgggtaccgagtaattagttacaataattcgtgattactacaactaactaatcatcgtctaacgatataccaaaacagtcatcctcattctggtagaatggatcatcttcttggtcatcattattttcggatgattcagcttccttcttggggggttcttctttttcttcctgttgaagcagttggagaacttccttaagattttgagcaagactctttttagattttcagcttgccaagcatgctacaagttgagacttctgattcagaaacaaagatgtctctggatcagcaggtttgagaaactcagggttcctctgaaaccagttcttgactttttctggagcagcctttgaggtatcaaattgtgaccaccattttacaaaggcatgtctctgtaatggtggatactacttgctattttcagttttcccatatctgtattgccatgaaaaaatccatgacaaggcaaaactggaaaagtactttaaatctgcaggaattcttgattccttgctattgaagagcttgttgaattgttggaatccctgttggacttcttccggaaatatctgtggaattggtccgaagtagttccaccattggaggaaccaatttggaaaattatacacggtgttatttttgaagtaaattagccatgaatgcttgaatttactattttgatgctagaacacattggtccaggcgtcaatgtagtcccaataattatatcctgcagggtcaaaaggtgcagaaatttttttgggttggtttaagtttgagccgtaatgtcgtggctgcattacttttaggatctggattgtggagtgggtgtttagatttggatctttggggtccttgaaatgtttaatagatacggagtttgtatctattagaatgaattcatagaattttctggttttgtttgtggctgttggcctataatgaaatctcggggggaatactttggcggttgccttgaaaggattcttgtcccagtattctggctccatttgtaagacattg

SEQ ID NO: 9665 - DNA, 1067 bp, Glycine max
  Gm_smallRNAprecursor_2498
tcggtaatgtttaccgaaactgttacaaattacattattaccgggtaccgagtaattagttacaataattcgtgattactacaactaactaatcatcgtctaacgatataccaaaacagtcatcctcattctggtagaatggatcatcttcttggtcatcattattttcggatgattcagcttccttcttggggggttcttctttttcttcctgttgaagcagttggagaacttccttaagattttgagcaagactctttttagattttcagcttgccaagcatgctacaagttgagacttctgattcagaaacaaagatgtctctggatcagcaggtttgagaaactcagggttcctctgaaaccagttcttgactttttctggagcagcctttgaggtatcaaattgtgaccaccattttacaaaggcatgtctctgtaatggtggatactacttgctattttcagttttcccatatctgtattgccatgaaaaaatccatgacaaggcaaaactggaaaagtactttaaatctgcaggaattcttgattccttgctattgaagagcttgttgaattgttggaatccctgttggacttcttccggaaatatctgtggaattggtccgaagtagttccaccattggaggaaccaatttggaaaattatacacggtgttatttttgaagtaaattagccatgaatgcttgaatttactattttgatgctagaacacattggtccaggcgtcaatgtagtcccaataattatatcctgcagggtcaaaaggtgcagaaatttttttgggttggtttaagtttgagccgtaatgtcgtggctgcattacttttaggatctggattgtggagtgggtgtttagatttggatctttggggtccttgaaatgtttaatagatacggagtttgtatctattagaatgaattcatagaattttctggttttgtttgtggctgttggcctataatgaaatctcggggggaatactttggcggttgccttgaaaggattcttgtcccagtattctggctccatttgtaagacattg

SEQ ID NO: 9666 - DNA, 1067 bp, Glycine max; identical to SEQ ID NO: 9665
  Gm_smallRNAprecursor_2499

SEQ ID NO: 9667 - DNA, 1070 bp, Glycine max
  Gm_smallRNAprecursor_2500
caactaactaatcatcgtctaacgatataccaaaacagtcatcctcattctggtagaatggatcatcttcttggtcatcattattttcggatgattcagcttccttcttggggggttcttctttttcttcctgttgaagcagttggagaacttccttaagattttgagcaagactctttttagattttcagcttgccaagcatgctacaagttgagacttctgattcagaaacaaagatgtctctggatcagcaggtttgagaaactcagggttcctctgaaaccagttcttgactttttctggagcagcctttgaggtatcaaattgtgaccaccattttacaaaggcatgtctctgtaatggtggatactacttgctattttcagttttcccatatctgtattgccatgaaaaaatccatgacaaggcaaaactggaaaagtactttaaatctgcaggaattcttgattccttgctattgaagagcttgttgaattgttggaatccctgttggacttcttccggaaatatctgtggaattggtccgaagtagttccaccattggaggaaccaatttggaaaattatacacggtgttatttttgaagtaaattagccatgaatgcttgaatttactattttgatgctagaacacattggtccaggcgtcaatgtagtcccaataattatatcctgcagggtcaaaaggtgcagaaatttttttgggttggtttaagtttgagccgtaatgtcgtggctgcattacttttaggatctggattgtggagtgggtgtttagatttggatctttggggtccttgaaatgtttaatagatacggagtttgtatctattagaatgaattcatagaattttctggttttgtttgtggctgttggcctataatgaaatctcggggggaatactttggcggttgccttgaaaggattcttgtcccagtattctggctccatttgtaagacattgaagaatttttttttttgaaatatagctgttgctaggttgtggtgttgattcttgtggagtcaatggttggcttggtttttggtt

SEQ ID NO: 9668 - DNA, 1195 bp, Glycine max
  Gm_smallRNAprecursor_2501
caactaactaatcatcgtctaacgatataccaaaacagtcatcctcattctggtagaatggatcatcttcttggtcatcattattttcggatgattcagcttccttcttggggggttcttctttttcttcctgttgaagcagttggagaacttccttaagattttgagcaagactctttttagattttcagcttgccaagcatgctacaagttgagacttctgattcagaaacaaagatgtctctggatcagcaggtttgagaaactcagggttcctctgaaaccagttcttgactttttctggagcagcctttgaggtatcaaattgtgaccaccattttacaaaggcatgtctctgtaatggtggatactacttgctattttcagttttcccatatctgtattgccatgaaaaaatccatgacaaggcaaaactggaaaagtactttaaatctgcaggaattcttgattccttgctattgaagagcttgttgaattgttggaatccctgttggacttcttccggaaatatctgtggaattggtccgaagtagttccaccattggaggaaccaatttggaaaattatacacggtgttatttttgaagtaaattagccatgaatgcttgaatttactattttgatgctagaacacattggtccaggcgtcaatgtagtcccaataattatatcctgcagggtcaaaaggtgcagaaatttttttgggttggtttaagtttgagccgtaatgtcgtggctgcattacttttaggatctggattgtggagtgggtgtttagatttggatctttggggtccttgaaatgtttaatagatacggagtttgtatctattagaatgaattcatagaattttctggttttgtttgtggctgttggcctataatgaaatctcggggggaatactttggcggttgccttgaaaggattcttgtcccagtattctggctccatttgtaagacattgaagaatttttttttttgaaatatagctgttgctaggttgtggtgttgattcttgtggagtcaatggttggcttggtttttggttacagatagttttggtctgtttggctttttgaatttgtttttgcaggtctgtttcagaatcatcgtctgattctgaggccatttctgcccaggtttttttggccaattttggtactctggtgaggc

SEQ ID NO: 9669 - DNA, 1161 bp, Glycine max
  Gm_smallRNAprecursor_2502
gtgtctggaaaaaattgatttttgatttggagaccgccaaaccattctgtttaatgatatggatgaaagtctggagatgtttgaaatgttgatcaatatcttgggaaaagattaaagcatcatcaatgtaaacaatgacgaattttgaataaggattgaaaatatcattcatgattttttgaaattctgaaggggcattctttagtccgaatggcattacattccactcatattgcccgaaaggtacagtaaacgccgttttgtacctatctgattcttggatttggatttgccaaaatccggatttcatgtcaaattttgaaaatacttttgcagaatttaatttgttaagtaagtcttttttatttggaataggatacctaatccattgtaatgcttgatttagtggtttctaatttatgactaagcggggtgttcctcgctcaatctcggattgtttgttgacgtaaaaagccgcacaagaccatgggcttttacttttccgaattaaacctttatcaagtaaatctttaatttcattttggcaatattggagaagttcttcattcatttggattggtctagcttttgtgggaatttgtttttccctaaaatctttttcataaggaagatcaacaatatgtttctttctgtcccaaaatgcatgtggcaattcagaacaaacagttgattctatatgacttaataaagattggattttctcctttatttgggtttttcctagttgtacttggatatttttaaacgatacttcttcttttaagaagttaatttgattaatcttattttctataagatttatatttctagagattggtttagtagaaaaattaaatataattttccttcctaaataacttgtggttattccttcattagatatttggatgggaaataaagctcttatgaagggggttcctaggattacttcgttcttaagatttttttccaaaagaaagtttgtgttaatcatgagaccttggttttcaataattgcctttgatagcttaaaattaatttttaattttgagccgtttgctgtacttagtttctctgaggttttctcaaagaattttgtaggaattaatccttctaaaatacagtttgagtcagcccctgtgtcaaatagggccattgttt

SEQ ID NO: 9670 - DNA, 1149 bp, Glycine max
  Gm_smallRNAprecursor_2503
gatgtgtaaatatttatactttcgactatgttcataaattgaattttttgaaagtaaatggaattcttcccctatgtcttgccctagaggaatattgttttctactgttttgattatgtaatcaaagttgtgtttatctttaattgttttaggaacgtatagttgatcctgagggatttctgggatgttccagtcatccatgttttgattgatttctttgaatcagacttcctcatcgaagagattgtgtttaggggtgaccttttgggtctggttatcttgttcacttaataagtttgaatttctggaagaagtcgatgaagaggaattagatcgaaaggaaatgcgcgagaaagaacgcaagagtctagacataattataaaatcctctaatatcttcgccctcatttggttccatagaaatatttccgtaagcaaatacgtaacaaaatttttcgaatttgaattatttttaagaaaaaactctttttttttttaaaatagtttgaacggcaatcctatagccaccagtatattatgtcttgatattttggttaaacagtacaccttagccttactgccctttgtccatcacgggtcttactgctacagtaccattcaactaaaatactagactgttgtactttcaggaagtactgttcaaacatctattgtacatattaaaataaaatattctccgtactatacagggtttcagatccataaaatttgttaacatatgtccttacggacagtattcctacttccccatcaagacgctctgataccagagatcagcggaaaggatacaaatggacagataggaagtaagaatatgacaacatatatccttgatcatgtaatagagtgggtggtttttgagagtggctgaaaaacagagaaggtgaaaaacagcagaaaaacagagagttcaatagagaaagagagctaggagattgagaaaggttttggaagagagaaaccaagaaagatcaaagctagctgctgcttgtattgaacttgtaatttcatgatcaatgtgatgatgaggagctgcactttcccgtggatgtaggcacattgccgaaccacgtaaatctttggttcttgctctgctgtgtttgtttgctgtgttttctgttttttttt

SEQ ID NO: 9671 - DNA, 1132 bp, Glycine max
  Gm_smallRNAprecursor_2504
tacaagattggtgctgaccactttggttctgactttgcaatggcttaaaggaaaacccattctcctagtaagaaacttttatcatactattttttttatgtattagttttataattcagaattctaagttatgctcttggttggtaattggtattgcagcatattggtggcgaatgtttgggtcacaaactccaaatttgcagaagctagctattaagattttgagtttgacttgcagtgcttcaggatgtgaaagaaattggagtgtgtttgagcaagtaattgtgacaaaactctaactatactttttaattttatttaattttgatgatcaagttttatttggagtatatttgagattgaaatcaacatttatttgttatgttgtagattcattccaaaaaaagaaataggcttgagcacaagaggttgcatgatttggtgtttgtcaaatacaaccaacaattgaagcaaagatatattgcaagagatgaaattgatccaatttctcttaatgatattgatgtatgcaatgaatggctcgtgggagagatggatcaagatgatgataatgatgctggaaatgatttggtatttgaagatgatgatgctctaaattgggcaactgtgtatcaggcttcgggggttggagagtgtaggatgtatactaggcggaaaaagcaaaaaacaagtgttgctgctgctcaaacttctaaaaaacaggcaataattgttggatcttcatcaaggaagcaaaaagcagtccaagaaaatgatgaggatctagatgttgaggagaatattgatgttgaatctgaagaagaagaaatcatggtcaattttgaggcgtctgatggggaagagggagatgctccattatcatatgataacaacgaagatgattatgttgggattggagaagatgattagagcctcaaccttcactttgcactttgcattatgtttttatcattttcttattttgaactctttaatgagtttatttggtgttcgtacttgattattgtatgaactcatgaaatttttttaatttatttgaatgcaatcctttgttttttttcaatttcaatgagtttatatatatgtttttttttgtccgccatgacatccg

SEQ ID NO: 9672 - DNA, 1132 bp, Glycine max
  Gm_smallRNAprecursor_2505
tacaagattggtgctgaccactttggttccgactttgcaatggctcaaaggaaaacccattctcctagtaagaaacttttatcatactattttttttatgtattagttttataattcagaattctaagttatgctcttggttggtaattggtattgcagcatattggtggcgaatgtttgggtcacaaactccaaatttgcagaagctagctattaagattttgagtttgacttgcagtgcttcaggatgtgaaagaaattggagtgtgtttgagcaagtaattgtgacaaaactctaactatactttttaattttatttaattttgatgatcaagttttatttggagtatatttgagattgaaatcaacatttatttgttatgttgtagattcattccaaaaaaagaaataggcttgagcacaagaggttgcatgatttggtgtttgtcaaatacaaccaacaattgaagcaaagatataatgcaagagatgaaattgatccaatttctcttaatgatattgatgtatgcaatgaatggctcgtgggagagatggatcaagatgatgataatgatgctggaaatgatttggtatttgaagatgatgatgctctaaattgggcaactgtgtatcaggcttcgggggttggagagtgtaggatgtatactaggcgaaaaaagcaaaaaacaagtgttgctgctgcccaaacttctaaaaaacaggcaatgattgttggatcttcatcaaggaagcaaaaagcagtccaagaaaatgatgaggatctagatgttgaggagaatattgatgttgaatctgaaaaagaagaaatcatggtcaattttgaggcgtctgatggggaagagggagatgctccattaccatatgataacaacgaagatgattatgttgggattggagaagatgattagagcctcaaccttcactttgcactttgcattatgtttttatcattttcttattttgaactctttaatgagtttatttggtgttcgtacttgattattgtatgaactcatgaaacttttttagtttatttgaatgcaatcctttgtttttttcaatttcaatgagtttatatatatgttttttttttgtccgccatgacatccg

SEQ ID NO: 9673 - DNA, 1054 bp, Glycine max
  Gm_smallRNAprecursor_2506
ctaatttattgtttgtcaggcataatttcaaatccctgaagcttctgacagtatgacaaagaagaaattcttcagattgtcggcgagcgctggaggcagtttaaatctgacttgactaggaaatgggcacttgcagtcgacaaggacggtgtggacgacattgtctgtgaaaaatatggcattagcaaggagaaatggactcagttttgtcagacccgcagagacccctcatgggaggtatgtattttgtcattttagttgttttccacaacaaaatcacttcttataatttattgtaataatcattttcattaatgttaaacttttccaggatgtacgaaaaaaggcacaggcctcccagaagcaaaacactgccccccacgtattgtctcgtgggggttatgaatatttagaagaaaagctcatggctgagaagacaaagaaaagactggaagaagctgcccagtctggaagcactgagggcatcattgaccctccatctcccatcagacgccacgtgaaatggaagatggtccgcacgaagaaaactggacagatgacgtctgaggcagcaaaggaaatagctgacaggattgtaagtcatttttaattaataattgtaattatctttgtgtattttgtgaattccttggacaaatatgtgttcggtacaggattctttggacgagcaggcgtcacagggatcgttcgtcccccatggacgtcaggatatcctgactgctgccattgggcgaccagagcaccctgtccgtgttagtgctgttggagccggtgtcaccataaagcaatactttggatcagcttcacgaacatcccgcagttcttcctccatgcctcttgaagacctagaacagttgacccaacaaatcagagaccaactggaggagtcaatcacagaaaaagtgactcgaaagatgatggaatgcttcagccagatgcagtcccagtttcagtctcagatgcaatcacagggaattgcactacctccagagccagaggttggtccctcagatcctcgtgtcagcacaaagga

SEQ ID NO: 9674 - DNA, 1037 bp, Glycine max
  Gm_smallRNAprecursor_2507
ttagtggggcaggcacttaacactttccttgcttggccaacacatcttgtgaagcgtttatcagaacaggtattttactttgattatatgtttattgttttcaattaatttgttcactgtaatcaaaacttgctaattaactatgttttatcaataggcagctgtgtctccagcaaaaccttcagaaagcccggatgaagaggtcgatgatcccctgtacctgatgacattgaccatcccacaactgtttttgaagccgctccaagttatgtgggatgctaccatattcggggtgtttaatcaaaacttcccattgtatataaagcacgaagatctctctgaaattgcacatggtggtcaatgtctcagcatatctgttatacaattgtggattctgtaagtcattttagattattattaattaccaaagtaattgttttaaattcatacataattaactttgacttaacaacacaaccatctgactgagacaagtgtgcgagcggggaattctgatgtgtatggattcctcgagccacagtccattcagagatctgggcaatcacaatttgaatccgaaagttacattaagagttggatacagagttcaaaacgagatgtttaccttggagcgtatctgaataggtaagtcaaacaaaataattgaatttaaataatctatactactacaataacccatattcgtctctactgcaatggacactggcaaatggtcgtcattctacctaaggaaaacctagttgtctggttttgttctttgcataacaggccagacaactaccttaagggaataattaacaggtccgtattgttttcaatacattttcattggcataactcaacaacatcaatattttaatgttccttatattcaacactagtgctttgaaaggacttgatgatactccacaaccgaaatccaaggctgctgctaggtggattgttgttaaggtacgtgatttaaataaaagttctacttatatatattttatgtgtgtgtacactaattgtagtta

SEQ ID NO: 9675 - DNA, 1178 bp, Glycine max
  Gm_smallRNAprecursor_2508
ccattttttaggaagagttacctcatcccattttatcgttcttggaagagaaacattggcctttgtcaaatctgtaataaacaaagttgtttctcctctttgaggttttaataggactctagacacacgagtgttcatgaccttatactggatcctatagattagagctgttgggattgatccttccttcatgtcggggccatgaaagtggatgtttaagaacagagagtcaagaatgtttctatccatcagactcactgttttttttggataacaattgaagtatactggaccttgtcctaggcttgtttctactgttcatattaaggaatcttcaaatttgttatgcctaatgtctctaaggcacattaaaattgctgcatctatacccatatcaattaagggcttgatggctacatgtacacaatcgatgtgtaaataattgtatttttggctatgttcgtagattgagttctatgaaagtaaatgaaattcttcccctatatcttgtcctagaggaatattattttctatagtttttattatataatcaaagttgtgtttgtctttaattgtctcgtttgtctttaattgtctcaggaacatacaatgtgtcctgaggaatttctggaatgttccagtcatccatgttttgatttatatcttggaattggacttcctcatcgaagagattgtgttttggggtgacctcatgggtctagttttcatgctcattgagaaaattgttatttttgagtgaattcatagaagaagaggatgaagacgagttggatctaaatgaaatacgagaaaaggaatgtaaaaggcgagacatgataatttcatcctctagtatctttgtcatcatatggttccataaaaatgtttccataaggttatatgtcactgaatttcttggatctgaaaaactaaaaagttttttttatggtcaatatagtttgaacactactcctatagccaccaatatattatgtcttaatattttatctgaacaatacaccttagccttattgtcctttctcatccacgagacttactgctacagtatcattcaactaaaatatcagactgctgtgcttccagaaaatactgttcaaacatatattgcttaaattaaaagtatacattctaaaaaataattaatgtgcaaaagttca

SEQ ID NO: 9676 - DNA, 1044 bp, Glycine max
  Gm_smallRNAprecursor_2509
acttctttttcatcgcaagtttttcactcacttggaacctagagaaaaatcactttttttctctctcccacttccgaggttgttcaacttgggaaagtggcgcatgaatcctaacctgggtctgaaattttcagatctcttactttaacaggttctgtaataaccccctattttttttttctttttttgctccccaatgcggtattatgtgtatacgactgcttaagtgacctatgtatgacaatgatatttttgtttgaaatttgaaatacaacttctccagtagttaaatttggctgaatttgtaaagggatttataaaactggggaccaaatgtgcgaattaaattataagggaccaaaatcgaaattggagtaaaattgggggaccaaaagtacaattttacctacaaaaaatgaagcatttacagggaaccactcaaacgttgacacgtggcattgacacgtggcagtcacacgtgacattgacacgtggcaatcaacgtctgaggttaacggtcaatgtccaaatcgggcttccatgaccaattttgcagggatttataaaactgggagaccaaatttgtgaattaaattatagggggaccaaatccgaaattgaagataaactgggggaccaaaagtgcaattttgccaaattataaaaaaaatgaaaacaaactatattatttaattgataaaatactatgttttaatataatttttaataaaagaaaatctaaatagtcaaaagctcatgttataggacagtcatatatacacttaacattcaaaacctttcgtttggtcctcattctagcaacaacaaaaaaagcttcctaatcttataataaaagtgaagttctttgttttttttttttactgtaataagagtgtcgttgaaaaagttatttatatcttatttgaatttattttatggcaaagggtaagtttgttacatattaaaatagaggagattcttatctaatttaatttcgatattatttttttttatttttaaaaaaatagaaatgagcagaaaaag

SEQ ID NO: 9677 - DNA, 1187 bp, Glycine max; identical to SEQ ID NO: 7875
  Gm_smallRNAprecursor_2510

SEQ ID NO: 9678 - DNA, 1079 bp, Glycine max
  Gm_smallRNAprecursor_2511
agagctatcatgatactaatctatcatgaaaactctagaaagacctaaagtaatgttgaaacattcaccaccattgagaggttggtaacttgagcctataaataggcaattggtatgttgtaattgatcatccaagaaatcaatgacatagccttatttctaaaataattctctaaaactatcaactatcaactatcaactatcatctaataaactatcaacagttgtatcagagctacgttcggtcatacattgggcgtagttatattacctacctaccattccaaagtcctcccaagtacttcaaaaattccctttgtactattaacccactccaataatattttttctaaactatggacaacactactcaattgtcaaatatttctgtccctatcttcaatggtgaaaattatgatttctggcatgttaaaatggaaacatatttttcatctcaagatatatgggacatagtagaagaagactcactgttcccgcggatacttcagctcttaatgcatctcaagaaaaagagttgaagaaaaataaacagaaaaattcaaaggcgttgttcaccttgcaacaagcggtgactgatccaattttcccaagaattatgggagctaagactgccaaagaagcgtggaacacattacaggaggagtttcaaggaagtgttaaggtacgtgtcgttaaacttcaatctctaagaaaagattttgaactattgaagatgaaggagtctgagacagttaaagattactattctaaagttaaagaaatagttaatcaaatgagagcttttgcggaagatattcttgacaagaaaattgttgagaaaattctaattactatgccccaaaagtttgaccctatcgtgacaacgattgaggaaaccaaagatctgtccactctattaaagacagaacttgtgggctctcttgaagcatatgagcaaagactgtataggcataaagaagatacacttgaaaatgcattctagtcaaagtttaaatttcatccccaaaacaaagaaaatggaggaaagaaaaattatggaggaacttccagaagaagaa

SEQ ID NO: 9679 - DNA, 1116 bp, Glycine max
  Gm_smallRNAprecursor_2512
ttgcataagatggaccttaaaactggcttgcaacaacctatagctttgattgatgaggcagggtgctattttttccctgaaatctatgttgcttctgatgaagaaccttataatttgagcaaacaggttggtggaaaaagtccaaattgatgcagctaatgaaataaaattacatttagaagttgaaataaatggagtggatcaatccaggttgagtgagtggggagtccaatggactatttggatcaaagtgcacatatgacattggtgttcatcgttagttagtaacattagttattttcgtttgtctactttagtttttttaaactttatttattattatagtttgatgcgcgacataaactgtatccattagtaagccttaataaactgcatacgatagattaaatgtcaaattcaaatgagaaacatacaacaacaaatttaaacagagacatgaaaatcattcattatgatgtctgtgatgatatgaggatgtgtcacatggtcgatcccatcttcgtgcttgacgatcaagattttttctgccccgatgtctccctgcttctacatggccaacctcagtagaaaattggtgacgcaaatcaacacctaataagtcacccatatcaggtattgctccgggtacattccattgcgtgcctaatggggtgttaggtgttgcaattggggcatcatgttgctgtgaaggggtcatagtcggccatgaaaaatgaggatgtgtttccgcatcaccaccgaacaaatgttcgcttgcaaaagtattagtgtgatgaccttcgaaaggatactgatacatttgtgaaggatactgagaaaatgttggtggcgtgtaatacattccatggccacgctccaccatttgttgggaatattcttccgcttcaacagcctcccttcgtctgcctatgccctgagtttcaacacttgactgaagaatgtgaaactcttgtgttataaattgatgctctgatgctggaccatgtgacgcaggctcagtgattctctcttgctcttcggacaaaatcgttatcttctccatataaggcacgagatcatcaattgtccatgtgttcctcccttgtggtgacacca

SEQ ID NO: 9680 - DNA, 1079 bp, Glycine max
  Gm_smallRNAprecursor_2513
gatagaagaatctagaactatcatgatactaatctatcatgaaaactttagaaagacctaaagtaatgtagaagcattcaccaccattgagaggttggtgacttaagcctataaataggcaattggtatgttgtaattgttcatccaagaaatcaatgacataaccttctttctaaaacaattctctaaaactatcaactatcatctaatcaactaccaacagtggcatcagagctacgtttggtcatacattgggcgtagttatattacctacctaccattccaaaatcctcccaactacttcaaaaatttcctttgtactattaacccactctaataatattttttccaagttatggataacactactcaatcatcaactatttttgtccctatcttcaatggtgaaaattatgatttatggcgtgttaaaatggaaacatatttttcatctcaagatttatgggacatagtagaagaaggcttcaccgttctcgcggatacttcagctcttaatgcatctcaagaaaaagagttgaagaaaaataaacagaaaaattcaaaggtgttgttcaccttgcaacaagcggtgactgatccaattttcccaagaattatgagagctaagactgccaaagaagcgtggaacacattgcaggaggagtttcaaggaagtgttaaggtacgtgccgttaaacttcaatctctaagaagagattttgaactattgaagatgaaggagtctgagacagttaaatattactattctaaagttaaagaaatagttaatcaaatgagagcttttggggaagatattcttgacaagaaaattgttgagaaaattctaattactatgccccaaaagtttgacccaatcgtgacaacgattgaggaaaccaaagatctgtccactctatcagagacagaacttgtgggctctcttgaagcatatgagcaaagactgtataggcataaagaagatacacttgaaaattctttccagtcaaagtttaaatttcagccccaaaacaaagaaaatgaaggaaagaaaaattatggagaaacttcttgaagaagag

SEQ ID NO: 9681 - DNA, 1066 bp, Glycine max
  Gm_smallRNAprecursor_2514
tttaattttagtggattttatttgattattgacgtaattttgaatgaagtgaaaaataaaattaagggtttcctttggttcgatctcactataggcgatccacctcagcgggagagaagtcaaagaatcaagataaagaaagaactcaagaatattacaaaaggttagtgtgattttatttgcaatcaattcttttgctttagtgttttagtttttcatatggtttcgaaaggcaatttaattctatgtattcaagagatattttgttctttgagaaacacatctataattctttatacttccttcccaaattcaaccaaaaaactagtgaaggtgagaaatgaatattccataattttaggatagacatgaattcgatagtatgtgccatttgaaatgagttgcaacatgcaagccaaaatccctttttcactattagaaaatatactttttacattggttatttatgacttttaacatcggtttttgaaccgatgtttaaagtaccgacgttgatagtattatcattaacattggtttttaaaaaatcgatgttaacgataatactatcaacgtcggtactttcaacatcggttatataaataacctatgttgctaatatgaattacacccaaaaatgtatattaatgttgaaaattaacatcggttttctgtaaaaaaaaaccgatgttaacaaatgtgttaatgttgacagttaacatcggttttttcaaaaaaccaatgttaacattagttaacatcggttttatgtaaaaaaaactgatgttaacgaatgtgttaatgttgacagttaacatcggttttctgtaaaaaaccgatgttaacgaatgtgttaatgttgacagttaacatcggttttctgtaaagaactgatgctaacgaatgtgtaaatgttgacagttaacatcggttttttcaaaaaaccgatgttaacgtttgttaacatcgattttctgtaaaaaaaaatcgatgttaacgaatgtgttaatgttggcagttaacatcgatttttttgtaaaaaaaaaccgatgttaactgtcaacat

SEQ ID NO: 9682 - DNA, 1064 bp, Glycine max
  Gm_smallRNAprecursor_2515
ttaattttagtggattttatttgattattgacgtaattttgaatgaagtgaaaaataaaattaagggtttcctttggttcgatctcactataggcgatccacctcagcgggagagaagtcaaagaatcaagataaagaaagaactcaagaatattacaaaaggttagtgtgattttatttgcaatcaattcttttgctttagtgttttagtttttcatatggtttcgaaaggcaatttaattctatgtattcaagagatattttgttctttgagaaacacatctataattctttatacttccttcccaaattcaaccaaaaaactagtgaaggtgagaaatgaatattccataattttaggatagacatgaattcgatagtatgtgccatttgaaatgagttgcaacatgcaagccaaaatccctttttcactattagaaaatatactttttacattggttatttatgacttttaacatcggtttttgaaccgatgtttaaagtaccgacgttgatagtattatcattaacattggtttttaaaaaatcgatgttaacgataatactatcaacgtcggtactttcaacatcggttatataaataacctatgttgctaatatgaattacacccaaaaatgtatattaatgttgaaaattaacatcggttttctgtaaaaaaaaaccgatgttaacaaatgtgttaatgttgacagttaacatcggttttttcaaaaaaccaatgttaacattagttaacatcggttttatgtaaaaaaaactgatgttaacgaatgtgttaatgttgacagttaacatcggttttctgtaaaaaaccgatgttaacgaatgtgttaatgttgacagttaacatcggttttctgtaaagaactgatgctaacgaatgtgtaaatgttgacagttaacatcggttttttcaaaaaaccgatgttaacgtttgttaacatcgattttctgtaaaaaaaaatcgatgttaacgaatgtgttaatgttggcagttaacatcgatttttttgtaaaaaaaaaccgatgttaactgtcaaca

SEQ ID NO: 9683 - DNA, 1064 bp, Glycine max; identical to SEQ ID NO: 9682
  Gm_smallRNAprecursor_2516

SEQ ID NO: 9684 - DNA, 1065 bp, Glycine max
  Gm_smallRNAprecursor_2517
ttaattttagtggattttatttgattattgacgtaattttgaatgaagtgaaaaataaaattaagggtttcctttggttcgatctcactataggcgatccacctcagcgggagagaagtcaaagaatcaagataaagaaagaactcaagaatattacaaaaggttagtgtgattttatttgcaatcaattcttttgctttagtgttttagtttttcatatggtttcgaaaggcaatttaattctatgtattcaagagatattttgttctttgagaaacacatctataattctttatacttccttcccaaattcaaccaaaaaactagtgaaggtgagaaatgaatattccataattttaggatagacatgaattcgatagtatgtgccatttgaaatgagttgcaacatgcaagccaaaatccctttttcactattagaaaatatactttttacattggttatttatgacttttaacatcggtttttgaaccgatgtttaaagtaccgacgttgatagtattatcattaacattggtttttaaaaaatcgatgttaacgataatactatcaacgtcggtactttcaacatcggttatataaataacctatgttgctaatatgaattacacccaaaaatgtatattaatgttgaaaattaacatcggttttctgtaaaaaaaaaccgatgttaacaaatgtgttaatgttgacagttaacatcggttttttcaaaaaaccaatgttaacattagttaacatcggttttatgtaaaaaaaactgatgttaacgaatgtgttaatgttgacagttaacatcggttttctgtaaaaaaccgatgttaacgaatgtgttaatgttgacagttaacatcggttttctgtaaagaactgatgctaacgaatgtgtaaatgttgacagttaacatcggttttttcaaaaaaccgatgttaacgtttgttaacatcgattttctgtaaaaaaaaatcgatgttaacgaatgtgttaatgttggcagttaacatcgatttttttgtaaaaaaaaaccgatgttaactgtcaacat

SEQ ID NO: 9685 - DNA, 1065 bp, Glycine max; identical to SEQ ID NO: 9684
  Gm_smallRNAprecursor_2518

SEQ ID NO: 9686 - DNA, 1065 bp, Glycine max; identical to SEQ ID NO: 9684
  Gm_smallRNAprecursor_2519

SEQ ID NO: 9687 - DNA, 1065 bp, Glycine max; identical to SEQ ID NO: 9684
  Gm_smallRNAprecursor_2520

SEQ ID NO: 9688 - DNA, 1062 bp, Glycine max
  Gm_smallRNAprecursor_2521
taattttagtggattttatttgattattgacgtaattttgaatgaagtgaaaaataaaattaagggtttcctttggttcgatctcactataggcgatccacctcagcgggagagaagtcaaagaatcaagataaagaaagaactcaagaatattacaaaaggttagtgtgattttatttgcaatcaattcttttgctttagtgttttagtttttcatatggtttcgaaaggcaatttaattctatgtattcaagagatattttgttctttgagaaacacatctataattctttatacttccttcccaaattcaaccaaaaaactagtgaaggtgagaaatgaatattccataattttaggatagacatgaattcgatagtatgtgccatttgaaatgagttgcaacatgcaagccaaaatccctttttcactattagaaaatatactttttacattggttatttatgacttttaacatcggtttttgaaccgatgtttaaagtaccgacgttgatagtattatcattaacattggtttttaaaaaatcgatgttaacgataatactatcaacgtcggtactttcaacatcggttatataaataacctatgttgctaatatgaattacacccaaaaatgtatattaatgttgaaaattaacatcggttttctgtaaaaaaaaaccgatgttaacaaatgtgttaatgttgacagttaacatcggttttttcaaaaaaccaatgttaacattagttaacatcggttttatgtaaaaaaaactgatgttaacgaatgtgttaatgttgacagttaacatcggttttctgtaaaaaaccgatgttaacgaatgtgttaatgttgacagttaacatcggttttctgtaaagaactgatgctaacgaatgtgtaaatgttgacagttaacatcggttttttcaaaaaaccgatgttaacgtttgttaacatcgattttctgtaaaaaaaaatcgatgttaacgaatgtgttaatgttggcagttaacatcgatttttttgtaaaaaaaaaccgatgttaactgtcaac

SEQ ID NO: 9689 - DNA, 1063 bp, Glycine max
  Gm_smallRNAprecursor_2522
taattttagtggattttatttgattattgacgtaattttgaatgaagtgaaaaataaaattaagggtttcctttggttcgatctcactataggcgatccacctcagcgggagagaagtcaaagaatcaagataaagaaagaactcaagaatattacaaaaggttagtgtgattttatttgcaatcaattcttttgctttagtgttttagtttttcatatggtttcgaaaggcaatttaattctatgtattcaagagatattttgttctttgagaaacacatctataattctttatacttccttcccaaattcaaccaaaaaactagtgaaggtgagaaatgaatattccataattttaggatagacatgaattcgatagtatgtgccatttgaaatgagttgcaacatgcaagccaaaatccctttttcactattagaaaatatactttttacattggttatttatgacttttaacatcggtttttgaaccgatgtttaaagtaccgacgttgatagtattatcattaacattggtttttaaaaaatcgatgttaacgataatactatcaacgtcggtactttcaacatcggttatataaataacctatgttgctaatatgaattacacccaaaaatgtatattaatgttgaaaattaacatcggttttctgtaaaaaaaaaccgatgttaacaaatgtgttaatgttgacagttaacatcggttttttcaaaaaaccaatgttaacattagttaacatcggttttatgtaaaaaaaactgatgttaacgaatgtgttaatgttgacagttaacatcggttttctgtaaaaaaccgatgttaacgaatgtgttaatgttgacagttaacatcggttttctgtaaagaactgatgctaacgaatgtgtaaatgttgacagttaacatcggttttttcaaaaaaccgatgttaacgtttgttaacatcgattttctgtaaaaaaaaatcgatgttaacgaatgtgttaatgttggcagttaacatcgatttttttgtaaaaaaaaaccgatgttaactgtcaaca

SEQ ID NO: 9690 - DNA, 1063 bp, Glycine max; identical to SEQ ID NO: 9689
  Gm_smallRNAprecursor_2523

SEQ ID NO: 9691 - DNA, 1064 bp, Glycine max
  Gm_smallRNAprecursor_2524
taattttagtggattttatttgattattgacgtaattttgaatgaagtgaaaaataaaattaagggtttcctttggttcgatctcactataggcgatccacctcagcgggagagaagtcaaagaatcaagataaagaaagaactcaagaatattacaaaaggttagtgtgattttatttgcaatcaattcttttgctttagtgttttagtttttcatatggtttcgaaaggcaatttaattctatgtattcaagagatattttgttctttgagaaacacatctataattctttatacttccttcccaaattcaaccaaaaaactagtgaaggtgagaaatgaatattccataattttaggatagacatgaattcgatagtatgtgccatttgaaatgagttgcaacatgcaagccaaaatccctttttcactattagaaaatatactttttacattggttatttatgacttttaacatcggtttttgaaccgatgtttaaagtaccgacgttgatagtattatcattaacattggtttttaaaaaatcgatgttaacgataatactatcaacgtcggtactttcaacatcggttatataaataacctatgttgctaatatgaattacacccaaaaatgtatattaatgttgaaaattaacatcggttttctgtaaaaaaaaaccgatgttaacaaatgtgttaatgttgacagttaacatcggttttttcaaaaaaccaatgttaacattagttaacatcggttttatgtaaaaaaaactgatgttaacgaatgtgttaatgttgacagttaacatcggttttctgtaaaaaaccgatgttaacgaatgtgttaatgttgacagttaacatcggttttctgtaaagaactgatgctaacgaatgtgtaaatgttgacagttaacatcggttttttcaaaaaaccgatgttaacgtttgttaacatcgattttctgtaaaaaaaaatcgatgttaacgaatgtgttaatgttggcagttaacatcgatttttttgtaaaaaaaaaccgatgttaactgtcaacat

SEQ ID NO: 9692 - DNA, 1058 bp, Glycine max
  Gm_smallRNAprecursor_2525
attttagtggattttatttgattattgacgtaattttgaatgaagtgaaaaataaaattaagggtttcctttggttcgatctcactataggcgatccacctcagcgggagagaagtcaaagaatcaagataaagaaagaactcaagaatattacaaaaggttagtgtgattttatttgcaatcaattcttttgctttagtgttttagtttttcatatggtttcgaaaggcaatttaattctatgtattcaagagatattttgttctttgagaaacacatctataattctttatacttccttcccaaattcaaccaaaaaactagtgaaggtgagaaatgaatattccataattttaggatagacatgaattcgatagtatgtgccatttgaaatgagttgcaacatgcaagccaaaatccctttttcactattagaaaatatactttttacattggttatttatgacttttaacatcggtttttgaaccgatgtttaaagtaccgacgttgatagtattatcattaacattggtttttaaaaaatcgatgttaacgataatactatcaacgtcggtactttcaacatcggttatataaataacctatgttgctaatatgaattacacccaaaaatgtatattaatgttgaaaattaacatcggttttctgtaaaaaaaaaccgatgttaacaaatgtgttaatgttgacagttaacatcggttttttcaaaaaaccaatgttaacattagttaacatcggttttatgtaaaaaaaactgatgttaacgaatgtgttaatgttgacagttaacatcggttttctgtaaaaaaccgatgttaacgaatgtgttaatgttgacagttaacatcggttttctgtaaagaactgatgctaacgaatgtgtaaatgttgacagttaacatcggttttttcaaaaaaccgatgttaacgtttgttaacatcgattttctgtaaaaaaaaatcgatgttaacgaatgtgttaatgttggcagttaacatcgatttttttgtaaaaaaaaaccgatgttaactgtca

SEQ ID NO: 9693 - DNA, 1059 bp, Glycine max
  Gm_smallRNAprecursor_2526
attttagtggattttatttgattattgacgtaattttgaatgaagtgaaaaataaaattaagggtttcctttggttcgatctcactataggcgatccacctcagcgggagagaagtcaaagaatcaagataaagaaagaactcaagaatattacaaaaggttagtgtgattttatttgcaatcaattcttttgctttagtgttttagtttttcatatggtttcgaaaggcaatttaattctatgtattcaagagatattttgttctttgagaaacacatctataattctttatacttccttcccaaattcaaccaaaaaactagtgaaggtgagaaatgaatattccataattttaggatagacatgaattcgatagtatgtgccatttgaaatgagttgcaacatgcaagccaaaatccctttttcactattagaaaatatactttttacattggttatttatgacttttaacatcggtttttgaaccgatgtttaaagtaccgacgttgatagtattatcattaacattggtttttaaaaaatcgatgttaacgataatactatcaacgtcggtactttcaacatcggttatataaataacctatgttgctaatatgaattacacccaaaaatgtatattaatgttgaaaattaacatcggttttctgtaaaaaaaaaccgatgttaacaaatgtgttaatgttgacagttaacatcggttttttcaaaaaaccaatgttaacattagttaacatcggttttatgtaaaaaaaactgatgttaacgaatgtgttaatgttgacagttaacatcggttttctgtaaaaaaccgatgttaacgaatgtgttaatgttgacagttaacatcggttttctgtaaagaactgatgctaacgaatgtgtaaatgttgacagttaacatcggttttttcaaaaaaccgatgttaacgtttgttaacatcgattttctgtaaaaaaaaatcgatgttaacgaatgtgttaatgttggcagttaacatcgatttttttgtaaaaaaaaaccgatgttaactgtcaa

SEQ ID NO: 9694 - DNA, 1232 bp, Glycine max
  Gm_smallRNAprecursor_2527
tagcactcaattgatcacaaactcaaaacgattattaaaagaaatttaattattttcctaaaattagagagagagagagaatgaccagggatgattttgcgagagccgtcgatggcggaaccgacggcaaacttgaggaggtccaccagtatttggctaatcgtgtggcggcgggccatatctgtcacggcggcggccatgtcgtcgtcggcggtgtcttgcgattccgattagcttctttctgattaaccgaagtgtgtgtggttaactggttatgtattctgagggaggagctttcaattttatcatttcggttagatattattattagtagtagtagtatttattataatttattaattatctaattgagtgatttattaattattgcagggtgttgctaggtgcacccaccactattgctggtgcacctagcattttttcaaaataccagaactgcctctcatttatgttgggtgtgcgtgagagggcggttcgtaaaagacttacggatcaagttgatctatatgttgatattttaaacatacggatcaacttgatccataaaattcttacagatcaacttgattcgtaaaaggtttacggatcaagttgatccgtaaaagaattatggatcaacttgatccttaagccttttacgaatcaagttgatccatatgttgatattttaaacatatggatcaagttgattcgtaaaatccttacagatcaagttgatctgtaagccttttacggatcaaattgatccatatgttgatagcatacggatcaacttgatctgtaagccttttacgtaggagcattttttacttttaccataaagtgttgggtgcactagcaataatgttgggtgcacctagcaacatccttgagtgcccttgagtgcatgagatgagatcagatatgtgtacgctaaaagtcaaataaaaaatatgtttttttttttctagaatacaattaccctgtaggtaattgtgtaagattatttaataggaaagttttcctccaaatactatttagttaagctggaataattttaaatcaattaatcaacatgtttaatggtaatttatattagttattatttttttcttttaaacttgattttaaaagaaaaaaaatagacttgtaaaagaaaatgagatgaaaaaaaattatgtattaaaagtgtaaacatctaatcacaaaccaccttgtgataattttgtcaa

SEQ ID NO: 9695 - DNA, 1060 bp, Glycine max
  Gm_smallRNAprecursor_2528
tctgacactgaagactgtaaccagctctcagtactttctattgtaggcatgggcggtgtgggtaagaccacgcttgcccaacatgtatataatgacccaaggatagagggtaaattcgatatcaaagcttgggtttgtgtttcaaatgaatttgatgttttcaaggtaacaagaacaattcttgacacaattactaaatcagttgatgatagtagagagctagaaatggttcatggaagactgaaagaaaaattgacaggaaacaaattccttcttgttttggatgacgtatggaatgaaaaccgacataaatgggaaactgttcagagacctcttgattgtggggctcaaggaagtaggatccttgtcacaacacgcagtaagaaagttgcttctacaatgcagtcaaaagaacatcacctagagcaattagaaaaagatcactgttggcggttgtttaataaacatgcattccaagatgataatgctcaatcaaatccagactttaaggagattggcatgaagatagttgaaaaatgcaagggactgcctctagccttgaaaacaattggaagtctattgcacagaaaaacatctattttagaatgggaaagcatattaaaaagcaagatatgggaattttcagaagaggacagtgaaattgtccctgctttagcactgagctatcaccacctcccttcccatctcaagagatgttttgcttactgtgccttatttcccaaagattatgagtttgacaaggagtgtttaattcagttgtggatggctgaaaattttctacaatgtcatcaacagagtaagagtccagaagaagttggtgaacagtacttcaatgatctattatcaagatccttctttcaacaatcaagcatcaatgatctatcaccaatatttttcttaacaagttctaggatcagaaacaagacttattttgtcatgcatgaccttctcaatgatttggcaaagtatgttggtggggacatctatttcaggttggaagatgatcaagcaaaaagtattccaaaaacagctcgtcatt

SEQ ID NO: 9696 - DNA, 1087 bp, Glycine max
  Gm_smallRNAprecursor_2529
tcacctagagcaattagaaaaagatcactgttggcggttgtttaataaacatgcattccaagatgataatgctcaatcaaatccagactttaaggagattggcatgaagatagttgaaaaatgcaagggactgcctctagccttgaaaacaattggaagtctattgcacagaaaaacatctattttagaatgggaaagcatattaaaaagcaagatatgggaattttcagaagaggacagtgaaattgtccctgctttagcactgagctatcaccacctcccttcccatctcaagagatgttttgcttactgtgccttatttcccaaagattatgagtttgacaaggagtgtttaattcagttgtggatggctgaaaattttctacaatgtcatcaacagagtaagagtccagaagaagttggtgaacagtacttcaatgatctattatcaagatccttctttcaacaatcaagcatcaatgatctatcaccaatatttttcttaacaagttctaggatcagaaacaagacttattttgtcatgcatgaccttctcaatgatttggcaaagtatgttggtggggacatctatttcaggttggaagatgatcaagcaaaaagtattccaaaaacagctcgtcatttttcatttgaaaccaacgacatctattgttatgatgaggagcttgggagtttacatgatgttgaaaggtttcgtacatttatgccaacaagtaagagtatggattttctttactatagttggtattgcaagatgtcaatacatcaattgttctccaaatttaagttcttacgggttttatctctgcttggttgttctgaacttaaagaggtgcctgactcagtaggaaatctaaaacatctacattcgttagacctatccaatacaaacataaaaaaactacctgaatcaacatgttcactctacaacttgcaaatactgaagctgaatggttgttcacatatgaaggaatttcccacaaatttccataaactcaccaatttgcgtcgccttgaattaataaaaactgaagtgagaaaggtgcccgagcagttgggaaaactg

SEQ ID NO: 9697 - DNA, 1111 bp, Glycine max
  Gm_smallRNAprecursor_2530
tagttacgtaagcttaattcctattatgctaagttaactaaatgtgtttttgcagtttcaacagtcagatatttagggcacatcatttcagcccaaggagttcaacccaatccttccaaggtgcatgctcgatctgctattttttaggattgtctggcttttatcaatgattttttaggattgactcacagagctaccacacgctaatgtacaatttcaatggaatacacacacattacaggcatttacaacattaaaatacattatcacataggctccagtcctcagttttcccaattataaaatgccttttgagattgaaactcatgcttccaaccttgcgttaggagtagttctcaaccaacatagtcagccaattacctttttcagtaaaaaaaaactgccaaaaaatgcaataggcatcagcttatgcaagggaaatgtatgccatcacgaaagctattaagaaatggaagcaatcctctatgaagcaccgacatcgatacggacaccggacacgacacggacatggacacgtggacacctgtaatgtcccaaaatatagaacgtagtacgagtgtcatgtcggtgtcagacactgacacgaacgcgtgtcggacaccggacacggcaagggaatggagtatccgtgcttcataggcaatccttgattggaaattatttcaaggtatatatacagaccaacaaagcttgttgactcctgagcaacaaccttgggccaccaaacgccaaggattcttctatgacatcctttaccaggtcaccaaaaccgggtggcagatgttctttctcgaaggaacattgaaagtgaactactcttgttgacattctcttcgttgtacccaccttgttccaaaccctgcataaactttataagaacgatacatagtgtcatgaattcttcattaaatgctaaaatgatactgaaatgtagaaagttttccatgtgactagaggacttatcttttttaagaactgactgtatattcccaacactcagaattctcgccaacagttattatcagaatatcatagcccagggaataaacacaaggcatgcaacttaaattttccacaacttatcattagg

SEQ ID NO: 9698 - DNA, 1111 bp, Glycine max; identical to SEQ ID NO: 9697
  Gm_smallRNAprecursor_2531

SEQ ID NO: 9699 - DNA, 1112 bp, Glycine max
  Gm_smallRNAprecursor_2532
tagttacgtaagcttaattcctattatgctaagttaactaaatgtgtttttgcagtttcaacagtcagatatttagggcacatcatttcagcccaaggagttcaacccaatccttccaaggtgcatgctcgatctgctattttttaggattgtctggcttttatcaatgattttttaggattgactcacagagctaccacacgctaatgtacaatttcaatggaatacacacacattacaggcatttacaacattaaaatacattatcacataggctccagtcctcagttttcccaattataaaatgccttttgagattgaaactcatgcttccaaccttgcgttaggagtagttctcaaccaacatagtcagccaattacctttttcagtaaaaaaaaactgccaaaaaatgcaataggcatcagcttatgcaagggaaatgtatgccatcacgaaagctattaagaaatggaagcaatcctctatgaagcaccgacatcgatacggacaccggacacgacacggacatggacacgtggacacctgtaatgtcccaaaatatagaacgtagtacgagtgtcatgtcggtgtcagacactgacacgaacgcgtgtcggacaccggacacggcaagggaatggagtatccgtgcttcataggcaatccttgattggaaattatttcaaggtatatatacagaccaacaaagcttgttgactcctgagcaacaaccttgggccaccaaacgccaaggattcttctatgacatcctttaccaggtcaccaaaaccgggtggcagatgttctttctcgaaggaacattgaaagtgaactactcttgttgacattctcttcgttgtacccaccttgttccaaaccctgcataaactttataagaacgatacatagtgtcatgaattcttcattaaatgctaaaatgatactgaaatgtagaaagttttccatgtgactagaggacttatcttttttaagaactgactgtatattcccaacactcagaattctcgccaacagttattatcagaatatcatagcccagggaataaacacaaggcatgcaacttaaattttccacaacttatcattaggc

SEQ ID NO: 9700 - DNA, 1112 bp, Glycine max; identical to SEQ ID NO: 9699
  Gm_smallRNAprecursor_2533

SEQ ID NO: 9701 - DNA, 1112 bp, Glycine max; identical to SEQ ID NO: 9699
  Gm_smallRNAprecursor_2534

SEQ ID NO: 9702 - DNA, 1112 bp, Glycine max; identical to SEQ ID NO: 9699
  Gm_smallRNAprecursor_2535

SEQ ID NO: 9703 - DNA, 1113 bp, Glycine max
  Gm_smallRNAprecursor_2536
tagttacgtaagcttaattcctattatgctaagttaactaaatgtgtttttgcagtttcaacagtcagatatttagggcacatcatttcagcccaaggagttcaacccaatccttccaaggtgcatgctcgatctgctattttttaggattgtctggcttttatcaatgattttttaggattgactcacagagctaccacacgctaatgtacaatttcaatggaatacacacacattacaggcatttacaacattaaaatacattatcacataggctccagtcctcagttttcccaattataaaatgccttttgagattgaaactcatgcttccaaccttgcgttaggagtagttctcaaccaacatagtcagccaattacctttttcagtaaaaaaaaactgccaaaaaatgcaataggcatcagcttatgcaagggaaatgtatgccatcacgaaagctattaagaaatggaagcaatcctctatgaagcaccgacatcgatacggacaccggacacgacacggacatggacacgtggacacctgtaatgtcccaaaatatagaacgtagtacgagtgtcatgtcggtgtcagacactgacacgaacgcgtgtcggacaccggacacggcaagggaatggagtatccgtgcttcataggcaatccttgattggaaattatttcaaggtatatatacagaccaacaaagcttgttgactcctgagcaacaaccttgggccaccaaacgccaaggattcttctatgacatcctttaccaggtcaccaaaaccgggtggcagatgttctttctcgaaggaacattgaaagtgaactactcttgttgacattctcttcgttgtacccaccttgttccaaaccctgcataaactttataagaacgatacatagtgtcatgaattcttcattaaatgctaaaatgatactgaaatgtagaaagttttccatgtgactagaggacttatcttttttaagaactgactgtatattcccaacactcagaattctcgccaacagttattatcagaatatcatagcccagggaataaacacaaggcatgcaacttaaattttccacaacttatcattaggca

SEQ ID NO: 9704 - DNA, 1113 bp, Glycine max; identical to SEQ ID NO: 9703
  Gm_smallRNAprecursor_2537

SEQ ID NO: 9705 - DNA, 1113 bp, Glycine max; identical to SEQ ID NO: 9703
  Gm_smallRNAprecursor_2538

SEQ ID NO: 9706 - DNA, 1113 bp, Glycine max; identical to SEQ ID NO: 9703
  Gm_smallRNAprecursor_2539

SEQ ID NO: 9707 - DNA, 1114 bp, Glycine max
  Gm_smallRNAprecursor_2540
tagttacgtaagcttaattcctattatgctaagttaactaaatgtgtttttgcagtttcaacagtcagatatttagggcacatcatttcagcccaaggagttcaacccaatccttccaaggtgcatgctcgatctgctattttttaggattgtctggcttttatcaatgattttttaggattgactcacagagctaccacacgctaatgtacaatttcaatggaatacacacacattacaggcatttacaacattaaaatacattatcacataggctccagtcctcagttttcccaattataaaatgccttttgagattgaaactcatgcttccaaccttgcgttaggagtagttctcaaccaacatagtcagccaattacctttttcagtaaaaaaaaactgccaaaaaatgcaataggcatcagcttatgcaagggaaatgtatgccatcacgaaagctattaagaaatggaagcaatcctctatgaagcaccgacatcgatacggacaccggacacgacacggacatggacacgtggacacctgtaatgtcccaaaatatagaacgtagtacgagtgtcatgtcggtgtcagacactgacacgaacgcgtgtcggacaccggacacggcaagggaatggagtatccgtgcttcataggcaatccttgattggaaattatttcaaggtatatatacagaccaacaaagcttgttgactcctgagcaacaaccttgggccaccaaacgccaaggattcttctatgacatcctttaccaggtcaccaaaaccgggtggcagatgttctttctcgaaggaacattgaaagtgaactactcttgttgacattctcttcgttgtacccaccttgttccaaaccctgcataaactttataagaacgatacatagtgtcatgaattcttcattaaatgctaaaatgatactgaaatgtagaaagttttccatgtgactagaggacttatcttttttaagaactgactgtatattcccaacactcagaattctcgccaacagttattatcagaatatcatagcccagggaataaacacaaggcatgcaacttaaattttccacaacttatcattaggcac

SEQ ID NO: 9708 - DNA, 1157 bp, Glycine max
  Gm_smallRNAprecursor_2541
aagaccagtaaaacaactaccgagaagattcgcaccagaaatcatgtccaagatcaaggaagagatcgaaaggctgctgaggtgtaaattcatcagggctgccaggtatgtcgaatggttagcaaatatagtccctgtcattaaaaagaatggaactcttagagtatgcatagattttagggatttaaataatgctacacctaaagatgaatatgctatgccagtagcggaaatgttggtagattcggcagctggtttcgaatttttaagcatgttagatggttattctggttataaccaaatatttattgctgaaaatgatgtgtcgaaaacagcatttcgatgccctggtgctttaggcacttatgaatgggtggttatgccctttgggttgaaaaatgctggggccacttatcaaagggctatgaattccatgtttcatgattttattgacacatttatgcaaatttatattgatgatataatcatcaaatcctcctcagaagatagccatttggattatcttaggcaatctttcgaacgaatgaggaaacatggattaaaaatgaatccattaaaatgtgctttttgtgtgcgtgcaggagatttccttggttttgtggtgcataaaaaaggcattgagataaatcaaaataagacaaaggctattcttgagacgaagcctccttcgactaaaaaacagcttcagtctttgctaggaaaaatcaacttcttgaggcgattcatttcgaatctaagtggcaaagctcagattttttcgccattacttcgactcaagaaagatgaaccattcaaatggaatgaagagcatcaaaaggctttcgatgaaattaaagaatatctgatcaagcctcctgtgttaatgcctcctagtcgaaacaagtctatgaaattgtatattgctgcgtctgacaagaccattggtagcatgttggctcaggaagatgatgatagcatagaacatgcaatttattatcttagtcgtgtactaaatgatgcagaaactagatatactgccatagaaaaactttgtctttgtctgtatttctcttgtgcaaaacttaagcaatatataaagcctgttgatgtttatgtgtattctcattatgatgttattaagcacatgttgtcaaaac

SEQ ID NO: 9709 - DNA, 1114 bp, Glycine max
  Gm_smallRNAprecursor_2542
aatctaagtggcaaagctcagattttttcgccattacttcgactcaagaaagatgaaccattcaaatggaatgaagagcatcaaaaggctttcgatgaaattaaagaatatctgatcaagcctcctgtgttaatgcctcctagtcgaaacaagtctatgaaattgtatattgctgcgtctgacaagaccattggtagcatgttggctcaggaagatgatgatagcatagaacatgcaatttattatcttagtcgtgtactaaatgatgcagaaactagatatactgccatagaaaaactttgtctttgtctgtatttctcttgtgcaaaacttaagcaatatataaagcctgttgatgtttatgtgtattctcattatgatgttattaagcacatgttgtcaaaaccgattttacacagtagaattggaaaatgggctttagcattaacagaatattctttaacgtacaagcctttgaaatctgttaagggtcaaattgtggcagattttattgtagatcactcagtggtcgaaatgtcgcaagactatgtcgatacagagccatggattttgtatttcgatggttcgaaacacaaacatggaactggaattggagttttaataatatcccccaataaaattccaactaaattcaagtataaaatcaaagggctttgttctaataatgaggctgagtatgaagctctaattacaggccttgaaattttaattagcctgggggcaagaaatgttaatataagaggtgattcagaattagtgttgaggcaattaacacaagaatacaaatgtgttaatgaacacttagcaaaatattttgttatagcaagttctcttctgaatcatttcgattatattaacattgagcatgtacctcgacaagaaaaccgagaagcaaatgatttagcccaaatagcttcagggtacaaaatgtcgaaggaaaagttaactcaattgatcgaaataaaagataaactggtgttaccagagccattaggcactaaattgccaatgccaaaacttgtgggggcaagtattccacaaaataatgaagatgaaagtatgaatgatcttcaggaaaaaattcaaattttgg

SEQ ID NO: 9710 - DNA, 1082 bp, Glycine max
  Gm_smallRNAprecursor_2543
cagtggtcgaaatgtcgcaagactatgtcgatacagagccatggattttgtatttcgatggttcgaaacacaaacatggaactggaattggagttttaataatatcccccaataaaattccaactaaattcaagtataaaatcaaagggctttgttctaataatgaggctgagtatgaagctctaattacaggccttgaaattttaattagcctgggggcaagaaatgttaatataagaggtgattcagaattagtgttgaggcaattaacacaagaatacaaatgtgttaatgaacacttagcaaaatattttgttatagcaagttctcttctgaatcatttcgattatattaacattgagcatgtacctcgacaagaaaaccgagaagcaaatgatttagcccaaatagcttcagggtacaaaatgtcgaaggaaaagttaactcaattgatcgaaataaaagataaactggtgttaccagagccattaggcactaaattgccaatgccaaaacttgtgggggcaagtattccacaaaataatgaagatgaaagtatgaatgatcttcaggaaaaaattcaaattttggccattgacaatatgttagataatgattggagaaagtccattattgaatatttggaaaatccaataggcaatgtggctcgaaagatcaaatatagggctttaaattacgtgattgtgggaaatgatttgtttaaaaagactgcagaaggagtgttgttaaaatgtctaagtgaatcagaagcatacttggcagtttcccatgttcacagtggggcttgtggatcacatcaagcaggccataaaatgaaatggcttttatttcgacaaggtttgtattggccttcgatgttaaaagactgcatagaattcgctaaaggctgtcaggaatgccaaaagcatgcagggatacagcatgtacctgctagtgagttacattccataatcaaaccttggcctttcagaggatgggctttggacttaattggtgaaatcaagcctgcctcttctaagaaccagcgttatattatagttggtatcgattactttacaaaa

SEQ ID NO: 9711 - DNA, 1086 bp, Glycine max
  Gm_smallRNAprecursor_2544
gtttctgaatcgaatcagcggccttctcctggagttctttgcgcttggcctgctctgttacaattttctgccttagatcatcgacctgagacagcaaatttgtaatagttgcctcccaggaggagatgttatcatcacaggctttgatctcagaagatccttctttcgcttctttggtgagacgctcgacttcacgttgagccgctcgggctttctcgagcagaaggatatgtgcctgtttctgggcatcgagtctggcgccattttcgcgttttttctgcacagtatttgcaaattgatcgataatggactcgatttgtataactttgcccagaatctcatcagaagtaagggggttatgcaatttcttcaaaaagttcaggtgcccaaaagcagcagaagggttctcttcaatggatttaagtacgtctgcccgtgcgtattccattgataacttcaaaagcaggcaatcttggcgtactgtagaggttatatcagcatcagatgaggacgaagcaccaggattcttttcacttgaggtgttggcttgactggtgttcagcaggagtcgaagggctgcagcagggtcttcgtcttgcatttgaatgaatgtatcctctgcgatccctatgctagcggaaagcttagatgtcgaagacgctgggaaaatgtctgaacctccagcttcagcctcttgtatggcctcttcatcggaaaagtgttcttcagatgaacttctttgactcgatccctgaggactgctgggtccaataccttgaccttcaccctgttcctcaacattcactgcatccgtctcaggagcaggagaggttcgagcacatgagggtatttcttctacagaaacattttgttgtacctgattcgaattgtcatggaaaaggttaacaaatagtttcgtattagctatgattaaaatcatattaagaatgatacctcgacggtagggtgttcttgtggtaagtccggttgttcgacaaggttgcccatctcagcaatagagggagtagtttctgtttcagcgccgccgacatcagtcgaaggtggttggacgtcaacaggttgatt

SEQ ID NO: 9712 - DNA, 1046 bp, Glycine max
  Gm_smallRNAprecursor_2545
tgtgtaaaataggttttgacaacatgtgcttaataatatcataatgagaatatacataaacatcaacaggctttatatattgcttaagttttgcacaagagaaatacaaacaaagacaaagtttttctatggcagtatatctagtttctgcatcatttagtacacgactaagataataaattgcatgctctacgccatcatcatcctcctgagccaacatgctaccaatggtcttgtaagacgcagcaatatacaacttcatagtcttgtttcgactaggaggcattaacacaggaggcttgatcagatattctttaatttcatcaaaagccttttgatgcacttcatcccatttgaatggttcatctttcttgagtcgaagtaatggcgaaaaagtttgagctttgccacttagattcgaaatgaatcgcctcaagaagttgatttttcctagcaaaggctgaagctgttttttggtcgaaggaggcttcgtctcaagaatagcctttgtcttgttttgatttatctcaatgccttttttatgcaccacaaaaccaaggaaatctcctgcacgcacacaaaaagcacactttaatggattcatttttaatccatgtttcctcattcgttcgaaagattgcctaaggtaatccaaatggctatcttctgaggaggatttgatgattatatcatcaatataaacttgcataaatgtgtcaataaaatcatgaaacatggaattcatggccctttgataagtagccccagcatttttcaacccaaagggcataactacccattcataagtgcctaaagcaccagggcatcgaaatgctgtttttgacacatcactttcagcaataaatatttggttataaccagaataaccatctaacatgcttaaaaattcgaagccagctgctgaatctaccaacatttctgctactggcatagcatattcatctttaggtgtagcattatttaaatccctaaaatctatgcatactctaagagttccattttttaatgacagggactatatttgc

SEQ ID NO: 9713 - DNA, 1112 bp, Glycine max
  Gm_smallRNAprecursor_2546
tgttcaaaacataaaatatatattgggtcccaaatttcaaaatcctccaaatggtaatctagttggtatggaatccagtgttgaagaattagaaaagtgtttagcattggagtcggttagtgacgttcgggttgtcggaattagtggaatgggaggaataggaaagacaactcttgcccgtgctttatacgaaaagattgctgatcaatatgattttcattgttttgttgatgatgtaaacaatatttatcgacattctagttcactaggtgtacaaaaacagttactttctcagtgcctaaatgatgaaaatctagagatttgcaatgtttctaagggaacatatttggtatcgactatgctacgcaataaaagaggacttatagttcttgataatgttggtcaggttgaacaattacatatgtttacacagagtagagagactctattacgtgaatgcctaggtggagggagtagaatcatcataacttctagggatgaacacatattaaggacacatggagtaaatcatgtttaccaagtccaaccattgagttgggacaatgctgttaagttattttgcataaatgctttcaaatgtacctacattatgagtgattatgaaatgttgacacatggtgtactatcacatgctcaaggccatcccttggcaattgaagtaataggcaaatctttgtttggtcgaaatgtttcacagtggacaagtacattggataggctaagagataataaaagtaggaatattatggatgtgttgcgaataagttatgatgatctagaagaaaaagatagggaaatatttcttgatattgcttgtttcttcaatgatgatcatgagcaacatgtgaaggaaatcctaaattttcgtggatttgatcctgaaattggcctaccaattcttgttgaaaaatcactcataaccattagtgatggcttgattcatatgcatgacttgctgagagatttaggtaagtgtattgttcgagaaaaatcacctaaagagccaagaaagtggagtagattgtgggattttgaagatatctacaaagttatgtcagacaatatggtaaaatagtttttcaatgtataaa

SEQ ID NO: 9714 - DNA, 1159 bp, Glycine max
  Gm_smallRNAprecursor_2547
ccatttttcagggagagttacttcatcccattttattattctttttaaagaaacattggcttttgtcatatcagtgataaataaggttgtttctcccttttgtggttgtaataggactctagacgcacaagtattcatgaccttgtactggatcctataaattaaagctgctggaattgatgcttctttcatgtcaaggccatgaaagtggatatttaagaacagagagtcaagaatatttctgtccattaaactcactgttttgtttggataacaattaaattatactggacattatcctaaactggtttctactgtttcgattaaggagtcttcaaatttattatgcctaatatctcttagacacattaaaactactgcatctatgcccatgtcaattaagggcttgatggctacttgtacacaactgatgtgtaaatatttatacttacggctgtgttcataaattgaattttttgaaagtaaatgaaattcttcccctatatcttgtcctagaggaatattgttttctactgttttgattatgtaattaaagttgtgtatatctttaattgtttcaggaacatatagttgatcttgagggatttctggaatgttccagtcatccatgttttgattgatatcttcgaatcggacttcctcatcgaagagattgtgtttgggggtgacctcgtgggtctggttttcttgatcatttaatgaatttgtatttcttgaagaggatgatgagaaagaattggatcgaaaagagatacgggaaaaagggcataaaagtctagacatgattataacattctctaatatctttgccttcatctggttccatagaaatatttccgtaagtaaatatgtaacaaaatttcttggacctgaaaatttttaaagaaaagctctttttttttttatcgagagccttattagagaatgttatacttttaaaaaccttattagagaatgttatactttttgtccgtctcgcctattacgttctttctctcgcatttcatttagatctaactcatcctcatcctcttggttgtaaatcaaatgagagaaagaacgtaataggtgagacttgataaacttatcctccaatatcattgtcgtcatttggttctatagaaatattgtcgtaagc

SEQ ID NO: 9715 - DNA, 1133 bp, Glycine max
  Gm_smallRNAprecursor_2548
tctttttggcagtattgaaagagttcttcgttcatttgaattggtctggcttttgtgggaatttgttttccctaaagtctttctcataagagagatcaacaatatgtttctttctatcccaaaatgcatatgacaaatcaaaacagacagttgattcaatatgactcaacaaagattgaattttttcttttatttaggattttcccagttgtattcaatatatatatatatatatatatatatatatatatatgagcctggtggggaagtaggaatactatccgtagggacatatgttaacaaattttatggatctgaaactgaagccttgtatagtacaagtactattttactttgatttgtacagtaaatgtttgaacaatacttcctggaagtacagcggtctaatattttagttgaatggtactgtagcagtaagacccgtgatagataaagggcggtaaggctaaggtgtaccgtttaaccaaaatatcaagacataatatactggtggctataggattgccattcaaactattttataaaaaaaaaagagtttttcttaaaaataattcagatccagaaaaattttgtgacatatttacttacagggatatttctatggaaccaagtgagggcaaagatattagagaatattataatcatgtctagactattacgatctttttcccgtatctcttttcactcaaactcctcctcatcatcttcttcaagaaactccaatttattaaatgatcaagataaccagacccaagaggtcgccccaaaacacaatctcttcgatgaggaagtccgattcgaagatatcaatcaaaacatggatgactggaacatttcagaaatccctcaggatcaactatatgttcctgaaacaataaaggacaaacacaactttgattacataatcaaaacagtagaaaacaatattcctctaggacaagatataggggaagaatttcatttactttcaaaaaattcaatttatgaacatagccgtaagtataaatatctacacatcggttgtgtataagtagccatcaagcccttaattgatatgggcataaatgcagcagttttaatgtgtctaagagacattaggcataatcaatttg

SEQ ID NO: 9716 - DNA, 1157 bp, Glycine max
  Gm_smallRNAprecursor_2549
tatgttaacaaattttatggatctgaaactgaagccttgtatagtacaagtactattttactttgatttgtacagtaaatgtttgaacaatacttcctggaagtacagcggtctaatattttagttgaatggtactgtagcagtaagacccgtgatagataaagggcggtaaggctaaggtgtaccgtttaaccaaaatatcaagacataatatactggtggctataggattgccattcaaactattttataaaaaaaaaagagtttttcttaaaaataattcagatccagaaaaattttgtgacatatttacttacagggatatttctatggaaccaagtgagggcaaagatattagagaatattataatcatgtctagactattacgatctttttcccgtatctcttttcactcaaactcctcctcatcatcttcttcaagaaactccaatttattaaatgatcaagataaccagacccaagaggtcgccccaaaacacaatctcttcgatgaggaagtccgattcgaagatatcaatcaaaacatggatgactggaacatttcagaaatccctcaggatcaactatatgttcctgaaacaataaaggacaaacacaactttgattacataatcaaaacagtagaaaacaatattcctctaggacaagatataggggaagaatttcatttactttcaaaaaattcaatttatgaacatagccgtaagtataaatatctacacatcggttgtgtataagtagccatcaagcccttaattgatatgggcataaatgcagcagttttaatgtgtctaagagacattaggcataatcaatttgaagactccctaattggaacagtcgaaaccagcctaggacaaggtccaatatattttaactgttatccaaacaaaacagtgagtctgatggacaggagcattcttgactctctgttcttaaacatccactttcatggccttgacatgaaagaaggatcaatcccaacagccttaatttataggatccagtacaaggtcatgaatacttgtgcatctagagtcctgttaaaacctcaaaaaggagaaacaaccttgtttatcactgatatgacaaaggctaacgtttctctcccgagaaaaataaaatgggatgaagt

SEQ ID NO: 9717 - DNA, 1033 bp, Glycine max
  Gm_smallRNAprecursor_2550
aggctaaggtgtaccgtttaaccaaaatatcaagacataatatactggtggctataggattgccattcaaactattttataaaaaaaaaagagtttttcttaaaaataattcagatccagaaaaattttgtgacatatttacttacagggatatttctatggaaccaagtgagggcaaagatattagagaatattataatcatgtctagactattacgatctttttcccgtatctcttttcactcaaactcctcctcatcatcttcttcaagaaactccaatttattaaatgatcaagataaccagacccaagaggtcgccccaaaacacaatctcttcgatgaggaagtccgattcgaagatatcaatcaaaacatggatgactggaacatttcagaaatccctcaggatcaactatatgttcctgaaacaataaaggacaaacacaactttgattacataatcaaaacagtagaaaacaatattcctctaggacaagatataggggaagaatttcatttactttcaaaaaattcaatttatgaacatagccgtaagtataaatatctacacatcggttgtgtataagtagccatcaagcccttaattgatatgggcataaatgcagcagttttaatgtgtctaagagacattaggcataatcaatttgaagactccctaattggaacagtcgaaaccagcctaggacaaggtccaatatattttaactgttatccaaacaaaacagtgagtctgatggacaggagcattcttgactctctgttcttaaacatccactttcatggccttgacatgaaagaaggatcaatcccaacagccttaatttataggatccagtacaaggtcatgaatacttgtgcatctagagtcctgttaaaacctcaaaaaggagaaacaaccttgtttatcactgatatgacaaaggctaacgtttctctcccgagaaaaataaaatgggatgaagtaactcttccctaaagatgggttatggataaggcaacaccgtctattc

SEQ ID NO: 9718 - DNA, 1174 bp, Glycine max
  Gm_smallRNAprecursor_2551
gggttgactgcaaatcagccaaagacattttacagaaggatgtaaaaaaccttgcctcaaaacagatttttgcaagatggcaagcaattttaagtgtctttgattttaatatagaatatatcaagggctcttccaactctctacctgactacctcacccgtgaatttttacagaaaattcccgatgcctcctaaggtgtctagttcctccggcagaggagggaaatccagtacaaaaggaaaagaggttctattggctctaccagagccaataaccaaaaaagcaactacatcatcttctgggtcacctacccagactgggtcatcaacccagaaaggaaagcttgaagggtcattgacccagataactaccgtcaaacctgagtcatcaactcaagaatccccaaaaccaacaacaaccaaacagaccgtggctgactatgcctggtcaatacaaactctcttggccttagaagatataggcctcaccaaagtaccaaaattggccaaaaagacctgggcagaaatggcctcagaataagatgatgattctaaaacagatctgcaaaaacaaatccaaaaggccaaacagaccaaaactgtctgtaaccaaacaccaagccaatcgttgactcaacaagaatcaacgccacaacccagcaacagttatatttccaaaaacaaatttttcaatgttttacaaatggaaccagaatactgggacaagaatcctttcaaagcaaccgccaaagtattccccccgggattccattacaggccaacagccacaaacaaaacccgcaaattctacgaattcattctaatagatacaaactcagtatctattaaacagttcaaagaccccaaagatctaaatctaaatacccattccagaatccaaatcttaaaggttatgcagccacgacattgtggctcaaaattaaaccaacccaaaaaattttctgcaccatttgaccctgcaagatataattattgggattacattgacgcctggaccaatatgttctggcatcaaaatagtaaattcaagcattcatggctaatttacttcaaaaataacactgtgtataattttccaaattggttcctccaatggtggaactacttcagaccaattccacagatattcccagaagaagtccaacagggattcc

SEQ ID NO: 9719 - DNA, 1073 bp, Glycine max
  Gm_smallRNAprecursor_2552
tgtctagttcctccggcagaggagggaaatccagtacaaaaggaaaagaggttctattggctctaccagagccaataaccaaaaaagcaactacatcatcttctgggtcacctacccagactgggtcatcaacccagaaaggaaagcttgaagggtcattgacccagataactaccgtcaaacctgagtcatcaactcaagaatccccaaaaccaacaacaaccaaacagaccgtggctgactatgcctggtcaatacaaactctcttggccttagaagatataggcctcaccaaagtaccaaaattggccaaaaagacctgggcagaaatggcctcagaataagatgatgattctaaaacagatctgcaaaaacaaatccaaaaggccaaacagaccaaaactgtctgtaaccaaacaccaagccaatcgttgactcaacaagaatcaacgccacaacccagcaacagttatatttccaaaaacaaatttttcaatgttttacaaatggaaccagaatactgggacaagaatcctttcaaagcaaccgccaaagtattccccccgggattccattacaggccaacagccacaaacaaaacccgcaaattctacgaattcattctaatagatacaaactcagtatctattaaacagttcaaagaccccaaagatctaaatctaaatacccattccagaatccaaatcttaaaggttatgcagccacgacattgtggctcaaaattaaaccaacccaaaaaattttctgcaccatttgaccctgcaagatataattattgggattacattgacgcctggaccaatatgttctggcatcaaaatagtaaattcaagcattcatggctaatttacttcaaaaataacactgtgtataattttccaaattggttcctccaatggtggaactacttcagaccaattccacagatattcccagaagaagtccaacagggattccaacaattcaacaagctctataatagcaaggaatcacgtattccggcagatttaaagtacttttccagttttgccttgtcatggattttttcaagg

SEQ ID NO: 9720 - DNA, 1057 bp, Glycine max
  Gm_smallRNAprecursor_2553
ccaaaaacaaatttttcaatgttttacaaatggaaccagaatactgggacaagaatcctttcaaagcaaccgccaaagtattccccccgggattccattacaggccaacagccacaaacaaaacccgcaaattctacgaattcattctaatagatacaaactcagtatctattaaacagttcaaagaccccaaagatctaaatctaaatacccattccagaatccaaatcttaaaggttatgcagccacgacattgtggctcaaaattaaaccaacccaaaaaattttctgcaccatttgaccctgcaagatataattattgggattacattgacgcctggaccaatatgttctggcatcaaaatagtaaattcaagcattcatggctaatttacttcaaaaataacactgtgtataattttccaaattggttcctccaatggtggaactacttcagaccaattccacagatattcccagaagaagtccaacagggattccaacaattcaacaagctctataatagcaaggaatcacgtattccggcagatttaaagtacttttccagttttgccttgtcatggattttttcaaggcaatacagatacggaaaaaccgaaaacagcaaacagtatccaccgttgcagagacacgcctttgtaaaatggtggtcacaattcgatacttcaaaggctgctccagaacaagtcaagaacagattccagagcaatcctgagttcctcaaacctgctaatccggagacatctttgtttttgaatcagaagtcgcaactggcagcattcttagcaagctcaaaatctaaagagagtcttgctcagaatctcaaagaagttctccaactacttcaacaggaagtggaagaagaaccccccaagaaggaagccgaatcatccgagactaatgatgaccaagaagatgatccattctaccagaatgaagatgactgttttggtatatcgttagacgacgattaattagttttagtaatcatgaattattgtaactaatttgtcggtacctcttattaatgtaattt

SEQ ID NO: 9721 - DNA, 1054 bp, Glycine max
  Gm_smallRNAprecursor_2554
gaattcattctaatagatacaaactcagtatctattaaacagttcaaagaccccaaagatctaaatctaaatacccattccagaatccaaatcttaaaggttatgcagccacgacattgtggctcaaaattaaaccaacccaaaaaattttctgcaccatttgaccctgcaagatataattattgggattacattgacgcctggaccaatatgttctggcatcaaaatagtaaattcaagcattcatggctaatttacttcaaaaataacactgtgtataattttccaaattggttcctccaatggtggaactacttcagaccaattccacagatattcccagaagaagtccaacagggattccaacaattcaacaagctctataatagcaaggaatcacgtattccggcagatttaaagtacttttccagttttgccttgtcatggattttttcaaggcaatacagatacggaaaaaccgaaaacagcaaacagtatccaccgttgcagagacacgcctttgtaaaatggtggtcacaattcgatacttcaaaggctgctccagaacaagtcaagaacagattccagagcaatcctgagttcctcaaacctgctaatccggagacatctttgtttttgaatcagaagtcgcaactggcagcattcttagcaagctcaaaatctaaagagagtcttgctcagaatctcaaagaagttctccaactacttcaacaggaagtggaagaagaaccccccaagaaggaagccgaatcatccgagactaatgatgaccaagaagatgatccattctaccagaatgaagatgactgttttggtatatcgttagacgacgattaattagttttagtaatcatgaattattgtaactaatttgtcggtacctcttattaatgtaatttgtaaaagttttgtaacagttccggtaaacattaccgacactgtagaaacagtaaaaattgagtctatttaaaggagtcctcgttccctttgtgaggtaccctttcagatagtctcaaaaccaggttttagagag

SEQ ID NO: 9722 - DNA, 1188 bp, Glycine max
  Gm_smallRNAprecursor_2555
acgacattgtggctcaaaattaaaccaacccaaaaaattttctgcaccatttgaccctgcaagatataattattgggattacattgacgcctggaccaatatgttctggcatcaaaatagtaaattcaagcattcatggctaatttacttcaaaaataacactgtgtataattttccaaattggttcctccaatggtggaactacttcagaccaattccacagatattcccagaagaagtccaacagggattccaacaattcaacaagctctataatagcaaggaatcacgtattccggcagatttaaagtacttttccagttttgccttgtcatggattttttcaaggcaatacagatacggaaaaaccgaaaacagcaaacagtatccaccgttgcagagacacgcctttgtaaaatggtggtcacaattcgatacttcaaaggctgctccagaacaagtcaagaacagattccagagcaatcctgagttcctcaaacctgctaatccggagacatctttgtttttgaatcagaagtcgcaactggcagcattcttagcaagctcaaaatctaaagagagtcttgctcagaatctcaaagaagttctccaactacttcaacaggaagtggaagaagaaccccccaagaaggaagccgaatcatccgagactaatgatgaccaagaagatgatccattctaccagaatgaagatgactgttttggtatatcgttagacgacgattaattagttttagtaatcatgaattattgtaactaatttgtcggtacctcttattaatgtaatttgtaaaagttttgtaacagttccggtaaacattaccgacactgtagaaacagtaaaaattgagtctatttaaaggagtcctcgttccctttgtgaggtaccctttcagatagtctcaaaaccaggttttagagagagaagctctgcctaggaaaaactctttgtaagcttctatgcccatatcaattaagggcttgatggctacttgtacacaaccgatgtgtagatatttatacttacggctatgttcataaattgaattttttgaaagtaaatgaaattcttcccctatatcttgtcctagtggaatattgtttactactgttttgattatgtaatcaaagttgtatttgtcctttattgtttcaggaacgtatagt

SEQ ID NO: 9723 - DNA, 1168 bp, Glycine max
  Gm_smallRNAprecursor_2556
tatgttctggcatcaaaatagtaaattcaagcattcatggctaatttacttcaaaaataacactgtgtataattttccaaattggttcctccaatggtggaactacttcagaccaattccacagatattcccagaagaagtccaacagggattccaacaattcaacaagctctataatagcaaggaatcacgtattccggcagatttaaagtacttttccagttttgccttgtcatggattttttcaaggcaatacagatacggaaaaaccgaaaacagcaaacagtatccaccgttgcagagacacgcctttgtaaaatggtggtcacaattcgatacttcaaaggctgctccagaacaagtcaagaacagattccagagcaatcctgagttcctcaaacctgctaatccggagacatctttgtttttgaatcagaagtcgcaactggcagcattcttagcaagctcaaaatctaaagagagtcttgctcagaatctcaaagaagttctccaactacttcaacaggaagtggaagaagaaccccccaagaaggaagccgaatcatccgagactaatgatgaccaagaagatgatccattctaccagaatgaagatgactgttttggtatatcgttagacgacgattaattagttttagtaatcatgaattattgtaactaatttgtcggtacctcttattaatgtaatttgtaaaagttttgtaacagttccggtaaacattaccgacactgtagaaacagtaaaaattgagtctatttaaaggagtcctcgttccctttgtgaggtaccctttcagatagtctcaaaaccaggttttagagagagaagctctgcctaggaaaaactctttgtaagcttctatgcccatatcaattaagggcttgatggctacttgtacacaaccgatgtgtagatatttatacttacggctatgttcataaattgaattttttgaaagtaaatgaaattcttcccctatatcttgtcctagtggaatattgtttactactgttttgattatgtaatcaaagttgtatttgtcctttattgtttcaggaacgtatagttgatcctgagggatttctggaatgttccagtcatccatgttttgattgatatcttcgaatcggacttcctcatcgaaga

SEQ ID NO: 9724 - DNA, 1048 bp, Glycine max
  Gm_smallRNAprecursor_2557
ttttccaaattggttcctccaatggtggaactacttcagaccaattccacagatattcccagaagaagtccaacagggattccaacaattcaacaagctctataatagcaaggaatcacgtattccggcagatttaaagtacttttccagttttgccttgtcatggattttttcaaggcaatacagatacggaaaaaccgaaaacagcaaacagtatccaccgttgcagagacacgcctttgtaaaatggtggtcacaattcgatacttcaaaggctgctccagaacaagtcaagaacagattccagagcaatcctgagttcctcaaacctgctaatccggagacatctttgtttttgaatcagaagtcgcaactggcagcattcttagcaagctcaaaatctaaagagagtcttgctcagaatctcaaagaagttctccaactacttcaacaggaagtggaagaagaaccccccaagaaggaagccgaatcatccgagactaatgatgaccaagaagatgatccattctaccagaatgaagatgactgttttggtatatcgttagacgacgattaattagttttagtaatcatgaattattgtaactaatttgtcggtacctcttattaatgtaatttgtaaaagttttgtaacagttccggtaaacattaccgacactgtagaaacagtaaaaattgagtctatttaaaggagtcctcgttccctttgtgaggtaccctttcagatagtctcaaaaccaggttttagagagagaagctctgcctaggaaaaactctttgtaagcttctatgcccatatcaattaagggcttgatggctacttgtacacaaccgatgtgtagatatttatacttacggctatgttcataaattgaattttttgaaagtaaatgaaattcttcccctatatcttgtcctagtggaatattgtttactactgttttgattatgtaatcaaagttgtatttgtcctttattgtttcaggaacgtatagttgatcctgagggatttctggaatgttccagt

SEQ ID NO: 9725 - DNA, 1165 bp, Glycine max
  Gm_smallRNAprecursor_2558
accaattccacagatattcccagaagaagtccaacagggattccaacaattcaacaagctctataatagcaaggaatcacgtattccggcagatttaaagtacttttccagttttgccttgtcatggattttttcaaggcaatacagatacggaaaaaccgaaaacagcaaacagtatccaccgttgcagagacacgcctttgtaaaatggtggtcacaattcgatacttcaaaggctgctccagaacaagtcaagaacagattccagagcaatcctgagttcctcaaacctgctaatccggagacatctttgtttttgaatcagaagtcgcaactggcagcattcttagcaagctcaaaatctaaagagagtcttgctcagaatctcaaagaagttctccaactacttcaacaggaagtggaagaagaaccccccaagaaggaagccgaatcatccgagactaatgatgaccaagaagatgatccattctaccagaatgaagatgactgttttggtatatcgttagacgacgattaattagttttagtaatcatgaattattgtaactaatttgtcggtacctcttattaatgtaatttgtaaaagttttgtaacagttccggtaaacattaccgacactgtagaaacagtaaaaattgagtctatttaaaggagtcctcgttccctttgtgaggtaccctttcagatagtctcaaaaccaggttttagagagagaagctctgcctaggaaaaactctttgtaagcttctatgcccatatcaattaagggcttgatggctacttgtacacaaccgatgtgtagatatttatacttacggctatgttcataaattgaattttttgaaagtaaatgaaattcttcccctatatcttgtcctagtggaatattgtttactactgttttgattatgtaatcaaagttgtatttgtcctttattgtttcaggaacgtatagttgatcctgagggatttctggaatgttccagtcatccatgttttgattgatatcttcgaatcggacttcctcatcgaagagattttgttttgcggcgacctcttgggtctggttatcttgatcatttaataaattggagtttcttgaagaagatgaggaggaggagtttgagcgaaaagagatacggg

SEQ ID NO: 9726 - DNA, 1134 bp, Glycine max
  Gm_smallRNAprecursor_2559
caacagggattccaacaattcaacaagctctataatagcaaggaatcacgtattccggcagatttaaagtacttttccagttttgccttgtcatggattttttcaaggcaatacagatacggaaaaaccgaaaacagcaaacagtatccaccgttgcagagacacgcctttgtaaaatggtggtcacaattcgatacttcaaaggctgctccagaacaagtcaagaacagattccagagcaatcctgagttcctcaaacctgctaatccggagacatctttgtttttgaatcagaagtcgcaactggcagcattcttagcaagctcaaaatctaaagagagtcttgctcagaatctcaaagaagttctccaactacttcaacaggaagtggaagaagaaccccccaagaaggaagccgaatcatccgagactaatgatgaccaagaagatgatccattctaccagaatgaagatgactgttttggtatatcgttagacgacgattaattagttttagtaatcatgaattattgtaactaatttgtcggtacctcttattaatgtaatttgtaaaagttttgtaacagttccggtaaacattaccgacactgtagaaacagtaaaaattgagtctatttaaaggagtcctcgttccctttgtgaggtaccctttcagatagtctcaaaaccaggttttagagagagaagctctgcctaggaaaaactctttgtaagcttctatgcccatatcaattaagggcttgatggctacttgtacacaaccgatgtgtagatatttatacttacggctatgttcataaattgaattttttgaaagtaaatgaaattcttcccctatatcttgtcctagtggaatattgtttactactgttttgattatgtaatcaaagttgtatttgtcctttattgtttcaggaacgtatagttgatcctgagggatttctggaatgttccagtcatccatgttttgattgatatcttcgaatcggacttcctcatcgaagagattttgttttgcggcgacctcttgggtctggttatcttgatcatttaataaattggagtttcttgaagaagatgaggaggaggagtttgagcgaaaagagatacggg

SEQ ID NO: 9727 - DNA, 1039 bp, Glycine max
  Gm_smallRNAprecursor_2560
agggattccaacaattcaacaagctctataatagcaaggaatcacgtattccggcagatttaaagtacttttccagttttgccttgtcatggattttttcaaggcaatacagatacggaaaaaccgaaaacagcaaacagtatccaccgttgcagagacacgcctttgtaaaatggtggtcacaattcgatacttcaaaggctgctccagaacaagtcaagaacagattccagagcaatcctgagttcctcaaacctgctaatccggagacatctttgtttttgaatcagaagtcgcaactggcagcattcttagcaagctcaaaatctaaagagagtcttgctcagaatctcaaagaagttctccaactacttcaacaggaagtggaagaagaaccccccaagaaggaagccgaatcatccgagactaatgatgaccaagaagatgatccattctaccagaatgaagatgactgttttggtatatcgttagacgacgattaattagttttagtaatcatgaattattgtaactaatttgtcggtacctcttattaatgtaatttgtaaaagttttgtaacagttccggtaaacattaccgacactgtagaaacagtaaaaattgagtctatttaaaggagtcctcgttccctttgtgaggtaccctttcagatagtctcaaaaccaggttttagagagagaagctctgcctaggaaaaactctttgtaagcttctatgcccatatcaattaagggcttgatggctacttgtacacaaccgatgtgtagatatttatacttacggctatgttcataaattgaattttttgaaagtaaatgaaattcttcccctatatcttgtcctagtggaatattgtttactactgttttgattatgtaatcaaagttgtatttgtcctttattgtttcaggaacgtatagttgatcctgagggatttctggaatgttccagtcatccatgttttgattgatatcttcgaatcggacttcctcatcgaagagattttgttttgcggcg

SEQ ID NO: 9728 - DNA, 1097 bp, Glycine max
  Gm_smallRNAprecursor_2561
gattaattagttttagtaatcatgaattattgtaactaatttgtcggtacctcttattaatgtaatttgtaaaagttttgtaacagttccggtaaacattaccgacactgtagaaacagtaaaaattgagtctatttaaaggagtcctcgttccctttgtgaggtaccctttcagatagtctcaaaaccaggttttagagagagaagctctgcctaggaaaaactctttgtaagcttctatgcccatatcaattaagggcttgatggctacttgtacacaaccgatgtgtagatatttatacttacggctatgttcataaattgaattttttgaaagtaaatgaaattcttcccctatatcttgtcctagtggaatattgtttactactgttttgattatgtaatcaaagttgtatttgtcctttattgtttcaggaacgtatagttgatcctgagggatttctggaatgttccagtcatccatgttttgattgatatcttcgaatcggacttcctcatcgaagagattttgttttgcggcgacctcttgggtctggttatcttgatcatttaataaattggagtttcttgaagaagatgaggaggaggagtttgagcgaaaagagatacgggaaaaagatcgtaatagtctagacatgattataatattctctaatatcttttccctcatttggttccatagaaatatccccgtaagtaaatatgtcacaaaatttttctggatctgaattatttttaagaaaaactcttttttttttataaaatagtttgaacggcaatcctatagccaccagtatattatgtcttgatattttggttaaacagtacaccttagccttactaccctttatccatcacgggtcttactgctacagtaccatttaactaaaatattatatagctgtatttccaggaagtactgttcaaacatctactatacagatcaaaataaaatattactcgtattgtacaaggtttcagatcaataaaatttgtttacatatgtccttacggaccatattcctacttccccatcaggctctgataccagagatatgcccttgatacggtactgt

SEQ ID NO: 9729 - DNA, 1096 bp, Glycine max
  Gm_smallRNAprecursor_2562
attaattagttttagtaatcatgaattattgtaactaatttgtcggtacctcttattaatgtaatttgtaaaagttttgtaacagttccggtaaacattaccgacactgtagaaacagtaaaaattgagtctatttaaaggagtcctcgttccctttgtgaggtaccctttcagatagtctcaaaaccaggttttagagagagaagctctgcctaggaaaaactctttgtaagcttctatgcccatatcaattaagggcttgatggctacttgtacacaaccgatgtgtagatatttatacttacggctatgttcataaattgaattttttgaaagtaaatgaaattcttcccctatatcttgtcctagtggaatattgtttactactgttttgattatgtaatcaaagttgtatttgtcctttattgtttcaggaacgtatagttgatcctgagggatttctggaatgttccagtcatccatgttttgattgatatcttcgaatcggacttcctcatcgaagagattttgttttgcggcgacctcttgggtctggttatcttgatcatttaataaattggagtttcttgaagaagatgaggaggaggagtttgagcgaaaagagatacgggaaaaagatcgtaatagtctagacatgattataatattctctaatatcttttccctcatttggttccatagaaatatccccgtaagtaaatatgtcacaaaatttttctggatctgaattatttttaagaaaaactcttttttttttataaaatagtttgaacggcaatcctatagccaccagtatattatgtcttgatattttggttaaacagtacaccttagccttactaccctttatccatcacgggtcttactgctacagtaccatttaactaaaatattatatagctgtatttccaggaagtactgttcaaacatctactatacagatcaaaataaaatattactcgtattgtacaaggtttcagatcaataaaatttgtttacatatgtccttacggaccatattcctacttccccatcaggctctgataccagagatatgcccttgatacggtactgt

SEQ ID NO: 9730 - DNA, 1096 bp, Glycine max; identical to SEQ ID NO: 9729
  Gm_smallRNAprecursor_2563

SEQ ID NO: 9731 - DNA, 1179 bp, Glycine max
  Gm_smallRNAprecursor_2564
actgtagaaacagtaaaaattgagtctatttaaaggagtcctcgttccctttgtgaggtaccctttcagatagtctcaaaaccaggttttagagagagaagctctgcctaggaaaaactctttgtaagcttctatgcccatatcaattaagggcttgatggctacttgtacacaaccgatgtgtagatatttatacttacggctatgttcataaattgaattttttgaaagtaaatgaaattcttcccctatatcttgtcctagtggaatattgtttactactgttttgattatgtaatcaaagttgtatttgtcctttattgtttcaggaacgtatagttgatcctgagggatttctggaatgttccagtcatccatgttttgattgatatcttcgaatcggacttcctcatcgaagagattttgttttgcggcgacctcttgggtctggttatcttgatcatttaataaattggagtttcttgaagaagatgaggaggaggagtttgagcgaaaagagatacgggaaaaagatcgtaatagtctagacatgattataatattctctaatatcttttccctcatttggttccatagaaatatccccgtaagtaaatatgtcacaaaatttttctggatctgaattatttttaagaaaaactcttttttttttataaaatagtttgaacggcaatcctatagccaccagtatattatgtcttgatattttggttaaacagtacaccttagccttactaccctttatccatcacgggtcttactgctacagtaccatttaactaaaatattatatagctgtatttccaggaagtactgttcaaacatctactatacagatcaaaataaaatattactcgtattgtacaaggtttcagatcaataaaatttgtttacatatgtccttacggaccatattcctacttccccatcaggctctgataccagagatatgcccttgatacggtactgtaggaatatggtattgtaactaatatataggccttagaagatataggcctcaccaaagtaccaaaattggccaaaaagacctgggcagaaatggcctcagaataagatgatgattctaaaacagatctgcaaaaacaaatccaaaaggccaaacagaccaaaactgtctgtaaccaaacaccaagccaa

SEQ ID NO: 9732 - DNA, 1180 bp, Glycine max
  Gm_smallRNAprecursor_2565
actgtagaaacagtaaaaattgagtctatttaaaggagtcctcgttccctttgtgaggtaccctttcagatagtctcaaaaccaggttttagagagagaagctctgcctaggaaaaactctttgtaagcttctatgcccatatcaattaagggcttgatggctacttgtacacaaccgatgtgtagatatttatacttacggctatgttcataaattgaattttttgaaagtaaatgaaattcttcccctatatcttgtcctagtggaatattgtttactactgttttgattatgtaatcaaagttgtatttgtcctttattgtttcaggaacgtatagttgatcctgagggatttctggaatgttccagtcatccatgttttgattgatatcttcgaatcggacttcctcatcgaagagattttgttttgcggcgacctcttgggtctggttatcttgatcatttaataaattggagtttcttgaagaagatgaggaggaggagtttgagcgaaaagagatacgggaaaaagatcgtaatagtctagacatgattataatattctctaatatcttttccctcatttggttccatagaaatatccccgtaagtaaatatgtcacaaaatttttctggatctgaattatttttaagaaaaactcttttttttttataaaatagtttgaacggcaatcctatagccaccagtatattatgtcttgatattttggttaaacagtacaccttagccttactaccctttatccatcacgggtcttactgctacagtaccatttaactaaaatattatatagctgtatttccaggaagtactgttcaaacatctactatacagatcaaaataaaatattactcgtattgtacaaggtttcagatcaataaaatttgtttacatatgtccttacggaccatattcctacttccccatcaggctctgataccagagatatgcccttgatacggtactgtaggaatatggtattgtaactaatatataggccttagaagatataggcctcaccaaagtaccaaaattggccaaaaagacctgggcagaaatggcctcagaataagatgatgattctaaaacagatctgcaaaaacaaatccaaaaggccaaacagaccaaaactgtctgtaaccaaacaccaagccaat

SEQ ID NO: 9733 - DNA, 1105 bp, Glycine max
  Gm_smallRNAprecursor_2566
agaaacagtaaaaattgagtctatttaaaggagtcctcgttccctttgtgaggtaccctttcagatagtctcaaaaccaggttttagagagagaagctctgcctaggaaaaactctttgtaagcttctatgcccatatcaattaagggcttgatggctacttgtacacaaccgatgtgtagatatttatacttacggctatgttcataaattgaattttttgaaagtaaatgaaattcttcccctatatcttgtcctagtggaatattgtttactactgttttgattatgtaatcaaagttgtatttgtcctttattgtttcaggaacgtatagttgatcctgagggatttctggaatgttccagtcatccatgttttgattgatatcttcgaatcggacttcctcatcgaagagattttgttttgcggcgacctcttgggtctggttatcttgatcatttaataaattggagtttcttgaagaagatgaggaggaggagtttgagcgaaaagagatacgggaaaaagatcgtaatagtctagacatgattataatattctctaatatcttttccctcatttggttccatagaaatatccccgtaagtaaatatgtcacaaaatttttctggatctgaattatttttaagaaaaactcttttttttttataaaatagtttgaacggcaatcctatagccaccagtatattatgtcttgatattttggttaaacagtacaccttagccttactaccctttatccatcacgggtcttactgctacagtaccatttaactaaaatattatatagctgtatttccaggaagtactgttcaaacatctactatacagatcaaaataaaatattactcgtattgtacaaggtttcagatcaataaaatttgtttacatatgtccttacggaccatattcctacttccccatcaggctctgataccagagatatgcccttgatacggtactgtaggaatatggtattgtaactaatatataggccttagaagatataggcctcaccaaagtaccaaaattggccaaaaagacctgggcagaaatggcctcagaataagatgatgattctaaa

SEQ ID NO: 9734 - DNA, 1149 bp, Glycine max
  Gm_smallRNAprecursor_2567
atgtgtagatatttatacttacggctatgttcataaattgaattttttgaaagtaaatgaaattcttcccctatatcttgtcctagtggaatattgtttactactgttttgattatgtaatcaaagttgtatttgtcctttattgtttcaggaacgtatagttgatcctgagggatttctggaatgttccagtcatccatgttttgattgatatcttcgaatcggacttcctcatcgaagagattttgttttgcggcgacctcttgggtctggttatcttgatcatttaataaattggagtttcttgaagaagatgaggaggaggagtttgagcgaaaagagatacgggaaaaagatcgtaatagtctagacatgattataatattctctaatatcttttccctcatttggttccatagaaatatccccgtaagtaaatatgtcacaaaatttttctggatctgaattatttttaagaaaaactcttttttttttataaaatagtttgaacggcaatcctatagccaccagtatattatgtcttgatattttggttaaacagtacaccttagccttactaccctttatccatcacgggtcttactgctacagtaccatttaactaaaatattatatagctgtatttccaggaagtactgttcaaacatctactatacagatcaaaataaaatattactcgtattgtacaaggtttcagatcaataaaatttgtttacatatgtccttacggaccatattcctacttccccatcaggctctgataccagagatatgcccttgatacggtactgtaggaatatggtattgtaactaatatataggccttagaagatataggcctcaccaaagtaccaaaattggccaaaaagacctgggcagaaatggcctcagaataagatgatgattctaaaacagatctgcaaaaacaaatccaaaaggccaaacagaccaaaactgtctgtaaccaaacaccaagccaatcgttgactcaacaagaatcaacgccacaacccagcaacagttatatttccaaaaacaaatttttcaatgttttacaaatggaaccagaatactgggacaagaatcctttcaaagcaaccgccaaagtattccccccgggattccatt

SEQ ID NO: 9735 - DNA, 1086 bp, Glycine max
  Gm_smallRNAprecursor_2568
cgaagagattttgttttgcggcgacctcttgggtctggttatcttgatcatttaataaattggagtttcttgaagaagatgaggaggaggagtttgagcgaaaagagatacgggaaaaagatcgtaatagtctagacatgattataatattctctaatatcttttccctcatttggttccatagaaatatccccgtaagtaaatatgtcacaaaatttttctggatctgaattatttttaagaaaaactcttttttttttataaaatagtttgaacggcaatcctatagccaccagtatattatgtcttgatattttggttaaacagtacaccttagccttactaccctttatccatcacgggtcttactgctacagtaccatttaactaaaatattatatagctgtatttccaggaagtactgttcaaacatctactatacagatcaaaataaaatattactcgtattgtacaaggtttcagatcaataaaatttgtttacatatgtccttacggaccatattcctacttccccatcaggctctgataccagagatatgcccttgatacggtactgtaggaatatggtattgtaactaatatataggccttagaagatataggcctcaccaaagtaccaaaattggccaaaaagacctgggcagaaatggcctcagaataagatgatgattctaaaacagatctgcaaaaacaaatccaaaaggccaaacagaccaaaactgtctgtaaccaaacaccaagccaatcgttgactcaacaagaatcaacgccacaacccagcaacagttatatttccaaaaacaaatttttcaatgttttacaaatggaaccagaatactgggacaagaatcctttcaaagcaaccgccaaagtattccccccgggattccattacaggccaacagccacaaacaaaacccgcaaattctacgaattcattctaatagatacaaactcagtatctattaaacagttcaaagaccccaaagatctaaatctaaatacccattccagaatccaaatcttaaaggttatgcagccacgacattgtggctcaaaattaaa

SEQ ID NO: 9736 - DNA, 1094 bp, Glycine max
  Gm_smallRNAprecursor_2569
atttaataaattggagtttcttgaagaagatgaggaggaggagtttgagcgaaaagagatacgggaaaaagatcgtaatagtctagacatgattataatattctctaatatcttttccctcatttggttccatagaaatatccccgtaagtaaatatgtcacaaaatttttctggatctgaattatttttaagaaaaactcttttttttttataaaatagtttgaacggcaatcctatagccaccagtatattatgtcttgatattttggttaaacagtacaccttagccttactaccctttatccatcacgggtcttactgctacagtaccatttaactaaaatattatatagctgtatttccaggaagtactgttcaaacatctactatacagatcaaaataaaatattactcgtattgtacaaggtttcagatcaataaaatttgtttacatatgtccttacggaccatattcctacttccccatcaggctctgataccagagatatgcccttgatacggtactgtaggaatatggtattgtaactaatatataggccttagaagatataggcctcaccaaagtaccaaaattggccaaaaagacctgggcagaaatggcctcagaataagatgatgattctaaaacagatctgcaaaaacaaatccaaaaggccaaacagaccaaaactgtctgtaaccaaacaccaagccaatcgttgactcaacaagaatcaacgccacaacccagcaacagttatatttccaaaaacaaatttttcaatgttttacaaatggaaccagaatactgggacaagaatcctttcaaagcaaccgccaaagtattccccccgggattccattacaggccaacagccacaaacaaaacccgcaaattctacgaattcattctaatagatacaaactcagtatctattaaacagttcaaagaccccaaagatctaaatctaaatacccattccagaatccaaatcttaaaggttatgcagccacgacattgtggctcaaaattaaaccaacccaaaaaattttctgcaccatttgaccctgcaagatataattattgggatta

SEQ ID NO: 9737 - DNA, 1174 bp, Glycine max
  Gm_smallRNAprecursor_2570
tataatattctctaatatcttttccctcatttggttccatagaaatatccccgtaagtaaatatgtcacaaaatttttctggatctgaattatttttaagaaaaactcttttttttttataaaatagtttgaacggcaatcctatagccaccagtatattatgtcttgatattttggttaaacagtacaccttagccttactaccctttatccatcacgggtcttactgctacagtaccatttaactaaaatattatatagctgtatttccaggaagtactgttcaaacatctactatacagatcaaaataaaatattactcgtattgtacaaggtttcagatcaataaaatttgtttacatatgtccttacggaccatattcctacttccccatcaggctctgataccagagatatgcccttgatacggtactgtaggaatatggtattgtaactaatatataggccttagaagatataggcctcaccaaagtaccaaaattggccaaaaagacctgggcagaaatggcctcagaataagatgatgattctaaaacagatctgcaaaaacaaatccaaaaggccaaacagaccaaaactgtctgtaaccaaacaccaagccaatcgttgactcaacaagaatcaacgccacaacccagcaacagttatatttccaaaaacaaatttttcaatgttttacaaatggaaccagaatactgggacaagaatcctttcaaagcaaccgccaaagtattccccccgggattccattacaggccaacagccacaaacaaaacccgcaaattctacgaattcattctaatagatacaaactcagtatctattaaacagttcaaagaccccaaagatctaaatctaaatacccattccagaatccaaatcttaaaggttatgcagccacgacattgtggctcaaaattaaaccaacccaaaaaattttctgcaccatttgaccctgcaagatataattattgggattacattgacgcctggaccaatatgttctggcatcaaaatagtaaattcaagcattcatggctaatttacttcaaaaataacactgtgtataattttccaaattggttcctccaatggtggaactacttcagaccaattccacagatattcccagaagaagtccaacagggattcc

SEQ ID NO: 9738 - DNA, 1073 bp, Glycine max
  Gm_smallRNAprecursor_2571
cttactaccctttatccatcacgggtcttactgctacagtaccatttaactaaaatattatatagctgtatttccaggaagtactgttcaaacatctactatacagatcaaaataaaatattactcgtattgtacaaggtttcagatcaataaaatttgtttacatatgtccttacggaccatattcctacttccccatcaggctctgataccagagatatgcccttgatacggtactgtaggaatatggtattgtaactaatatataggccttagaagatataggcctcaccaaagtaccaaaattggccaaaaagacctgggcagaaatggcctcagaataagatgatgattctaaaacagatctgcaaaaacaaatccaaaaggccaaacagaccaaaactgtctgtaaccaaacaccaagccaatcgttgactcaacaagaatcaacgccacaacccagcaacagttatatttccaaaaacaaatttttcaatgttttacaaatggaaccagaatactgggacaagaatcctttcaaagcaaccgccaaagtattccccccgggattccattacaggccaacagccacaaacaaaacccgcaaattctacgaattcattctaatagatacaaactcagtatctattaaacagttcaaagaccccaaagatctaaatctaaatacccattccagaatccaaatcttaaaggttatgcagccacgacattgtggctcaaaattaaaccaacccaaaaaattttctgcaccatttgaccctgcaagatataattattgggattacattgacgcctggaccaatatgttctggcatcaaaatagtaaattcaagcattcatggctaatttacttcaaaaataacactgtgtataattttccaaattggttcctccaatggtggaactacttcagaccaattccacagatattcccagaagaagtccaacagggattccaacaattcaacaagctctataatagcaaggaatcacgtattccggcagatttaaagtacttttccagttttgccttgtcatggattttttcaagg

SEQ ID NO: 9739 - DNA, 1057 bp, Glycine max; identical to SEQ ID NO: 9720
  Gm_smallRNAprecursor_2572

SEQ ID NO: 9740 - DNA, 1054 bp, Glycine max; identical to SEQ ID NO: 9721
  Gm_smallRNAprecursor_2573

SEQ ID NO: 9741 - DNA, 1188 bp, Glycine max
  Gm_smallRNAprecursor_2574
acgacattgtggctcaaaattaaaccaacccaaaaaattttctgcaccatttgaccctgcaagatataattattgggattacattgacgcctggaccaatatgttctggcatcaaaatagtaaattcaagcattcatggctaatttacttcaaaaataacactgtgtataattttccaaattggttcctccaatggtggaactacttcagaccaattccacagatattcccagaagaagtccaacagggattccaacaattcaacaagctctataatagcaaggaatcacgtattccggcagatttaaagtacttttccagttttgccttgtcatggattttttcaaggcaatacagatacggaaaaaccgaaaacagcaaacagtatccaccgttgcagagacacgcctttgtaaaatggtggtcacaattcgatacttcaaaggctgctccagaacaagtcaagaacagattccagagcaatcctgagttcctcaaacctgctaatccggagacatctttgtttttgaatcagaagtcgcaactggcagcattcttagcaagctcaaaatctaaagagagtcttgctcagaatctcaaagaagttctccaactacttcaacaggaagtggaagaagaaccccccaagaaggaagccgaatcatccgagactaatgatgaccaagaagatgatccattctaccagaatgaagatgactgttttggtatatcgttagacgacgattaattagttttagtaatcatgaattattgtaactaatttgtcggtacctcttattaatgtaatttgtaaaagttttgtaacagttccggtaaacattaccgacactgtagaaacagtaaaaattgagtctatttaaaggagtcctcgttccctttgtgaggtaccctttcagatagtctcaaaaccaggttttagagagagaagctctgcctaggaaaaactctttgtaagcttctatgcccatatcaattaagggcttgatggctacttgtacacaaccgatgtgtagatatttatacttacggctatgttcataaattgaattttttgaaagtaaatgaaattcttcccctatatcttgtcctagtggaatattgtttactactgctttgattatgtaatcaaagttgtatttgtcctttattgtttcaggaacgtatagt

SEQ ID NO: 9742 - DNA, 1168 bp, Glycine max
  Gm_smallRNAprecursor_2575
tatgttctggcatcaaaatagtaaattcaagcattcatggctaatttacttcaaaaataacactgtgtataattttccaaattggttcctccaatggtggaactacttcagaccaattccacagatattcccagaagaagtccaacagggattccaacaattcaacaagctctataatagcaaggaatcacgtattccggcagatttaaagtacttttccagttttgccttgtcatggattttttcaaggcaatacagatacggaaaaaccgaaaacagcaaacagtatccaccgttgcagagacacgcctttgtaaaatggtggtcacaattcgatacttcaaaggctgctccagaacaagtcaagaacagattccagagcaatcctgagttcctcaaacctgctaatccggagacatctttgtttttgaatcagaagtcgcaactggcagcattcttagcaagctcaaaatctaaagagagtcttgctcagaatctcaaagaagttctccaactacttcaacaggaagtggaagaagaaccccccaagaaggaagccgaatcatccgagactaatgatgaccaagaagatgatccattctaccagaatgaagatgactgttttggtatatcgttagacgacgattaattagttttagtaatcatgaattattgtaactaatttgtcggtacctcttattaatgtaatttgtaaaagttttgtaacagttccggtaaacattaccgacactgtagaaacagtaaaaattgagtctatttaaaggagtcctcgttccctttgtgaggtaccctttcagatagtctcaaaaccaggttttagagagagaagctctgcctaggaaaaactctttgtaagcttctatgcccatatcaattaagggcttgatggctacttgtacacaaccgatgtgtagatatttatacttacggctatgttcataaattgaattttttgaaagtaaatgaaattcttcccctatatcttgtcctagtggaatattgtttactactgctttgattatgtaatcaaagttgtatttgtcctttattgtttcaggaacgtatagttgatcctgagggatttctggaatgttccagtcatccatgttttgattgatatcttcgaatcggacttcctcatcgaaga

SEQ ID NO: 9743 - DNA, 1048 bp, Glycine max
  Gm_smallRNAprecursor_2576
ttttccaaattggttcctccaatggtggaactacttcagaccaattccacagatattcccagaagaagtccaacagggattccaacaattcaacaagctctataatagcaaggaatcacgtattccggcagatttaaagtacttttccagttttgccttgtcatggattttttcaaggcaatacagatacggaaaaaccgaaaacagcaaacagtatccaccgttgcagagacacgcctttgtaaaatggtggtcacaattcgatacttcaaaggctgctccagaacaagtcaagaacagattccagagcaatcctgagttcctcaaacctgctaatccggagacatctttgtttttgaatcagaagtcgcaactggcagcattcttagcaagctcaaaatctaaagagagtcttgctcagaatctcaaagaagttctccaactacttcaacaggaagtggaagaagaaccccccaagaaggaagccgaatcatccgagactaatgatgaccaagaagatgatccattctaccagaatgaagatgactgttttggtatatcgttagacgacgattaattagttttagtaatcatgaattattgtaactaatttgtcggtacctcttattaatgtaatttgtaaaagttttgtaacagttccggtaaacattaccgacactgtagaaacagtaaaaattgagtctatttaaaggagtcctcgttccctttgtgaggtaccctttcagatagtctcaaaaccaggttttagagagagaagctctgcctaggaaaaactctttgtaagcttctatgcccatatcaattaagggcttgatggctacttgtacacaaccgatgtgtagatatttatacttacggctatgttcataaattgaattttttgaaagtaaatgaaattcttcccctatatcttgtcctagtggaatattgtttactactgctttgattatgtaatcaaagttgtatttgtcctttattgtttcaggaacgtatagttgatcctgagggatttctggaatgttccagt

SEQ ID NO: 9744 - DNA, 1165 bp, Glycine max
  Gm_smallRNAprecursor_2577
accaattccacagatattcccagaagaagtccaacagggattccaacaattcaacaagctctataatagcaaggaatcacgtattccggcagatttaaagtacttttccagttttgccttgtcatggattttttcaaggcaatacagatacggaaaaaccgaaaacagcaaacagtatccaccgttgcagagacacgcctttgtaaaatggtggtcacaattcgatacttcaaaggctgctccagaacaagtcaagaacagattccagagcaatcctgagttcctcaaacctgctaatccggagacatctttgtttttgaatcagaagtcgcaactggcagcattcttagcaagctcaaaatctaaagagagtcttgctcagaatctcaaagaagttctccaactacttcaacaggaagtggaagaagaaccccccaagaaggaagccgaatcatccgagactaatgatgaccaagaagatgatccattctaccagaatgaagatgactgttttggtatatcgttagacgacgattaattagttttagtaatcatgaattattgtaactaatttgtcggtacctcttattaatgtaatttgtaaaagttttgtaacagttccggtaaacattaccgacactgtagaaacagtaaaaattgagtctatttaaaggagtcctcgttccctttgtgaggtaccctttcagatagtctcaaaaccaggttttagagagagaagctctgcctaggaaaaactctttgtaagcttctatgcccatatcaattaagggcttgatggctacttgtacacaaccgatgtgtagatatttatacttacggctatgttcataaattgaattttttgaaagtaaatgaaattcttcccctatatcttgtcctagtggaatattgtttactactgctttgattatgtaatcaaagttgtatttgtcctttattgtttcaggaacgtatagttgatcctgagggatttctggaatgttccagtcatccatgttttgattgatatcttcgaatcggacttcctcatcgaagagattttgttttgcggcgacctcttgggtctggttatcttgatcatttaataaattggagtttcttgaagaagatgaggaggaggagtttgagcgaaaagagatacggg

SEQ ID NO: 9745 - DNA, 1134 bp, Glycine max
  Gm_smallRNAprecursor_2578
caacagggattccaacaattcaacaagctctataatagcaaggaatcacgtattccggcagatttaaagtacttttccagttttgccttgtcatggattttttcaaggcaatacagatacggaaaaaccgaaaacagcaaacagtatccaccgttgcagagacacgcctttgtaaaatggtggtcacaattcgatacttcaaaggctgctccagaacaagtcaagaacagattccagagcaatcctgagttcctcaaacctgctaatccggagacatctttgtttttgaatcagaagtcgcaactggcagcattcttagcaagctcaaaatctaaagagagtcttgctcagaatctcaaagaagttctccaactacttcaacaggaagtggaagaagaaccccccaagaaggaagccgaatcatccgagactaatgatgaccaagaagatgatccattctaccagaatgaagatgactgttttggtatatcgttagacgacgattaattagttttagtaatcatgaattattgtaactaatttgtcggtacctcttattaatgtaatttgtaaaagttttgtaacagttccggtaaacattaccgacactgtagaaacagtaaaaattgagtctatttaaaggagtcctcgttccctttgtgaggtaccctttcagatagtctcaaaaccaggttttagagagagaagctctgcctaggaaaaactctttgtaagcttctatgcccatatcaattaagggcttgatggctacttgtacacaaccgatgtgtagatatttatacttacggctatgttcataaattgaattttttgaaagtaaatgaaattcttcccctatatcttgtcctagtggaatattgtttactactgctttgattatgtaatcaaagttgtatttgtcctttattgtttcaggaacgtatagttgatcctgagggatttctggaatgttccagtcatccatgttttgattgatatcttcgaatcggacttcctcatcgaagagattttgttttgcggcgacctcttgggtctggttatcttgatcatttaataaattggagtttcttgaagaagatgaggaggaggagtttgagcgaaaagagatacggg

SEQ ID NO: 9746 - DNA, 1039 bp, Glycine max
  Gm_smallRNAprecursor_2579
agggattccaacaattcaacaagctctataatagcaaggaatcacgtattccggcagatttaaagtacttttccagttttgccttgtcatggattttttcaaggcaatacagatacggaaaaaccgaaaacagcaaacagtatccaccgttgcagagacacgcctttgtaaaatggtggtcacaattcgatacttcaaaggctgctccagaacaagtcaagaacagattccagagcaatcctgagttcctcaaacctgctaatccggagacatctttgtttttgaatcagaagtcgcaactggcagcattcttagcaagctcaaaatctaaagagagtcttgctcagaatctcaaagaagttctccaactacttcaacaggaagtggaagaagaaccccccaagaaggaagccgaatcatccgagactaatgatgaccaagaagatgatccattctaccagaatgaagatgactgttttggtatatcgttagacgacgattaattagttttagtaatcatgaattattgtaactaatttgtcggtacctcttattaatgtaatttgtaaaagttttgtaacagttccggtaaacattaccgacactgtagaaacagtaaaaattgagtctatttaaaggagtcctcgttccctttgtgaggtaccctttcagatagtctcaaaaccaggttttagagagagaagctctgcctaggaaaaactctttgtaagcttctatgcccatatcaattaagggcttgatggctacttgtacacaaccgatgtgtagatatttatacttacggctatgttcataaattgaattttttgaaagtaaatgaaattcttcccctatatcttgtcctagtggaatattgtttactactgctttgattatgtaatcaaagttgtatttgtcctttattgtttcaggaacgtatagttgatcctgagggatttctggaatgttccagtcatccatgttttgattgatatcttcgaatcggacttcctcatcgaagagattttgttttgcggcg

SEQ ID NO: 9747 - DNA, 1097 bp, Glycine max
  Gm_smallRNAprecursor_2580
gattaattagttttagtaatcatgaattattgtaactaatttgtcggtacctcttattaatgtaatttgtaaaagttttgtaacagttccggtaaacattaccgacactgtagaaacagtaaaaattgagtctatttaaaggagtcctcgttccctttgtgaggtaccctttcagatagtctcaaaaccaggttttagagagagaagctctgcctaggaaaaactctttgtaagcttctatgcccatatcaattaagggcttgatggctacttgtacacaaccgatgtgtagatatttatacttacggctatgttcataaattgaattttttgaaagtaaatgaaattcttcccctatatcttgtcctagtggaatattgtttactactgctttgattatgtaatcaaagttgtatttgtcctttattgtttcaggaacgtatagttgatcctgagggatttctggaatgttccagtcatccatgttttgattgatatcttcgaatcggacttcctcatcgaagagattttgttttgcggcgacctcttgggtctggttatcttgatcatttaataaattggagtttcttgaagaagatgaggaggaggagtttgagcgaaaagagatacgggaaaaagatcgtaatagtctagacatgattataatattctctaatatcttttccctcatttggttccatagaaatatccccgtaagtaaatatgtcacaaaatttttctggatctgaattatttttaagaaaaaactctttttttttttataaaatagtttgaacggcaatcctatagccaccagtatattatgtcttgatattttggttaaacagtacaccttagccttactaccctttatccatcacgggtcttactgctacagtaccatttaactaaaatattatatagctgtatttccaggaagtactgttcaaacatctactatacagatcaaaataaaatattactcatattgtacaaggtttcagatcaataaaatttgtttacatatgtccttacggaccatattcctacttccccatcaggctctgataccagagatatgcccttgatacggtact

SEQ ID NO: 9748 - DNA, 1096 bp, Glycine max
  Gm_smallRNAprecursor_2581
attaattagttttagtaatcatgaattattgtaactaatttgtcggtacctcttattaatgtaatttgtaaaagttttgtaacagttccggtaaacattaccgacactgtagaaacagtaaaaattgagtctatttaaaggagtcctcgttccctttgtgaggtaccctttcagatagtctcaaaaccaggttttagagagagaagctctgcctaggaaaaactctttgtaagcttctatgcccatatcaattaagggcttgatggctacttgtacacaaccgatgtgtagatatttatacttacggctatgttcataaattgaattttttgaaagtaaatgaaattcttcccctatatcttgtcctagtggaatattgtttactactgctttgattatgtaatcaaagttgtatttgtcctttattgtttcaggaacgtatagttgatcctgagggatttctggaatgttccagtcatccatgttttgattgatatcttcgaatcggacttcctcatcgaagagattttgttttgcggcgacctcttgggtctggttatcttgatcatttaataaattggagtttcttgaagaagatgaggaggaggagtttgagcgaaaagagatacgggaaaaagatcgtaatagtctagacatgattataatattctctaatatcttttccctcatttggttccatagaaatatccccgtaagtaaatatgtcacaaaatttttctggatctgaattatttttaagaaaaaactctttttttttttataaaatagtttgaacggcaatcctatagccaccagtatattatgtcttgatattttggttaaacagtacaccttagccttactaccctttatccatcacgggtcttactgctacagtaccatttaactaaaatattatatagctgtatttccaggaagtactgttcaaacatctactatacagatcaaaataaaatattactcatattgtacaaggtttcagatcaataaaatttgtttacatatgtccttacggaccatattcctacttccccatcaggctctgataccagagatatgcccttgatacggtact

SEQ ID NO: 9749 - DNA, 1096 bp, Glycine max; identical to SEQ ID NO: 9748
  Gm_smallRNAprecursor_2582

SEQ ID NO: 9750 - DNA, 1181 bp, Glycine max
  Gm_smallRNAprecursor_2583
actgtagaaacagtaaaaattgagtctatttaaaggagtcctcgttccctttgtgaggtaccctttcagatagtctcaaaaccaggttttagagagagaagctctgcctaggaaaaactctttgtaagcttctatgcccatatcaattaagggcttgatggctacttgtacacaaccgatgtgtagatatttatacttacggctatgttcataaattgaattttttgaaagtaaatgaaattcttcccctatatcttgtcctagtggaatattgtttactactgctttgattatgtaatcaaagttgtatttgtcctttattgtttcaggaacgtatagttgatcctgagggatttctggaatgttccagtcatccatgttttgattgatatcttcgaatcggacttcctcatcgaagagattttgttttgcggcgacctcttgggtctggttatcttgatcatttaataaattggagtttcttgaagaagatgaggaggaggagtttgagcgaaaagagatacgggaaaaagatcgtaatagtctagacatgattataatattctctaatatcttttccctcatttggttccatagaaatatccccgtaagtaaatatgtcacaaaatttttctggatctgaattatttttaagaaaaaactctttttttttttataaaatagtttgaacggcaatcctatagccaccagtatattatgtcttgatattttggttaaacagtacaccttagccttactaccctttatccatcacgggtcttactgctacagtaccatttaactaaaatattatatagctgtatttccaggaagtactgttcaaacatctactatacagatcaaaataaaatattactcatattgtacaaggtttcagatcaataaaatttgtttacatatgtccttacggaccatattcctacttccccatcaggctctgataccagagatatgcccttgatacggtactgtaggaatatggtattgtaactaatatataggccttagaagatataggcctcaccaaagtaccaaaattggccaaaaagacctgggcagaaatggcctcagaataagatgatgattctaaaacagatctgcaaaaacaaatccaaaaggccaaacagaccaaaactgtctgtaaccaaacaccaagccaa

SEQ ID NO: 9751 - DNA, 1182 bp, Glycine max
  Gm_smallRNAprecursor_2584
actgtagaaacagtaaaaattgagtctatttaaaggagtcctcgttccctttgtgaggtaccctttcagatagtctcaaaaccaggttttagagagagaagctctgcctaggaaaaactctttgtaagcttctatgcccatatcaattaagggcttgatggctacttgtacacaaccgatgtgtagatatttatacttacggctatgttcataaattgaattttttgaaagtaaatgaaattcttcccctatatcttgtcctagtggaatattgtttactactgctttgattatgtaatcaaagttgtatttgtcctttattgtttcaggaacgtatagttgatcctgagggatttctggaatgttccagtcatccatgttttgattgatatcttcgaatcggacttcctcatcgaagagattttgttttgcggcgacctcttgggtctggttatcttgatcatttaataaattggagtttcttgaagaagatgaggaggaggagtttgagcgaaaagagatacgggaaaaagatcgtaatagtctagacatgattataatattctctaatatcttttccctcatttggttccatagaaatatccccgtaagtaaatatgtcacaaaatttttctggatctgaattatttttaagaaaaaactctttttttttttataaaatagtttgaacggcaatcctatagccaccagtatattatgtcttgatattttggttaaacagtacaccttagccttactaccctttatccatcacgggtcttactgctacagtaccatttaactaaaatattatatagctgtatttccaggaagtactgttcaaacatctactatacagatcaaaataaaatattactcatattgtacaaggtttcagatcaataaaatttgtttacatatgtccttacggaccatattcctacttccccatcaggctctgataccagagatatgcccttgatacggtactgtaggaatatggtattgtaactaatatataggccttagaagatataggcctcaccaaagtaccaaaattggccaaaaagacctgggcagaaatggcctcagaataagatgatgattctaaaacagatctgcaaaaacaaatccaaaaggccaaacagaccaaaactgtctgtaaccaaacaccaagccaat

SEQ ID NO: 9752 - DNA, 1105 bp, Glycine max
  Gm_smallRNAprecursor_2585
agaaacagtaaaaattgagtctatttaaaggagtcctcgttccctttgtgaggtaccctttcagatagtctcaaaaccaggttttagagagagaagctctgcctaggaaaaactctttgtaagcttctatgcccatatcaattaagggcttgatggctacttgtacacaaccgatgtgtagatatttatacttacggctatgttcataaattgaattttttgaaagtaaatgaaattcttcccctatatcttgtcctagtggaatattgtttactactgctttgattatgtaatcaaagttgtatttgtcctttattgtttcaggaacgtatagttgatcctgagggatttctggaatgttccagtcatccatgttttgattgatatcttcgaatcggacttcctcatcgaagagattttgttttgcggcgacctcttgggtctggttatcttgatcatttaataaattggagtttcttgaagaagatgaggaggaggagtttgagcgaaaagagatacgggaaaaagatcgtaatagtctagacatgattataatattctctaatatcttttccctcatttggttccatagaaatatccccgtaagtaaatatgtcacaaaatttttctggatctgaattatttttaagaaaaaactctttttttttttataaaatagtttgaacggcaatcctatagccaccagtatattatgtcttgatattttggttaaacagtacaccttagccttactaccctttatccatcacgggtcttactgctacagtaccatttaactaaaatattatatagctgtatttccaggaagtactgttcaaacatctactatacagatcaaaataaaatattactcatattgtacaaggtttcagatcaataaaatttgtttacatatgtccttacggaccatattcctacttccccatcaggctctgataccagagatatgcccttgatacggtactgtaggaatatggtattgtaactaatatataggccttagaagatataggcctcaccaaagtaccaaaattggccaaaaagacctgggcagaaatggcctcagaataagatgatgattcta

SEQ ID NO: 9753 - DNA, 1149 bp, Glycine max
  Gm_smallRNAprecursor_2586
gtgtagatatttatacttacggctatgttcataaattgaattttttgaaagtaaatgaaattcttcccctatatcttgtcctagtggaatattgtttactactgctttgattatgtaatcaaagttgtatttgtcctttattgtttcaggaacgtatagttgatcctgagggatttctggaatgttccagtcatccatgttttgattgatatcttcgaatcggacttcctcatcgaagagattttgttttgcggcgacctcttgggtctggttatcttgatcatttaataaattggagtttcttgaagaagatgaggaggaggagtttgagcgaaaagagatacgggaaaaagatcgtaatagtctagacatgattataatattctctaatatcttttccctcatttggttccatagaaatatccccgtaagtaaatatgtcacaaaatttttctggatctgaattatttttaagaaaaaactctttttttttttataaaatagtttgaacggcaatcctatagccaccagtatattatgtcttgatattttggttaaacagtacaccttagccttactaccctttatccatcacgggtcttactgctacagtaccatttaactaaaatattatatagctgtatttccaggaagtactgttcaaacatctactatacagatcaaaataaaatattactcatattgtacaaggtttcagatcaataaaatttgtttacatatgtccttacggaccatattcctacttccccatcaggctctgataccagagatatgcccttgatacggtactgtaggaatatggtattgtaactaatatataggccttagaagatataggcctcaccaaagtaccaaaattggccaaaaagacctgggcagaaatggcctcagaataagatgatgattctaaaacagatctgcaaaaacaaatccaaaaggccaaacagaccaaaactgtctgtaaccaaacaccaagccaatcgttgactcaacaagaatcaacgccacaacccagcaacagttatatttccaaaaacaaatttttcaatgttttacaaatggaaccagaatactgggacaagaatcctttcaaagcaaccgccaaagtattccccccgggattccatt

SEQ ID NO: 9754 - DNA, 1086 bp, Glycine max
  Gm_smallRNAprecursor_2587
aagagattttgttttgcggcgacctcttgggtctggttatcttgatcatttaataaattggagtttcttgaagaagatgaggaggaggagtttgagcgaaaagagatacgggaaaaagatcgtaatagtctagacatgattataatattctctaatatcttttccctcatttggttccatagaaatatccccgtaagtaaatatgtcacaaaatttttctggatctgaattatttttaagaaaaaactctttttttttttataaaatagtttgaacggcaatcctatagccaccagtatattatgtcttgatattttggttaaacagtacaccttagccttactaccctttatccatcacgggtcttactgctacagtaccatttaactaaaatattatatagctgtatttccaggaagtactgttcaaacatctactatacagatcaaaataaaatattactcatattgtacaaggtttcagatcaataaaatttgtttacatatgtccttacggaccatattcctacttccccatcaggctctgataccagagatatgcccttgatacggtactgtaggaatatggtattgtaactaatatataggccttagaagatataggcctcaccaaagtaccaaaattggccaaaaagacctgggcagaaatggcctcagaataagatgatgattctaaaacagatctgcaaaaacaaatccaaaaggccaaacagaccaaaactgtctgtaaccaaacaccaagccaatcgttgactcaacaagaatcaacgccacaacccagcaacagttatatttccaaaaacaaatttttcaatgttttacaaatggaaccagaatactgggacaagaatcctttcaaagcaaccgccaaagtattccccccgggattccattacaggccaacagccacaaacaaaacccgcaaattctacgaattcattctaatagatacaaactcagtatctattaaacagttcaaagaccccaaagatctaaatctaaatacccattccagaatccaaatcttaaaggttatgcagccacgacattgtggctcaaaattaaa

SEQ ID NO: 9755 - DNA, 1094 bp, Glycine max
  Gm_smallRNAprecursor_2588
ttaataaattggagtttcttgaagaagatgaggaggaggagtttgagcgaaaagagatacgggaaaaagatcgtaatagtctagacatgattataatattctctaatatcttttccctcatttggttccatagaaatatccccgtaagtaaatatgtcacaaaatttttctggatctgaattatttttaagaaaaaactctttttttttttataaaatagtttgaacggcaatcctatagccaccagtatattatgtcttgatattttggttaaacagtacaccttagccttactaccctttatccatcacgggtcttactgctacagtaccatttaactaaaatattatatagctgtatttccaggaagtactgttcaaacatctactatacagatcaaaataaaatattactcatattgtacaaggtttcagatcaataaaatttgtttacatatgtccttacggaccatattcctacttccccatcaggctctgataccagagatatgcccttgatacggtactgtaggaatatggtattgtaactaatatataggccttagaagatataggcctcaccaaagtaccaaaattggccaaaaagacctgggcagaaatggcctcagaataagatgatgattctaaaacagatctgcaaaaacaaatccaaaaggccaaacagaccaaaactgtctgtaaccaaacaccaagccaatcgttgactcaacaagaatcaacgccacaacccagcaacagttatatttccaaaaacaaatttttcaatgttttacaaatggaaccagaatactgggacaagaatcctttcaaagcaaccgccaaagtattccccccgggattccattacaggccaacagccacaaacaaaacccgcaaattctacgaattcattctaatagatacaaactcagtatctattaaacagttcaaagaccccaaagatctaaatctaaatacccattccagaatccaaatcttaaaggttatgcagccacgacattgtggctcaaaattaaaccaacccaaaaaattttctgcaccatttgaccctgcaagatataattattgggatta

SEQ ID NO: 9756 - DNA, 1174 bp, Glycine max
  Gm_smallRNAprecursor_2589
taatattctctaatatcttttccctcatttggttccatagaaatatccccgtaagtaaatatgtcacaaaatttttctggatctgaattatttttaagaaaaaactctttttttttttataaaatagtttgaacggcaatcctatagccaccagtatattatgtcttgatattttggttaaacagtacaccttagccttactaccctttatccatcacgggtcttactgctacagtaccatttaactaaaatattatatagctgtatttccaggaagtactgttcaaacatctactatacagatcaaaataaaatattactcatattgtacaaggtttcagatcaataaaatttgtttacatatgtccttacggaccatattcctacttccccatcaggctctgataccagagatatgcccttgatacggtactgtaggaatatggtattgtaactaatatataggccttagaagatataggcctcaccaaagtaccaaaattggccaaaaagacctgggcagaaatggcctcagaataagatgatgattctaaaacagatctgcaaaaacaaatccaaaaggccaaacagaccaaaactgtctgtaaccaaacaccaagccaatcgttgactcaacaagaatcaacgccacaacccagcaacagttatatttccaaaaacaaatttttcaatgttttacaaatggaaccagaatactgggacaagaatcctttcaaagcaaccgccaaagtattccccccgggattccattacaggccaacagccacaaacaaaacccgcaaattctacgaattcattctaatagatacaaactcagtatctattaaacagttcaaagaccccaaagatctaaatctaaatacccattccagaatccaaatcttaaaggttatgcagccacgacattgtggctcaaaattaaaccaacccaaaaaattttctgcaccatttgaccctgcaagatataattattgggattacattgacgcctggaccaatatgttctggcatcaaaatagtaaattcaagcattcatggctaatttacttcaaaaataacactgtgtataattttccaaattggttcctccaatggtggaactacttcagaccaattccacagatattcccagaagaagtccaacagggattcc

SEQ ID NO: 9757 - DNA, 1073 bp, Glycine max
  Gm_smallRNAprecursor_2590
cttactaccctttatccatcacgggtcttactgctacagtaccatttaactaaaatattatatagctgtatttccaggaagtactgttcaaacatctactatacagatcaaaataaaatattactcatattgtacaaggtttcagatcaataaaatttgtttacatatgtccttacggaccatattcctacttccccatcaggctctgataccagagatatgcccttgatacggtactgtaggaatatggtattgtaactaatatataggccttagaagatataggcctcaccaaagtaccaaaattggccaaaaagacctgggcagaaatggcctcagaataagatgatgattctaaaacagatctgcaaaaacaaatccaaaaggccaaacagaccaaaactgtctgtaaccaaacaccaagccaatcgttgactcaacaagaatcaacgccacaacccagcaacagttatatttccaaaaacaaatttttcaatgttttacaaatggaaccagaatactgggacaagaatcctttcaaagcaaccgccaaagtattccccccgggattccattacaggccaacagccacaaacaaaacccgcaaattctacgaattcattctaatagatacaaactcagtatctattaaacagttcaaagaccccaaagatctaaatctaaatacccattccagaatccaaatcttaaaggttatgcagccacgacattgtggctcaaaattaaaccaacccaaaaaattttctgcaccatttgaccctgcaagatataattattgggattacattgacgcctggaccaatatgttctggcatcaaaatagtaaattcaagcattcatggctaatttacttcaaaaataacactgtgtataattttccaaattggttcctccaatggtggaactacttcagaccaattccacagatattcccagaagaagtccaacagggattccaacaattcaacaagctctataatagcaaggaatcacgtattccggcagatttaaagtacttttccagttttgccttgtcatggattttttcaagg

SEQ ID NO: 9758 - DNA, 1223 bp, Glycine max
  Gm_smallRNAprecursor_2591
acccagcaacagttatatttccaaaaacaaatttttcaatgttttacaaatggaaccagaatactgggacaagaatcctttcaaagcaaccgccaaagtattccccccgggattccattacaggccaacagccacaaacaaaacccgcaaattctacgaattcattctaatagatacaaactcagtatctattaaacagttcaaagaccccaaagatctaaatctaaatacccattccagaatccaaatcttaaaggttatgcagccacgacattgtggctcaaaattaaaccaacccaaaaaattttctgcaccatttgaccctgcaagatataattattgggattacattgacgcctggaccaatatgttctggcatcaaaatagtaaattcaagcattcatggctaatttacttcaaaaataacactgtgtataattttccaaattggttcctccaatggtggaactacttcagaccaattccacagatattcccagaagaagtccaacagggattccaacaattcaacaagctctataatagcaaggaatcacgtattccggcagatttaaagtacttttccagttttgccttgtcatggattttttcaaggcaatacagatacggaaaaaccgaaaacagcaaacagtatccaccgttgcagagacacgcctttgtaaaatggtggtcacaattcgatacttcaaaggctgctccagaacaagtcaagaactggttccagagcaatcctgagttcctcaaacctgctaatccgaagacatctttgtttctgaatcagaagtcacaactggcagcattcttagcaagctcaaaatctaaagagagtcttgctcagaatctcaaagaagttctccaactacttcaacaggaagtggaagaagaacccccgaagaaggaagtcgaatcatccgagactaatgatgaccaagaagatgatccattctaccagaatgaagatgactattttggtatatcgttagacgacgattaattagttttagtaatcatgaattattgtaactaatttgtcggtacctcttattaatgtaatttgtaaaatttttgtaacagttccggtaaacattaccgacactgtagaaacagtaaaaattgagtctatttaaaggagtcctcgttccctttgtgaggtaccctttcagatagtctcataaccaggttttagagagagaagctctgcc

SEQ ID NO: 9759 - DNA, 1057 bp, Glycine max
  Gm_smallRNAprecursor_2592
ccaaaaacaaatttttcaatgttttacaaatggaaccagaatactgggacaagaatcctttcaaagcaaccgccaaagtattccccccgggattccattacaggccaacagccacaaacaaaacccgcaaattctacgaattcattctaatagatacaaactcagtatctattaaacagttcaaagaccccaaagatctaaatctaaatacccattccagaatccaaatcttaaaggttatgcagccacgacattgtggctcaaaattaaaccaacccaaaaaattttctgcaccatttgaccctgcaagatataattattgggattacattgacgcctggaccaatatgttctggcatcaaaatagtaaattcaagcattcatggctaatttacttcaaaaataacactgtgtataattttccaaattggttcctccaatggtggaactacttcagaccaattccacagatattcccagaagaagtccaacagggattccaacaattcaacaagctctataatagcaaggaatcacgtattccggcagatttaaagtacttttccagttttgccttgtcatggattttttcaaggcaatacagatacggaaaaaccgaaaacagcaaacagtatccaccgttgcagagacacgcctttgtaaaatggtggtcacaattcgatacttcaaaggctgctccagaacaagtcaagaactggttccagagcaatcctgagttcctcaaacctgctaatccgaagacatctttgtttctgaatcagaagtcacaactggcagcattcttagcaagctcaaaatctaaagagagtcttgctcagaatctcaaagaagttctccaactacttcaacaggaagtggaagaagaacccccgaagaaggaagtcgaatcatccgagactaatgatgaccaagaagatgatccattctaccagaatgaagatgactattttggtatatcgttagacgacgattaattagttttagtaatcatgaattattgtaactaatttgtcggtacctcttattaatgtaattt

SEQ ID NO: 9760 - DNA, 1054 bp, Glycine max
  Gm_smallRNAprecursor_2593
gaattcattctaatagatacaaactcagtatctattaaacagttcaaagaccccaaagatctaaatctaaatacccattccagaatccaaatcttaaaggttatgcagccacgacattgtggctcaaaattaaaccaacccaaaaaattttctgcaccatttgaccctgcaagatataattattgggattacattgacgcctggaccaatatgttctggcatcaaaatagtaaattcaagcattcatggctaatttacttcaaaaataacactgtgtataattttccaaattggttcctccaatggtggaactacttcagaccaattccacagatattcccagaagaagtccaacagggattccaacaattcaacaagctctataatagcaaggaatcacgtattccggcagatttaaagtacttttccagttttgccttgtcatggattttttcaaggcaatacagatacggaaaaaccgaaaacagcaaacagtatccaccgttgcagagacacgcctttgtaaaatggtggtcacaattcgatacttcaaaggctgctccagaacaagtcaagaactggttccagagcaatcctgagttcctcaaacctgctaatccgaagacatctttgtttctgaatcagaagtcacaactggcagcattcttagcaagctcaaaatctaaagagagtcttgctcagaatctcaaagaagttctccaactacttcaacaggaagtggaagaagaacccccgaagaaggaagtcgaatcatccgagactaatgatgaccaagaagatgatccattctaccagaatgaagatgactattttggtatatcgttagacgacgattaattagttttagtaatcatgaattattgtaactaatttgtcggtacctcttattaatgtaatttgtaaaatttttgtaacagttccggtaaacattaccgacactgtagaaacagtaaaaattgagtctatttaaaggagtcctcgttccctttgtgaggtaccctttcagatagtctcataaccaggttttagagag

SEQ ID NO: 9761 - DNA, 1066 bp, Glycine max
  Gm_smallRNAprecursor_2594
gaattcattctaatagatacaaactcagtatctattaaacagttcaaagaccccaaagatctaaatctaaatacccattccagaatccaaatcttaaaggttatgcagccacgacattgtggctcaaaattaaaccaacccaaaaaattttctgcaccatttgaccctgcaagatataattattgggattacattgacgcctggaccaatatgttctggcatcaaaatagtaaattcaagcattcatggctaatttacttcaaaaataacactgtgtataattttccaaattggttcctccaatggtggaactacttcagaccaattccacagatattcccagaagaagtccaacagggattccaacaattcaacaagctctataatagcaaggaatcacgtattccggcagatttaaagtacttttccagttttgccttgtcatggattttttcaaggcaatacagatacggaaaaaccgaaaacagcaaacagtatccaccgttgcagagacacgcctttgtaaaatggtggtcacaattcgatacttcaaaggctgctccagaacaagtcaagaactggttccagagcaatcctgagttcctcaaacctgctaatccgaagacatctttgtttctgaatcagaagtcacaactggcagcattcttagcaagctcaaaatctaaagagagtcttgctcagaatctcaaagaagttctccaactacttcaacaggaagtggaagaagaacccccgaagaaggaagtcgaatcatccgagactaatgatgaccaagaagatgatccattctaccagaatgaagatgactattttggtatatcgttagacgacgattaattagttttagtaatcatgaattattgtaactaatttgtcggtacctcttattaatgtaatttgtaaaatttttgtaacagttccggtaaacattaccgacactgtagaaacagtaaaaattgagtctatttaaaggagtcctcgttccctttgtgaggtaccctttcagatagtctcataaccaggttttagagagagaagctctgcc

SEQ ID NO: 9762 - DNA, 1145 bp, Glycine max
  Gm_smallRNAprecursor_2595
tctaaatacccattccagaatccaaatcttaaaggttatgcagccacgacattgtggctcaaaattaaaccaacccaaaaaattttctgcaccatttgaccctgcaagatataattattgggattacattgacgcctggaccaatatgttctggcatcaaaatagtaaattcaagcattcatggctaatttacttcaaaaataacactgtgtataattttccaaattggttcctccaatggtggaactacttcagaccaattccacagatattcccagaagaagtccaacagggattccaacaattcaacaagctctataatagcaaggaatcacgtattccggcagatttaaagtacttttccagttttgccttgtcatggattttttcaaggcaatacagatacggaaaaaccgaaaacagcaaacagtatccaccgttgcagagacacgcctttgtaaaatggtggtcacaattcgatacttcaaaggctgctccagaacaagtcaagaactggttccagagcaatcctgagttcctcaaacctgctaatccgaagacatctttgtttctgaatcagaagtcacaactggcagcattcttagcaagctcaaaatctaaagagagtcttgctcagaatctcaaagaagttctccaactacttcaacaggaagtggaagaagaacccccgaagaaggaagtcgaatcatccgagactaatgatgaccaagaagatgatccattctaccagaatgaagatgactattttggtatatcgttagacgacgattaattagttttagtaatcatgaattattgtaactaatttgtcggtacctcttattaatgtaatttgtaaaatttttgtaacagttccggtaaacattaccgacactgtagaaacagtaaaaattgagtctatttaaaggagtcctcgttccctttgtgaggtaccctttcagatagtctcataaccaggttttagagagagaagctctgcctagggaaaaactctttgtaagcttctatgcccatatcaattaagagcttgatgggtacttgtacacaaccgatgtttagatatttatacttacggctatgttcataaattgaattttttgaaagtaaatgaaattcttccccta

SEQ ID NO: 9763 - DNA, 1231 bp, Glycine max
  Gm_smallRNAprecursor_2596
taaatacccattccagaatccaaatcttaaaggttatgcagccacgacattgtggctcaaaattaaaccaacccaaaaaattttctgcaccatttgaccctgcaagatataattattgggattacattgacgcctggaccaatatgttctggcatcaaaatagtaaattcaagcattcatggctaatttacttcaaaaataacactgtgtataattttccaaattggttcctccaatggtggaactacttcagaccaattccacagatattcccagaagaagtccaacagggattccaacaattcaacaagctctataatagcaaggaatcacgtattccggcagatttaaagtacttttccagttttgccttgtcatggattttttcaaggcaatacagatacggaaaaaccgaaaacagcaaacagtatccaccgttgcagagacacgcctttgtaaaatggtggtcacaattcgatacttcaaaggctgctccagaacaagtcaagaactggttccagagcaatcctgagttcctcaaacctgctaatccgaagacatctttgtttctgaatcagaagtcacaactggcagcattcttagcaagctcaaaatctaaagagagtcttgctcagaatctcaaagaagttctccaactacttcaacaggaagtggaagaagaacccccgaagaaggaagtcgaatcatccgagactaatgatgaccaagaagatgatccattctaccagaatgaagatgactattttggtatatcgttagacgacgattaattagttttagtaatcatgaattattgtaactaatttgtcggtacctcttattaatgtaatttgtaaaatttttgtaacagttccggtaaacattaccgacactgtagaaacagtaaaaattgagtctatttaaaggagtcctcgttccctttgtgaggtaccctttcagatagtctcataaccaggttttagagagagaagctctgcctagggaaaaactctttgtaagcttctatgcccatatcaattaagagcttgatgggtacttgtacacaaccgatgtttagatatttatacttacggctatgttcataaattgaattttttgaaagtaaatgaaattcttcccctatatcttgtcctagaggaatattgttttctactgttttgattatgtaatcaaagttgtgtttgtcctttattgtttcaggaacgtatag

SEQ ID NO: 9764 - DNA, 1124 bp, Glycine max
  Gm_smallRNAprecursor_2597
attccagaatccaaatcttaaaggttatgcagccacgacattgtggctcaaaattaaaccaacccaaaaaattttctgcaccatttgaccctgcaagatataattattgggattacattgacgcctggaccaatatgttctggcatcaaaatagtaaattcaagcattcatggctaatttacttcaaaaataacactgtgtataattttccaaattggttcctccaatggtggaactacttcagaccaattccacagatattcccagaagaagtccaacagggattccaacaattcaacaagctctataatagcaaggaatcacgtattccggcagatttaaagtacttttccagttttgccttgtcatggattttttcaaggcaatacagatacggaaaaaccgaaaacagcaaacagtatccaccgttgcagagacacgcctttgtaaaatggtggtcacaattcgatacttcaaaggctgctccagaacaagtcaagaactggttccagagcaatcctgagttcctcaaacctgctaatccgaagacatctttgtttctgaatcagaagtcacaactggcagcattcttagcaagctcaaaatctaaagagagtcttgctcagaatctcaaagaagttctccaactacttcaacaggaagtggaagaagaacccccgaagaaggaagtcgaatcatccgagactaatgatgaccaagaagatgatccattctaccagaatgaagatgactattttggtatatcgttagacgacgattaattagttttagtaatcatgaattattgtaactaatttgtcggtacctcttattaatgtaatttgtaaaatttttgtaacagttccggtaaacattaccgacactgtagaaacagtaaaaattgagtctatttaaaggagtcctcgttccctttgtgaggtaccctttcagatagtctcataaccaggttttagagagagaagctctgcctagggaaaaactctttgtaagcttctatgcccatatcaattaagagcttgatgggtacttgtacacaaccgatgtttagatatttatacttacggctatgttcataaattgaattttttgaaagtaaatgaaat

SEQ ID NO: 9765 - DNA, 1123 bp, Glycine max
  Gm_smallRNAprecursor_2598
ttccagaatccaaatcttaaaggttatgcagccacgacattgtggctcaaaattaaaccaacccaaaaaattttctgcaccatttgaccctgcaagatataattattgggattacattgacgcctggaccaatatgttctggcatcaaaatagtaaattcaagcattcatggctaatttacttcaaaaataacactgtgtataattttccaaattggttcctccaatggtggaactacttcagaccaattccacagatattcccagaagaagtccaacagggattccaacaattcaacaagctctataatagcaaggaatcacgtattccggcagatttaaagtacttttccagttttgccttgtcatggattttttcaaggcaatacagatacggaaaaaccgaaaacagcaaacagtatccaccgttgcagagacacgcctttgtaaaatggtggtcacaattcgatacttcaaaggctgctccagaacaagtcaagaactggttccagagcaatcctgagttcctcaaacctgctaatccgaagacatctttgtttctgaatcagaagtcacaactggcagcattcttagcaagctcaaaatctaaagagagtcttgctcagaatctcaaagaagttctccaactacttcaacaggaagtggaagaagaacccccgaagaaggaagtcgaatcatccgagactaatgatgaccaagaagatgatccattctaccagaatgaagatgactattttggtatatcgttagacgacgattaattagttttagtaatcatgaattattgtaactaatttgtcggtacctcttattaatgtaatttgtaaaatttttgtaacagttccggtaaacattaccgacactgtagaaacagtaaaaattgagtctatttaaaggagtcctcgttccctttgtgaggtaccctttcagatagtctcataaccaggttttagagagagaagctctgcctagggaaaaactctttgtaagcttctatgcccatatcaattaagagcttgatgggtacttgtacacaaccgatgtttagatatttatacttacggctatgttcataaattgaattttttgaaagtaaatgaaat

SEQ ID NO: 9766 - DNA, 1168 bp, Glycine max
  Gm_smallRNAprecursor_2599
tatgttctggcatcaaaatagtaaattcaagcattcatggctaatttacttcaaaaataacactgtgtataattttccaaattggttcctccaatggtggaactacttcagaccaattccacagatattcccagaagaagtccaacagggattccaacaattcaacaagctctataatagcaaggaatcacgtattccggcagatttaaagtacttttccagttttgccttgtcatggattttttcaaggcaatacagatacggaaaaaccgaaaacagcaaacagtatccaccgttgcagagacacgcctttgtaaaatggtggtcacaattcgatacttcaaaggctgctccagaacaagtcaagaactggttccagagcaatcctgagttcctcaaacctgctaatccgaagacatctttgtttctgaatcagaagtcacaactggcagcattcttagcaagctcaaaatctaaagagagtcttgctcagaatctcaaagaagttctccaactacttcaacaggaagtggaagaagaacccccgaagaaggaagtcgaatcatccgagactaatgatgaccaagaagatgatccattctaccagaatgaagatgactattttggtatatcgttagacgacgattaattagttttagtaatcatgaattattgtaactaatttgtcggtacctcttattaatgtaatttgtaaaatttttgtaacagttccggtaaacattaccgacactgtagaaacagtaaaaattgagtctatttaaaggagtcctcgttccctttgtgaggtaccctttcagatagtctcataaccaggttttagagagagaagctctgcctagggaaaaactctttgtaagcttctatgcccatatcaattaagagcttgatgggtacttgtacacaaccgatgtttagatatttatacttacggctatgttcataaattgaattttttgaaagtaaatgaaattcttcccctatatcttgtcctagaggaatattgttttctactgttttgattatgtaatcaaagttgtgtttgtcctttattgtttcaggaacgtatagttgatcctgagggatttctggaatgttccagtcatccatgttttgattgatatattcgaatcggacttcctcatcgaag

SEQ ID NO: 9767 - DNA, 1134 bp, Glycine max
  Gm_smallRNAprecursor_2600
caacagggattccaacaattcaacaagctctataatagcaaggaatcacgtattccggcagatttaaagtacttttccagttttgccttgtcatggattttttcaaggcaatacagatacggaaaaaccgaaaacagcaaacagtatccaccgttgcagagacacgcctttgtaaaatggtggtcacaattcgatacttcaaaggctgctccagaacaagtcaagaactggttccagagcaatcctgagttcctcaaacctgctaatccgaagacatctttgtttctgaatcagaagtcacaactggcagcattcttagcaagctcaaaatctaaagagagtcttgctcagaatctcaaagaagttctccaactacttcaacaggaagtggaagaagaacccccgaagaaggaagtcgaatcatccgagactaatgatgaccaagaagatgatccattctaccagaatgaagatgactattttggtatatcgttagacgacgattaattagttttagtaatcatgaattattgtaactaatttgtcggtacctcttattaatgtaatttgtaaaatttttgtaacagttccggtaaacattaccgacactgtagaaacagtaaaaattgagtctatttaaaggagtcctcgttccctttgtgaggtaccctttcagatagtctcataaccaggttttagagagagaagctctgcctagggaaaaactctttgtaagcttctatgcccatatcaattaagagcttgatgggtacttgtacacaaccgatgtttagatatttatacttacggctatgttcataaattgaattttttgaaagtaaatgaaattcttcccctatatcttgtcctagaggaatattgttttctactgttttgattatgtaatcaaagttgtgtttgtcctttattgtttcaggaacgtatagttgatcctgagggatttctggaatgttccagtcatccatgttttgattgatatattcgaatcggacttcctcatcgaagagattgtgttttggggcgacctcttgggtctggttatcttgatcatttaataaattggagtttcttgaagatgaggaggaggagtttgagcgaaaagagatacgggaa

SEQ ID NO: 9768 - DNA, 1039 bp, Glycine max
  Gm_smallRNAprecursor_2601
agggattccaacaattcaacaagctctataatagcaaggaatcacgtattccggcagatttaaagtacttttccagttttgccttgtcatggattttttcaaggcaatacagatacggaaaaaccgaaaacagcaaacagtatccaccgttgcagagacacgcctttgtaaaatggtggtcacaattcgatacttcaaaggctgctccagaacaagtcaagaactggttccagagcaatcctgagttcctcaaacctgctaatccgaagacatctttgtttctgaatcagaagtcacaactggcagcattcttagcaagctcaaaatctaaagagagtcttgctcagaatctcaaagaagttctccaactacttcaacaggaagtggaagaagaacccccgaagaaggaagtcgaatcatccgagactaatgatgaccaagaagatgatccattctaccagaatgaagatgactattttggtatatcgttagacgacgattaattagttttagtaatcatgaattattgtaactaatttgtcggtacctcttattaatgtaatttgtaaaatttttgtaacagttccggtaaacattaccgacactgtagaaacagtaaaaattgagtctatttaaaggagtcctcgttccctttgtgaggtaccctttcagatagtctcataaccaggttttagagagagaagctctgcctagggaaaaactctttgtaagcttctatgcccatatcaattaagagcttgatgggtacttgtacacaaccgatgtttagatatttatacttacggctatgttcataaattgaattttttgaaagtaaatgaaattcttcccctatatcttgtcctagaggaatattgttttctactgttttgattatgtaatcaaagttgtgtttgtcctttattgtttcaggaacgtatagttgatcctgagggatttctggaatgttccagtcatccatgttttgattgatatattcgaatcggacttcctcatcgaagagattgtgttttggggc

SEQ ID NO: 9769 - DNA, 1076 bp, Glycine max
  Gm_smallRNAprecursor_2602
caaagaagttctccaactacttcaacaggaagtggaagaagaacccccgaagaaggaagtcgaatcatccgagactaatgatgaccaagaagatgatccattctaccagaatgaagatgactattttggtatatcgttagacgacgattaattagttttagtaatcatgaattattgtaactaatttgtcggtacctcttattaatgtaatttgtaaaatttttgtaacagttccggtaaacattaccgacactgtagaaacagtaaaaattgagtctatttaaaggagtcctcgttccctttgtgaggtaccctttcagatagtctcataaccaggttttagagagagaagctctgcctagggaaaaactctttgtaagcttctatgcccatatcaattaagagcttgatgggtacttgtacacaaccgatgtttagatatttatacttacggctatgttcataaattgaattttttgaaagtaaatgaaattcttcccctatatcttgtcctagaggaatattgttttctactgttttgattatgtaatcaaagttgtgtttgtcctttattgtttcaggaacgtatagttgatcctgagggatttctggaatgttccagtcatccatgttttgattgatatattcgaatcggacttcctcatcgaagagattgtgttttggggcgacctcttgggtctggttatcttgatcatttaataaattggagtttcttgaagatgaggaggaggagtttgagcgaaaagagatacgggaaaaagatcgtaatagtctagacatgattataatattctctaatatctttgccctcatttggttccatagaaatatccccgtaagtaaatatgtcacaaaatttttctggatctgaattattttaaagaaaaactcttttttttatatataaaatagtttgaacggcaatcctatagccaccagtatattatgtcttgatattttggttaaacaatacaccttggccttaccgccctttatctatcacaggtcttagtactacaataccattcaactaaaatattagactgctatacttc

SEQ ID NO: 9770 - DNA, 1159 bp, Glycine max
  Gm_smallRNAprecursor_2603
caaagaagttctccaactacttcaacaggaagtggaagaagaacccccgaagaaggaagtcgaatcatccgagactaatgatgaccaagaagatgatccattctaccagaatgaagatgactattttggtatatcgttagacgacgattaattagttttagtaatcatgaattattgtaactaatttgtcggtacctcttattaatgtaatttgtaaaatttttgtaacagttccggtaaacattaccgacactgtagaaacagtaaaaattgagtctatttaaaggagtcctcgttccctttgtgaggtaccctttcagatagtctcataaccaggttttagagagagaagctctgcctagggaaaaactctttgtaagcttctatgcccatatcaattaagagcttgatgggtacttgtacacaaccgatgtttagatatttatacttacggctatgttcataaattgaattttttgaaagtaaatgaaattcttcccctatatcttgtcctagaggaatattgttttctactgttttgattatgtaatcaaagttgtgtttgtcctttattgtttcaggaacgtatagttgatcctgagggatttctggaatgttccagtcatccatgttttgattgatatattcgaatcggacttcctcatcgaagagattgtgttttggggcgacctcttgggtctggttatcttgatcatttaataaattggagtttcttgaagatgaggaggaggagtttgagcgaaaagagatacgggaaaaagatcgtaatagtctagacatgattataatattctctaatatctttgccctcatttggttccatagaaatatccccgtaagtaaatatgtcacaaaatttttctggatctgaattattttaaagaaaaactcttttttttatatataaaatagtttgaacggcaatcctatagccaccagtatattatgtcttgatattttggttaaacaatacaccttggccttaccgccctttatctatcacaggtcttagtactacaataccattcaactaaaatattagactgctatacttccaggaagtactgttcaaacatttactgtacaacaaatgtttgaacagtacttcctggaagtacagcagtctaatattttagtt

SEQ ID NO: 9771 - DNA, 1088 bp, Glycine max
  Gm_smallRNAprecursor_2604
acagtaaaatcgttccctttatggggctatctgaaagggtgcctcacaaagcttacaaagagtcatccactcagggataccccaaaccggcaaccgccaaacagacatcgactgactatgcttgggctgactatgcttggccaattgaaactcttcaggcccttcaagaaatgggtctaaccaaattcccgaaaataataaaaaaaacatgggcaaatattgcctcaaaatctgacgatgattctcaatcaaacttacaaaccatgatccggactacatcaatgaccaaaaaagctatcaatcctaaagggaaactaccactagccaaaattcaaacaccacccaccaagcaaactaacaattatatttacaaaaataaattttcaactgttttgcagatggaacctgaattctgggacaaacacccatttaaggcaacaaccaaggcattccagtcaggatttcatttcaaaccaaccaccatcatgaagtccaggactttttatgaattgattttggtagactcaaattcagtgtctatcaaacatttcaaagacccaaaagatcaaacattgaacacccactcaacaattcaaatactaaaagttcttcaaccaagaaattttggttcggaattaaacaaaggaaaaagattttcagtatcatttgaccttgtaggttatacctattgggattatattgatgcttggactaagtttttttggcaccaaaatacccgcttcaagcactcatgattaatatatttcaaaaccaacacaatctataatttcccaaattggtttttacaatggtgggatttctttggtccaattccaaagattttcccagaaatagttcaacaacgatttgctcaatttgaaaaacaatacaattctcaagaatcacgaattccaacagatcttaaatatttttccaattttgctatgtcatgatttttttcatggcaatatcgttacagtaaaactgaaaaaacaaaccaatatccatcactacaaaggcatgcatttgtaaaatggtggactcaatttgactcgtccaaagctaatccagaacaagtgaaactctgg

SEQ ID NO: 9772 - DNA, 1085 bp, Glycine max
  Gm_smallRNAprecursor_2605
cctttatggggctatctgaaagggtgcctcacaaagcttacaaagagtcatccactcagggataccccaaaccggcaaccgccaaacagacatcgactgactatgcttgggctgactatgcttggccaattgaaactcttcaggcccttcaagaaatgggtctaaccaaattcccgaaaataataaaaaaaacatgggcaaatattgcctcaaaatctgacgatgattctcaatcaaacttacaaaccatgatccggactacatcaatgaccaaaaaagctatcaatcctaaagggaaactaccactagccaaaattcaaacaccacccaccaagcaaactaacaattatatttacaaaaataaattttcaactgttttgcagatggaacctgaattctgggacaaacacccatttaaggcaacaaccaaggcattccagtcaggatttcatttcaaaccaaccaccatcatgaagtccaggactttttatgaattgattttggtagactcaaattcagtgtctatcaaacatttcaaagacccaaaagatcaaacattgaacacccactcaacaattcaaatactaaaagttcttcaaccaagaaattttggttcggaattaaacaaaggaaaaagattttcagtatcatttgaccttgtaggttatacctattgggattatattgatgcttggactaagtttttttggcaccaaaatacccgcttcaagcactcatgattaatatatttcaaaaccaacacaatctataatttcccaaattggtttttacaatggtgggatttctttggtccaattccaaagattttcccagaaatagttcaacaacgatttgctcaatttgaaaaacaatacaattctcaagaatcacgaattccaacagatcttaaatatttttccaattttgctatgtcatgatttttttcatggcaatatcgttacagtaaaactgaaaaaacaaaccaatatccatcactacaaaggcatgcatttgtaaaatggtggactcaatttgactcgtccaaagctaatccagaacaagtgaaactctggttccaatcccat

SEQ ID NO: 9773 - DNA, 1239 bp, Glycine max
  Gm_smallRNAprecursor_2606
attgaacacccactcaacaattcaaatactaaaagttcttcaaccaagaaattttggttcggaattaaacaaaggaaaaagattttcagtatcatttgaccttgtaggttatacctattgggattatattgatgcttggactaagtttttttggcaccaaaatacccgcttcaagcactcatgattaatatatttcaaaaccaacacaatctataatttcccaaattggtttttacaatggtgggatttctttggtccaattccaaagattttcccagaaatagttcaacaacgatttgctcaatttgaaaaacaatacaattctcaagaatcacgaattccaacagatcttaaatatttttccaattttgctatgtcatgatttttttcatggcaatatcgttacagtaaaactgaaaaaacaaaccaatatccatcactacaaaggcatgcatttgtaaaatggtggactcaatttgactcgtccaaagctaatccagaacaagtgaaactctggttccaatcccatccggaatttctcaaagcagctgatccaaaaacttttgtgtttttgaaccaaaagtcccacctggcagtatttttagcaggatcaaaattgaaagagatcctaactaaaaatcttaagaaagttctgcaaatgttatagcaagatgaagaaggttcatcctcaaaaaaggaagaaataagctctgttgaagaagaagaagaccttttttaccaaaacgaagatgattgttttggtatttgtttagattaattataatttcagtcacaaaaccgtttgtacttaattattttgtaattccagacaatactacctgtcctgtagcaaataagttgcggtcaaaactaattgtcttgtaacaaacagtcaaatagttccggtcacaactaccggcaactactgatcttatgaaagaattttggctatataaggagtcctcaaccatctagtgaggcacccttccatttagccattttcaggtttctgagacgaggtgctctgaaagaacaacttttgtaagcacttctttcaagttttaataaatttctatttttcatccatcttccttctccctctttaccgatcctgtgctgctctgccgccgcttcggtttctttgtttaagaaaaccttggatttgtaagccatttttcggtgtgcccttgatacttgtttttaaagtttagattttgatttccatttatcatactacat

SEQ ID NO: 9774 - DNA, 1240 bp, Glycine max
  Gm_smallRNAprecursor_2607
attgaacacccactcaacaattcaaatactaaaagttcttcaaccaagaaattttggttcggaattaaacaaaggaaaaagattttcagtatcatttgaccttgtaggttatacctattgggattatattgatgcttggactaagtttttttggcaccaaaatacccgcttcaagcactcatgattaatatatttcaaaaccaacacaatctataatttcccaaattggtttttacaatggtgggatttctttggtccaattccaaagattttcccagaaatagttcaacaacgatttgctcaatttgaaaaacaatacaattctcaagaatcacgaattccaacagatcttaaatatttttccaattttgctatgtcatgatttttttcatggcaatatcgttacagtaaaactgaaaaaacaaaccaatatccatcactacaaaggcatgcatttgtaaaatggtggactcaatttgactcgtccaaagctaatccagaacaagtgaaactctggttccaatcccatccggaatttctcaaagcagctgatccaaaaacttttgtgtttttgaaccaaaagtcccacctggcagtatttttagcaggatcaaaattgaaagagatcctaactaaaaatcttaagaaagttctgcaaatgttatagcaagatgaagaaggttcatcctcaaaaaaggaagaaataagctctgttgaagaagaagaagaccttttttaccaaaacgaagatgattgttttggtatttgtttagattaattataatttcagtcacaaaaccgtttgtacttaattattttgtaattccagacaatactacctgtcctgtagcaaataagttgcggtcaaaactaattgtcttgtaacaaacagtcaaatagttccggtcacaactaccggcaactactgatcttatgaaagaattttggctatataaggagtcctcaaccatctagtgaggcacccttccatttagccattttcaggtttctgagacgaggtgctctgaaagaacaacttttgtaagcacttctttcaagttttaataaatttctatttttcatccatcttccttctccctctttaccgatcctgtgctgctctgccgccgcttcggtttctttgtttaagaaaaccttggatttgtaagccatttttcggtgtgcccttgatacttgtttttaaagtttagattttgatttccatttatcatactacatt

SEQ ID NO: 9775 - DNA, 1148 bp, Glycine max
  Gm_smallRNAprecursor_2608
ggtgggatttctttggtccaattccaaagattttcccagaaatagttcaacaacgatttgctcaatttgaaaaacaatacaattctcaagaatcacgaattccaacagatcttaaatatttttccaattttgctatgtcatgatttttttcatggcaatatcgttacagtaaaactgaaaaaacaaaccaatatccatcactacaaaggcatgcatttgtaaaatggtggactcaatttgactcgtccaaagctaatccagaacaagtgaaactctggttccaatcccatccggaatttctcaaagcagctgatccaaaaacttttgtgtttttgaaccaaaagtcccacctggcagtatttttagcaggatcaaaattgaaagagatcctaactaaaaatcttaagaaagttctgcaaatgttatagcaagatgaagaaggttcatcctcaaaaaaggaagaaataagctctgttgaagaagaagaagaccttttttaccaaaacgaagatgattgttttggtatttgtttagattaattataatttcagtcacaaaaccgtttgtacttaattattttgtaattccagacaatactacctgtcctgtagcaaataagttgcggtcaaaactaattgtcttgtaacaaacagtcaaatagttccggtcacaactaccggcaactactgatcttatgaaagaattttggctatataaggagtcctcaaccatctagtgaggcacccttccatttagccattttcaggtttctgagacgaggtgctctgaaagaacaacttttgtaagcacttctttcaagttttaataaatttctatttttcatccatcttccttctccctctttaccgatcctgtgctgctctgccgccgcttcggtttctttgtttaagaaaaccttggatttgtaagccatttttcggtgtgcccttgatacttgtttttaaagtttagattttgatttccatttatcatactacattgttacttcctatttgtgcatttgatccctacccgctgatctctcgtatcaacctggtatcagagccggatctctggtaaggacatatgttaactgaattcatgatggggaagtaggaacagtgtccgtaaggataaataggaagtaa

SEQ ID NO: 9776 - DNA, 1166 bp, Glycine max
  Gm_smallRNAprecursor_2609
tttttttcatggcaatatcgttacagtaaaactgaaaaaacaaaccaatatccatcactacaaaggcatgcatttgtaaaatggtggactcaatttgactcgtccaaagctaatccagaacaagtgaaactctggttccaatcccatccggaatttctcaaagcagctgatccaaaaacttttgtgtttttgaaccaaaagtcccacctggcagtatttttagcaggatcaaaattgaaagagatcctaactaaaaatcttaagaaagttctgcaaatgttatagcaagatgaagaaggttcatcctcaaaaaaggaagaaataagctctgttgaagaagaagaagaccttttttaccaaaacgaagatgattgttttggtatttgtttagattaattataatttcagtcacaaaaccgtttgtacttaattattttgtaattccagacaatactacctgtcctgtagcaaataagttgcggtcaaaactaattgtcttgtaacaaacagtcaaatagttccggtcacaactaccggcaactactgatcttatgaaagaattttggctatataaggagtcctcaaccatctagtgaggcacccttccatttagccattttcaggtttctgagacgaggtgctctgaaagaacaacttttgtaagcacttctttcaagttttaataaatttctatttttcatccatcttccttctccctctttaccgatcctgtgctgctctgccgccgcttcggtttctttgtttaagaaaaccttggatttgtaagccatttttcggtgtgcccttgatacttgtttttaaagtttagattttgatttccatttatcatactacattgttacttcctatttgtgcatttgatccctacccgctgatctctcgtatcaacctggtatcagagccggatctctggtaaggacatatgttaactgaattcatgatggggaagtaggaacagtgtccgtaaggataaataggaagtaagatggggatatataacattaagagaacaactcaatgtccgtaaggaaaatagttaacataaattgttgtatttgggtgacatcattgaccaaaacagtagatagatatctattgttgagtgggtgttcaatcgaagcggtggcagagtcgcacaggatcgg

SEQ ID NO: 9777 - DNA, 1035 bp, Glycine max
  Gm_smallRNAprecursor_2610
tatttgctacaggataggtagtattgtccagaattacaaaataattaagtacaaacggttttgtgaccgaaattacaattaatctaaacaaataccaaaacaatcatcttcgttttggtaaaaagggtcttcttcttcttcaatagagcttgtttcttccttctttgaggatgaaccttcttcatcttgttgtaacatttgcagaacttccttaagatttttagttaggatctctttcgattttgatcctgctaaaaatggtgtcaggtgggacttttggttcaaaaacacagaagtttctggatcagctgctctgagaaattccggataggattggaaccagagtttcacttgttctggatcagctttggacgagtcgaattgagtccaccattttacaaatgcatgcttttgtagtgatggatattggttggttttttcagttttactgtaaccatattgccatgaaaaaatccatgacaaagcaaaactggaaaaatatttaagatctgttggaattcgtgattcctaagaattgtattgtttttcaaattgagcaaatccttgttgaactgtttctgggaaaatctctggaattggaccaaagaaatcccaccattgtaaaaaccaatttgggaaattatagattgtgttggttttgaaatatattaaccatgagtgcttgaagcgggtattttggtgccaaaaaaccttagtccaagcatcaatataatcccaataggtataacctatagggtcaaatgatactgaaaatctttttcctttgtttaagtccgaaccaaaatgtcttggttgaagaacttttagtatttgaattgttgagtgggtgttcaaagtttgatcttttggggctttgaaatgttttatagacactgaatttgagtctaccaaaatcaattcgtaaaaagtcctggacttcatgatggtggttggtttgaaatgaaatccagacgggaatgccttggatgttgcctgaaatgggtttttgtcccagaattcaggttccatctgcaa

SEQ ID NO: 9778 - DNA, 1215 bp, Glycine max
  Gm_smallRNAprecursor_2611
tatttgctacaggataggtagtattgtccagaattacaaaataattaagtacaaacggttttgtgaccgaaattacaattaatctaaacaaataccaaaacaatcatcttcgttttggtaaaaagggtcttcttcttcttcaatagagcttgtttcttccttctttgaggatgaaccttcttcatcttgttgtaacatttgcagaacttccttaagatttttagttaggatctctttcgattttgatcctgctaaaaatggtgtcaggtgggacttttggttcaaaaacacagaagtttctggatcagctgctctgagaaattccggataggattggaaccagagtttcacttgttctggatcagctttggacgagtcgaattgagtccaccattttacaaatgcatgcttttgtagtgatggatattggttggttttttcagttttactgtaaccatattgccatgaaaaaatccatgacaaagcaaaactggaaaaatatttaagatctgttggaattcgtgattcctaagaattgtattgtttttcaaattgagcaaatccttgttgaactgtttctgggaaaatctctggaattggaccaaagaaatcccaccattgtaaaaaccaatttgggaaattatagattgtgttggttttgaaatatattaaccatgagtgcttgaagcgggtattttggtgccaaaaaaccttagtccaagcatcaatataatcccaataggtataacctatagggtcaaatgatactgaaaatctttttcctttgtttaagtccgaaccaaaatgtcttggttgaagaacttttagtatttgaattgttgagtgggtgttcaaagtttgatcttttggggctttgaaatgttttatagacactgaatttgagtctaccaaaatcaattcgtaaaaagtcctggacttcatgatggtggttggtttgaaatgaaatccagacgggaatgccttggatgttgcctgaaatgggtttttgtcccagaattcaggttccatctgcaaaacagttgaaaatttatttttgtaaatataattgttagttttcttggtgggtggtgtttgaattttggctagtggtagtttccttttaggattaatagttgttttgctcattgatgtagtctggatcatggtttgtaagtttgattcagaatcatcgtcagattttgaggcaatatctgc

SEQ ID NO: 9779 - DNA, 1216 bp, Glycine max
  Gm_smallRNAprecursor_2612
tatttgctacaggataggtagtattgtccagaattacaaaataattaagtacaaacggttttgtgaccgaaattacaattaatctaaacaaataccaaaacaatcatcttcgttttggtaaaaagggtcttcttcttcttcaatagagcttgtttcttccttctttgaggatgaaccttcttcatcttgttgtaacatttgcagaacttccttaagatttttagttaggatctctttcgattttgatcctgctaaaaatggtgtcaggtgggacttttggttcaaaaacacagaagtttctggatcagctgctctgagaaattccggataggattggaaccagagtttcacttgttctggatcagctttggacgagtcgaattgagtccaccattttacaaatgcatgcttttgtagtgatggatattggttggttttttcagttttactgtaaccatattgccatgaaaaaatccatgacaaagcaaaactggaaaaatatttaagatctgttggaattcgtgattcctaagaattgtattgtttttcaaattgagcaaatccttgttgaactgtttctgggaaaatctctggaattggaccaaagaaatcccaccattgtaaaaaccaatttgggaaattatagattgtgttggttttgaaatatattaaccatgagtgcttgaagcgggtattttggtgccaaaaaaccttagtccaagcatcaatataatcccaataggtataacctatagggtcaaatgatactgaaaatctttttcctttgtttaagtccgaaccaaaatgtcttggttgaagaacttttagtatttgaattgttgagtgggtgttcaaagtttgatcttttggggctttgaaatgttttatagacactgaatttgagtctaccaaaatcaattcgtaaaaagtcctggacttcatgatggtggttggtttgaaatgaaatccagacgggaatgccttggatgttgcctgaaatgggtttttgtcccagaattcaggttccatctgcaaaacagttgaaaatttatttttgtaaatataattgttagttttcttggtgggtggtgtttgaattttggctagtggtagtttccttttaggattaatagttgttttgctcattgatgtagtctggatcatggtttgtaagtttgattcagaatcatcgtcagattttgaggcaatatctgcc

SEQ ID NO: 9780 - DNA, 1096 bp, Glycine max
  Gm_smallRNAprecursor_2613
tacaaaataattaagtacaaacggttttgtgaccgaaattacaattaatctaaacaaataccaaaacaatcatcttcgttttggtaaaaagggtcttcttcttcttcaatagagcttgtttcttccttctttgaggatgaaccttcttcatcttgttgtaacatttgcagaacttccttaagatttttagttaggatctctttcgattttgatcctgctaaaaatggtgtcaggtgggacttttggttcaaaaacacagaagtttctggatcagctgctctgagaaattccggataggattggaaccagagtttcacttgttctggatcagctttggacgagtcgaattgagtccaccattttacaaatgcatgcttttgtagtgatggatattggttggttttttcagttttactgtaaccatattgccatgaaaaaatccatgacaaagcaaaactggaaaaatatttaagatctgttggaattcgtgattcctaagaattgtattgtttttcaaattgagcaaatccttgttgaactgtttctgggaaaatctctggaattggaccaaagaaatcccaccattgtaaaaaccaatttgggaaattatagattgtgttggttttgaaatatattaaccatgagtgcttgaagcgggtattttggtgccaaaaaaccttagtccaagcatcaatataatcccaataggtataacctatagggtcaaatgatactgaaaatctttttcctttgtttaagtccgaaccaaaatgtcttggttgaagaacttttagtatttgaattgttgagtgggtgttcaaagtttgatcttttggggctttgaaatgttttatagacactgaatttgagtctaccaaaatcaattcgtaaaaagtcctggacttcatgatggtggttggtttgaaatgaaatccagacgggaatgccttggatgttgcctgaaatgggtttttgtcccagaattcaggttccatctgcaaaacagttgaaaatttatttttgtaaatataattgttagttttcttggtgggtggtgtttgaattttggctagtggtagtttccttttaggattaa

SEQ ID NO: 9781 - DNA, 1181 bp, Glycine max
  Gm_smallRNAprecursor_2614
tacaaaataattaagtacaaacggttttgtgaccgaaattacaattaatctaaacaaataccaaaacaatcatcttcgttttggtaaaaagggtcttcttcttcttcaatagagcttgtttcttccttctttgaggatgaaccttcttcatcttgttgtaacatttgcagaacttccttaagatttttagttaggatctctttcgattttgatcctgctaaaaatggtgtcaggtgggacttttggttcaaaaacacagaagtttctggatcagctgctctgagaaattccggataggattggaaccagagtttcacttgttctggatcagctttggacgagtcgaattgagtccaccattttacaaatgcatgcttttgtagtgatggatattggttggttttttcagttttactgtaaccatattgccatgaaaaaatccatgacaaagcaaaactggaaaaatatttaagatctgttggaattcgtgattcctaagaattgtattgtttttcaaattgagcaaatccttgttgaactgtttctgggaaaatctctggaattggaccaaagaaatcccaccattgtaaaaaccaatttgggaaattatagattgtgttggttttgaaatatattaaccatgagtgcttgaagcgggtattttggtgccaaaaaaccttagtccaagcatcaatataatcccaataggtataacctatagggtcaaatgatactgaaaatctttttcctttgtttaagtccgaaccaaaatgtcttggttgaagaacttttagtatttgaattgttgagtgggtgttcaaagtttgatcttttggggctttgaaatgttttatagacactgaatttgagtctaccaaaatcaattcgtaaaaagtcctggacttcatgatggtggttggtttgaaatgaaatccagacgggaatgccttggatgttgcctgaaatgggtttttgtcccagaattcaggttccatctgcaaaacagttgaaaatttatttttgtaaatataattgttagttttcttggtgggtggtgtttgaattttggctagtggtagtttccttttaggattaatagttgttttgctcattgatgtagtctggatcatggtttgtaagtttgattcagaatcatcgtcagattttgaggcaatatctgc

SEQ ID NO: 9782 - DNA, 1082 bp, Glycine max
  Gm_smallRNAprecursor_2615
tcttcaatagagcttgtttcttccttctttgaggatgaaccttcttcatcttgttgtaacatttgcagaacttccttaagatttttagttaggatctctttcgattttgatcctgctaaaaatggtgtcaggtgggacttttggttcaaaaacacagaagtttctggatcagctgctctgagaaattccggataggattggaaccagagtttcacttgttctggatcagctttggacgagtcgaattgagtccaccattttacaaatgcatgcttttgtagtgatggatattggttggttttttcagttttactgtaaccatattgccatgaaaaaatccatgacaaagcaaaactggaaaaatatttaagatctgttggaattcgtgattcctaagaattgtattgtttttcaaattgagcaaatccttgttgaactgtttctgggaaaatctctggaattggaccaaagaaatcccaccattgtaaaaaccaatttgggaaattatagattgtgttggttttgaaatatattaaccatgagtgcttgaagcgggtattttggtgccaaaaaaccttagtccaagcatcaatataatcccaataggtataacctatagggtcaaatgatactgaaaatctttttcctttgtttaagtccgaaccaaaatgtcttggttgaagaacttttagtatttgaattgttgagtgggtgttcaaagtttgatcttttggggctttgaaatgttttatagacactgaatttgagtctaccaaaatcaattcgtaaaaagtcctggacttcatgatggtggttggtttgaaatgaaatccagacgggaatgccttggatgttgcctgaaatgggtttttgtcccagaattcaggttccatctgcaaaacagttgaaaatttatttttgtaaatataattgttagttttcttggtgggtggtgtttgaattttggctagtggtagtttccttttaggattaatagttgttttgctcattgatgtagtctggatcatggtttgtaagtttgattcagaatcatcgtcagattttgaggcaatatctgccca

SEQ ID NO: 9783 - DNA, 1082 bp, Glycine max; identical to SEQ ID NO: 9782
  Gm_smallRNAprecursor_2616

SEQ ID NO: 9784 - DNA, 1083 bp, Glycine max
  Gm_smallRNAprecursor_2617
tcttcaatagagcttgtttcttccttctttgaggatgaaccttcttcatcttgttgtaacatttgcagaacttccttaagatttttagttaggatctctttcgattttgatcctgctaaaaatggtgtcaggtgggacttttggttcaaaaacacagaagtttctggatcagctgctctgagaaattccggataggattggaaccagagtttcacttgttctggatcagctttggacgagtcgaattgagtccaccattttacaaatgcatgcttttgtagtgatggatattggttggttttttcagttttactgtaaccatattgccatgaaaaaatccatgacaaagcaaaactggaaaaatatttaagatctgttggaattcgtgattcctaagaattgtattgtttttcaaattgagcaaatccttgttgaactgtttctgggaaaatctctggaattggaccaaagaaatcccaccattgtaaaaaccaatttgggaaattatagattgtgttggttttgaaatatattaaccatgagtgcttgaagcgggtattttggtgccaaaaaaccttagtccaagcatcaatataatcccaataggtataacctatagggtcaaatgatactgaaaatctttttcctttgtttaagtccgaaccaaaatgtcttggttgaagaacttttagtatttgaattgttgagtgggtgttcaaagtttgatcttttggggctttgaaatgttttatagacactgaatttgagtctaccaaaatcaattcgtaaaaagtcctggacttcatgatggtggttggtttgaaatgaaatccagacgggaatgccttggatgttgcctgaaatgggtttttgtcccagaattcaggttccatctgcaaaacagttgaaaatttatttttgtaaatataattgttagttttcttggtgggtggtgtttgaattttggctagtggtagtttccttttaggattaatagttgttttgctcattgatgtagtctggatcatggtttgtaagtttgattcagaatcatcgtcagattttgaggcaatatctgcccaa

SEQ ID NO: 9785 - DNA, 1083 bp, Glycine max; identical to SEQ ID NO: 9784
  Gm_smallRNAprecursor_2618

SEQ ID NO: 9786 - DNA, 1076 bp, Glycine max
  Gm_smallRNAprecursor_2619
tcaatagagcttgtttcttccttctttgaggatgaaccttcttcatcttgttgtaacatttgcagaacttccttaagatttttagttaggatctctttcgattttgatcctgctaaaaatggtgtcaggtgggacttttggttcaaaaacacagaagtttctggatcagctgctctgagaaattccggataggattggaaccagagtttcacttgttctggatcagctttggacgagtcgaattgagtccaccattttacaaatgcatgcttttgtagtgatggatattggttggttttttcagttttactgtaaccatattgccatgaaaaaatccatgacaaagcaaaactggaaaaatatttaagatctgttggaattcgtgattcctaagaattgtattgtttttcaaattgagcaaatccttgttgaactgtttctgggaaaatctctggaattggaccaaagaaatcccaccattgtaaaaaccaatttgggaaattatagattgtgttggttttgaaatatattaaccatgagtgcttgaagcgggtattttggtgccaaaaaaccttagtccaagcatcaatataatcccaataggtataacctatagggtcaaatgatactgaaaatctttttcctttgtttaagtccgaaccaaaatgtcttggttgaagaacttttagtatttgaattgttgagtgggtgttcaaagtttgatcttttggggctttgaaatgttttatagacactgaatttgagtctaccaaaatcaattcgtaaaaagtcctggacttcatgatggtggttggtttgaaatgaaatccagacgggaatgccttggatgttgcctgaaatgggtttttgtcccagaattcaggttccatctgcaaaacagttgaaaatttatttttgtaaatataattgttagttttcttggtgggtggtgtttgaattttggctagtggtagtttccttttaggattaatagttgttttgctcattgatgtagtctggatcatggtttgtaagtttgattcagaatcatcgtcagattttgaggcaatatctgc

SEQ ID NO: 9787 - DNA, 1077 bp, Glycine max
  Gm_smallRNAprecursor_2620
tcaatagagcttgtttcttccttctttgaggatgaaccttcttcatcttgttgtaacatttgcagaacttccttaagatttttagttaggatctctttcgattttgatcctgctaaaaatggtgtcaggtgggacttttggttcaaaaacacagaagtttctggatcagctgctctgagaaattccggataggattggaaccagagtttcacttgttctggatcagctttggacgagtcgaattgagtccaccattttacaaatgcatgcttttgtagtgatggatattggttggttttttcagttttactgtaaccatattgccatgaaaaaatccatgacaaagcaaaactggaaaaatatttaagatctgttggaattcgtgattcctaagaattgtattgtttttcaaattgagcaaatccttgttgaactgtttctgggaaaatctctggaattggaccaaagaaatcccaccattgtaaaaaccaatttgggaaattatagattgtgttggttttgaaatatattaaccatgagtgcttgaagcgggtattttggtgccaaaaaaccttagtccaagcatcaatataatcccaataggtataacctatagggtcaaatgatactgaaaatctttttcctttgtttaagtccgaaccaaaatgtcttggttgaagaacttttagtatttgaattgttgagtgggtgttcaaagtttgatcttttggggctttgaaatgttttatagacactgaatttgagtctaccaaaatcaattcgtaaaaagtcctggacttcatgatggtggttggtttgaaatgaaatccagacgggaatgccttggatgttgcctgaaatgggtttttgtcccagaattcaggttccatctgcaaaacagttgaaaatttatttttgtaaatataattgttagttttcttggtgggtggtgtttgaattttggctagtggtagtttccttttaggattaatagttgttttgctcattgatgtagtctggatcatggtttgtaagtttgattcagaatcatcgtcagattttgaggcaatatctgcc

SEQ ID NO: 9788 - DNA, 1079 bp, Glycine max
  Gm_smallRNAprecursor_2621
tcaatagagcttgtttcttccttctttgaggatgaaccttcttcatcttgttgtaacatttgcagaacttccttaagatttttagttaggatctctttcgattttgatcctgctaaaaatggtgtcaggtgggacttttggttcaaaaacacagaagtttctggatcagctgctctgagaaattccggataggattggaaccagagtttcacttgttctggatcagctttggacgagtcgaattgagtccaccattttacaaatgcatgcttttgtagtgatggatattggttggttttttcagttttactgtaaccatattgccatgaaaaaatccatgacaaagcaaaactggaaaaatatttaagatctgttggaattcgtgattcctaagaattgtattgtttttcaaattgagcaaatccttgttgaactgtttctgggaaaatctctggaattggaccaaagaaatcccaccattgtaaaaaccaatttgggaaattatagattgtgttggttttgaaatatattaaccatgagtgcttgaagcgggtattttggtgccaaaaaaccttagtccaagcatcaatataatcccaataggtataacctatagggtcaaatgatactgaaaatctttttcctttgtttaagtccgaaccaaaatgtcttggttgaagaacttttagtatttgaattgttgagtgggtgttcaaagtttgatcttttggggctttgaaatgttttatagacactgaatttgagtctaccaaaatcaattcgtaaaaagtcctggacttcatgatggtggttggtttgaaatgaaatccagacgggaatgccttggatgttgcctgaaatgggtttttgtcccagaattcaggttccatctgcaaaacagttgaaaatttatttttgtaaatataattgttagttttcttggtgggtggtgtttgaattttggctagtggtagtttccttttaggattaatagttgttttgctcattgatgtagtctggatcatggtttgtaagtttgattcagaatcatcgtcagattttgaggcaatatctgccca

SEQ ID NO: 9789 - DNA, 1080 bp, Glycine max
  Gm_smallRNAprecursor_2622
tcaatagagcttgtttcttccttctttgaggatgaaccttcttcatcttgttgtaacatttgcagaacttccttaagatttttagttaggatctctttcgattttgatcctgctaaaaatggtgtcaggtgggacttttggttcaaaaacacagaagtttctggatcagctgctctgagaaattccggataggattggaaccagagtttcacttgttctggatcagctttggacgagtcgaattgagtccaccattttacaaatgcatgcttttgtagtgatggatattggttggttttttcagttttactgtaaccatattgccatgaaaaaatccatgacaaagcaaaactggaaaaatatttaagatctgttggaattcgtgattcctaagaattgtattgtttttcaaattgagcaaatccttgttgaactgtttctgggaaaatctctggaattggaccaaagaaatcccaccattgtaaaaaccaatttgggaaattatagattgtgttggttttgaaatatattaaccatgagtgcttgaagcgggtattttggtgccaaaaaaccttagtccaagcatcaatataatcccaataggtataacctatagggtcaaatgatactgaaaatctttttcctttgtttaagtccgaaccaaaatgtcttggttgaagaacttttagtatttgaattgttgagtgggtgttcaaagtttgatcttttggggctttgaaatgttttatagacactgaatttgagtctaccaaaatcaattcgtaaaaagtcctggacttcatgatggtggttggtttgaaatgaaatccagacgggaatgccttggatgttgcctgaaatgggtttttgtcccagaattcaggttccatctgcaaaacagttgaaaatttatttttgtaaatataattgttagttttcttggtgggtggtgtttgaattttggctagtggtagtttccttttaggattaatagttgttttgctcattgatgtagtctggatcatggtttgtaagtttgattcagaatcatcgtcagattttgaggcaatatctgcccaa

SEQ ID NO: 9790 - DNA, 1076 bp, Glycine max
  Gm_smallRNAprecursor_2623
cccatttttcggggagagttacttaatcccattttattattctttttaaaaaaacgttggcttttgtcatatcagtgataaataaggttgttctcccttttgtggttgcaacaggactctagatgcacaagtattcatgaccttgtactggatcctataaatcaaagtcgctaggattgatccttctttcatgtcaaggccatgaaagtggatatttaagaacagagagtcaagaatgtttctgtccatcagactcactgttttgtttggataacaattaaaatatattggaccttgtccaaggctagtttcgactgttccaattagggagtcttcaaatttattatgcctaatatctcttagacacattaaaactgttgcatctatgcccatgtcaatcaagggcttgatgactacttgtacacagccaatgtgtagatatttatacttacggctatgttcataaattgaattttttgaaagtaaatgaaactcttcccctatatcttgtcctagaggaatattgttttctactgttttgattatgtaatcaaatttgtgtttgtctttaattgtttcaggaacgtatagttgatcctgagggatttctggaatgttccagtcatccatgttttgattgatatcttcgaattggacttcctcatcgaagagattgtgtttggggcgacctcttgggtatggttttcttgatcacttaataaattggaatttcttgaagaagatgatgatgaagaatttgatcgaaaagagatacgggaaaaagaacgtagaagtctagacatgattataacattctctaatatctttgcctttatttggttccatagaaatatttccgtaagtaaatatgtaacaaaattctttggatctgaaatattttaaacaaaaactcttttttaaaaaaattgtttgaacggcattcctatagccaccagtatattatgtcttaatattttggttaaacagtacaccttagccttactgccctctatccatcacgggtcttactgctacagtaccattcatctaaaatattagactgttgtacttccaga

SEQ ID NO: 9791 - DNA, 1159 bp, Glycine max
  Gm_smallRNAprecursor_2624
cccatttttcggggagagttacttaatcccattttattattctttttaaaaaaacgttggcttttgtcatatcagtgataaataaggttgttctcccttttgtggttgcaacaggactctagatgcacaagtattcatgaccttgtactggatcctataaatcaaagtcgctaggattgatccttctttcatgtcaaggccatgaaagtggatatttaagaacagagagtcaagaatgtttctgtccatcagactcactgttttgtttggataacaattaaaatatattggaccttgtccaaggctagtttcgactgttccaattagggagtcttcaaatttattatgcctaatatctcttagacacattaaaactgttgcatctatgcccatgtcaatcaagggcttgatgactacttgtacacagccaatgtgtagatatttatacttacggctatgttcataaattgaattttttgaaagtaaatgaaactcttcccctatatcttgtcctagaggaatattgttttctactgttttgattatgtaatcaaatttgtgtttgtctttaattgtttcaggaacgtatagttgatcctgagggatttctggaatgttccagtcatccatgttttgattgatatcttcgaattggacttcctcatcgaagagattgtgtttggggcgacctcttgggtatggttttcttgatcacttaataaattggaatttcttgaagaagatgatgatgaagaatttgatcgaaaagagatacgggaaaaagaacgtagaagtctagacatgattataacattctctaatatctttgcctttatttggttccatagaaatatttccgtaagtaaatatgtaacaaaattctttggatctgaaatattttaaacaaaaactcttttttaaaaaaattgtttgaacggcattcctatagccaccagtatattatgtcttaatattttggttaaacagtacaccttagccttactgccctctatccatcacgggtcttactgctacagtaccattcatctaaaatattagactgttgtacttccagaaagtactgttcaaacgtttactgtatagatcaaaataaaacattacgtacactatacaagattttagatccataaaatctgtt

SEQ ID NO: 9792 - DNA, 1102 bp, Glycine max
  Gm_smallRNAprecursor_2625
tggatgaaagtctggagatgtttgaaatgttgatcaatgttttgggaaaagattaaaacatcatcaatgtaggcaatgacgaattttgaatagggattaaaaatatcattcataattttttgaaattctgaaggggcattcttcagtccgaacgacattacgttccattcatattgcccgaaaggtacagtaaacgtcgttttgtacctatctgattcttggatttggatttgccagaatccatatttcatatcaaattttgaaaatacttttgcagaatttaatctattaagtaagtcttttttctttggaataggatacttaatccattgtaatgcttggtttagtggtttgtaatttatgactaaacggggtgttccacgctcaatctcggattgtttgttgacataaaaagccgcacaagaccatgggcttttgcttttccagattagacctttatcaagcaaatccttgatttccttttggcaatattgaaggagttcttcgttcatttggattggtctggcttttgtgggaatttgtttttccctaaagtctttctcataagggagatcaacaatatgtttttttctgtcccaaaatgcatgtggcaaatcagaacaaacagttgacacaatatgacttaataatgattggatttttttcttttacttggggttttcccagttgtacctgaatattattaaacgatacttcttcttttaagaagttaatttgattaatcttattttctataagatttatatttctggagattggtttagtagaaaaattaaatataatttttcttcctaaataatttgtggttattccttcattagatatttggatgggaaacaaggctctaatgaagggggttcctaggattacttcgttcttaaggttttttaccagaagaaagtttgtgttaatcctaagactttggttttcaatgattgcatttgatagcttaaaattaatttttaattttgagtcgtttgctgtacttaatttttctgaggttttttcaaagaattttgtaggaattaatcctttcaaaatgcagtttgaatcagcccctgtgtcaaataaggccaatgtt

SEQ ID NO: 9793 - DNA, 1085 bp, Glycine max
  Gm_smallRNAprecursor_2626
tgcaacaaacattgtcataaaggtacaagttgatgattcatggctatggcatcaaagatttggccacttcaacacacatgccttgaagttgttacatgagaagaacatgatgagagatcttccaagcataaaggagaacaatgaagtgtgtgaaggatgtctccttagtaagcaacaccgatttcctttctcaacaagcggagcatggagagtgaaagatctattagagctgatacatacgaacgtttgtggaccaatgaggacgccatcacatgggaacaacaggtacttcatactcttcattgatgatttctctagaatgacatgggtatattttctaaaagaaaaatcagaagtctttggagtattcaaaaagttcaaggcccttgctgaaaatcaaagtggaaaacgaataaaagtactaagaagtgatcgcggcaaagagtacacctttcgcgagtttgaaagattttgtgaggatgaaggcattgagcgacaacttacagtcgcatattctcctcaacaaaacggagtgtccgagaaaaagaatcgcacagttatggaaatggctagattgatgctcaaggagaagggactacctaacacattctgggctgaagcagtctacactgttgtttacatactcaacagatatccaactaagtctgtaaaagacaagccaccaattgaagcttggagcgggaagaagccatcaacaaagcacctaagggtctttggatctatatgctacattcatattccgaacatgaagaggcacaagcttgaagacaagactatacgaagtatcttccttgggtataacaatatctctaagggctaccgtgtctacaacttgtaagctaagaaactcgtcatcagtcgagatgttgaagttgatgagtacgcttcttggaattgggatgaagaaaaagtggagaagaatgttcttatacccgctcaactacctcaagaagaagctgaggaagaagacccaggtgaaccaccttcacctccaccacaacaacaagatcaagaactatcatcaccagagtctactccaagacgagtaagatcttcggtggaca

SEQ ID NO: 9794 - DNA, 1160 bp, Glycine max
  Gm_smallRNAprecursor_2627
tgaagatggaggaggatgttgattgaaattgcatggcagtttgcctgatatcaggcatcttagaatgctcctcatgtattggtttctctaacagctgattactaaatacttttggacagccagagatatttagatatccaagagaacttagactcaatatgttgctgggtagacttactagactaatgcagtttttcaaattcaagaaagcaagttttcttagaagtccaactgatggatggatccgtgcaagatttgtgcatccttcaagaattatccactcaagattaaggacccctccaaagtctggagcctcaataagattcttggagtaactgagatccaaagctcttaaatttggcagatgctgcaaaataccaatacaagagatagctacttatcgcgtgttttttaatatatcctcaaaaagatagtattctttttaaattcatattttaaaaactaaaattaagaagatagtttacaatacctttatgcctttccataattgtttgatgttgctatgttgcaagatcaattcaaccagcaggttcggctgaaaacttgatggcaaataggagaaaggatagttataccactcaagaaattgtagtttattggagagacaattaactgaattaagtattcccataaacttcacatcacggaatatgagcaacctaaggttgctcattttggacaatgcttcagcatcagccatcaatatttccatctctctgtctaaaacaatggcttcattgtttgttgtttcctaaagcattgcaaaatgattaatcacttgatgtataataaaacttgtaaaaggggaatataagatgattagtttattttctattttcgattaatatattatcattaacaattacaaaattgttactttattttcattttattctttcctattaacaattaacgattgcaaaacattaacaaaaagttgaaaaagaaatcctaaaatcttgtattttcaaacaactacttaccgttgccttcgacatattgtagaaatcttcgtggagccaaaccctgctccactttcctggctctttgggtgcattgcctttaacaattgttctgcctaaaactttcaacaaattatgcatttcaatgaatccacttgaattatctatgagtgattt

SEQ ID NO: 9795 - DNA, 1040 bp, Glycine max
  Gm_smallRNAprecursor_2628
agttgagaatgttggaatcaacaaagtgctcattgatggaggagcggctgtcaacttaatgcctcgatctatgctctacaagatcgggaaacatgacactgatctatctgcccacaacattgtgctttcgaattatgaaggtaaaactggctattctttgggagccattcaagtagatgttgctgtaggcagtatagttcgaccaactctattcctggtgatccagtccaaggctaattttaacttgctattaggaagggaatggatccatggagttggggctgtgccatctacccttcaccagaaactcattatctggagggaggatgggattgttgagaatatagaggcggatcaaagcttctataagtcagaggtcgataatgttactgcaaaaacctttgacaaaaagttggctaacatagcaccttgtggtgacaaggaggctgttgtcgaatcaagtgacaacgttatccactctgtcaaactccatcctacctatgggtttatatgggagagggaggaaattggtgctgttccctctgaagatggagtcattccaccaactgggtggaatatgtatgaagattaatatgactgaggccactgcattggccagaattacggcttatatggccgaaaatagactaaatacggcctttgaggctgaatctcaacaaaatatggcagttgaagccaagatcgaagatcataaaaacaaagaaacaaaggatcgaagactggattgcatttatgacgatgagccgctgggtttcgagaaaaatcccgtaagtgaggtgccaaagatgcaggctcaagatcctttggaggaaatcgacattggagatggctcgatgaaaaggccaacatatatcagtgccaatatcacctcaagtctaaaagaaaagttggtgcctcttcttagggaatttaaagactgttttgcttgggattaccacgaaatgcctgggttaagcagagaaatggtcgaaatgaaattaccaattaaggagggaaaaagaccagtaaaacaactacca

SEQ ID NO: 9796 - DNA, 1157 bp, Glycine max
  Gm_smallRNAprecursor_2629
aagaccagtaaaacaactaccaagaagattcgcaccagaaatcatgtccaaaatcaaggaagagatcgaaaggctgctgaggtgtaaattcatcagatctgccaggtatgtcgaatggttagcaaatatagtccctgtcattaaaaagaatggaactcttagagtatgcatagattttagggatttaaataatgctacacctaaagatgaatatgctatgccagtagcggaaatgttggtagattcggcagctggcttcgaatttttaagcatgttagatggttattctggttataaccaaatatttattgctgaaagtgatgtgtcgaaaacagcatttcgatgccctggtgctttaggcacttatgaatgggtggttatgccctttgggttgaaaaatgctggggccacttatcaaagggccatgaattccatgtttcatgattttattgacacatttatgcaaatttatattgatgatataatcatcaaatcctcctcagaagatagccatttggattatcttaggcaatctttcgaacgaatgaggaaacatggattgaaaatgaatccattaaagtgtgctttttgtgtgcgtgcaggagatttccttggttttgtggtgcataaaaaaggcattgagataaatcaaaataagacaaaggctattcttgagacgaagcctccttcgaccaaaaaacagcttcaatctttgctaggaaaaatcaacttcttgaggcgattcatttcaaatctaagtggcaaagctcaaattttttcgccattacttcgactcaagaaagatgaaccattcaaatggaatgaagagcatcaaaaggctttcgatgaaattaaagaatatctgatcaagcctcctgtgttaatgcctcccagtcgaaataagactatgaagttgtatattgctgcgtctgacaagaccattggtagcatgttggctcaggaagatgatgatggcatagaacatgcaatttattatcttagtcgtgtactaaatgatgcagaaactagatatactgccatagaaaaactttgtctttgtctgtatttctcttgtgcaaaacttaagcaatatataaagcctgttgatgtttatgtgtattctcattatgatattattaagcacatgttgtcaaaac

SEQ ID NO: 9797 - DNA, 1079 bp, Glycine max
  Gm_smallRNAprecursor_2630
atgtgggatatatatttaattattttattgtaaatgtaattaattttttttctttataaataatgtataaattattttgtgaatttattgtattatattttattttgcagtatcaatgagatcttcgtcgtcatcttcatcaaatattaaaattaagtctagcccgatcgatggagacgtattatggatgcaagctaagcattcttcagaacatgtttggaatggggaagaagaccgaaaattacacataagacgagttgtccccacgtatcaaggggaagaagaaattccagaggaaattatttctcttcttcggcaatgtggtctttattggataatgaagatgagctacctaaaaataaatgtttcattaattaatcactgctttgattgaaagatggaggtccgaaacgcatacgtttcacatgaaatgtggagagtgtacaattactcttcaagatgtcttagtattattaggtctgcgtgttgacgggtatcattaattggtcaaactaatcttgattcggctgaattatgtgaagaattattgggagtcagactacaggaaggtgaactccaaggtagtgtggttaaattaagctggctgactcaccatttttcacacataaataaccatgacggtaacgtaaaacaactacaaaggtttaccagtgcatgaatccttagattcataggaggagtcctatttgttgacaaaagcaacaacaaagttttcctacggtacctacaatttttacgggactttgagcagtgcaacatgcatggagacctgccgtgcttgcttatttatatagagagatgtgaagccccactgattacaaaattaaatcaatggaaggtatgtgcatcttaatccaaatgtgggcatgggaacgatgcacgactttggctccaaagaggactcctcccgtgatagaaaataagtcactcggacacaggtgagttgttttaaaaataagatttcatttgaaaataattaataatgtgacgcgtgtccactgatgatttcatatttttgttaggtggttgcgacgtggaaatcagcatattgacaatga

SEQ ID NO: 9798 - DNA, 1190 bp, Glycine max
  Gm_smallRNAprecursor_2631
ttcaattgtaaagattgaaaaaaatattgttgacctgcatctatgaatggttgtcggtaatagatttcatccagtagttgatcgttggttagttgaagggtgttgtgcattctaagcttgagtgtatcaaaagaacagttcttaggaactcgcattggtgttgaaatgagactttgaaaataaacaccagtttggttgtaactgattgatccatttggaaaaatgaaagctaatctagaattagtaatggtttgactgcttgtttctcccaaaaatgacatagtaataagattgaatttggtttgtgaaattatgttatatgagattgtgtgtttgtattgtgtttatgttgtgttatttatagttgtatgagtattctgccacgatgtgtattggaatccaatgtttcttttttcctagtaagtgatgtagcagacgtccattataattccagagtgaacaaagagattatgagttgtccatctcatgtcagttttgcacacgtctctaaaaattaaatgtatcacctgtaaaactgacatgaaatggacagctcataatgcagagtgttgttaatttggactgtgatttttcccatgtaattaaagcaataggcgttcatgatgattttcagagtgaataaagagatgatgagctgtccatttcatggcagttttgcaggtgagacatttaatttttagagacgtgtgcaaattacagagtattgtcaatttggattgtgatttttcccttgtaattaaagcagcaaacgtccataattattttcagagtgaataaagagattatgagttgtccatttcatgtcagttttgtcgatgagacatttaatttttaaaagcagtgtagtgtaaatgacaaagtattgtgaattttgacagttatgttaccatgtcaactactacagtaaacgtgggtaaactgaaaattgctaatttaaatttaaaggaaaaattatttcaatatgtaaagtgataactgaaaacagacataagacattacatgaaaatctcaaagaagaaataacttagacatgaatgatccgtagattaccaatcccgtttgaatataggttagtgggatggagacaggttacttccttcgggcccggaagaggagtccgtatcactatcatggtttttgagccagcaagtctcgtattcacctgataa

SEQ ID NO: 9799 - DNA, 1039 bp, Glycine max
  Gm_smallRNAprecursor_2632
agcaatcaaagaatacaacatcagaaatcattttgattgcagaacaatttactctgaccaaagaaggctaaatttcgtctgcaagttacatgaaaatggttgtacatggagcttgggcgcatgcaattcaaagaggcataacaaatggattatcaagagtattagaggtcatcacacttgtctcgtgccgatgctcagacaagatcatcgccaacttgacaaacacgtcataacacagatcattcaaccaattatcaaaacaaacccaactgtctccatcaagacgttgattgcagaaattaaaacgttcatgaattataccccatcctacaagaagacatggttagcaaagcaaaaagcattggagatgattcatggaaactgggaagaatcatatgccaaacttccaaaacttttcagagctttgcaatcttgtgttcccgggactgtggtcactgctcaaacagaatccttgtatgaggggggagaaataatatcgggcaaaagattgtttaaacgtgtcttttggtcatttggtccatgcattaatggttttgcatgttgcaaacccattgtacaagtagatggtacatggctttacggaaagtatactggtacactgtcgatagctaccgcacaagatggagctaaccatatcttcccgattgcctatgccattgtagaaggggagacaacttcagcttgggggttttttctaaagaatttgagaagacatgttactccgcaaattaacatttctcttatttcagactgacacccctcaattataagtgcctacaacaacccaagtaacttatgggtccaggacacatcccatttcttttgcctgcgccacattgcacaaaactttcttcgtggtaactcaaactgcaaacatttaaagaaaccacttatgttggctggtgagaatctattttatttattcgttataattttctttcaatcaaattttataacataatacattgattaaatatttacagggtacgcatacacggagaagatgcactggcgacat

SEQ ID NO: 9800 - DNA, 1154 bp, Glycine max
  Gm_smallRNAprecursor_2633
tcatcgttggttgaggagacctatttcaagactgcacaactctttgctaatagaggtcgacaaactcaggcaatgatcaactccggctcacagtattctgaagtcgtcttcgatgcaatcaatagtggtcaacaagaatctaatacacacattgtaaatgaattcgacagacacaatcacacttttattataacagagactcaatccctacttgaaacacccagaccacctggaaggtttagagtaatgttacaatcccaaaagtgtgattgtggtgaatttcaggctaaacatttaccgtgttctcacgtcatggctgcctgtaaatctgtcaatgttgatcccatgacctatgtgtcgatgatattcactttacaacacattttgcacatatacgacaactcctttggtctattgccacacgaatcaatgtggcaagaatatgaaggagatcagtggggtcctgatccaaggagaaaaaggactgcaaagggtcatctcgtttcaactcgcattcctaccgagatggacgaagacgaaaatgaacgagcaagtagaaaaaaatgtggactttgccggtaacatggtcatagcagaaataattgtcctaatgtatcctcatcttagtttttccttagacaaatgtcattgtttaaatattttattgatgacgtagtataatgttcttatataaataaattgttaaaagctttagttttatcatttttaattaaatctaataacataaacaaactaattatatttagtaaaatagttaaattaaaaattttaaaattcagattattatacaaaataaatatttactaaaataaatatattattatacaaaattcagattttaaaacatatattcacccaaaaaatatcttaaataatttaaataatataacaaaaatacttaaatttaataatatcattttcttaataacaaaattaaattataaaataatattacataaattaatttaataaataaataattttatataatataatatttaattttaataatatataaacttttttataaaaaaaaggaagaaaggaagtcagggtgccagaacccgacttccgtgaaaacgtaaaagtgatgtaatttaggaattaattcccaaactggtgtattccaagca

SEQ ID NO: 9801 - DNA, 1197 bp, Glycine max
  Gm_smallRNAprecursor_2634
aaatggttcatgcaaggctgaaagaaaaattgcccggaaagagatttctccttgttttagatgacgtttggaatgaatgccaatctaaatgggaggaagtgcagaaagctcttgattttggggctcagggaagtaagattctcatcacaacacgcagtaagaaagttgcttctaccatgcggtcaaaagaacaccacctgaagcaattacaagaagattattgcaggcagttgttggctgaacatgcattccgggatgataattctcaaccagatccagactgcaaggagattggaatgaagattgttgaaaaatgtaaagggcttcctctagccttgaaaacaatgggaagtctattacaccgcaaatctgtttcggaatggaaaagtgtattgcaaagtgagatgtgggaattagaggatagtgacattgtccctgctttacattgagctatcaccaccttccttctcatctcaaaagatgttttgcatactgtgccttatttcccaaagattatgagtttgacaaggagtgtttaattcagttcaggatggcttaaaaatttctacaatgccctcaacagagtaagagtctagaagaagttggtgaacagtacttcaatgatctattatcaaggtccttctttcaacaatcaagcaccagatacaaaacatgtttttatcatgcatgaccttctcaacgatttggcaaaatatgtttgtggggacatttgtttcaagttggaagctgatcaagcaaaagatattccaaaatcaactcgtcatttttcacttgcaatcagtcatgttcaatgttttaatgggtttggaactttatatgatacaagaaggctacatacatttatgtcaacaactgtgtgcagtgatttttattaccgttgttggcattgcaagatgtcaatagacgagttgttctccaagttccagttcttatgggtcttatctctgtattgctattctaacctaacagaggtgcctgactctgtagccaatcttaaacatctctgttcattagacctttcccatactaacatagaaaaactacctgaatcaacatgttcactctacaacttgcaaatactaaagctgaatcattgtgcacatttgaaggagctgccatcgaatttgcataaactcaataatttgcgttgccttgaatttataaatactggcgtta

SEQ ID NO: 9802 - DNA, 1126 bp, Glycine max
  Gm_smallRNAprecursor_2635
cccttaattgctcaaatttccactctgagcctctttatcaaatctcatattgcattgtcacactccacgtcagttgcaatcactcacacccctcctatataatacatcttcactctttgcatcctcaccctaaaccaaaccaaatcgaagacaaaacaattttaacatcaatctcaagggtatttttctctctcttttctctttccttatttagtttaatatatattttcttgtcttatctatcaaccatttagttgattttaggttattaactacttagagatcaacagagaaaggaaaggaatggacattactcttgcaaaaaaggtatgttcaaaattgcactaagctaagttccttatctaacaaaataaattatatacgtgaattgatgagttgactccaaattaaaccaagttggagcagagtttattggcacattcattctcatgtttgcggcaataggctctgcaattgagaaggaaaagacagagcaaaactttaattatgcagcgtcagtggacttgctgtcatgatctgtcatatcctccacatgtcacatctttggggctcatttcaacccccgagatgtggtgtgtggagaatatgacgatcatgacagcaagtccactagcgctgcataattagagtttctgatccatgtgtcttttcgttctcaattgcaaagcctattgtcacaaacatgagaataaatgtgccaataaactctgctccaacctaatttaattttcaactcaacaacatcaattcacatatatcattttactagataaggaacttagcttagtgcaattttggatatatcttttttgcaagaataatgttcattcttttctctattaatctctaattagttggtaccctaaaaccaaataaagggtagatagataagacaagaaaaactatattagactaaataggaagagaataaagagagaaagatacccttgagattgatgttaaaattgttatgtctttggtttattagatctgggacgaggatacaaagagtgaagaagtatgtattacataggaggaatgtgattgactagagaatcgagatggaaagaaaggaaaaatacatgaggtttgaaatttattacag

SEQ ID NO: 9803 - DNA, 1117 bp, Glycine max
  Gm_smallRNAprecursor_2636
taattgctcaaatttccactctgagcctctttatcaaatctcatattgcattgtcacactccacgtcagttgcaatcactcacacccctcctatataatacatcttcactctttgcatcctcaccctaaaccaaaccaaatcgaagacaaaacaattttaacatcaatctcaagggtatttttctctctcttttctctttccttatttagtttaatatatattttcttgtcttatctatcaaccatttagttgattttaggttattaactacttagagatcaacagagaaaggaaaggaatggacattactcttgcaaaaaaggtatgttcaaaattgcactaagctaagttccttatctaacaaaataaattatatacgtgaattgatgagttgactccaaattaaaccaagttggagcagagtttattggcacattcattctcatgtttgcggcaataggctctgcaattgagaaggaaaagacagagcaaaactttaattatgcagcgtcagtggacttgctgtcatgatctgtcatatcctccacatgtcacatctttggggctcatttcaacccccgagatgtggtgtgtggagaatatgacgatcatgacagcaagtccactagcgctgcataattagagtttctgatccatgtgtcttttcgttctcaattgcaaagcctattgtcacaaacatgagaataaatgtgccaataaactctgctccaacctaatttaattttcaactcaacaacatcaattcacatatatcattttactagataaggaacttagcttagtgcaattttggatatatcttttttgcaagaataatgttcattcttttctctattaatctctaattagttggtaccctaaaaccaaataaagggtagatagataagacaagaaaaactatattagactaaataggaagagaataaagagagaaagatacccttgagattgatgttaaaattgttatgtctttggtttattagatctgggacgaggatacaaagagtgaagaagtatgtattacataggaggaatgtgattgactagagaatcgagatggaaagaaaggaaaaatacatgaggtttgaaatttat

SEQ ID NO: 9804 - DNA, 1118 bp, Glycine max
  Gm_smallRNAprecursor_2637
taattgctcaaatttccactctgagcctctttatcaaatctcatattgcattgtcacactccacgtcagttgcaatcactcacacccctcctatataatacatcttcactctttgcatcctcaccctaaaccaaaccaaatcgaagacaaaacaattttaacatcaatctcaagggtatttttctctctcttttctctttccttatttagtttaatatatattttcttgtcttatctatcaaccatttagttgattttaggttattaactacttagagatcaacagagaaaggaaaggaatggacattactcttgcaaaaaaggtatgttcaaaattgcactaagctaagttccttatctaacaaaataaattatatacgtgaattgatgagttgactccaaattaaaccaagttggagcagagtttattggcacattcattctcatgtttgcggcaataggctctgcaattgagaaggaaaagacagagcaaaactttaattatgcagcgtcagtggacttgctgtcatgatctgtcatatcctccacatgtcacatctttggggctcatttcaacccccgagatgtggtgtgtggagaatatgacgatcatgacagcaagtccactagcgctgcataattagagtttctgatccatgtgtcttttcgttctcaattgcaaagcctattgtcacaaacatgagaataaatgtgccaataaactctgctccaacctaatttaattttcaactcaacaacatcaattcacatatatcattttactagataaggaacttagcttagtgcaattttggatatatcttttttgcaagaataatgttcattcttttctctattaatctctaattagttggtaccctaaaaccaaataaagggtagatagataagacaagaaaaactatattagactaaataggaagagaataaagagagaaagatacccttgagattgatgttaaaattgttatgtctttggtttattagatctgggacgaggatacaaagagtgaagaagtatgtattacataggaggaatgtgattgactagagaatcgagatggaaagaaaggaaaaatacatgaggtttgaaatttatt

SEQ ID NO: 9805 - DNA, 1113 bp, Glycine max
  Gm_smallRNAprecursor_2638
attgctcaaatttccactctgagcctctttatcaaatctcatattgcattgtcacactccacgtcagttgcaatcactcacacccctcctatataatacatcttcactctttgcatcctcaccctaaaccaaaccaaatcgaagacaaaacaattttaacatcaatctcaagggtatttttctctctcttttctctttccttatttagtttaatatatattttcttgtcttatctatcaaccatttagttgattttaggttattaactacttagagatcaacagagaaaggaaaggaatggacattactcttgcaaaaaaggtatgttcaaaattgcactaagctaagttccttatctaacaaaataaattatatacgtgaattgatgagttgactccaaattaaaccaagttggagcagagtttattggcacattcattctcatgtttgcggcaataggctctgcaattgagaaggaaaagacagagcaaaactttaattatgcagcgtcagtggacttgctgtcatgatctgtcatatcctccacatgtcacatctttggggctcatttcaacccccgagatgtggtgtgtggagaatatgacgatcatgacagcaagtccactagcgctgcataattagagtttctgatccatgtgtcttttcgttctcaattgcaaagcctattgtcacaaacatgagaataaatgtgccaataaactctgctccaacctaatttaattttcaactcaacaacatcaattcacatatatcattttactagataaggaacttagcttagtgcaattttggatatatcttttttgcaagaataatgttcattcttttctctattaatctctaattagttggtaccctaaaaccaaataaagggtagatagataagacaagaaaaactatattagactaaataggaagagaataaagagagaaagatacccttgagattgatgttaaaattgttatgtctttggtttattagatctgggacgaggatacaaagagtgaagaagtatgtattacataggaggaatgtgattgactagagaatcgagatggaaagaaaggaaaaatacatgaggtttgaaattt

SEQ ID NO: 9806 - DNA, 1114 bp, Glycine max
  Gm_smallRNAprecursor_2639
attgctcaaatttccactctgagcctctttatcaaatctcatattgcattgtcacactccacgtcagttgcaatcactcacacccctcctatataatacatcttcactctttgcatcctcaccctaaaccaaaccaaatcgaagacaaaacaattttaacatcaatctcaagggtatttttctctctcttttctctttccttatttagtttaatatatattttcttgtcttatctatcaaccatttagttgattttaggttattaactacttagagatcaacagagaaaggaaaggaatggacattactcttgcaaaaaaggtatgttcaaaattgcactaagctaagttccttatctaacaaaataaattatatacgtgaattgatgagttgactccaaattaaaccaagttggagcagagtttattggcacattcattctcatgtttgcggcaataggctctgcaattgagaaggaaaagacagagcaaaactttaattatgcagcgtcagtggacttgctgtcatgatctgtcatatcctccacatgtcacatctttggggctcatttcaacccccgagatgtggtgtgtggagaatatgacgatcatgacagcaagtccactagcgctgcataattagagtttctgatccatgtgtcttttcgttctcaattgcaaagcctattgtcacaaacatgagaataaatgtgccaataaactctgctccaacctaatttaattttcaactcaacaacatcaattcacatatatcattttactagataaggaacttagcttagtgcaattttggatatatcttttttgcaagaataatgttcattcttttctctattaatctctaattagttggtaccctaaaaccaaataaagggtagatagataagacaagaaaaactatattagactaaataggaagagaataaagagagaaagatacccttgagattgatgttaaaattgttatgtctttggtttattagatctgggacgaggatacaaagagtgaagaagtatgtattacataggaggaatgtgattgactagagaatcgagatggaaagaaaggaaaaatacatgaggtttgaaattta

SEQ ID NO: 9807 - DNA, 1114 bp, Glycine max; identical to SEQ ID NO: 9806
  Gm_smallRNAprecursor_2640

SEQ ID NO: 9808 - DNA, 1115 bp, Glycine max
  Gm_smallRNAprecursor_2641
attgctcaaatttccactctgagcctctttatcaaatctcatattgcattgtcacactccacgtcagttgcaatcactcacacccctcctatataatacatcttcactctttgcatcctcaccctaaaccaaaccaaatcgaagacaaaacaattttaacatcaatctcaagggtatttttctctctcttttctctttccttatttagtttaatatatattttcttgtcttatctatcaaccatttagttgattttaggttattaactacttagagatcaacagagaaaggaaaggaatggacattactcttgcaaaaaaggtatgttcaaaattgcactaagctaagttccttatctaacaaaataaattatatacgtgaattgatgagttgactccaaattaaaccaagttggagcagagtttattggcacattcattctcatgtttgcggcaataggctctgcaattgagaaggaaaagacagagcaaaactttaattatgcagcgtcagtggacttgctgtcatgatctgtcatatcctccacatgtcacatctttggggctcatttcaacccccgagatgtggtgtgtggagaatatgacgatcatgacagcaagtccactagcgctgcataattagagtttctgatccatgtgtcttttcgttctcaattgcaaagcctattgtcacaaacatgagaataaatgtgccaataaactctgctccaacctaatttaattttcaactcaacaacatcaattcacatatatcattttactagataaggaacttagcttagtgcaattttggatatatcttttttgcaagaataatgttcattcttttctctattaatctctaattagttggtaccctaaaaccaaataaagggtagatagataagacaagaaaaactatattagactaaataggaagagaataaagagagaaagatacccttgagattgatgttaaaattgttatgtctttggtttattagatctgggacgaggatacaaagagtgaagaagtatgtattacataggaggaatgtgattgactagagaatcgagatggaaagaaaggaaaaatacatgaggtttgaaatttat

SEQ ID NO: 9809 - DNA, 1195 bp, Glycine max
  Gm_smallRNAprecursor_2642
attgctcaaatttccactctgagcctctttatcaaatctcatattgcattgtcacactccacgtcagttgcaatcactcacacccctcctatataatacatcttcactctttgcatcctcaccctaaaccaaaccaaatcgaagacaaaacaattttaacatcaatctcaagggtatttttctctctcttttctctttccttatttagtttaatatatattttcttgtcttatctatcaaccatttagttgattttaggttattaactacttagagatcaacagagaaaggaaaggaatggacattactcttgcaaaaaaggtatgttcaaaattgcactaagctaagttccttatctaacaaaataaattatatacgtgaattgatgagttgactccaaattaaaccaagttggagcagagtttattggcacattcattctcatgtttgcggcaataggctctgcaattgagaaggaaaagacagagcaaaactttaattatgcagcgtcagtggacttgctgtcatgatctgtcatatcctccacatgtcacatctttggggctcatttcaacccccgagatgtggtgtgtggagaatatgacgatcatgacagcaagtccactagcgctgcataattagagtttctgatccatgtgtcttttcgttctcaattgcaaagcctattgtcacaaacatgagaataaatgtgccaataaactctgctccaacctaatttaattttcaactcaacaacatcaattcacatatatcattttactagataaggaacttagcttagtgcaattttggatatatcttttttgcaagaataatgttcattcttttctctattaatctctaattagttggtaccctaaaaccaaataaagggtagatagataagacaagaaaaactatattagactaaataggaagagaataaagagagaaagatacccttgagattgatgttaaaattgttatgtctttggtttattagatctgggacgaggatacaaagagtgaagaagtatgtattacataggaggaatgtgattgactagagaatcgagatggaaagaaaggaaaaatacatgaggtttgaaatttattacagttaggcacaaaggaaaagaagaggtagttgtttacttgtacagagaagtgttcgatgtgagaaagatacattggt

SEQ ID NO: 9810 - DNA, 1097 bp, Glycine max
  Gm_smallRNAprecursor_2643
tgctcaaatttccactctgagcctctttatcaaatctcatattgcattgtcacactccacgtcagttgcaatcactcacacccctcctatataatacatcttcactctttgcatcctcaccctaaaccaaaccaaatcgaagacaaaacaattttaacatcaatctcaagggtatttttctctctcttttctctttccttatttagtttaatatatattttcttgtcttatctatcaaccatttagttgattttaggttattaactacttagagatcaacagagaaaggaaaggaatggacattactcttgcaaaaaaggtatgttcaaaattgcactaagctaagttccttatctaacaaaataaattatatacgtgaattgatgagttgactccaaattaaaccaagttggagcagagtttattggcacattcattctcatgtttgcggcaataggctctgcaattgagaaggaaaagacagagcaaaactttaattatgcagcgtcagtggacttgctgtcatgatctgtcatatcctccacatgtcacatctttggggctcatttcaacccccgagatgtggtgtgtggagaatatgacgatcatgacagcaagtccactagcgctgcataattagagtttctgatccatgtgtcttttcgttctcaattgcaaagcctattgtcacaaacatgagaataaatgtgccaataaactctgctccaacctaatttaattttcaactcaacaacatcaattcacatatatcattttactagataaggaacttagcttagtgcaattttggatatatcttttttgcaagaataatgttcattcttttctctattaatctctaattagttggtaccctaaaaccaaataaagggtagatagataagacaagaaaaactatattagactaaataggaagagaataaagagagaaagatacccttgagattgatgttaaaattgttatgtctttggtttattagatctgggacgaggatacaaagagtgaagaagtatgtattacataggaggaatgtgattgactagagaatcgagatggaaagaaaggaaaaatacat

SEQ ID NO: 9811 - DNA, 1110 bp, Glycine max
  Gm_smallRNAprecursor_2644
tgctcaaatttccactctgagcctctttatcaaatctcatattgcattgtcacactccacgtcagttgcaatcactcacacccctcctatataatacatcttcactctttgcatcctcaccctaaaccaaaccaaatcgaagacaaaacaattttaacatcaatctcaagggtatttttctctctcttttctctttccttatttagtttaatatatattttcttgtcttatctatcaaccatttagttgattttaggttattaactacttagagatcaacagagaaaggaaaggaatggacattactcttgcaaaaaaggtatgttcaaaattgcactaagctaagttccttatctaacaaaataaattatatacgtgaattgatgagttgactccaaattaaaccaagttggagcagagtttattggcacattcattctcatgtttgcggcaataggctctgcaattgagaaggaaaagacagagcaaaactttaattatgcagcgtcagtggacttgctgtcatgatctgtcatatcctccacatgtcacatctttggggctcatttcaacccccgagatgtggtgtgtggagaatatgacgatcatgacagcaagtccactagcgctgcataattagagtttctgatccatgtgtcttttcgttctcaattgcaaagcctattgtcacaaacatgagaataaatgtgccaataaactctgctccaacctaatttaattttcaactcaacaacatcaattcacatatatcattttactagataaggaacttagcttagtgcaattttggatatatcttttttgcaagaataatgttcattcttttctctattaatctctaattagttggtaccctaaaaccaaataaagggtagatagataagacaagaaaaactatattagactaaataggaagagaataaagagagaaagatacccttgagattgatgttaaaattgttatgtctttggtttattagatctgggacgaggatacaaagagtgaagaagtatgtattacataggaggaatgtgattgactagagaatcgagatggaaagaaaggaaaaatacatgaggtttgaaatt

SEQ ID NO: 9812 - DNA, 1110 bp, Glycine max; identical to SEQ ID NO: 9811
  Gm_smallRNAprecursor_2645

SEQ ID NO: 9813 - DNA, 1111 bp, Glycine max
  Gm_smallRNAprecursor_2646
tgctcaaatttccactctgagcctctttatcaaatctcatattgcattgtcacactccacgtcagttgcaatcactcacacccctcctatataatacatcttcactctttgcatcctcaccctaaaccaaaccaaatcgaagacaaaacaattttaacatcaatctcaagggtatttttctctctcttttctctttccttatttagtttaatatatattttcttgtcttatctatcaaccatttagttgattttaggttattaactacttagagatcaacagagaaaggaaaggaatggacattactcttgcaaaaaaggtatgttcaaaattgcactaagctaagttccttatctaacaaaataaattatatacgtgaattgatgagttgactccaaattaaaccaagttggagcagagtttattggcacattcattctcatgtttgcggcaataggctctgcaattgagaaggaaaagacagagcaaaactttaattatgcagcgtcagtggacttgctgtcatgatctgtcatatcctccacatgtcacatctttggggctcatttcaacccccgagatgtggtgtgtggagaatatgacgatcatgacagcaagtccactagcgctgcataattagagtttctgatccatgtgtcttttcgttctcaattgcaaagcctattgtcacaaacatgagaataaatgtgccaataaactctgctccaacctaatttaattttcaactcaacaacatcaattcacatatatcattttactagataaggaacttagcttagtgcaattttggatatatcttttttgcaagaataatgttcattcttttctctattaatctctaattagttggtaccctaaaaccaaataaagggtagatagataagacaagaaaaactatattagactaaataggaagagaataaagagagaaagatacccttgagattgatgttaaaattgttatgtctttggtttattagatctgggacgaggatacaaagagtgaagaagtatgtattacataggaggaatgtgattgactagagaatcgagatggaaagaaaggaaaaatacatgaggtttgaaattt

SEQ ID NO: 9814 - DNA, 1084 bp, Glycine max
  Gm_smallRNAprecursor_2647
actctgagcctctttatcaaatctcatattgcattgtcacactccacgtcagttgcaatcactcacacccctcctatataatacatcttcactctttgcatcctcaccctaaaccaaaccaaatcgaagacaaaacaattttaacatcaatctcaagggtatttttctctctcttttctctttccttatttagtttaatatatattttcttgtcttatctatcaaccatttagttgattttaggttattaactacttagagatcaacagagaaaggaaaggaatggacattactcttgcaaaaaaggtatgttcaaaattgcactaagctaagttccttatctaacaaaataaattatatacgtgaattgatgagttgactccaaattaaaccaagttggagcagagtttattggcacattcattctcatgtttgcggcaataggctctgcaattgagaaggaaaagacagagcaaaactttaattatgcagcgtcagtggacttgctgtcatgatctgtcatatcctccacatgtcacatctttggggctcatttcaacccccgagatgtggtgtgtggagaatatgacgatcatgacagcaagtccactagcgctgcataattagagtttctgatccatgtgtcttttcgttctcaattgcaaagcctattgtcacaaacatgagaataaatgtgccaataaactctgctccaacctaatttaattttcaactcaacaacatcaattcacatatatcattttactagataaggaacttagcttagtgcaattttggatatatcttttttgcaagaataatgttcattcttttctctattaatctctaattagttggtaccctaaaaccaaataaagggtagatagataagacaagaaaaactatattagactaaataggaagagaataaagagagaaagatacccttgagattgatgttaaaattgttatgtctttggtttattagatctgggacgaggatacaaagagtgaagaagtatgtattacataggaggaatgtgattgactagagaatcgagatggaaagaaaggaaaaatacat

SEQ ID NO: 9815 - DNA, 1085 bp, Glycine max
  Gm_smallRNAprecursor_2648
actctgagcctctttatcaaatctcatattgcattgtcacactccacgtcagttgcaatcactcacacccctcctatataatacatcttcactctttgcatcctcaccctaaaccaaaccaaatcgaagacaaaacaattttaacatcaatctcaagggtatttttctctctcttttctctttccttatttagtttaatatatattttcttgtcttatctatcaaccatttagttgattttaggttattaactacttagagatcaacagagaaaggaaaggaatggacattactcttgcaaaaaaggtatgttcaaaattgcactaagctaagttccttatctaacaaaataaattatatacgtgaattgatgagttgactccaaattaaaccaagttggagcagagtttattggcacattcattctcatgtttgcggcaataggctctgcaattgagaaggaaaagacagagcaaaactttaattatgcagcgtcagtggacttgctgtcatgatctgtcatatcctccacatgtcacatctttggggctcatttcaacccccgagatgtggtgtgtggagaatatgacgatcatgacagcaagtccactagcgctgcataattagagtttctgatccatgtgtcttttcgttctcaattgcaaagcctattgtcacaaacatgagaataaatgtgccaataaactctgctccaacctaatttaattttcaactcaacaacatcaattcacatatatcattttactagataaggaacttagcttagtgcaattttggatatatcttttttgcaagaataatgttcattcttttctctattaatctctaattagttggtaccctaaaaccaaataaagggtagatagataagacaagaaaaactatattagactaaataggaagagaataaagagagaaagatacccttgagattgatgttaaaattgttatgtctttggtttattagatctgggacgaggatacaaagagtgaagaagtatgtattacataggaggaatgtgattgactagagaatcgagatggaaagaaaggaaaaatacatg

SEQ ID NO: 9816 - DNA, 1083 bp, Glycine max
  Gm_smallRNAprecursor_2649
ctctgagcctctttatcaaatctcatattgcattgtcacactccacgtcagttgcaatcactcacacccctcctatataatacatcttcactctttgcatcctcaccctaaaccaaaccaaatcgaagacaaaacaattttaacatcaatctcaagggtatttttctctctcttttctctttccttatttagtttaatatatattttcttgtcttatctatcaaccatttagttgattttaggttattaactacttagagatcaacagagaaaggaaaggaatggacattactcttgcaaaaaaggtatgttcaaaattgcactaagctaagttccttatctaacaaaataaattatatacgtgaattgatgagttgactccaaattaaaccaagttggagcagagtttattggcacattcattctcatgtttgcggcaataggctctgcaattgagaaggaaaagacagagcaaaactttaattatgcagcgtcagtggacttgctgtcatgatctgtcatatcctccacatgtcacatctttggggctcatttcaacccccgagatgtggtgtgtggagaatatgacgatcatgacagcaagtccactagcgctgcataattagagtttctgatccatgtgtcttttcgttctcaattgcaaagcctattgtcacaaacatgagaataaatgtgccaataaactctgctccaacctaatttaattttcaactcaacaacatcaattcacatatatcattttactagataaggaacttagcttagtgcaattttggatatatcttttttgcaagaataatgttcattcttttctctattaatctctaattagttggtaccctaaaaccaaataaagggtagatagataagacaagaaaaactatattagactaaataggaagagaataaagagagaaagatacccttgagattgatgttaaaattgttatgtctttggtttattagatctgggacgaggatacaaagagtgaagaagtatgtattacataggaggaatgtgattgactagagaatcgagatggaaagaaaggaaaaatacat

SEQ ID NO: 9817 - DNA, 1105 bp, Glycine max
  Gm_smallRNAprecursor_2650
atataatacatcttcactctttgcatcctcaccctaaaccaaaccaaatcgaagacaaaacaattttaacatcaatctcaagggtatttttctctctcttttctctttccttatttagtttaatatatattttcttgtcttatctatcaaccatttagttgattttaggttattaactacttagagatcaacagagaaaggaaaggaatggacattactcttgcaaaaaaggtatgttcaaaattgcactaagctaagttccttatctaacaaaataaattatatacgtgaattgatgagttgactccaaattaaaccaagttggagcagagtttattggcacattcattctcatgtttgcggcaataggctctgcaattgagaaggaaaagacagagcaaaactttaattatgcagcgtcagtggacttgctgtcatgatctgtcatatcctccacatgtcacatctttggggctcatttcaacccccgagatgtggtgtgtggagaatatgacgatcatgacagcaagtccactagcgctgcataattagagtttctgatccatgtgtcttttcgttctcaattgcaaagcctattgtcacaaacatgagaataaatgtgccaataaactctgctccaacctaatttaattttcaactcaacaacatcaattcacatatatcattttactagataaggaacttagcttagtgcaattttggatatatcttttttgcaagaataatgttcattcttttctctattaatctctaattagttggtaccctaaaaccaaataaagggtagatagataagacaagaaaaactatattagactaaataggaagagaataaagagagaaagatacccttgagattgatgttaaaattgttatgtctttggtttattagatctgggacgaggatacaaagagtgaagaagtatgtattacataggaggaatgtgattgactagagaatcgagatggaaagaaaggaaaaatacatgaggtttgaaatttattacagttaggcacaaaggaaaagaagaggtagttgtttacttgtacagagaagtgttcgatgtgagaaagatacattggt

SEQ ID NO: 9818 - DNA, 1084 bp, Glycine max
  Gm_smallRNAprecursor_2651
acctgatttgtcttggctttttatctgagtaagctgtatcaaataaatgccgattatcttccaaattttgcagaggacttttgttttatgtcgcttgatgaagaaacctgggaaaacaactgaaggcggaactgatgcactcatctgtgatgaaggggagcccagtagacacatgatttctgtctatggaaatcaggaaaaagcagaaggaattccatctgtaagctgaagcatccttcatggacatattttacactctgccatgtgaaacatgctgataactgattcttgtttcatattttttttctttctttccagggaagtacttgtattggaatggaaacaatccttcaggcaacccctcaggcagagaaatacttctctccaatacaccagagtcaaactggtattgaggaagaagcatctttttcaagctatccatttaacaatgcctattttagaaatgaaaacaaccctatgcagacttcatttgaaactacagaggaaatgcagacttcatttgaaattactgaggaagttgaattcctaaactcaattttagttgatgagagttttgttatcgataaagaaagtatgcatgtttttgttaatagctccacccaatcagagtcattgagtgatacagatgcagaagttgtctctaaactggtaaagatacgttatccaaagtccaaataatatagggaagtgtatctccatatgtttctgaactggcattggttttaaaggttaaaattgcagtgtgcattgatgtgatgtgaattttgccacatttttttggcaatatttagtgattttctcgtatagattctaaacagacactgaagtgaaatgtctggtttgagttgagtttgattttttgttgtgattcatgatcatggtttgagttgaattcatttgtttattttcttttgaaatcattacaggatggcaatactgtggatatttcaacagtgtgccatgaatatcctaattcagatgaataccattcatcaaaaaggcttaaatcatcccatgatgttgtccatggtggcatatgttttccatcttctaatcctgaagc

SEQ ID NO: 9819 - DNA, 1084 bp, Glycine max; identical to SEQ ID NO: 9818
  Gm_smallRNAprecursor_2652

SEQ ID NO: 9820 - DNA, 1085 bp, Glycine max
  Gm_smallRNAprecursor_2653
acctgatttgtcttggctttttatctgagtaagctgtatcaaataaatgccgattatcttccaaattttgcagaggacttttgttttatgtcgcttgatgaagaaacctgggaaaacaactgaaggcggaactgatgcactcatctgtgatgaaggggagcccagtagacacatgatttctgtctatggaaatcaggaaaaagcagaaggaattccatctgtaagctgaagcatccttcatggacatattttacactctgccatgtgaaacatgctgataactgattcttgtttcatattttttttctttctttccagggaagtacttgtattggaatggaaacaatccttcaggcaacccctcaggcagagaaatacttctctccaatacaccagagtcaaactggtattgaggaagaagcatctttttcaagctatccatttaacaatgcctattttagaaatgaaaacaaccctatgcagacttcatttgaaactacagaggaaatgcagacttcatttgaaattactgaggaagttgaattcctaaactcaattttagttgatgagagttttgttatcgataaagaaagtatgcatgtttttgttaatagctccacccaatcagagtcattgagtgatacagatgcagaagttgtctctaaactggtaaagatacgttatccaaagtccaaataatatagggaagtgtatctccatatgtttctgaactggcattggttttaaaggttaaaattgcagtgtgcattgatgtgatgtgaattttgccacatttttttggcaatatttagtgattttctcgtatagattctaaacagacactgaagtgaaatgtctggtttgagttgagtttgattttttgttgtgattcatgatcatggtttgagttgaattcatttgtttattttcttttgaaatcattacaggatggcaatactgtggatatttcaacagtgtgccatgaatatcctaattcagatgaataccattcatcaaaaaggcttaaatcatcccatgatgttgtccatggtggcatatgttttccatcttctaatcctgaagca

SEQ ID NO: 9821 - DNA, 1055 bp, Glycine max
  Gm_smallRNAprecursor_2654
gaggacttttgttttatgttgcttgatcaagaaacctgggaaagcaactgaaggtggaactgatgcactgatctgcgatgaaggggagcccagtagaagcatggtttctgactttgaaaatcaggcaacagcagaaggaattccatctgtaagctgaagcatccttcatggacatatttacactctgccatgtgaaacatgctgagaactgatacttgttccatatatatatctatatctatatatatatatatatatatatatatatatatacatatttttttttttcaggaaggtacttttaccggaatggaaacaatctttcaggcaaccccttgggcagagaattgcttctctccaatacaacagtctccgactagtattgagcaggaaggagcatcctttccaaactatgcatttaacaatgcctattttagaaatgaagacaatgttatgcggaatccatttgaaactacaaaggaagatgaattcctgaattcaatcttagccggtgaaagtatagttatcaatgaagaaaataagcataattttgtccatagctccacccaatcagagtcattgaagacaatattattgaagactagacaacttcgtatgatgggaactaaaatctaagttagttccattaatggattactggcagctatttaggagtatatgttataaaatataaatagttctataatagcaaatttattagaaaacaattctgtattagaaattgcataatgacagtttatgcataaaaaataactatggccagtttatgtattgagatttaggagtatataatctaatagtaaatctattacaaagtattaaaaactgcatgatagaagttattaggaagtgtgtgtagttgtttgcagtttatggacaaagaatactcggtgtaggagacttttgtctctaggacaacaagtgtattttgtatcgatgtattttgtgtgattttagtattcaataatatatttttagtttttggagtgtgagcaagaagcctagttttaagatgaaaaatagagttatctccc

SEQ ID NO: 9822 - DNA, 1045 bp, Glycine max
  Gm_smallRNAprecursor_2655
ttttaatatatatcaattatatataatgatttgaaaagaactttatgaaaatgaattctacctagattaaaaataaacaaattcatatacgatgcaacaggtgttatatgaatgtaaccaagaatgtgatgatgtctctcgtaattggacagttgaatgatacatggaaccatatcaatacatcaatgacgtgacatattacctgaatttattttaattttatatttaattttttttaaaaaaatcctacacccattttttcccttccttcttcctcgttctttcccacttttctcagatctagagaaaaaatgggtaccaccccaagccagaacatacaacaaatcaaaaaacgcaacccagattcaagacagatccaaataaaaaaggcaaacgcaagcctctgtcccttcctcttcgtgctccgcatctccgacgcgcccgaaatcgacgaggtagccattaaacgtgcagatctgcgaggtagctatcagaactaaggaatccatttagatctgtttcagtcgaacccaatatggtgttgcgaaacagatctgaatggattcctctgttccaacgaatgtcatcagccgatgaaggccggcagtgccgtggtctatccggaggtgaaggcctttgttgtggcggcggtatagtggagactggagacatggcgacggcaacgtggtatggttgcttacggtggagaggtgatggttcgcagtgatggcaaatagaaggagaggggcaggtagaaagataagcataaaaaaaaaagaaaaaagaaaataaaaaatgcaaaatatttgagccatgaaaattaaaaagaatccaacggtgaaggtttcatacccatggtccaagcaagaaaacttacgtgtcatcatgtcttaaatgaagacttcataatgataaaaatttcccacaaattttttgaagtttcatgtgttaaatgaagacttaataatgataaaaatttctcacacttgaaatttcaagacttactagaattaattttttttaggaattagttgtgaaattttga

SEQ ID NO: 9823 - DNA, 1074 bp, Glycine max
  Gm_smallRNAprecursor_2656
attatttttaattgagcacttgacatttaaataatttattaaactcgcgagtaacctaggatctaatatcattaaaattaaatcctacatttcgcttctcattatgttatatattttgtaaatataattttatatgtatatcttcaaaaattagtggtaaaatgacacaagtaacttgctacgtgaaacctttaatcaaggttagggattcaatcttcaatttgagtagaatgacaactggaggtctcactttatcccaagaaatgggccgatccggtggaaggagattacatctcccggttattaaaaaaaaaataggtaaaatttcattttggtctttcaaattgtctccaattttgattttgattcccctttaaaattattaacgaattttgtcctcttattttatccaatcacgcaatcttcggcctccaatctaaaattaaacgttgactattataaaggaatgttgactgtcacgtgtcaccttttgaacgatgattgtcacgtgtcatgttctgattggatgtcgaatccatgaaagatgaaatacattgttgttgtcattggccaatcagaacatgacacgtggtagtcatcatccaataagaacgtgacacatgactgtcaacattcatttgtgacagtcaacgtccaattctggatttggaaccaagattacgtgattgaataaaataggaggacaaaattcgtcaataattttaaaggagaaccaaaatcgaaattaaagaaaaattgaaagaccaaaaatacaattttaccaaaaaaaattagttgtagaagaaaatttatccatgtattactaatttttttatacaaccaccagcaacaacacagacacaacaagtaaaaatactaccaagattgggacgatcaacaacactgccaccattatcgccaccaccaacttttttatcgccaactgggtcaccagcacaagtaacaacattttcgtcaccatcaatactaatacgagtgtcaggtcagttttatcattcttcaagtatttattattctttctcctaattttgattaagttctcataatgataat

SEQ ID NO: 9824 - DNA, 1084 bp, Glycine max
  Gm_smallRNAprecursor_2657
caagttacaggtttcatatatgtccaccaaagatcttacccatcttggagtagactttggtgatgatagttcttgatcttgttgttgtggtggaggtgaaggtggttcacctaggccttcttccttagcttcttcttgaggtagttgagcgggtataagaacgttcttctccactttttcttcatcccaattccaagaagcgtactcatcaacttcaacatctcgactgatgacgagttttttagtttgcaagttatagacacgatagcccttagagatatagttatacccaaggaagatatctcgcatagtcttgtcttcaagcttgtgcctcttcacgtctggaatatgaatgtagcatatagatccaaagacccttaggtgctttgttgatggcttcttcccgttccaagcttcaattggagtcttgtcttttacagacttagttggacatctgttgagtatgtaaacagcagtgtagactgcttcagcccagaatatgttaggtagtcccttctccttgagcatcgatctagccatttccataattgtgcgattctttctctcggacactccattttgttgaggagaatatgcgactgtaagttgtcactcaatgtcttcatcctcacaaaatctttcaaactcgcgagaggtgtactctttgccgcgatcacttcttagtacttttatttgttttccactttgattttcaacaagggccttgaactttttgaatactccaaagacttctaatttttcttttagaaaatatacccatgtcattctagagaagtcatcaatgaagagtatgaagtacctgttgttctcatgtgatggcatcctcattggtccacagacgtctatatgtatcagctccaatatatctttcgctctccatgcttcgcttgttgagaaaggaaatcggtgttgcttaccaaggagacatccttcacacacttcattgttctcctttatgcttggaagatctctcatcatgttcttctcatgtaacaacttcaaggcatgtgtgttgaagtggccaaatcttcgatgccatagccatgaatcatcaacttgtatc

SEQ ID NO: 9825 - DNA, 1079 bp, Glycine max
  Gm_smallRNAprecursor_2658
tgttttgttcttaaggaaattcctagaaccttctcttcttctgaaagtttctccataatttttctttcctccattttctttgttttggggctgaaatttaaactttgactggaaggccttttcaagtgtatcttctttatgcctatacagtctttgctcatatgcttcaagagagcccataagttctgtctctgatagagtggacagatctttggtttcctcaatcgttgtcacgattgggtcaaacttttggggcataataattagaattttctcaacaattttcttgtcaagaatatcttctccaaaagctctcatttgattaactatttctttaactttagaatagtaatctttaactatctcagactccttcatcttcaatagttaaaaatctcttcttagagattgaagtttaatggcacgtaccttgaaactcctcctgcaatgtgttccacgcttttttggtagtcttagttcccataattcttgggaaaattggatcagtcaccgcttgttgcaaggtgaacaacgcctttgaatttttctgtttatttttcttcaaatttttttcttgagatgcattaagagctgaagtatccgcgggaacggtgaagccttcttctactatgtcccataaatcttaagatgaaaaatatgtttccattttaacacgctagaaatcataattttcaccattgaagataggaacagaaatagttgacgattgagtagtgtcatccatggcttagaaaaaatattattggagtgggttaatagtacaaaggaaatttttgaagtagttgggagaattttggaatggtatataggtaatataactacgcccaatgtatgaccgaaccaggctctgataccactgttggtagttgattagatgatagttgatagttttagagaattgttatagaaagaaggctatgtcattgatttcttggataatcaattataacatatcaattgcctatttataggctcaagtcaccaacctctcaatggtggtgaatgtttctacattaccttaggtctttctagagttttcatgataaattagtatcatg

SEQ ID NO: 9826 - DNA, 1154 bp, Glycine max
  Gm_smallRNAprecursor_2659
catgtctcatcaaccaatcaataaatatgtagacaaatcaacgacacagccaagagcaagagcaagagtcatgagcatacatccgtacaacaatgttagggatgagaaattcctaggaaattcgcactgagttcaacaataaaactaacatacttgacaatacatgcaatctagtgtcctaaactccgctagaccatatattttcaagcatgcatgtccagatccaacagaacgtgcagcaaattaattaaaattagacaaatacaacaataaaaaaattgattatagcaacaaataagctttccaaaatgatcaaataggttccatatatatcaggctcacttcagtgatagacaaattcagtatggatctaatcatgtacataccttgaacaaggatactccagagcaagaacgagattatggcaaaagagaaaaatgaaaaactaaaaaaaaaacaatcatcaaatctaaattatgtgacaaaaggggagaagggtgtagagctcccttcaatccaaagaaggataatactataaaggcaaatgaagctccccagatatggaagccacaagactaccacaaaagcacttaatgatgggtagaactgtgggatccatagctaagcagctcaatccacccagtaagatcctcaattggacttcaaggagctccactccataaccccctttgttttgtgattccctttgacctaataataataagttcaaaacctaacctaaccaagaactttccaacttcattccactcaccacctaaacccttgctagaaccacccccactaagtaaaacaccaaaaacacaagaccatgaacctaatcgcagagactcatctacataaacacacccaaatgggaactagaaacctgtctgaatccctcatctggacaagagcatgaaactacaaagtaaactaacaacaatacacaacacaaaccaaactttttcgtatttcttagaaagaagagcaaaacaaaaccctagatctgagatctagaatcctccacaagattgaggacaaaatgttctatgtatatatataatatatatacacatgacctcataggttaaagggtgcatcaataacccttgaccatgatgaaaaccctacctatgcctattcctagctaccct

SEQ ID NO: 9827 - DNA, 1242 bp, Glycine max
  Gm_smallRNAprecursor_2660
tacatcaacaagccctttcacaccagcttttgtttcatcaaatgctttgcgttgactcaaaacataatcaaagttaaggtcagttgttgttcccatgttccttttggttttgtgtggccttggagctagaagagtgggtggaagagccaaagaaaaattaagtagcagctaagacttaaaactgtgctgatggaggataacgaagcaaaagtgatcccaaactctcaatcttctcccacctctttgacggcaaaataaaaacaaaaatgaatgtgtaactcttgtgatgcatatttcatgtttttaaattaaaagcatcttttatttatttatatatatatcatactgcattcttacttcctatttgtccgtttgatcttaaaactaagactgatgggaaagtaggaatactgtccgtaaggacatatgttaacaaatttttatggatctggaactaaaagtacatttaatattttactttgatttgtacagtaagtgtttgaacagtacttcctggaagtacagcagtctaatattttagttgaatggtactgtagcagtaagacccgtgttggataaaggacagtaagactaaggtgtactgtttaatcaaaatatcaagacataatacactggtggctataggattgccgttcaaactatttttcaaaaaaaaaaaaagagtttttcttaaaaataattcagatccagaaaaattttgtgacatatttacttacggagatatttctatggaaccaaatgagggcaaagatattagagaatatcataatcatgtctagactcttacgatctttttctcgtatctcttttcgctcaaactcctcctcatcatcttcttcaagaaactccaatctattaaatgatcaagacaaccagacccaagaggtcgccccaaaacacaatctcttcgatgaggaagtctgattcgaagatatcaatcaaaacatggatgactggaacattccagaaatccctcaggatcaactatacgttcctgagacaataaaagacaaacacaactttgattacataatcaaaacagtagaaaacaatattcctctaggacaagatgtaggggaagaatttcatttactttcaaaaaattcaatttatgaacatagccgtaagtataaatatctacacatcggttgtgtacaagtagccatcaagcccttaattgatatgggcatagatgcagcagttttaatgtgtctaagagac

SEQ ID NO: 9828 - DNA, 1199 bp, Glycine max
  Gm_smallRNAprecursor_2661
tttcacaccagcttttgtttcatcaaatgctttgcgttgactcaaaacataatcaaagttaaggtcagttgttgttcccatgttccttttggttttgtgtggccttggagctagaagagtgggtggaagagccaaagaaaaattaagtagcagctaagacttaaaactgtgctgatggaggataacgaagcaaaagtgatcccaaactctcaatcttctcccacctctttgacggcaaaataaaaacaaaaatgaatgtgtaactcttgtgatgcatatttcatgtttttaaattaaaagcatcttttatttatttatatatatatcatactgcattcttacttcctatttgtccgtttgatcttaaaactaagactgatgggaaagtaggaatactgtccgtaaggacatatgttaacaaatttttatggatctggaactaaaagtacatttaatattttactttgatttgtacagtaagtgtttgaacagtacttcctggaagtacagcagtctaatattttagttgaatggtactgtagcagtaagacccgtgttggataaaggacagtaagactaaggtgtactgtttaatcaaaatatcaagacataatacactggtggctataggattgccgttcaaactatttttcaaaaaaaaaaaaagagtttttcttaaaaataattcagatccagaaaaattttgtgacatatttacttacggagatatttctatggaaccaaatgagggcaaagatattagagaatatcataatcatgtctagactcttacgatctttttctcgtatctcttttcgctcaaactcctcctcatcatcttcttcaagaaactccaatctattaaatgatcaagacaaccagacccaagaggtcgccccaaaacacaatctcttcgatgaggaagtctgattcgaagatatcaatcaaaacatggatgactggaacattccagaaatccctcaggatcaactatacgttcctgagacaataaaagacaaacacaactttgattacataatcaaaacagtagaaaacaatattcctctaggacaagatgtaggggaagaatttcatttactttcaaaaaattcaatttatgaacatagccgtaagtataaatatctacacatcggttgtgtacaagtagccatcaagcccttaattgatatgggcataga

SEQ ID NO: 9829 - DNA, 1183 bp, Glycine max
  Gm_smallRNAprecursor_2662
aagagccaaagaaaaattaagtagcagctaagacttaaaactgtgctgatggaggataacgaagcaaaagtgatcccaaactctcaatcttctcccacctctttgacggcaaaataaaaacaaaaatgaatgtgtaactcttgtgatgcatatttcatgtttttaaattaaaagcatcttttatttatttatatatatatcatactgcattcttacttcctatttgtccgtttgatcttaaaactaagactgatgggaaagtaggaatactgtccgtaaggacatatgttaacaaatttttatggatctggaactaaaagtacatttaatattttactttgatttgtacagtaagtgtttgaacagtacttcctggaagtacagcagtctaatattttagttgaatggtactgtagcagtaagacccgtgttggataaaggacagtaagactaaggtgtactgtttaatcaaaatatcaagacataatacactggtggctataggattgccgttcaaactatttttcaaaaaaaaaaaaagagtttttcttaaaaataattcagatccagaaaaattttgtgacatatttacttacggagatatttctatggaaccaaatgagggcaaagatattagagaatatcataatcatgtctagactcttacgatctttttctcgtatctcttttcgctcaaactcctcctcatcatcttcttcaagaaactccaatctattaaatgatcaagacaaccagacccaagaggtcgccccaaaacacaatctcttcgatgaggaagtctgattcgaagatatcaatcaaaacatggatgactggaacattccagaaatccctcaggatcaactatacgttcctgagacaataaaagacaaacacaactttgattacataatcaaaacagtagaaaacaatattcctctaggacaagatgtaggggaagaatttcatttactttcaaaaaattcaatttatgaacatagccgtaagtataaatatctacacatcggttgtgtacaagtagccatcaagcccttaattgatatgggcatagatgcagcagttttaatgtgtctaagagacattaggcataaccaatttgaagactccctaattggaacagtcgaaaccagcctaggacaaggtccaatatattttaattgtt

SEQ ID NO: 9830 - DNA, 1157 bp, Glycine max
  Gm_smallRNAprecursor_2663
cctattccaaacaaaaaagatttgcttaacagattaaattctgcaaagatattttcaaagtttgatatgaaatctggattttggcaaatccaaatccaagaatcagataggtacaaaacagcgtttactgtacctttcgggcaatatgagtggaacgtaatgccattcggactgaagaatgccccatcaaaatttcaaaaaattatgaatgatatttttaatccctattcaaaatttgtcattgtctacatagatgatgttttaatcttttcccaaaacattgaccagcatttcaaacatctccaaaccttcatccatatcatcaaacaaaatggtttggcagtctccaaatcaaaaatcaatcttttccaaagacgaattcgattccttggtcacaatatttatcaaggtacaattgttccaatcgaaaggtcaattgagtttgctagcaaattccccagccaaatcttagacaaaacccagttacaaagatttctaggttgtctaaattacgtaggtgaatttgtcccctacttaaacaatattgtcaaaccattgcatgataggctaaagaaaaatccgcctccttggtctgacctccatacccaaacagttaaagaaatcaaagtcaaagtccaatccataaaatgtctgtatcttcccattccacaggcattcaaaattgtcgaaactgatgcatcagacatcggttacggtggcatcctcaaacaacaagtacatggtcaagaacatgtcatcgcatatacttcaaaacactggaatcctgcacagttaaagtattcaactgttaaaaaagaagttttagcaattgttttgtgcatttccaaatttgaatctgatttattaaatcaaaattttttagtaagagttgactacaaatcagccaaagatattttacagaaggatgtaaaaaaccttgcctcaaaacagatttttgcaagatggcaagcaattttaagtgtctttgattttaatatagaatatatcaagggctcttccaactctctacctgactacctcacccgtgaatttttacagaaaattcccgatgcctcctaaggtgtctagttcctccggcagaggaggaagatccagtacgaaaggtaaagaagttctactggctctaccagagccaa

SEQ ID NO: 9831 - DNA, 1038 bp, Glycine max
  Gm_smallRNAprecursor_2664
tacctttcgggcaatatgagtggaacgtaatgccattcggactgaagaatgccccatcaaaatttcaaaaaattatgaatgatatttttaatccctattcaaaatttgtcattgtctacatagatgatgttttaatcttttcccaaaacattgaccagcatttcaaacatctccaaaccttcatccatatcatcaaacaaaatggtttggcagtctccaaatcaaaaatcaatcttttccaaagacgaattcgattccttggtcacaatatttatcaaggtacaattgttccaatcgaaaggtcaattgagtttgctagcaaattccccagccaaatcttagacaaaacccagttacaaagatttctaggttgtctaaattacgtaggtgaatttgtcccctacttaaacaatattgtcaaaccattgcatgataggctaaagaaaaatccgcctccttggtctgacctccatacccaaacagttaaagaaatcaaagtcaaagtccaatccataaaatgtctgtatcttcccattccacaggcattcaaaattgtcgaaactgatgcatcagacatcggttacggtggcatcctcaaacaacaagtacatggtcaagaacatgtcatcgcatatacttcaaaacactggaatcctgcacagttaaagtattcaactgttaaaaaagaagttttagcaattgttttgtgcatttccaaatttgaatctgatttattaaatcaaaattttttagtaagagttgactacaaatcagccaaagatattttacagaaggatgtaaaaaaccttgcctcaaaacagatttttgcaagatggcaagcaattttaagtgtctttgattttaatatagaatatatcaagggctcttccaactctctacctgactacctcacccgtgaatttttacagaaaattcccgatgcctcctaaggtgtctagttcctccggcagaggaggaagatccagtacgaaaggtaaagaagttctactggctctaccagagccaataaccaaaaag

SEQ ID NO: 9832 - DNA, 1049 bp, Glycine max
  Gm_smallRNAprecursor_2665
caatgttttacaaatggaaccagaatactgggacaagaatcctttcaaagcaaccaccaaagtattcccccagggattccattacaggccaatagccgcaaacaaaacccgcaaattctacgaattcatcctaatagatacaaactcagtatctataaaacacttcaaagaccccaaagatccaaatctaaatacccattccacaatccaaatcctgaaggttatgcagccacgacattatgactcaaacttaaaccaacccaaaaaattctctgcaccatttgaccctacaggatataattattgggattacgttgacgcttggaccaatgtgttctggcatcaaaatagtaaattcaagcattcatggctgatttacttcaaaaataatactgcatataattttccaaattggttcctccaatggtggaactacttcggaccaattccacaaatatttccagaagaagtccaacagggattcgaacaattcaacaagctctataatagcaaggaatcacgaattccggcagatttaaagtacttttccagttttgccttgtcatggatcttttcatggcaatacagatacggaaaaactgaaaacaacaagcaatatccaccgttacagagacacgcctttgtaaaatggtggtcacaattcgatacttcaaaggctgctccagatcaagtcaagaactggttccagagcaatcctgagttccttaaacctgctgatctggagacatctttgtttctaaattagaagtcgcaactggcagcattcttagcaagctcaaaatctaaagagagtcttgctcagaatctcaaagaagttctccaactacttcaacaggaagtggaagaagaaccttccaagaaggaagctgaatcatccgagactaatgatgaccaagaagatgatccattctaccagaatgaagatgattgttttggtatatcattggacgacgattaattagttgtaataatcatgaattattgtaactaatttgtcagtttcttttaaataatgtaatttgtaaaaa

SEQ ID NO: 9833 - DNA, 1131 bp, Glycine max
  Gm_smallRNAprecursor_2666
caatgttttacaaatggaaccagaatactgggacaagaatcctttcaaagcaaccaccaaagtattcccccagggattccattacaggccaatagccgcaaacaaaacccgcaaattctacgaattcatcctaatagatacaaactcagtatctataaaacacttcaaagaccccaaagatccaaatctaaatacccattccacaatccaaatcctgaaggttatgcagccacgacattatgactcaaacttaaaccaacccaaaaaattctctgcaccatttgaccctacaggatataattattgggattacgttgacgcttggaccaatgtgttctggcatcaaaatagtaaattcaagcattcatggctgatttacttcaaaaataatactgcatataattttccaaattggttcctccaatggtggaactacttcggaccaattccacaaatatttccagaagaagtccaacagggattcgaacaattcaacaagctctataatagcaaggaatcacgaattccggcagatttaaagtacttttccagttttgccttgtcatggatcttttcatggcaatacagatacggaaaaactgaaaacaacaagcaatatccaccgttacagagacacgcctttgtaaaatggtggtcacaattcgatacttcaaaggctgctccagatcaagtcaagaactggttccagagcaatcctgagttccttaaacctgctgatctggagacatctttgtttctaaattagaagtcgcaactggcagcattcttagcaagctcaaaatctaaagagagtcttgctcagaatctcaaagaagttctccaactacttcaacaggaagtggaagaagaaccttccaagaaggaagctgaatcatccgagactaatgatgaccaagaagatgatccattctaccagaatgaagatgattgttttggtatatcattggacgacgattaattagttgtaataatcatgaattattgtaactaatttgtcagtttcttttaaataatgtaatttgtaaaaagttttgtaacagttccggtaaacattaccgatactgtagaaacagtaaaaattgggtctatttaaaggagtcctcgtcccct

SEQ ID NO: 9834 - DNA, 1131 bp, Glycine max; identical to SEQ ID NO: 9833
  Gm_smallRNAprecursor_2667

SEQ ID NO: 9835 - DNA, 1086 bp, Glycine max
  Gm_smallRNAprecursor_2668
caaagcaaccaccaaagtattcccccagggattccattacaggccaatagccgcaaacaaaacccgcaaattctacgaattcatcctaatagatacaaactcagtatctataaaacacttcaaagaccccaaagatccaaatctaaatacccattccacaatccaaatcctgaaggttatgcagccacgacattatgactcaaacttaaaccaacccaaaaaattctctgcaccatttgaccctacaggatataattattgggattacgttgacgcttggaccaatgtgttctggcatcaaaatagtaaattcaagcattcatggctgatttacttcaaaaataatactgcatataattttccaaattggttcctccaatggtggaactacttcggaccaattccacaaatatttccagaagaagtccaacagggattcgaacaattcaacaagctctataatagcaaggaatcacgaattccggcagatttaaagtacttttccagttttgccttgtcatggatcttttcatggcaatacagatacggaaaaactgaaaacaacaagcaatatccaccgttacagagacacgcctttgtaaaatggtggtcacaattcgatacttcaaaggctgctccagatcaagtcaagaactggttccagagcaatcctgagttccttaaacctgctgatctggagacatctttgtttctaaattagaagtcgcaactggcagcattcttagcaagctcaaaatctaaagagagtcttgctcagaatctcaaagaagttctccaactacttcaacaggaagtggaagaagaaccttccaagaaggaagctgaatcatccgagactaatgatgaccaagaagatgatccattctaccagaatgaagatgattgttttggtatatcattggacgacgattaattagttgtaataatcatgaattattgtaactaatttgtcagtttcttttaaataatgtaatttgtaaaaagttttgtaacagttccggtaaacattaccgatactgtagaaacagtaaaaattgggtctatttaaaggagtcctcgtcccct

SEQ ID NO: 9836 - DNA, 1086 bp, Glycine max; identical to SEQ ID NO: 9835
  Gm_smallRNAprecursor_2669

SEQ ID NO: 9837 - DNA, 1085 bp, Glycine max
  Gm_smallRNAprecursor_2670
aaagcaaccaccaaagtattcccccagggattccattacaggccaatagccgcaaacaaaacccgcaaattctacgaattcatcctaatagatacaaactcagtatctataaaacacttcaaagaccccaaagatccaaatctaaatacccattccacaatccaaatcctgaaggttatgcagccacgacattatgactcaaacttaaaccaacccaaaaaattctctgcaccatttgaccctacaggatataattattgggattacgttgacgcttggaccaatgtgttctggcatcaaaatagtaaattcaagcattcatggctgatttacttcaaaaataatactgcatataattttccaaattggttcctccaatggtggaactacttcggaccaattccacaaatatttccagaagaagtccaacagggattcgaacaattcaacaagctctataatagcaaggaatcacgaattccggcagatttaaagtacttttccagttttgccttgtcatggatcttttcatggcaatacagatacggaaaaactgaaaacaacaagcaatatccaccgttacagagacacgcctttgtaaaatggtggtcacaattcgatacttcaaaggctgctccagatcaagtcaagaactggttccagagcaatcctgagttccttaaacctgctgatctggagacatctttgtttctaaattagaagtcgcaactggcagcattcttagcaagctcaaaatctaaagagagtcttgctcagaatctcaaagaagttctccaactacttcaacaggaagtggaagaagaaccttccaagaaggaagctgaatcatccgagactaatgatgaccaagaagatgatccattctaccagaatgaagatgattgttttggtatatcattggacgacgattaattagttgtaataatcatgaattattgtaactaatttgtcagtttcttttaaataatgtaatttgtaaaaagttttgtaacagttccggtaaacattaccgatactgtagaaacagtaaaaattgggtctatttaaaggagtcctcgtcccct

SEQ ID NO: 9838 - DNA, 1085 bp, Glycine max; identical to SEQ ID NO: 9837
  Gm_smallRNAprecursor_2671

SEQ ID NO: 9839 - DNA, 1149 bp, Glycine max
  Gm_smallRNAprecursor_2672
agcaaccaccaaagtattcccccagggattccattacaggccaatagccgcaaacaaaacccgcaaattctacgaattcatcctaatagatacaaactcagtatctataaaacacttcaaagaccccaaagatccaaatctaaatacccattccacaatccaaatcctgaaggttatgcagccacgacattatgactcaaacttaaaccaacccaaaaaattctctgcaccatttgaccctacaggatataattattgggattacgttgacgcttggaccaatgtgttctggcatcaaaatagtaaattcaagcattcatggctgatttacttcaaaaataatactgcatataattttccaaattggttcctccaatggtggaactacttcggaccaattccacaaatatttccagaagaagtccaacagggattcgaacaattcaacaagctctataatagcaaggaatcacgaattccggcagatttaaagtacttttccagttttgccttgtcatggatcttttcatggcaatacagatacggaaaaactgaaaacaacaagcaatatccaccgttacagagacacgcctttgtaaaatggtggtcacaattcgatacttcaaaggctgctccagatcaagtcaagaactggttccagagcaatcctgagttccttaaacctgctgatctggagacatctttgtttctaaattagaagtcgcaactggcagcattcttagcaagctcaaaatctaaagagagtcttgctcagaatctcaaagaagttctccaactacttcaacaggaagtggaagaagaaccttccaagaaggaagctgaatcatccgagactaatgatgaccaagaagatgatccattctaccagaatgaagatgattgttttggtatatcattggacgacgattaattagttgtaataatcatgaattattgtaactaatttgtcagtttcttttaaataatgtaatttgtaaaaagttttgtaacagttccggtaaacattaccgatactgtagaaacagtaaaaattgggtctatttaaaggagtcctcgtcccctttgtgaggcaccctttcagatagactcagaatcaggtttttagagagagaagctctgcctagggaa

SEQ ID NO: 9840 - DNA, 1165 bp, Glycine max
  Gm_smallRNAprecursor_2673
ctaatagatacaaactcagtatctataaaacacttcaaagaccccaaagatccaaatctaaatacccattccacaatccaaatcctgaaggttatgcagccacgacattatgactcaaacttaaaccaacccaaaaaattctctgcaccatttgaccctacaggatataattattgggattacgttgacgcttggaccaatgtgttctggcatcaaaatagtaaattcaagcattcatggctgatttacttcaaaaataatactgcatataattttccaaattggttcctccaatggtggaactacttcggaccaattccacaaatatttccagaagaagtccaacagggattcgaacaattcaacaagctctataatagcaaggaatcacgaattccggcagatttaaagtacttttccagttttgccttgtcatggatcttttcatggcaatacagatacggaaaaactgaaaacaacaagcaatatccaccgttacagagacacgcctttgtaaaatggtggtcacaattcgatacttcaaaggctgctccagatcaagtcaagaactggttccagagcaatcctgagttccttaaacctgctgatctggagacatctttgtttctaaattagaagtcgcaactggcagcattcttagcaagctcaaaatctaaagagagtcttgctcagaatctcaaagaagttctccaactacttcaacaggaagtggaagaagaaccttccaagaaggaagctgaatcatccgagactaatgatgaccaagaagatgatccattctaccagaatgaagatgattgttttggtatatcattggacgacgattaattagttgtaataatcatgaattattgtaactaatttgtcagtttcttttaaataatgtaatttgtaaaaagttttgtaacagttccggtaaacattaccgatactgtagaaacagtaaaaattgggtctatttaaaggagtcctcgtcccctttgtgaggcaccctttcagatagactcagaatcaggtttttagagagagaagctctgcctagggaaaaactctttgtaagcttttctttcggtttcaataaatttcaagttctatttttcatatctcccttctcccctcaccgatcctgtgcggctctgccgcc

SEQ ID NO: 9841 - DNA, 1086 bp, Glycine max
  Gm_smallRNAprecursor_2674
taaatacccattccacaatccaaatcctgaaggttatgcagccacgacattatgactcaaacttaaaccaacccaaaaaattctctgcaccatttgaccctacaggatataattattgggattacgttgacgcttggaccaatgtgttctggcatcaaaatagtaaattcaagcattcatggctgatttacttcaaaaataatactgcatataattttccaaattggttcctccaatggtggaactacttcggaccaattccacaaatatttccagaagaagtccaacagggattcgaacaattcaacaagctctataatagcaaggaatcacgaattccggcagatttaaagtacttttccagttttgccttgtcatggatcttttcatggcaatacagatacggaaaaactgaaaacaacaagcaatatccaccgttacagagacacgcctttgtaaaatggtggtcacaattcgatacttcaaaggctgctccagatcaagtcaagaactggttccagagcaatcctgagttccttaaacctgctgatctggagacatctttgtttctaaattagaagtcgcaactggcagcattcttagcaagctcaaaatctaaagagagtcttgctcagaatctcaaagaagttctccaactacttcaacaggaagtggaagaagaaccttccaagaaggaagctgaatcatccgagactaatgatgaccaagaagatgatccattctaccagaatgaagatgattgttttggtatatcattggacgacgattaattagttgtaataatcatgaattattgtaactaatttgtcagtttcttttaaataatgtaatttgtaaaaagttttgtaacagttccggtaaacattaccgatactgtagaaacagtaaaaattgggtctatttaaaggagtcctcgtcccctttgtgaggcaccctttcagatagactcagaatcaggtttttagagagagaagctctgcctagggaaaaactctttgtaagcttttctttcggtttcaataaatttcaagttctatttttcatatctcccttctcccctcaccg

SEQ ID NO: 9842 - DNA, 1137 bp, Glycine max
  Gm_smallRNAprecursor_2675
taaatacccattccacaatccaaatcctgaaggttatgcagccacgacattatgactcaaacttaaaccaacccaaaaaattctctgcaccatttgaccctacaggatataattattgggattacgttgacgcttggaccaatgtgttctggcatcaaaatagtaaattcaagcattcatggctgatttacttcaaaaataatactgcatataattttccaaattggttcctccaatggtggaactacttcggaccaattccacaaatatttccagaagaagtccaacagggattcgaacaattcaacaagctctataatagcaaggaatcacgaattccggcagatttaaagtacttttccagttttgccttgtcatggatcttttcatggcaatacagatacggaaaaactgaaaacaacaagcaatatccaccgttacagagacacgcctttgtaaaatggtggtcacaattcgatacttcaaaggctgctccagatcaagtcaagaactggttccagagcaatcctgagttccttaaacctgctgatctggagacatctttgtttctaaattagaagtcgcaactggcagcattcttagcaagctcaaaatctaaagagagtcttgctcagaatctcaaagaagttctccaactacttcaacaggaagtggaagaagaaccttccaagaaggaagctgaatcatccgagactaatgatgaccaagaagatgatccattctaccagaatgaagatgattgttttggtatatcattggacgacgattaattagttgtaataatcatgaattattgtaactaatttgtcagtttcttttaaataatgtaatttgtaaaaagttttgtaacagttccggtaaacattaccgatactgtagaaacagtaaaaattgggtctatttaaaggagtcctcgtcccctttgtgaggcaccctttcagatagactcagaatcaggtttttagagagagaagctctgcctagggaaaaactctttgtaagcttttctttcggtttcaataaatttcaagttctatttttcatatctcccttctcccctcaccgatcctgtgcggctctgccgccgcttcggtttctttgttttcaaaaacttgg

SEQ ID NO: 9843 - DNA, 1121 bp, Glycine max
  Gm_smallRNAprecursor_2676
cattccacaatccaaatcctgaaggttatgcagccacgacattatgactcaaacttaaaccaacccaaaaaattctctgcaccatttgaccctacaggatataattattgggattacgttgacgcttggaccaatgtgttctggcatcaaaatagtaaattcaagcattcatggctgatttacttcaaaaataatactgcatataattttccaaattggttcctccaatggtggaactacttcggaccaattccacaaatatttccagaagaagtccaacagggattcgaacaattcaacaagctctataatagcaaggaatcacgaattccggcagatttaaagtacttttccagttttgccttgtcatggatcttttcatggcaatacagatacggaaaaactgaaaacaacaagcaatatccaccgttacagagacacgcctttgtaaaatggtggtcacaattcgatacttcaaaggctgctccagatcaagtcaagaactggttccagagcaatcctgagttccttaaacctgctgatctggagacatctttgtttctaaattagaagtcgcaactggcagcattcttagcaagctcaaaatctaaagagagtcttgctcagaatctcaaagaagttctccaactacttcaacaggaagtggaagaagaaccttccaagaaggaagctgaatcatccgagactaatgatgaccaagaagatgatccattctaccagaatgaagatgattgttttggtatatcattggacgacgattaattagttgtaataatcatgaattattgtaactaatttgtcagtttcttttaaataatgtaatttgtaaaaagttttgtaacagttccggtaaacattaccgatactgtagaaacagtaaaaattgggtctatttaaaggagtcctcgtcccctttgtgaggcaccctttcagatagactcagaatcaggtttttagagagagaagctctgcctagggaaaaactctttgtaagcttttctttcggtttcaataaatttcaagttctatttttcatatctcccttctcccctcaccgatcctgtgcggctctgccgccgcttcggtttctttgttttcaa

SEQ ID NO: 9844 - DNA, 1080 bp, Glycine max
  Gm_smallRNAprecursor_2677
attccacaatccaaatcctgaaggttatgcagccacgacattatgactcaaacttaaaccaacccaaaaaattctctgcaccatttgaccctacaggatataattattgggattacgttgacgcttggaccaatgtgttctggcatcaaaatagtaaattcaagcattcatggctgatttacttcaaaaataatactgcatataattttccaaattggttcctccaatggtggaactacttcggaccaattccacaaatatttccagaagaagtccaacagggattcgaacaattcaacaagctctataatagcaaggaatcacgaattccggcagatttaaagtacttttccagttttgccttgtcatggatcttttcatggcaatacagatacggaaaaactgaaaacaacaagcaatatccaccgttacagagacacgcctttgtaaaatggtggtcacaattcgatacttcaaaggctgctccagatcaagtcaagaactggttccagagcaatcctgagttccttaaacctgctgatctggagacatctttgtttctaaattagaagtcgcaactggcagcattcttagcaagctcaaaatctaaagagagtcttgctcagaatctcaaagaagttctccaactacttcaacaggaagtggaagaagaaccttccaagaaggaagctgaatcatccgagactaatgatgaccaagaagatgatccattctaccagaatgaagatgattgttttggtatatcattggacgacgattaattagttgtaataatcatgaattattgtaactaatttgtcagtttcttttaaataatgtaatttgtaaaaagttttgtaacagttccggtaaacattaccgatactgtagaaacagtaaaaattgggtctatttaaaggagtcctcgtcccctttgtgaggcaccctttcagatagactcagaatcaggtttttagagagagaagctctgcctagggaaaaactctttgtaagcttttctttcggtttcaataaatttcaagttctatttttcatatctcccttctcccctcaccgatc

SEQ ID NO: 9845 - DNA, 1098 bp, Glycine max
  Gm_smallRNAprecursor_2678
attccacaatccaaatcctgaaggttatgcagccacgacattatgactcaaacttaaaccaacccaaaaaattctctgcaccatttgaccctacaggatataattattgggattacgttgacgcttggaccaatgtgttctggcatcaaaatagtaaattcaagcattcatggctgatttacttcaaaaataatactgcatataattttccaaattggttcctccaatggtggaactacttcggaccaattccacaaatatttccagaagaagtccaacagggattcgaacaattcaacaagctctataatagcaaggaatcacgaattccggcagatttaaagtacttttccagttttgccttgtcatggatcttttcatggcaatacagatacggaaaaactgaaaacaacaagcaatatccaccgttacagagacacgcctttgtaaaatggtggtcacaattcgatacttcaaaggctgctccagatcaagtcaagaactggttccagagcaatcctgagttccttaaacctgctgatctggagacatctttgtttctaaattagaagtcgcaactggcagcattcttagcaagctcaaaatctaaagagagtcttgctcagaatctcaaagaagttctccaactacttcaacaggaagtggaagaagaaccttccaagaaggaagctgaatcatccgagactaatgatgaccaagaagatgatccattctaccagaatgaagatgattgttttggtatatcattggacgacgattaattagttgtaataatcatgaattattgtaactaatttgtcagtttcttttaaataatgtaatttgtaaaaagttttgtaacagttccggtaaacattaccgatactgtagaaacagtaaaaattgggtctatttaaaggagtcctcgtcccctttgtgaggcaccctttcagatagactcagaatcaggtttttagagagagaagctctgcctagggaaaaactctttgtaagcttttctttcggtttcaataaatttcaagttctatttttcatatctcccttctcccctcaccgatcctgtgcggctctgccgcc

SEQ ID NO: 9846 - DNA, 1120 bp, Glycine max
  Gm_smallRNAprecursor_2679
attccacaatccaaatcctgaaggttatgcagccacgacattatgactcaaacttaaaccaacccaaaaaattctctgcaccatttgaccctacaggatataattattgggattacgttgacgcttggaccaatgtgttctggcatcaaaatagtaaattcaagcattcatggctgatttacttcaaaaataatactgcatataattttccaaattggttcctccaatggtggaactacttcggaccaattccacaaatatttccagaagaagtccaacagggattcgaacaattcaacaagctctataatagcaaggaatcacgaattccggcagatttaaagtacttttccagttttgccttgtcatggatcttttcatggcaatacagatacggaaaaactgaaaacaacaagcaatatccaccgttacagagacacgcctttgtaaaatggtggtcacaattcgatacttcaaaggctgctccagatcaagtcaagaactggttccagagcaatcctgagttccttaaacctgctgatctggagacatctttgtttctaaattagaagtcgcaactggcagcattcttagcaagctcaaaatctaaagagagtcttgctcagaatctcaaagaagttctccaactacttcaacaggaagtggaagaagaaccttccaagaaggaagctgaatcatccgagactaatgatgaccaagaagatgatccattctaccagaatgaagatgattgttttggtatatcattggacgacgattaattagttgtaataatcatgaattattgtaactaatttgtcagtttcttttaaataatgtaatttgtaaaaagttttgtaacagttccggtaaacattaccgatactgtagaaacagtaaaaattgggtctatttaaaggagtcctcgtcccctttgtgaggcaccctttcagatagactcagaatcaggtttttagagagagaagctctgcctagggaaaaactctttgtaagcttttctttcggtttcaataaatttcaagttctatttttcatatctcccttctcccctcaccgatcctgtgcggctctgccgccgcttcggtttctttgttttcaa

SEQ ID NO: 9847 - DNA, 1041 bp, Glycine max
  Gm_smallRNAprecursor_2680
tgcaccatttgaccctacaggatataattattgggattacgttgacgcttggaccaatgtgttctggcatcaaaatagtaaattcaagcattcatggctgatttacttcaaaaataatactgcatataattttccaaattggttcctccaatggtggaactacttcggaccaattccacaaatatttccagaagaagtccaacagggattcgaacaattcaacaagctctataatagcaaggaatcacgaattccggcagatttaaagtacttttccagttttgccttgtcatggatcttttcatggcaatacagatacggaaaaactgaaaacaacaagcaatatccaccgttacagagacacgcctttgtaaaatggtggtcacaattcgatacttcaaaggctgctccagatcaagtcaagaactggttccagagcaatcctgagttccttaaacctgctgatctggagacatctttgtttctaaattagaagtcgcaactggcagcattcttagcaagctcaaaatctaaagagagtcttgctcagaatctcaaagaagttctccaactacttcaacaggaagtggaagaagaaccttccaagaaggaagctgaatcatccgagactaatgatgaccaagaagatgatccattctaccagaatgaagatgattgttttggtatatcattggacgacgattaattagttgtaataatcatgaattattgtaactaatttgtcagtttcttttaaataatgtaatttgtaaaaagttttgtaacagttccggtaaacattaccgatactgtagaaacagtaaaaattgggtctatttaaaggagtcctcgtcccctttgtgaggcaccctttcagatagactcagaatcaggtttttagagagagaagctctgcctagggaaaaactctttgtaagcttttctttcggtttcaataaatttcaagttctatttttcatatctcccttctcccctcaccgatcctgtgcggctctgccgccgcttcggtttctttgtttt

SEQ ID NO: 9848 - DNA, 1172 bp, Glycine max
  Gm_smallRNAprecursor_2681
gaccaatgtgttctggcatcaaaatagtaaattcaagcattcatggctgatttacttcaaaaataatactgcatataattttccaaattggttcctccaatggtggaactacttcggaccaattccacaaatatttccagaagaagtccaacagggattcgaacaattcaacaagctctataatagcaaggaatcacgaattccggcagatttaaagtacttttccagttttgccttgtcatggatcttttcatggcaatacagatacggaaaaactgaaaacaacaagcaatatccaccgttacagagacacgcctttgtaaaatggtggtcacaattcgatacttcaaaggctgctccagatcaagtcaagaactggttccagagcaatcctgagttccttaaacctgctgatctggagacatctttgtttctaaattagaagtcgcaactggcagcattcttagcaagctcaaaatctaaagagagtcttgctcagaatctcaaagaagttctccaactacttcaacaggaagtggaagaagaaccttccaagaaggaagctgaatcatccgagactaatgatgaccaagaagatgatccattctaccagaatgaagatgattgttttggtatatcattggacgacgattaattagttgtaataatcatgaattattgtaactaatttgtcagtttcttttaaataatgtaatttgtaaaaagttttgtaacagttccggtaaacattaccgatactgtagaaacagtaaaaattgggtctatttaaaggagtcctcgtcccctttgtgaggcaccctttcagatagactcagaatcaggtttttagagagagaagctctgcctagggaaaaactctttgtaagcttttctttcggtttcaataaatttcaagttctatttttcatatctcccttctcccctcaccgatcctgtgcggctctgccgccgcttcggtttctttgttttcaaaaacttgggtttgtaagccgtttcggtgtgcccttgatatctgcttttacaagttaataattcttacgtttaatcttatcatactgcattcttacttcttatttgtccgtttgatcttactccgctgatctctggtatatatatatatatatatatatatatatatatagtttgtactt

SEQ ID NO: 9849 - DNA, 1106 bp, Glycine max
  Gm_smallRNAprecursor_2682
tactgcatataattttccaaattggttcctccaatggtggaactacttcggaccaattccacaaatatttccagaagaagtccaacagggattcgaacaattcaacaagctctataatagcaaggaatcacgaattccggcagatttaaagtacttttccagttttgccttgtcatggatcttttcatggcaatacagatacggaaaaactgaaaacaacaagcaatatccaccgttacagagacacgcctttgtaaaatggtggtcacaattcgatacttcaaaggctgctccagatcaagtcaagaactggttccagagcaatcctgagttccttaaacctgctgatctggagacatctttgtttctaaattagaagtcgcaactggcagcattcttagcaagctcaaaatctaaagagagtcttgctcagaatctcaaagaagttctccaactacttcaacaggaagtggaagaagaaccttccaagaaggaagctgaatcatccgagactaatgatgaccaagaagatgatccattctaccagaatgaagatgattgttttggtatatcattggacgacgattaattagttgtaataatcatgaattattgtaactaatttgtcagtttcttttaaataatgtaatttgtaaaaagttttgtaacagttccggtaaacattaccgatactgtagaaacagtaaaaattgggtctatttaaaggagtcctcgtcccctttgtgaggcaccctttcagatagactcagaatcaggtttttagagagagaagctctgcctagggaaaaactctttgtaagcttttctttcggtttcaataaatttcaagttctatttttcatatctcccttctcccctcaccgatcctgtgcggctctgccgccgcttcggtttctttgttttcaaaaacttgggtttgtaagccgtttcggtgtgcccttgatatctgcttttacaagttaataattcttacgtttaatcttatcatactgcattcttacttcttatttgtccgtttgatcttactccgctgatctctggtatatatatatatatatatatatatatatatatagtttgtactt

SEQ ID NO: 9850 - DNA, 1189 bp, Glycine max
  Gm_smallRNAprecursor_2683
gaggccggaaacacatacgtttcacataagatgcggagagtgtactattactctccaagacgtctctgtattgttaggtctattatgtgtggatggtttaccattaatcggtccaacaaatcttaattgggctgatttatgtgaggaattattgggagtcagaccacaagaaggtgaaattaaaggtagtgtggttaaattaagttggctggctcaccattttgcacaaataaataaccacaacgacgaagaacaagtacgaaggtttgcccgtgcatggatactaagattcattggaggtgtcttattcgttgacaaaagcagtaacaaagtttcgctaagttaccttcaatttttacgtgactttgatgactgtagcacatatgcatggggacctaccgtacttgtttttctatacagagagatgtgcagtgccaccgattataaaactaaattaattagaggtatgtgcatcttactacaaatgtgggcataggaacgatgtccaaccttggctccaaagaggactccttcccaagtaaaaaataaaccactggggcacaggttagtcatttttaaaagcatatttcatttcaaaagaataaatagttttagggtatattaaattttaatctttgtaggtggttgcgacatggaaaccaacatatcagcaataatgatgtgagagtttttcgtcgcaagttggatattatgaaacgtcatgaggtaagaacatggtattgtatttgtaaaataaaaaatgatatgtgttattttactaaaatgttgacaactatgttgttatatgcagtttgtgtgggagccttacacaacaactgttatatcattgttgcctcccatttgtgtagtcggaaatgtcgcgtggtgcgcggtggtgccactaatttgtttccaagttattgagtggcaccaaccggatagagtattgagacaatttgggatgcagtaaccaattctagagtctcatttgcaacccttaaacattcatggcataacactaaaagggaaacatgacgaaaattgggggcaattgttcaccccaatgattgatcagtggaataatcgccatgcttttagggtcgacgcttatcctcgacaagagggcctattgagctttaactcagactacatggtctggtatagacgaaagacagagatgtttttaaac

SEQ ID NO: 9851 - DNA, 1169 bp, Glycine max
  Gm_smallRNAprecursor_2684
tttcttctcctttgtggttgagtatgaattcacatcaatggaaaaaggtgggcccctttttgctccacttaaaagaggacatgtggcaagtgcttttagaaaaaaaaaatcatttttttaataaaagccaaattctctctccttcttcagaaatttcagaagcttttcttctcccttccatgtagcttttcttcttccttcttctccaccattgttgtccattgaagcttcaaaattcctcctcatttctactccaagccattttcggagtcttggagcacacctctacattgtggggcttcgaatttcaggtatgggtggacttcttctcacatgaaatttgtgggtgttgggtttttgggagctatgatgggtagttctactaggttattgccttagggtagttatttgtgaaggaatttgttgaaatcatgctaaacttgacgtgtttgatgtgagtaaagctacccattctgttttagggttttatgatgatgctttgtgatatttgtatgctgaaattgttgatagaaaactggtagagatgatggggagagttaacttagggttaaatgtgagaatggtaatgttgtaggtagaaaaatgtgagattttgagggttagaaagccaaatttggggttagtggaaattggagtctaaagtgagttgatcctagtttaaaatgtcaattaggacttgtaggaaagcttgggcaaagcaaatgaaaaaaatgagtgacaaaggtgaaagaaaagagccatttctagggtaaattgggtgttgagaggtcaaattttgaatcggtggagttttcaccttaaaaccagtttgagcaagtctaaattaatgttatagacttgattgagatgagattttaccccaaaattacccaattctcattttcacctttcaaaccttgaaaattcactaaattggtgggttttggatacctatattttgatttgccttggtctaaagtttgcttttggtttaaatatgatttatacatgatttaggacttgtaggatccaatttgagcaaaattggatgtggacaagttggatttcgaaatctgccatattatgcagaaaaatgctgtcaaaattgtgtagtagttttttttaacatagtgcagaaaaatggttggcattgctagtcatgggaagag

SEQ ID NO: 9852 - DNA, 1046 bp, Glycine max
  Gm_smallRNAprecursor_2685
gcaaatgcaaatttataaggaggatttggcttagctgggctcacagtaatcactgggtttgggaaataaaactgtgggttaggctttggtctttggatggatatggctgggggatgtctgttctgttctattcacgggccgaatataagggggttaattttatatgtgtttatttaggggcaatttggcattaatgaaaaagaaaaaaggtgtagaagaaattttggagatttttagaattgatttgaaaatttggaaaacatttatagtaaaaaattattgactcatttcattgagttaatctatgcaagaggggtttgaattgtctaaggagacatttctgaaatacatagaggaatgccattttgagaatttctcgagtgaataggcaatttagtctctgagattgtatctattttgcatattagtccctaacttaatattaaattcaaaatagtccatatctttgcataagtgttgcaaaatagtcattccattaaattttaaagtaacgccgttagcgaggtcaattttagtgtcacgtgaactatccaacgtgacactaaaggatgacgtgacatgatacgtgaactcgcttcttaaaagatgtcacgtcttttgatgataacaaaacgagtaaataggcaatttagtcattgactttgtacccctgttgcatattagtccctaacttaatgaaaaattcaaaatagttcatatcttttgcataagtattgcaaaatagtctctaacttaaaagatgtcagaaatcgtgcttaaagtgtccatgcattgcaaaggttgtgaaatgtctcgtggactttcaaaatgacgtgacatcttttaggagacacgtccacatgtcatgtcacgtcatcctttagtgctatattggatagttcacgtggcactaaaattgatctcactaacggtgttactttaaaatttaacggaatgactattttgcaacacttatgtaaagatagagattattttgaatttaacattaagttagagactaatatgcaaaataggtacaatctcag

SEQ ID NO: 9853 - DNA, 1045 bp, Glycine max
  Gm_smallRNAprecursor_2686
caaatgcaaatttataaggaggatttggcttagctgggctcacagtaatcactgggtttgggaaataaaactgtgggttaggctttggtctttggatggatatggctgggggatgtctgttctgttctattcacgggccgaatataagggggttaattttatatgtgtttatttaggggcaatttggcattaatgaaaaagaaaaaaggtgtagaagaaattttggagatttttagaattgatttgaaaatttggaaaacatttatagtaaaaaattattgactcatttcattgagttaatctatgcaagaggggtttgaattgtctaaggagacatttctgaaatacatagaggaatgccattttgagaatttctcgagtgaataggcaatttagtctctgagattgtatctattttgcatattagtccctaacttaatattaaattcaaaatagtccatatctttgcataagtgttgcaaaatagtcattccattaaattttaaagtaacgccgttagcgaggtcaattttagtgtcacgtgaactatccaacgtgacactaaaggatgacgtgacatgatacgtgaactcgcttcttaaaagatgtcacgtcttttgatgataacaaaacgagtaaataggcaatttagtcattgactttgtacccctgttgcatattagtccctaacttaatgaaaaattcaaaatagttcatatcttttgcataagtattgcaaaatagtctctaacttaaaagatgtcagaaatcgtgcttaaagtgtccatgcattgcaaaggttgtgaaatgtctcgtggactttcaaaatgacgtgacatcttttaggagacacgtccacatgtcatgtcacgtcatcctttagtgctatattggatagttcacgtggcactaaaattgatctcactaacggtgttactttaaaatttaacggaatgactattttgcaacacttatgtaaagatagagattattttgaatttaacattaagttagagactaatatgcaaaataggtacaatctcag

SEQ ID NO: 9854 - DNA, 1037 bp, Glycine max
  Gm_smallRNAprecursor_2687
atgatctctaagataaaagaggtaccaaggaaatacataaagagcaagaataacaaggttgggaaaaaaaggatataacttatttaaatcaaaatgaagatataaataagagataaccccagttaccaacaacctatcccaccacccaaaatatgttctgcagaaaggatcgtggatccaccaaaaggaaagatataaaccaacaagagaaagaaaacagtaaaagcctataaaacctgtatcaagccaagtcaccatcgggacctttatgttgtgatagagcaccttacatgttcccaagcattgcacaaaaccgcagaatgtatctcaaagatgagcatcatatcacccaatctggtataattcaatccagagaaatacatgttcagcaagtatgaatcctccagcaatatggtaaatgatgagcttacaaaaataaacccgagcctgaacacctgataacctatgaagcacagacacttcagccccttgccgtttccggtgtccgacacgcgtccgtgtcagtgtccgacactgacacgacacccgtactacgttctatattttggacattacaagtgtccacgtgtctgtgtccgtgtcgtatccggtgtccgtgtcgatgttggtgcttcatagctgataactatcaaatagagacaattgtgtccctatttttggtggaaatttgttaaaataatcgaaatataatttatcatatttttacacttaattcttatcaatcacaaataatttattttatttagtattgtgacagaattgcaatagcaagtttttcttatttaaactaactgttgatataactttcaattaaaaaaacatgagatcaatcgagtgcacataaaattttatcataatcatgtattattatatcaatctgaaaatattcattttgataatttaatatccacgacaatagtttcagaatagacatagtatttcatgaacagatgttttcgaaacaagtaaagaccatgtaaaatttgactaataaatgaagttgaaatgtaaacaca

SEQ ID NO: 9855 - DNA, 1111 bp, Glycine max
  Gm_smallRNAprecursor_2688
ttttttactattgactgaaagttgtttagaatcataaaattgtgtaggtctctcgatctttttatttaatgaacctttctcgtgattttgtagtttttaataaattttagccaataatagtgtgtcagggaatgtgttgctagcacttctcttattattattattatgccaacgattttgagttctatgttggatttttgttgtagttgctgctcttgaaacttaggctgggcttcatctattgatgaggcaggtcggtatttgcaaaacaattgtaaaattttggtttggctgctttttgcagcactgttcatgtttattcagtgttattttttaatgtaggatgatttggcagccatggtggctgataagtgcatgaaggtggtggggaatcaagagaaaccactagaatatgaggcacaatttgtccgtgctaaagcaccaaaagggctgattgaacttgtcaatggcaatctatgaagcacggacacttcagtcccttgccgtgtccggtgtccgacacgcgtccgtgtcagtgtctgaccgacacgacacccgtactacgttctatatttgggacattacaggtgtccacgtgtccgtgtctgtgtcgtgtccggtgtccgtgtcggtgttggtgcttcatagatggcaatactgacttaggttgtgcttaaggtctatttgttcattgctgttactcttgatgaacactaattatgtgcctggtgcagctgaagatttcttcgacaagtctcttgccaagcagtattgtgatggtatcctcccgttcatgaggtactggagcaggcatccttcaacaccgaattgatgtttggttttgtaggtactgctggtctatcatatgtggaattcctgcataaaatagggaactatccattggcaaaagaggtttacataacgtgtacaaggtgctactgaagtaaaaaatgctggcagaccatacttaggagcgggtaacatgagcatggaagaattaattgtagggtccttgtgtgctttaggacagcttgaagtacttatggggtaggcttaataatcaattttgtttggttttccttagccataccacaaccttccttttttatgt

SEQ ID NO: 9856 - DNA, 1112 bp, Glycine max
  Gm_smallRNAprecursor_2689
ttttttactattgactgaaagttgtttagaatcataaaattgtgtaggtctctcgatctttttatttaatgaacctttctcgtgattttgtagtttttaataaattttagccaataatagtgtgtcagggaatgtgttgctagcacttctcttattattattattatgccaacgattttgagttctatgttggatttttgttgtagttgctgctcttgaaacttaggctgggcttcatctattgatgaggcaggtcggtatttgcaaaacaattgtaaaattttggtttggctgctttttgcagcactgttcatgtttattcagtgttattttttaatgtaggatgatttggcagccatggtggctgataagtgcatgaaggtggtggggaatcaagagaaaccactagaatatgaggcacaatttgtccgtgctaaagcaccaaaagggctgattgaacttgtcaatggcaatctatgaagcacggacacttcagtcccttgccgtgtccggtgtccgacacgcgtccgtgtcagtgtctgaccgacacgacacccgtactacgttctatatttgggacattacaggtgtccacgtgtccgtgtctgtgtcgtgtccggtgtccgtgtcggtgttggtgcttcatagatggcaatactgacttaggttgtgcttaaggtctatttgttcattgctgttactcttgatgaacactaattatgtgcctggtgcagctgaagatttcttcgacaagtctcttgccaagcagtattgtgatggtatcctcccgttcatgaggtactggagcaggcatccttcaacaccgaattgatgtttggttttgtaggtactgctggtctatcatatgtggaattcctgcataaaatagggaactatccattggcaaaagaggtttacataacgtgtacaaggtgctactgaagtaaaaaatgctggcagaccatacttaggagcgggtaacatgagcatggaagaattaattgtagggtccttgtgtgctttaggacagcttgaagtacttatggggtaggcttaataatcaattttgtttggttttccttagccataccacaaccttccttttttatgtt

SEQ ID NO: 9857 - DNA, 1110 bp, Glycine max
  Gm_smallRNAprecursor_2690
tttttactattgactgaaagttgtttagaatcataaaattgtgtaggtctctcgatctttttatttaatgaacctttctcgtgattttgtagtttttaataaattttagccaataatagtgtgtcagggaatgtgttgctagcacttctcttattattattattatgccaacgattttgagttctatgttggatttttgttgtagttgctgctcttgaaacttaggctgggcttcatctattgatgaggcaggtcggtatttgcaaaacaattgtaaaattttggtttggctgctttttgcagcactgttcatgtttattcagtgttattttttaatgtaggatgatttggcagccatggtggctgataagtgcatgaaggtggtggggaatcaagagaaaccactagaatatgaggcacaatttgtccgtgctaaagcaccaaaagggctgattgaacttgtcaatggcaatctatgaagcacggacacttcagtcccttgccgtgtccggtgtccgacacgcgtccgtgtcagtgtctgaccgacacgacacccgtactacgttctatatttgggacattacaggtgtccacgtgtccgtgtctgtgtcgtgtccggtgtccgtgtcggtgttggtgcttcatagatggcaatactgacttaggttgtgcttaaggtctatttgttcattgctgttactcttgatgaacactaattatgtgcctggtgcagctgaagatttcttcgacaagtctcttgccaagcagtattgtgatggtatcctcccgttcatgaggtactggagcaggcatccttcaacaccgaattgatgtttggttttgtaggtactgctggtctatcatatgtggaattcctgcataaaatagggaactatccattggcaaaagaggtttacataacgtgtacaaggtgctactgaagtaaaaaatgctggcagaccatacttaggagcgggtaacatgagcatggaagaattaattgtagggtccttgtgtgctttaggacagcttgaagtacttatggggtaggcttaataatcaattttgtttggttttccttagccataccacaaccttccttttttatgt

SEQ ID NO: 9858 - DNA, 1110 bp, Glycine max; identical to SEQ ID NO: 9857
  Gm_smallRNAprecursor_2691

SEQ ID NO: 9859 - DNA, 1110 bp, Glycine max; identical to SEQ ID NO: 9857
  Gm_smallRNAprecursor_2692

SEQ ID NO: 9860 - DNA, 1110 bp, Glycine max; identical to SEQ ID NO: 9857
  Gm_smallRNAprecursor_2693

SEQ ID NO: 9861 - DNA, 1111 bp, Glycine max
  Gm_smallRNAprecursor_2694
tttttactattgactgaaagttgtttagaatcataaaattgtgtaggtctctcgatctttttatttaatgaacctttctcgtgattttgtagtttttaataaattttagccaataatagtgtgtcagggaatgtgttgctagcacttctcttattattattattatgccaacgattttgagttctatgttggatttttgttgtagttgctgctcttgaaacttaggctgggcttcatctattgatgaggcaggtcggtatttgcaaaacaattgtaaaattttggtttggctgctttttgcagcactgttcatgtttattcagtgttattttttaatgtaggatgatttggcagccatggtggctgataagtgcatgaaggtggtggggaatcaagagaaaccactagaatatgaggcacaatttgtccgtgctaaagcaccaaaagggctgattgaacttgtcaatggcaatctatgaagcacggacacttcagtcccttgccgtgtccggtgtccgacacgcgtccgtgtcagtgtctgaccgacacgacacccgtactacgttctatatttgggacattacaggtgtccacgtgtccgtgtctgtgtcgtgtccggtgtccgtgtcggtgttggtgcttcatagatggcaatactgacttaggttgtgcttaaggtctatttgttcattgctgttactcttgatgaacactaattatgtgcctggtgcagctgaagatttcttcgacaagtctcttgccaagcagtattgtgatggtatcctcccgttcatgaggtactggagcaggcatccttcaacaccgaattgatgtttggttttgtaggtactgctggtctatcatatgtggaattcctgcataaaatagggaactatccattggcaaaagaggtttacataacgtgtacaaggtgctactgaagtaaaaaatgctggcagaccatacttaggagcgggtaacatgagcatggaagaattaattgtagggtccttgtgtgctttaggacagcttgaagtacttatggggtaggcttaataatcaattttgtttggttttccttagccataccacaaccttccttttttatgtt

SEQ ID NO: 9862 - DNA, 1111 bp, Glycine max; identical to SEQ ID NO: 9861
  Gm_smallRNAprecursor_2695

SEQ ID NO: 9863 - DNA, 1112 bp, Glycine max
  Gm_smallRNAprecursor_2696
tttttactattgactgaaagttgtttagaatcataaaattgtgtaggtctctcgatctttttatttaatgaacctttctcgtgattttgtagtttttaataaattttagccaataatagtgtgtcagggaatgtgttgctagcacttctcttattattattattatgccaacgattttgagttctatgttggatttttgttgtagttgctgctcttgaaacttaggctgggcttcatctattgatgaggcaggtcggtatttgcaaaacaattgtaaaattttggtttggctgctttttgcagcactgttcatgtttattcagtgttattttttaatgtaggatgatttggcagccatggtggctgataagtgcatgaaggtggtggggaatcaagagaaaccactagaatatgaggcacaatttgtccgtgctaaagcaccaaaagggctgattgaacttgtcaatggcaatctatgaagcacggacacttcagtcccttgccgtgtccggtgtccgacacgcgtccgtgtcagtgtctgaccgacacgacacccgtactacgttctatatttgggacattacaggtgtccacgtgtccgtgtctgtgtcgtgtccggtgtccgtgtcggtgttggtgcttcatagatggcaatactgacttaggttgtgcttaaggtctatttgttcattgctgttactcttgatgaacactaattatgtgcctggtgcagctgaagatttcttcgacaagtctcttgccaagcagtattgtgatggtatcctcccgttcatgaggtactggagcaggcatccttcaacaccgaattgatgtttggttttgtaggtactgctggtctatcatatgtggaattcctgcataaaatagggaactatccattggcaaaagaggtttacataacgtgtacaaggtgctactgaagtaaaaaatgctggcagaccatacttaggagcgggtaacatgagcatggaagaattaattgtagggtccttgtgtgctttaggacagcttgaagtacttatggggtaggcttaataatcaattttgtttggttttccttagccataccacaaccttccttttttatgttg

SEQ ID NO: 9864 - DNA, 1108 bp, Glycine max
  Gm_smallRNAprecursor_2697
ttttactattgactgaaagttgtttagaatcataaaattgtgtaggtctctcgatctttttatttaatgaacctttctcgtgattttgtagtttttaataaattttagccaataatagtgtgtcagggaatgtgttgctagcacttctcttattattattattatgccaacgattttgagttctatgttggatttttgttgtagttgctgctcttgaaacttaggctgggcttcatctattgatgaggcaggtcggtatttgcaaaacaattgtaaaattttggtttggctgctttttgcagcactgttcatgtttattcagtgttattttttaatgtaggatgatttggcagccatggtggctgataagtgcatgaaggtggtggggaatcaagagaaaccactagaatatgaggcacaatttgtccgtgctaaagcaccaaaagggctgattgaacttgtcaatggcaatctatgaagcacggacacttcagtcccttgccgtgtccggtgtccgacacgcgtccgtgtcagtgtctgaccgacacgacacccgtactacgttctatatttgggacattacaggtgtccacgtgtccgtgtctgtgtcgtgtccggtgtccgtgtcggtgttggtgcttcatagatggcaatactgacttaggttgtgcttaaggtctatttgttcattgctgttactcttgatgaacactaattatgtgcctggtgcagctgaagatttcttcgacaagtctcttgccaagcagtattgtgatggtatcctcccgttcatgaggtactggagcaggcatccttcaacaccgaattgatgtttggttttgtaggtactgctggtctatcatatgtggaattcctgcataaaatagggaactatccattggcaaaagaggtttacataacgtgtacaaggtgctactgaagtaaaaaatgctggcagaccatacttaggagcgggtaacatgagcatggaagaattaattgtagggtccttgtgtgctttaggacagcttgaagtacttatggggtaggcttaataatcaattttgtttggttttccttagccataccacaaccttccttttttatg

SEQ ID NO: 9865 - DNA, 1109 bp, Glycine max
  Gm_smallRNAprecursor_2698
ttttactattgactgaaagttgtttagaatcataaaattgtgtaggtctctcgatctttttatttaatgaacctttctcgtgattttgtagtttttaataaattttagccaataatagtgtgtcagggaatgtgttgctagcacttctcttattattattattatgccaacgattttgagttctatgttggatttttgttgtagttgctgctcttgaaacttaggctgggcttcatctattgatgaggcaggtcggtatttgcaaaacaattgtaaaattttggtttggctgctttttgcagcactgttcatgtttattcagtgttattttttaatgtaggatgatttggcagccatggtggctgataagtgcatgaaggtggtggggaatcaagagaaaccactagaatatgaggcacaatttgtccgtgctaaagcaccaaaagggctgattgaacttgtcaatggcaatctatgaagcacggacacttcagtcccttgccgtgtccggtgtccgacacgcgtccgtgtcagtgtctgaccgacacgacacccgtactacgttctatatttgggacattacaggtgtccacgtgtccgtgtctgtgtcgtgtccggtgtccgtgtcggtgttggtgcttcatagatggcaatactgacttaggttgtgcttaaggtctatttgttcattgctgttactcttgatgaacactaattatgtgcctggtgcagctgaagatttcttcgacaagtctcttgccaagcagtattgtgatggtatcctcccgttcatgaggtactggagcaggcatccttcaacaccgaattgatgtttggttttgtaggtactgctggtctatcatatgtggaattcctgcataaaatagggaactatccattggcaaaagaggtttacataacgtgtacaaggtgctactgaagtaaaaaatgctggcagaccatacttaggagcgggtaacatgagcatggaagaattaattgtagggtccttgtgtgctttaggacagcttgaagtacttatggggtaggcttaataatcaattttgtttggttttccttagccataccacaaccttccttttttatgt

SEQ ID NO: 9866 - DNA, 1109 bp, Glycine max; identical to SEQ ID NO: 9865
  Gm_smallRNAprecursor_2699

SEQ ID NO: 9867 - DNA, 1035 bp, Glycine max
  Gm_smallRNAprecursor_2700
tgactgaaagttgtttagaatcataaaattgtgtaggtctctcgatctttttatttaatgaacctttctcgtgattttgtagtttttaataaattttagccaataatagtgtgtcagggaatgtgttgctagcacttctcttattattattattatgccaacgattttgagttctatgttggatttttgttgtagttgctgctcttgaaacttaggctgggcttcatctattgatgaggcaggtcggtatttgcaaaacaattgtaaaattttggtttggctgctttttgcagcactgttcatgtttattcagtgttattttttaatgtaggatgatttggcagccatggtggctgataagtgcatgaaggtggtggggaatcaagagaaaccactagaatatgaggcacaatttgtccgtgctaaagcaccaaaagggctgattgaacttgtcaatggcaatctatgaagcacggacacttcagtcccttgccgtgtccggtgtccgacacgcgtccgtgtcagtgtctgaccgacacgacacccgtactacgttctatatttgggacattacaggtgtccacgtgtccgtgtctgtgtcgtgtccggtgtccgtgtcggtgttggtgcttcatagatggcaatactgacttaggttgtgcttaaggtctatttgttcattgctgttactcttgatgaacactaattatgtgcctggtgcagctgaagatttcttcgacaagtctcttgccaagcagtattgtgatggtatcctcccgttcatgaggtactggagcaggcatccttcaacaccgaattgatgtttggttttgtaggtactgctggtctatcatatgtggaattcctgcataaaatagggaactatccattggcaaaagaggtttacataacgtgtacaaggtgctactgaagtaaaaaatgctggcagaccatacttaggagcgggtaacatgagcatggaagaattaattgtagggtccttgtgtgctttaggacagcttgaagtacttatgg

SEQ ID NO: 9868 - DNA, 1099 bp, Glycine max
  Gm_smallRNAprecursor_2701
gactgaaagttgtttagaatcataaaattgtgtaggtctctcgatctttttatttaatgaacctttctcgtgattttgtagtttttaataaattttagccaataatagtgtgtcagggaatgtgttgctagcacttctcttattattattattatgccaacgattttgagttctatgttggatttttgttgtagttgctgctcttgaaacttaggctgggcttcatctattgatgaggcaggtcggtatttgcaaaacaattgtaaaattttggtttggctgctttttgcagcactgttcatgtttattcagtgttattttttaatgtaggatgatttggcagccatggtggctgataagtgcatgaaggtggtggggaatcaagagaaaccactagaatatgaggcacaatttgtccgtgctaaagcaccaaaagggctgattgaacttgtcaatggcaatctatgaagcacggacacttcagtcccttgccgtgtccggtgtccgacacgcgtccgtgtcagtgtctgaccgacacgacacccgtactacgttctatatttgggacattacaggtgtccacgtgtccgtgtctgtgtcgtgtccggtgtccgtgtcggtgttggtgcttcatagatggcaatactgacttaggttgtgcttaaggtctatttgttcattgctgttactcttgatgaacactaattatgtgcctggtgcagctgaagatttcttcgacaagtctcttgccaagcagtattgtgatggtatcctcccgttcatgaggtactggagcaggcatccttcaacaccgaattgatgtttggttttgtaggtactgctggtctatcatatgtggaattcctgcataaaatagggaactatccattggcaaaagaggtttacataacgtgtacaaggtgctactgaagtaaaaaatgctggcagaccatacttaggagcgggtaacatgagcatggaagaattaattgtagggtccttgtgtgctttaggacagcttgaagtacttatggggtaggcttaataatcaattttgtttggttttccttagccataccacaaccttccttttttatgt

SEQ ID NO: 9869 - DNA, 1099 bp, Glycine max; identical to SEQ ID NO: 9868
  Gm_smallRNAprecursor_2702

SEQ ID NO: 9870 - DNA, 1100 bp, Glycine max
  Gm_smallRNAprecursor_2703
gactgaaagttgtttagaatcataaaattgtgtaggtctctcgatctttttatttaatgaacctttctcgtgattttgtagtttttaataaattttagccaataatagtgtgtcagggaatgtgttgctagcacttctcttattattattattatgccaacgattttgagttctatgttggatttttgttgtagttgctgctcttgaaacttaggctgggcttcatctattgatgaggcaggtcggtatttgcaaaacaattgtaaaattttggtttggctgctttttgcagcactgttcatgtttattcagtgttattttttaatgtaggatgatttggcagccatggtggctgataagtgcatgaaggtggtggggaatcaagagaaaccactagaatatgaggcacaatttgtccgtgctaaagcaccaaaagggctgattgaacttgtcaatggcaatctatgaagcacggacacttcagtcccttgccgtgtccggtgtccgacacgcgtccgtgtcagtgtctgaccgacacgacacccgtactacgttctatatttgggacattacaggtgtccacgtgtccgtgtctgtgtcgtgtccggtgtccgtgtcggtgttggtgcttcatagatggcaatactgacttaggttgtgcttaaggtctatttgttcattgctgttactcttgatgaacactaattatgtgcctggtgcagctgaagatttcttcgacaagtctcttgccaagcagtattgtgatggtatcctcccgttcatgaggtactggagcaggcatccttcaacaccgaattgatgtttggttttgtaggtactgctggtctatcatatgtggaattcctgcataaaatagggaactatccattggcaaaagaggtttacataacgtgtacaaggtgctactgaagtaaaaaatgctggcagaccatacttaggagcgggtaacatgagcatggaagaattaattgtagggtccttgtgtgctttaggacagcttgaagtacttatggggtaggcttaataatcaattttgtttggttttccttagccataccacaaccttccttttttatgtt

SEQ ID NO: 9871 - DNA, 1101 bp, Glycine max
  Gm_smallRNAprecursor_2704
gactgaaagttgtttagaatcataaaattgtgtaggtctctcgatctttttatttaatgaacctttctcgtgattttgtagtttttaataaattttagccaataatagtgtgtcagggaatgtgttgctagcacttctcttattattattattatgccaacgattttgagttctatgttggatttttgttgtagttgctgctcttgaaacttaggctgggcttcatctattgatgaggcaggtcggtatttgcaaaacaattgtaaaattttggtttggctgctttttgcagcactgttcatgtttattcagtgttattttttaatgtaggatgatttggcagccatggtggctgataagtgcatgaaggtggtggggaatcaagagaaaccactagaatatgaggcacaatttgtccgtgctaaagcaccaaaagggctgattgaacttgtcaatggcaatctatgaagcacggacacttcagtcccttgccgtgtccggtgtccgacacgcgtccgtgtcagtgtctgaccgacacgacacccgtactacgttctatatttgggacattacaggtgtccacgtgtccgtgtctgtgtcgtgtccggtgtccgtgtcggtgttggtgcttcatagatggcaatactgacttaggttgtgcttaaggtctatttgttcattgctgttactcttgatgaacactaattatgtgcctggtgcagctgaagatttcttcgacaagtctcttgccaagcagtattgtgatggtatcctcccgttcatgaggtactggagcaggcatccttcaacaccgaattgatgtttggttttgtaggtactgctggtctatcatatgtggaattcctgcataaaatagggaactatccattggcaaaagaggtttacataacgtgtacaaggtgctactgaagtaaaaaatgctggcagaccatacttaggagcgggtaacatgagcatggaagaattaattgtagggtccttgtgtgctttaggacagcttgaagtacttatggggtaggcttaataatcaattttgtttggttttccttagccataccacaaccttccttttttatgttg

SEQ ID NO: 9872 - DNA, 1065 bp, Glycine max
  Gm_smallRNAprecursor_2705
aggtctctcgatctttttatttaatgaacctttctcgtgattttgtagtttttaataaattttagccaataatagtgtgtcagggaatgtgttgctagcacttctcttattattattattatgccaacgattttgagttctatgttggatttttgttgtagttgctgctcttgaaacttaggctgggcttcatctattgatgaggcaggtcggtatttgcaaaacaattgtaaaattttggtttggctgctttttgcagcactgttcatgtttattcagtgttattttttaatgtaggatgatttggcagccatggtggctgataagtgcatgaaggtggtggggaatcaagagaaaccactagaatatgaggcacaatttgtccgtgctaaagcaccaaaagggctgattgaacttgtcaatggcaatctatgaagcacggacacttcagtcccttgccgtgtccggtgtccgacacgcgtccgtgtcagtgtctgaccgacacgacacccgtactacgttctatatttgggacattacaggtgtccacgtgtccgtgtctgtgtcgtgtccggtgtccgtgtcggtgttggtgcttcatagatggcaatactgacttaggttgtgcttaaggtctatttgttcattgctgttactcttgatgaacactaattatgtgcctggtgcagctgaagatttcttcgacaagtctcttgccaagcagtattgtgatggtatcctcccgttcatgaggtactggagcaggcatccttcaacaccgaattgatgtttggttttgtaggtactgctggtctatcatatgtggaattcctgcataaaatagggaactatccattggcaaaagaggtttacataacgtgtacaaggtgctactgaagtaaaaaatgctggcagaccatacttaggagcgggtaacatgagcatggaagaattaattgtagggtccttgtgtgctttaggacagcttgaagtacttatggggtaggcttaataatcaattttgtttggttttccttagccataccacaaccttccttttttatg

SEQ ID NO: 9873 - DNA, 1061 bp, Glycine max
  Gm_smallRNAprecursor_2706
tgtaactaatttatcaagataatttataataataaaataattgataatttatagctaattatatatatatatatatatatatatatatatatatattaattatagaaagtactaaaagataattaaaatacagattatagaaactaaaaaatcattttcaaatcataaaaactaaaagagaattaaaatacaaactacaagaactaaaaaaaatcaattttaaactataggaattaaacaacgtaataagaagtaggcaaaagtacaaaaatataataaaagcaaaagaaagtaaataaaagtaggcaaagagtacaaaaatataatataaatcagtccattttattgaatcaggatgcatttttgcttggtgaaatcctgattttaaatcgaattttgaaaaccgtttagctttctgtatcctatttatcaacacatctttagaggggatagtatatccatctatgtgggtgttattgttaagccttttgtaattatagaccattctagtctttcctcctttttgttctgagtgtttattaacaataaaagcagggcttctatgaggactagtactaggtgatataacttttagatctaatagggtttttatgtggcttttacatttctgttgttcgaaattcccatactgaatatctttggttttaattatcagatctaggtttatgatttctaatttgcatataactggatctttttcccaatattttgtagggtcttctcctattatgctagttttattcaatccatctataatttgttgtatattatcaaaggttataattttgttaattttgacagatttgtaatcagattctgctacagctaactcatattgtagctctgtttctatttttatgctttctaaaatactttcatagtaagaatcatgggatgtgtcgtatgtttctatagtgtttatattgccatgatttttttattcttttattttacaactaccgggtgtatcacaaggacattgtttatcattggtgggagcatcaccacgctttgttcgtaactctgatgtgatttcatct

SEQ ID NO: 9874 - DNA, 1158 bp, Glycine max
  Gm_smallRNAprecursor_2707
gagtgtttattaacaataaaagcagggcttctatgaggactagtactaggtgatataacttttagatctaatagggtttttatgtggcttttacatttctgttgttcgaaattcccatactgaatatctttggttttaattatcagatctaggtttatgatttctaatttgcatataactggatctttttcccaatattttgtagggtcttctcctattatgctagttttattcaatccatctataatttgttgtatattatcaaaggttataattttgttaattttgacagatttgtaatcagattctgctacagctaactcatattgtagctctgtttctatttttatgctttctaaaatactttcatagtaagaatcatgggatgtgtcgtatgtttctatagtgtttatattgccatgatttttttattcttttattttacaactaccgggtgtatcacaaggacattgtttatcattggtgggagcatcaccacgctttgttcgtaactctgatgtgatttcatctattataggtgacatttgtgagttcgtagagattaataggtaatcttttgtaatagtaattgatctattattatgtataataaaatcaagtcctaaaatcattttttctttagcaggtcgtaagtctaccacatctgctttatttataaaaattttattaccaaaaatttcacaatttgtggataattgaatagtgaaatttcgtgtttctgtatcatttgttattatgtctccagacattgttctagttttggttattatattacttttgaaacaattgtgcttgggcacaacactttggcatatagaagtaaaagaacaaccagtatctaccaaggcttgcagaattatttcggtttggttaaatttatttattttaggaaaatttattttgactaaaatgtgtaggcttttgtttttctctttattacaaattataggaatgcaatctttgttttgtaatgccataagtccactagtatgttcttcataaaagtttggatttttttctttttcgaaattttcataaagaaaatctaccgtcttttctatttggtttaaactgatctctagagtggagatccgattattcataattttatttccagaatcattttctttctttgaa

SEQ ID NO: 9875 - DNA, 1050 bp, Glycine max
  Gm_smallRNAprecursor_2708
taaagttttttacactatactatttattagctctctctctctatacatttttttatttataatgagagataagataatcaaatcttaaacattggatttcacataagtggttagcattagaaattatttaaaggatatcttaaaagaagaatcactgataaatttctaatcttgatcttttatatatatatatatatatatatatatatatatatatatataattttatggttaaaattcacccgtatcactcttataaatatagagcatcttttacctgttaagcatgtagtggttcattattcataggaacacagtagaaactctggtttcatcgggtaaacgagctatccgataaattaaggaactccaatagctgtataatcaaatagaataaacactagagaataaactaaactcttgaagtaaaggaggatattgattttgttgaactgatgttctaatgctcttaattgatattggtcattacataaggaagtggtaatctacatcccaaggattacccccgatatataaacatattgtttctaaacctcaggatgcagattacctgatcctaaaccaatactgactcttccaagaaggtttgaaccaatgacagtacatagaagaatgttgggtggattgagttgagaggcctgttttgtttcagaaatttatagttgttcttaaagttatgaaactattctttctaaatttaatattgattacaaaaaatattaattgcagcagcctctaactaagaatcattttttgatcagtaaaagaatcatttacatatttttttttaatcaaaatatagatcttttccttgagcataactgttggattctgagatgaatattatatatatttttcaattgctgcctttaaatgttatctggtgtattattagaggctagttgaagtttcttttttaaattattcatagtaatttttattttattatcttttttatttttaaaaaacattgttgaaaagattggaaatattaatatatctaatttatgtatttaatgaaaattaact

SEQ ID NO: 9876 - DNA, 1043 bp, Glycine max
  Gm_smallRNAprecursor_2709
tatttaatgtttatatttttacagaattatttaatttttaaaatagaaaaaagaataataatcacaacctacatgtctttcttagtaataaattatgggaattttttttgtttttgtgtgtagacggaccaaaaataatatttttatcttatttatttcttttctcctttatttacacttaaataaataaataaaaatatgttagaatatctctatttatatgtgatgttctcaagagtcatttacacatgtcttcgtagcattgatttttgtagacaacatatttatttacatattatctatattgttgactttgtactatcaaagacattgttgccacactctaataattttgggggtatatacatgatagtataaaagcttgtttaaaacaagtcactcatttattaaaaatggtctgtcattgatgcaagcttatgactgaacttagaatgaaggggattaaggataagacttgatcctttgaggagttgaattgatccgacgttcaatattttatccactaaatattaatataatttatggcgtaaatacttgagttgagaatcaattatttgagagatgaagtagtcagacaatccaaataattaagagacattatttttctgtcatgagcatctttaatgttaaacattagtatatcttcgctattaaacatcattagaccaatagagttgcctaactttatttttatgagctctattatataacatctttaataaatttaacaacttttttcactttttaataatgtaactcttcatatctaacttaaaatagatctaataaattattgtagatgtttatatttttttaataaggaattattttaatattaaaaacaggttcttgcaaaagaagaatatgtgtagtctcttgtcatctaattaactctaatagtaaaagtgtataaaaattaattgttaagtttaataagttcttaattaagaaattttcattgacgtgcccttatatgttttaaatatctatttatttttgtatttatatcttctttttttctc

SEQ ID NO: 9877 - DNA, 1151 bp, Glycine max
  Gm_smallRNAprecursor_2710
ttgttagtaactattttcattttattcatattatgtaagtgttgtctcgaatggaagcacataagatttatttaaggaattctttcatatttgaggtatatatatatatatatatatatatatatatatatatatatatatatatatatatatatatatatatatatacggacagataggaagtaagaatgcaatatgataaatgaaaatgaaaatataaacttgtaaaacagatatcaagggcacaccggagaccaacttacaaatcccaggttttcataaacaaaaaaaccgaagcggcgacagagccgcacaggatcggtaaagagagagaagagggatgaaaaatagaaatttattgaaacttgaaagaagcacttacaaaagttttctttcagagcacctctcttctgaaacctgaaaaatggccaaatgaaagggtgcctcacaacatagttgaggactccttatatagctaaaaatctgagaccggtagttgccagtagttttgaccggaactatttgactgtttgttataagacaagtagttttgaccaggactttaatggctataggacaggtagtattgcccaaaattaattacacattaattacaaacagacggttttgtgaccgaaattaaatttaatctaaacagataccaaaacaatcatcctcgttttggtaaaaggggtcttcttcttcttcttcagcagaacttgtttcttccttctttgaggatgaaccttcatcttcctgctgtaacatttgcaagacttcctttagatttttagttaggatctcctttgatttcgatcctgctaaaaatgctgccagatgagacttttggtacaaaaacacggaagtttctggatcagctgctttgaggaattctggatgggattggaaccagagttttacttgttctggatctgctttggatgagtcaaattatgtccaccattttacaaatgcgtgtctttgtagtgatggatattggcttgtcttttcagtcttgctgtaacgatattgccatgagaagatccatgacagtgcaaagcttgagaagtacttaagatctactggaattcgtgattcctgcgaattgtattgtctctcaaattgagcaaatccttgttggactgtttctg

SEQ ID NO: 9878 - DNA, 1061 bp, Glycine max
  Gm_smallRNAprecursor_2711
tatatatatatatatatacggacagataggaagtaagaatgcaatatgataaatgaaaatgaaaatataaacttgtaaaacagatatcaagggcacaccggagaccaacttacaaatcccaggttttcataaacaaaaaaaccgaagcggcgacagagccgcacaggatcggtaaagagagagaagagggatgaaaaatagaaatttattgaaacttgaaagaagcacttacaaaagttttctttcagagcacctctcttctgaaacctgaaaaatggccaaatgaaagggtgcctcacaacatagttgaggactccttatatagctaaaaatctgagaccggtagttgccagtagttttgaccggaactatttgactgtttgttataagacaagtagttttgaccaggactttaatggctataggacaggtagtattgcccaaaattaattacacattaattacaaacagacggttttgtgaccgaaattaaatttaatctaaacagataccaaaacaatcatcctcgttttggtaaaaggggtcttcttcttcttcttcagcagaacttgtttcttccttctttgaggatgaaccttcatcttcctgctgtaacatttgcaagacttcctttagatttttagttaggatctcctttgatttcgatcctgctaaaaatgctgccagatgagacttttggtacaaaaacacggaagtttctggatcagctgctttgaggaattctggatgggattggaaccagagttttacttgttctggatctgctttggatgagtcaaattatgtccaccattttacaaatgcgtgtctttgtagtgatggatattggcttgtcttttcagtcttgctgtaacgatattgccatgagaagatccatgacagtgcaaagcttgagaagtacttaagatctactggaattcgtgattcctgcgaattgtattgtctctcaaattgagcaaatccttgttggactgtttctgggaatatctctggtattggtccaaagaagtcccaccattgtaaaatccaatttggaaaat

SEQ ID NO: 9879 - DNA, 1063 bp, Glycine max
  Gm_smallRNAprecursor_2712
tatatatatatatatatacggacagataggaagtaagaatgcaatatgataaatgaaaatgaaaatataaacttgtaaaacagatatcaagggcacaccggagaccaacttacaaatcccaggttttcataaacaaaaaaaccgaagcggcgacagagccgcacaggatcggtaaagagagagaagagggatgaaaaatagaaatttattgaaacttgaaagaagcacttacaaaagttttctttcagagcacctctcttctgaaacctgaaaaatggccaaatgaaagggtgcctcacaacatagttgaggactccttatatagctaaaaatctgagaccggtagttgccagtagttttgaccggaactatttgactgtttgttataagacaagtagttttgaccaggactttaatggctataggacaggtagtattgcccaaaattaattacacattaattacaaacagacggttttgtgaccgaaattaaatttaatctaaacagataccaaaacaatcatcctcgttttggtaaaaggggtcttcttcttcttcttcagcagaacttgtttcttccttctttgaggatgaaccttcatcttcctgctgtaacatttgcaagacttcctttagatttttagttaggatctcctttgatttcgatcctgctaaaaatgctgccagatgagacttttggtacaaaaacacggaagtttctggatcagctgctttgaggaattctggatgggattggaaccagagttttacttgttctggatctgctttggatgagtcaaattatgtccaccattttacaaatgcgtgtctttgtagtgatggatattggcttgtcttttcagtcttgctgtaacgatattgccatgagaagatccatgacagtgcaaagcttgagaagtacttaagatctactggaattcgtgattcctgcgaattgtattgtctctcaaattgagcaaatccttgttggactgtttctgggaatatctctggtattggtccaaagaagtcccaccattgtaaaatccaatttggaaaattg

SEQ ID NO: 9880 - DNA, 1063 bp, Glycine max; identical to SEQ ID NO: 9879
  Gm_smallRNAprecursor_2713

SEQ ID NO: 9881 - DNA, 1064 bp, Glycine max
  Gm_smallRNAprecursor_2714
tatatatatatatatatacggacagataggaagtaagaatgcaatatgataaatgaaaatgaaaatataaacttgtaaaacagatatcaagggcacaccggagaccaacttacaaatcccaggttttcataaacaaaaaaaccgaagcggcgacagagccgcacaggatcggtaaagagagagaagagggatgaaaaatagaaatttattgaaacttgaaagaagcacttacaaaagttttctttcagagcacctctcttctgaaacctgaaaaatggccaaatgaaagggtgcctcacaacatagttgaggactccttatatagctaaaaatctgagaccggtagttgccagtagttttgaccggaactatttgactgtttgttataagacaagtagttttgaccaggactttaatggctataggacaggtagtattgcccaaaattaattacacattaattacaaacagacggttttgtgaccgaaattaaatttaatctaaacagataccaaaacaatcatcctcgttttggtaaaaggggtcttcttcttcttcttcagcagaacttgtttcttccttctttgaggatgaaccttcatcttcctgctgtaacatttgcaagacttcctttagatttttagttaggatctcctttgatttcgatcctgctaaaaatgctgccagatgagacttttggtacaaaaacacggaagtttctggatcagctgctttgaggaattctggatgggattggaaccagagttttacttgttctggatctgctttggatgagtcaaattatgtccaccattttacaaatgcgtgtctttgtagtgatggatattggcttgtcttttcagtcttgctgtaacgatattgccatgagaagatccatgacagtgcaaagcttgagaagtacttaagatctactggaattcgtgattcctgcgaattgtattgtctctcaaattgagcaaatccttgttggactgtttctgggaatatctctggtattggtccaaagaagtcccaccattgtaaaatccaatttggaaaattgt

SEQ ID NO: 9882 - DNA, 1057 bp, Glycine max
  Gm_smallRNAprecursor_2715
atatatatatatatacggacagataggaagtaagaatgcaatatgataaatgaaaatgaaaatataaacttgtaaaacagatatcaagggcacaccggagaccaacttacaaatcccaggttttcataaacaaaaaaaccgaagcggcgacagagccgcacaggatcggtaaagagagagaagagggatgaaaaatagaaatttattgaaacttgaaagaagcacttacaaaagttttctttcagagcacctctcttctgaaacctgaaaaatggccaaatgaaagggtgcctcacaacatagttgaggactccttatatagctaaaaatctgagaccggtagttgccagtagttttgaccggaactatttgactgtttgttataagacaagtagttttgaccaggactttaatggctataggacaggtagtattgcccaaaattaattacacattaattacaaacagacggttttgtgaccgaaattaaatttaatctaaacagataccaaaacaatcatcctcgttttggtaaaaggggtcttcttcttcttcttcagcagaacttgtttcttccttctttgaggatgaaccttcatcttcctgctgtaacatttgcaagacttcctttagatttttagttaggatctcctttgatttcgatcctgctaaaaatgctgccagatgagacttttggtacaaaaacacggaagtttctggatcagctgctttgaggaattctggatgggattggaaccagagttttacttgttctggatctgctttggatgagtcaaattatgtccaccattttacaaatgcgtgtctttgtagtgatggatattggcttgtcttttcagtcttgctgtaacgatattgccatgagaagatccatgacagtgcaaagcttgagaagtacttaagatctactggaattcgtgattcctgcgaattgtattgtctctcaaattgagcaaatccttgttggactgtttctgggaatatctctggtattggtccaaagaagtcccaccattgtaaaatccaatttggaaaa

SEQ ID NO: 9883 - DNA, 1058 bp, Glycine max
  Gm_smallRNAprecursor_2716
atatatatatatatacggacagataggaagtaagaatgcaatatgataaatgaaaatgaaaatataaacttgtaaaacagatatcaagggcacaccggagaccaacttacaaatcccaggttttcataaacaaaaaaaccgaagcggcgacagagccgcacaggatcggtaaagagagagaagagggatgaaaaatagaaatttattgaaacttgaaagaagcacttacaaaagttttctttcagagcacctctcttctgaaacctgaaaaatggccaaatgaaagggtgcctcacaacatagttgaggactccttatatagctaaaaatctgagaccggtagttgccagtagttttgaccggaactatttgactgtttgttataagacaagtagttttgaccaggactttaatggctataggacaggtagtattgcccaaaattaattacacattaattacaaacagacggttttgtgaccgaaattaaatttaatctaaacagataccaaaacaatcatcctcgttttggtaaaaggggtcttcttcttcttcttcagcagaacttgtttcttccttctttgaggatgaaccttcatcttcctgctgtaacatttgcaagacttcctttagatttttagttaggatctcctttgatttcgatcctgctaaaaatgctgccagatgagacttttggtacaaaaacacggaagtttctggatcagctgctttgaggaattctggatgggattggaaccagagttttacttgttctggatctgctttggatgagtcaaattatgtccaccattttacaaatgcgtgtctttgtagtgatggatattggcttgtcttttcagtcttgctgtaacgatattgccatgagaagatccatgacagtgcaaagcttgagaagtacttaagatctactggaattcgtgattcctgcgaattgtattgtctctcaaattgagcaaatccttgttggactgtttctgggaatatctctggtattggtccaaagaagtcccaccattgtaaaatccaatttggaaaat

SEQ ID NO: 9884 - DNA, 1056 bp, Glycine max
  Gm_smallRNAprecursor_2717
tatatatatatatacggacagataggaagtaagaatgcaatatgataaatgaaaatgaaaatataaacttgtaaaacagatatcaagggcacaccggagaccaacttacaaatcccaggttttcataaacaaaaaaaccgaagcggcgacagagccgcacaggatcggtaaagagagagaagagggatgaaaaatagaaatttattgaaacttgaaagaagcacttacaaaagttttctttcagagcacctctcttctgaaacctgaaaaatggccaaatgaaagggtgcctcacaacatagttgaggactccttatatagctaaaaatctgagaccggtagttgccagtagttttgaccggaactatttgactgtttgttataagacaagtagttttgaccaggactttaatggctataggacaggtagtattgcccaaaattaattacacattaattacaaacagacggttttgtgaccgaaattaaatttaatctaaacagataccaaaacaatcatcctcgttttggtaaaaggggtcttcttcttcttcttcagcagaacttgtttcttccttctttgaggatgaaccttcatcttcctgctgtaacatttgcaagacttcctttagatttttagttaggatctcctttgatttcgatcctgctaaaaatgctgccagatgagacttttggtacaaaaacacggaagtttctggatcagctgctttgaggaattctggatgggattggaaccagagttttacttgttctggatctgctttggatgagtcaaattatgtccaccattttacaaatgcgtgtctttgtagtgatggatattggcttgtcttttcagtcttgctgtaacgatattgccatgagaagatccatgacagtgcaaagcttgagaagtacttaagatctactggaattcgtgattcctgcgaattgtattgtctctcaaattgagcaaatccttgttggactgtttctgggaatatctctggtattggtccaaagaagtcccaccattgtaaaatccaatttggaaaa

SEQ ID NO: 9885 - DNA, 1057 bp, Glycine max
  Gm_smallRNAprecursor_2718
tatatatatatatacggacagataggaagtaagaatgcaatatgataaatgaaaatgaaaatataaacttgtaaaacagatatcaagggcacaccggagaccaacttacaaatcccaggttttcataaacaaaaaaaccgaagcggcgacagagccgcacaggatcggtaaagagagagaagagggatgaaaaatagaaatttattgaaacttgaaagaagcacttacaaaagttttctttcagagcacctctcttctgaaacctgaaaaatggccaaatgaaagggtgcctcacaacatagttgaggactccttatatagctaaaaatctgagaccggtagttgccagtagttttgaccggaactatttgactgtttgttataagacaagtagttttgaccaggactttaatggctataggacaggtagtattgcccaaaattaattacacattaattacaaacagacggttttgtgaccgaaattaaatttaatctaaacagataccaaaacaatcatcctcgttttggtaaaaggggtcttcttcttcttcttcagcagaacttgtttcttccttctttgaggatgaaccttcatcttcctgctgtaacatttgcaagacttcctttagatttttagttaggatctcctttgatttcgatcctgctaaaaatgctgccagatgagacttttggtacaaaaacacggaagtttctggatcagctgctttgaggaattctggatgggattggaaccagagttttacttgttctggatctgctttggatgagtcaaattatgtccaccattttacaaatgcgtgtctttgtagtgatggatattggcttgtcttttcagtcttgctgtaacgatattgccatgagaagatccatgacagtgcaaagcttgagaagtacttaagatctactggaattcgtgattcctgcgaattgtattgtctctcaaattgagcaaatccttgttggactgtttctgggaatatctctggtattggtccaaagaagtcccaccattgtaaaatccaatttggaaaat

SEQ ID NO: 9886 - DNA, 1055 bp, Glycine max
  Gm_smallRNAprecursor_2719
aggatcggtaaagagagagaagagggatgaaaaatagaaatttattgaaacttgaaagaagcacttacaaaagttttctttcagagcacctctcttctgaaacctgaaaaatggccaaatgaaagggtgcctcacaacatagttgaggactccttatatagctaaaaatctgagaccggtagttgccagtagttttgaccggaactatttgactgtttgttataagacaagtagttttgaccaggactttaatggctataggacaggtagtattgcccaaaattaattacacattaattacaaacagacggttttgtgaccgaaattaaatttaatctaaacagataccaaaacaatcatcctcgttttggtaaaaggggtcttcttcttcttcttcagcagaacttgtttcttccttctttgaggatgaaccttcatcttcctgctgtaacatttgcaagacttcctttagatttttagttaggatctcctttgatttcgatcctgctaaaaatgctgccagatgagacttttggtacaaaaacacggaagtttctggatcagctgctttgaggaattctggatgggattggaaccagagttttacttgttctggatctgctttggatgagtcaaattatgtccaccattttacaaatgcgtgtctttgtagtgatggatattggcttgtcttttcagtcttgctgtaacgatattgccatgagaagatccatgacagtgcaaagcttgagaagtacttaagatctactggaattcgtgattcctgcgaattgtattgtctctcaaattgagcaaatccttgttggactgtttctgggaatatctctggtattggtccaaagaagtcccaccattgtaaaatccaatttggaaaattgtaaattgtattggtcttgaaatatatcagccatgaatgcttgaagcgggtattttggtgccaaaacaccttagtccaagcatcaacataatctcaataggtataacctaccggatcaaatggaactgaaaatctctttcctttgttcaagtccgaa

SEQ ID NO: 9887 - DNA, 1173 bp, Glycine max
  Gm_smallRNAprecursor_2720
aaagaagcacttacaaaagttttctttcagagcacctctcttctgaaacctgaaaaatggccaaatgaaagggtgcctcacaacatagttgaggactccttatatagctaaaaatctgagaccggtagttgccagtagttttgaccggaactatttgactgtttgttataagacaagtagttttgaccaggactttaatggctataggacaggtagtattgcccaaaattaattacacattaattacaaacagacggttttgtgaccgaaattaaatttaatctaaacagataccaaaacaatcatcctcgttttggtaaaaggggtcttcttcttcttcttcagcagaacttgtttcttccttctttgaggatgaaccttcatcttcctgctgtaacatttgcaagacttcctttagatttttagttaggatctcctttgatttcgatcctgctaaaaatgctgccagatgagacttttggtacaaaaacacggaagtttctggatcagctgctttgaggaattctggatgggattggaaccagagttttacttgttctggatctgctttggatgagtcaaattatgtccaccattttacaaatgcgtgtctttgtagtgatggatattggcttgtcttttcagtcttgctgtaacgatattgccatgagaagatccatgacagtgcaaagcttgagaagtacttaagatctactggaattcgtgattcctgcgaattgtattgtctctcaaattgagcaaatccttgttggactgtttctgggaatatctctggtattggtccaaagaagtcccaccattgtaaaatccaatttggaaaattgtaaattgtattggtcttgaaatatatcagccatgaatgcttgaagcgggtattttggtgccaaaacaccttagtccaagcatcaacataatctcaataggtataacctaccggatcaaatggaactgaaaatctctttcctttgttcaagtccgaaccaaagtgtcttggttgaataacttttagtatttggattgtggagtgggtgtttaatgtttggtcttttgggtctttgaaatgtttgatagatactaaatttgaatctaccaaaatcaattcataaaaagttcttgtcttcaggatgatcgttggtttgtagtgaaatcctg

SEQ ID NO: 9888 - DNA, 1078 bp, Glycine max
  Gm_smallRNAprecursor_2721
cttacaaaagttttctttcagagcacctctcttctgaaacctgaaaaatggccaaatgaaagggtgcctcacaacatagttgaggactccttatatagctaaaaatctgagaccggtagttgccagtagttttgaccggaactatttgactgtttgttataagacaagtagttttgaccaggactttaatggctataggacaggtagtattgcccaaaattaattacacattaattacaaacagacggttttgtgaccgaaattaaatttaatctaaacagataccaaaacaatcatcctcgttttggtaaaaggggtcttcttcttcttcttcagcagaacttgtttcttccttctttgaggatgaaccttcatcttcctgctgtaacatttgcaagacttcctttagatttttagttaggatctcctttgatttcgatcctgctaaaaatgctgccagatgagacttttggtacaaaaacacggaagtttctggatcagctgctttgaggaattctggatgggattggaaccagagttttacttgttctggatctgctttggatgagtcaaattatgtccaccattttacaaatgcgtgtctttgtagtgatggatattggcttgtcttttcagtcttgctgtaacgatattgccatgagaagatccatgacagtgcaaagcttgagaagtacttaagatctactggaattcgtgattcctgcgaattgtattgtctctcaaattgagcaaatccttgttggactgtttctgggaatatctctggtattggtccaaagaagtcccaccattgtaaaatccaatttggaaaattgtaaattgtattggtcttgaaatatatcagccatgaatgcttgaagcgggtattttggtgccaaaacaccttagtccaagcatcaacataatctcaataggtataacctaccggatcaaatggaactgaaaatctctttcctttgttcaagtccgaaccaaagtgtcttggttgaataacttttagtatttggattgtggagtgggtgtttaatgtttggtcttttgggtctttgaaatgttt

SEQ ID NO: 9889 - DNA, 1164 bp, Glycine max
  Gm_smallRNAprecursor_2722
cttacaaaagttttctttcagagcacctctcttctgaaacctgaaaaatggccaaatgaaagggtgcctcacaacatagttgaggactccttatatagctaaaaatctgagaccggtagttgccagtagttttgaccggaactatttgactgtttgttataagacaagtagttttgaccaggactttaatggctataggacaggtagtattgcccaaaattaattacacattaattacaaacagacggttttgtgaccgaaattaaatttaatctaaacagataccaaaacaatcatcctcgttttggtaaaaggggtcttcttcttcttcttcagcagaacttgtttcttccttctttgaggatgaaccttcatcttcctgctgtaacatttgcaagacttcctttagatttttagttaggatctcctttgatttcgatcctgctaaaaatgctgccagatgagacttttggtacaaaaacacggaagtttctggatcagctgctttgaggaattctggatgggattggaaccagagttttacttgttctggatctgctttggatgagtcaaattatgtccaccattttacaaatgcgtgtctttgtagtgatggatattggcttgtcttttcagtcttgctgtaacgatattgccatgagaagatccatgacagtgcaaagcttgagaagtacttaagatctactggaattcgtgattcctgcgaattgtattgtctctcaaattgagcaaatccttgttggactgtttctgggaatatctctggtattggtccaaagaagtcccaccattgtaaaatccaatttggaaaattgtaaattgtattggtcttgaaatatatcagccatgaatgcttgaagcgggtattttggtgccaaaacaccttagtccaagcatcaacataatctcaataggtataacctaccggatcaaatggaactgaaaatctctttcctttgttcaagtccgaaccaaagtgtcttggttgaataacttttagtatttggattgtggagtgggtgtttaatgtttggtcttttgggtctttgaaatgtttgatagatactaaatttgaatctaccaaaatcaattcataaaaagttcttgtcttcaggatgatcgttggtttgtagtgaaatcctg

SEQ ID NO: 9890 - DNA, 1077 bp, Glycine max
  Gm_smallRNAprecursor_2723
ttacaaaagttttctttcagagcacctctcttctgaaacctgaaaaatggccaaatgaaagggtgcctcacaacatagttgaggactccttatatagctaaaaatctgagaccggtagttgccagtagttttgaccggaactatttgactgtttgttataagacaagtagttttgaccaggactttaatggctataggacaggtagtattgcccaaaattaattacacattaattacaaacagacggttttgtgaccgaaattaaatttaatctaaacagataccaaaacaatcatcctcgttttggtaaaaggggtcttcttcttcttcttcagcagaacttgtttcttccttctttgaggatgaaccttcatcttcctgctgtaacatttgcaagacttcctttagatttttagttaggatctcctttgatttcgatcctgctaaaaatgctgccagatgagacttttggtacaaaaacacggaagtttctggatcagctgctttgaggaattctggatgggattggaaccagagttttacttgttctggatctgctttggatgagtcaaattatgtccaccattttacaaatgcgtgtctttgtagtgatggatattggcttgtcttttcagtcttgctgtaacgatattgccatgagaagatccatgacagtgcaaagcttgagaagtacttaagatctactggaattcgtgattcctgcgaattgtattgtctctcaaattgagcaaatccttgttggactgtttctgggaatatctctggtattggtccaaagaagtcccaccattgtaaaatccaatttggaaaattgtaaattgtattggtcttgaaatatatcagccatgaatgcttgaagcgggtattttggtgccaaaacaccttagtccaagcatcaacataatctcaataggtataacctaccggatcaaatggaactgaaaatctctttcctttgttcaagtccgaaccaaagtgtcttggttgaataacttttagtatttggattgtggagtgggtgtttaatgtttggtcttttgggtctttgaaatgttt

SEQ ID NO: 9891 - DNA, 1163 bp, Glycine max
  Gm_smallRNAprecursor_2724
ttacaaaagttttctttcagagcacctctcttctgaaacctgaaaaatggccaaatgaaagggtgcctcacaacatagttgaggactccttatatagctaaaaatctgagaccggtagttgccagtagttttgaccggaactatttgactgtttgttataagacaagtagttttgaccaggactttaatggctataggacaggtagtattgcccaaaattaattacacattaattacaaacagacggttttgtgaccgaaattaaatttaatctaaacagataccaaaacaatcatcctcgttttggtaaaaggggtcttcttcttcttcttcagcagaacttgtttcttccttctttgaggatgaaccttcatcttcctgctgtaacatttgcaagacttcctttagatttttagttaggatctcctttgatttcgatcctgctaaaaatgctgccagatgagacttttggtacaaaaacacggaagtttctggatcagctgctttgaggaattctggatgggattggaaccagagttttacttgttctggatctgctttggatgagtcaaattatgtccaccattttacaaatgcgtgtctttgtagtgatggatattggcttgtcttttcagtcttgctgtaacgatattgccatgagaagatccatgacagtgcaaagcttgagaagtacttaagatctactggaattcgtgattcctgcgaattgtattgtctctcaaattgagcaaatccttgttggactgtttctgggaatatctctggtattggtccaaagaagtcccaccattgtaaaatccaatttggaaaattgtaaattgtattggtcttgaaatatatcagccatgaatgcttgaagcgggtattttggtgccaaaacaccttagtccaagcatcaacataatctcaataggtataacctaccggatcaaatggaactgaaaatctctttcctttgttcaagtccgaaccaaagtgtcttggttgaataacttttagtatttggattgtggagtgggtgtttaatgtttggtcttttgggtctttgaaatgtttgatagatactaaatttgaatctaccaaaatcaattcataaaaagttcttgtcttcaggatgatcgttggtttgtagtgaaatcctg

SEQ ID NO: 9892 - DNA, 1130 bp, Glycine max
  Gm_smallRNAprecursor_2725
tgaaacctgaaaaatggccaaatgaaagggtgcctcacaacatagttgaggactccttatatagctaaaaatctgagaccggtagttgccagtagttttgaccggaactatttgactgtttgttataagacaagtagttttgaccaggactttaatggctataggacaggtagtattgcccaaaattaattacacattaattacaaacagacggttttgtgaccgaaattaaatttaatctaaacagataccaaaacaatcatcctcgttttggtaaaaggggtcttcttcttcttcttcagcagaacttgtttcttccttctttgaggatgaaccttcatcttcctgctgtaacatttgcaagacttcctttagatttttagttaggatctcctttgatttcgatcctgctaaaaatgctgccagatgagacttttggtacaaaaacacggaagtttctggatcagctgctttgaggaattctggatgggattggaaccagagttttacttgttctggatctgctttggatgagtcaaattatgtccaccattttacaaatgcgtgtctttgtagtgatggatattggcttgtcttttcagtcttgctgtaacgatattgccatgagaagatccatgacagtgcaaagcttgagaagtacttaagatctactggaattcgtgattcctgcgaattgtattgtctctcaaattgagcaaatccttgttggactgtttctgggaatatctctggtattggtccaaagaagtcccaccattgtaaaatccaatttggaaaattgtaaattgtattggtcttgaaatatatcagccatgaatgcttgaagcgggtattttggtgccaaaacaccttagtccaagcatcaacataatctcaataggtataacctaccggatcaaatggaactgaaaatctctttcctttgttcaagtccgaaccaaagtgtcttggttgaataacttttagtatttggattgtggagtgggtgtttaatgtttggtcttttgggtctttgaaatgtttgatagatactaaatttgaatctaccaaaatcaattcataaaaagttcttgtcttcaggatgatcgttggtttgtagtgaaatcctg

SEQ ID NO: 9893 - DNA, 1131 bp, Glycine max
  Gm_smallRNAprecursor_2726
acaagtagttttgaccaggactttaatggctataggacaggtagtattgcccaaaattaattacacattaattacaaacagacggttttgtgaccgaaattaaatttaatctaaacagataccaaaacaatcatcctcgttttggtaaaaggggtcttcttcttcttcttcagcagaacttgtttcttccttctttgaggatgaaccttcatcttcctgctgtaacatttgcaagacttcctttagatttttagttaggatctcctttgatttcgatcctgctaaaaatgctgccagatgagacttttggtacaaaaacacggaagtttctggatcagctgctttgaggaattctggatgggattggaaccagagttttacttgttctggatctgctttggatgagtcaaattatgtccaccattttacaaatgcgtgtctttgtagtgatggatattggcttgtcttttcagtcttgctgtaacgatattgccatgagaagatccatgacagtgcaaagcttgagaagtacttaagatctactggaattcgtgattcctgcgaattgtattgtctctcaaattgagcaaatccttgttggactgtttctgggaatatctctggtattggtccaaagaagtcccaccattgtaaaatccaatttggaaaattgtaaattgtattggtcttgaaatatatcagccatgaatgcttgaagcgggtattttggtgccaaaacaccttagtccaagcatcaacataatctcaataggtataacctaccggatcaaatggaactgaaaatctctttcctttgttcaagtccgaaccaaagtgtcttggttgaataacttttagtatttggattgtggagtgggtgtttaatgtttggtcttttgggtctttgaaatgtttgatagatactaaatttgaatctaccaaaatcaattcataaaaagttcttgtcttcaggatgatcgttggtttgtagtgaaatcctgatgggaaagccttggccgacgccttgaagggatttttgtcccaaaatccaggttccatctgcaaaacagttaaaaatttatttttataaatatagtttttagtttgtttggcaggtggtgtttgtgcttt

SEQ ID NO: 9894 - DNA, 1100 bp, Glycine max
  Gm_smallRNAprecursor_2727
gcagaacttgtttcttccttctttgaggatgaaccttcatcttcctgctgtaacatttgcaagacttcctttagatttttagttaggatctcctttgatttcgatcctgctaaaaatgctgccagatgagacttttggtacaaaaacacggaagtttctggatcagctgctttgaggaattctggatgggattggaaccagagttttacttgttctggatctgctttggatgagtcaaattatgtccaccattttacaaatgcgtgtctttgtagtgatggatattggcttgtcttttcagtcttgctgtaacgatattgccatgagaagatccatgacagtgcaaagcttgagaagtacttaagatctactggaattcgtgattcctgcgaattgtattgtctctcaaattgagcaaatccttgttggactgtttctgggaatatctctggtattggtccaaagaagtcccaccattgtaaaatccaatttggaaaattgtaaattgtattggtcttgaaatatatcagccatgaatgcttgaagcgggtattttggtgccaaaacaccttagtccaagcatcaacataatctcaataggtataacctaccggatcaaatggaactgaaaatctctttcctttgttcaagtccgaaccaaagtgtcttggttgaataacttttagtatttggattgtggagtgggtgtttaatgtttggtcttttgggtctttgaaatgtttgatagatactaaatttgaatctaccaaaatcaattcataaaaagttcttgtcttcaggatgatcgttggtttgtagtgaaatcctgatgggaaagccttggccgacgccttgaagggatttttgtcccaaaatccaggttccatctgcaaaacagttaaaaatttatttttataaatatagtttttagtttgtttggcaggtggtgtttgtgctttggctaaaggtagtttccctttaggattggtagctgttttggtcattgatgcattttggatcattgtttgtaaatttgattcagaatcatcatcagattctgaggcaatgtctgcccaagattttttgattatttttggaaa

SEQ ID NO: 9895 - DNA, 1098 bp, Glycine max
  Gm_smallRNAprecursor_2728
agaacttgtttcttccttctttgaggatgaaccttcatcttcctgctgtaacatttgcaagacttcctttagatttttagttaggatctcctttgatttcgatcctgctaaaaatgctgccagatgagacttttggtacaaaaacacggaagtttctggatcagctgctttgaggaattctggatgggattggaaccagagttttacttgttctggatctgctttggatgagtcaaattatgtccaccattttacaaatgcgtgtctttgtagtgatggatattggcttgtcttttcagtcttgctgtaacgatattgccatgagaagatccatgacagtgcaaagcttgagaagtacttaagatctactggaattcgtgattcctgcgaattgtattgtctctcaaattgagcaaatccttgttggactgtttctgggaatatctctggtattggtccaaagaagtcccaccattgtaaaatccaatttggaaaattgtaaattgtattggtcttgaaatatatcagccatgaatgcttgaagcgggtattttggtgccaaaacaccttagtccaagcatcaacataatctcaataggtataacctaccggatcaaatggaactgaaaatctctttcctttgttcaagtccgaaccaaagtgtcttggttgaataacttttagtatttggattgtggagtgggtgtttaatgtttggtcttttgggtctttgaaatgtttgatagatactaaatttgaatctaccaaaatcaattcataaaaagttcttgtcttcaggatgatcgttggtttgtagtgaaatcctgatgggaaagccttggccgacgccttgaagggatttttgtcccaaaatccaggttccatctgcaaaacagttaaaaatttatttttataaatatagtttttagtttgtttggcaggtggtgtttgtgctttggctaaaggtagtttccctttaggattggtagctgttttggtcattgatgcattttggatcattgtttgtaaatttgattcagaatcatcatcagattctgaggcaatgtctgcccaagattttttgattatttttggaaa

SEQ ID NO: 9896 - DNA, 1135 bp, Glycine max
  Gm_smallRNAprecursor_2729
ctttttagattgtttatctctgtttggagatcttggattgtcgttggtttggttgaagaattttctaatcttttgagtatgttacttacatcaaatgtattattcgtaataaaatccttttgtctaggttttacttctaatgtctttttgagcttttccaggaaaaccttgttttcctgggggtcaggtatggaattgattgcttcaaacaagagatcttgttctctagttagagtattgatctgcccatcatcatcatctgttggtgatagttggtcatcttgttggattaggtttaggttttcatcaaaaattacggaggatgaatttctgtttcttcttcctctgaggtttcgataagcaaattgtttatttgctcttcaatttctggttctaaattaaggtttatgaaattctttcttaatctacaatatttaataatgtggccttgtttttcacaattgtaacatgttattttttattttattttttgtttaggatattccatttctttactggttgagagtttgtgtgagtatctccttcttgtaaatctctttttattgaccggtttattctcgtggatttcttttttagaggattgtttcttcttttgttttggacaggtcagtagaccaaattgttcacagaaggaacctaaatctttctttgtttgagccttttcttgggctaattgcctctgaattttgtcatcctgacaaatctttgaggctaccttttggacataagaaatcaattgaccatagcttaaacttcatatggaatatctccattggcagattgactacggattttatctctaaccttgtcccctaatgatctgggaagaccggctagaaatttttctttccaaaaaggttgttgactatcttctctggtgtaaaccctacttaggaaagtatctctgtaccacctaaagtctgctaaggttctacacttaagatttgataataattctgcagacctatctttccacaaggatgggtctccaatgaaatgttgggctattgtaaaaattaatgtgttaacagcgtcgtcagaaatctctttatcatcgtcattagtaatgacttttccattgagatctgttttgactgcgctgtaaatttttgat

SEQ ID NO: 9897 - DNA, 1048 bp, Glycine max
  Gm_smallRNAprecursor_2730
acctttttggaaagaaaaatttctagccggtcttcccagatcattaggggacaaggttagagataaaatccgtagtcaatatgccaatggagatattccatatgaaagtttaagctatggtcaattgatttcttatgtccaaaaggtagccttaaagatttgtcaggatgacaaaattcagaggcaattagccaaagaaaaggctcaatcaaaggaagatttaggttccttctgtgaacaatttggtctaccggcttgtccaaaacaaaataagaaacaatcctctagaaaagaaatcaatgagaataaaccggtcaataaaaagagatttccaagaaggagatactcacacaaaccctcaaccagtaaagaaatggaatattcgaaacaaaaaaataaaataaaaaataacatgttacaattgtggaaaacaaggccacattagtaaatattgtagattaaaaaagaagtgaagaaacctcaatagagtttgctagcaaatttcccaaccaaatcttagacaaaacccagttacaaagatttctaggttgtctaaattatgtaggagaatttgtcccctatttaaacaatattgtcaagccattacatgataggctgaagaaaaatctgcctctttggtctgacctccatacacaaacagttaaagaaattaaactcaaagtccaatccattaaatgtttgtatcttcctattccacaggcatttaaaattgtcgaaactgatacatcagacataggttatggtggcatcctcaaacaaagagtccatggccaagatcatgccattgcatatacatcaaaacattggaatcctgcacaattaaaatattcaacttttaaaagggaagttttagcaattgttttgtgcatttccaagtttcaatcggatttattaaaccaaaaatttctaatcagggttgattgtaaatcaaccaaagatattttactaaaagatgttaaaaaccttgcctgaaaacaaatttttgcaagatggcaagcaattctaactgtcattgattttgacatag

SEQ ID NO: 9898 - DNA, 1048 bp, Glycine max; identical to SEQ ID NO: 9897
  Gm_smallRNAprecursor_2731

SEQ ID NO: 9899 - DNA, 1049 bp, Glycine max
  Gm_smallRNAprecursor_2732
acctttttggaaagaaaaatttctagccggtcttcccagatcattaggggacaaggttagagataaaatccgtagtcaatatgccaatggagatattccatatgaaagtttaagctatggtcaattgatttcttatgtccaaaaggtagccttaaagatttgtcaggatgacaaaattcagaggcaattagccaaagaaaaggctcaatcaaaggaagatttaggttccttctgtgaacaatttggtctaccggcttgtccaaaacaaaataagaaacaatcctctagaaaagaaatcaatgagaataaaccggtcaataaaaagagatttccaagaaggagatactcacacaaaccctcaaccagtaaagaaatggaatattcgaaacaaaaaaataaaataaaaaataacatgttacaattgtggaaaacaaggccacattagtaaatattgtagattaaaaaagaagtgaagaaacctcaatagagtttgctagcaaatttcccaaccaaatcttagacaaaacccagttacaaagatttctaggttgtctaaattatgtaggagaatttgtcccctatttaaacaatattgtcaagccattacatgataggctgaagaaaaatctgcctctttggtctgacctccatacacaaacagttaaagaaattaaactcaaagtccaatccattaaatgtttgtatcttcctattccacaggcatttaaaattgtcgaaactgatacatcagacataggttatggtggcatcctcaaacaaagagtccatggccaagatcatgccattgcatatacatcaaaacattggaatcctgcacaattaaaatattcaacttttaaaagggaagttttagcaattgttttgtgcatttccaagtttcaatcggatttattaaaccaaaaatttctaatcagggttgattgtaaatcaaccaaagatattttactaaaagatgttaaaaaccttgcctgaaaacaaatttttgcaagatggcaagcaattctaactgtcattgattttgacataga

SEQ ID NO: 9900 - DNA, 1049 bp, Glycine max; identical to SEQ ID NO: 9899
  Gm_smallRNAprecursor_2733

SEQ ID NO: 9901 - DNA, 1050 bp, Glycine max
  Gm_smallRNAprecursor_2734
acctttttggaaagaaaaatttctagccggtcttcccagatcattaggggacaaggttagagataaaatccgtagtcaatatgccaatggagatattccatatgaaagtttaagctatggtcaattgatttcttatgtccaaaaggtagccttaaagatttgtcaggatgacaaaattcagaggcaattagccaaagaaaaggctcaatcaaaggaagatttaggttccttctgtgaacaatttggtctaccggcttgtccaaaacaaaataagaaacaatcctctagaaaagaaatcaatgagaataaaccggtcaataaaaagagatttccaagaaggagatactcacacaaaccctcaaccagtaaagaaatggaatattcgaaacaaaaaaataaaataaaaaataacatgttacaattgtggaaaacaaggccacattagtaaatattgtagattaaaaaagaagtgaagaaacctcaatagagtttgctagcaaatttcccaaccaaatcttagacaaaacccagttacaaagatttctaggttgtctaaattatgtaggagaatttgtcccctatttaaacaatattgtcaagccattacatgataggctgaagaaaaatctgcctctttggtctgacctccatacacaaacagttaaagaaattaaactcaaagtccaatccattaaatgtttgtatcttcctattccacaggcatttaaaattgtcgaaactgatacatcagacataggttatggtggcatcctcaaacaaagagtccatggccaagatcatgccattgcatatacatcaaaacattggaatcctgcacaattaaaatattcaacttttaaaagggaagttttagcaattgttttgtgcatttccaagtttcaatcggatttattaaaccaaaaatttctaatcagggttgattgtaaatcaaccaaagatattttactaaaagatgttaaaaaccttgcctgaaaacaaatttttgcaagatggcaagcaattctaactgtcattgattttgacatagaa

SEQ ID NO: 9902 - DNA, 1092 bp, Glycine max
  Gm_smallRNAprecursor_2735
acctttttggaaagaaaaatttctagccggtcttcccagatcattaggggacaaggttagagataaaatccgtagtcaatatgccaatggagatattccatatgaaagtttaagctatggtcaattgatttcttatgtccaaaaggtagccttaaagatttgtcaggatgacaaaattcagaggcaattagccaaagaaaaggctcaatcaaaggaagatttaggttccttctgtgaacaatttggtctaccggcttgtccaaaacaaaataagaaacaatcctctagaaaagaaatcaatgagaataaaccggtcaataaaaagagatttccaagaaggagatactcacacaaaccctcaaccagtaaagaaatggaatattcgaaacaaaaaaataaaataaaaaataacatgttacaattgtggaaaacaaggccacattagtaaatattgtagattaaaaaagaagtgaagaaacctcaatagagtttgctagcaaatttcccaaccaaatcttagacaaaacccagttacaaagatttctaggttgtctaaattatgtaggagaatttgtcccctatttaaacaatattgtcaagccattacatgataggctgaagaaaaatctgcctctttggtctgacctccatacacaaacagttaaagaaattaaactcaaagtccaatccattaaatgtttgtatcttcctattccacaggcatttaaaattgtcgaaactgatacatcagacataggttatggtggcatcctcaaacaaagagtccatggccaagatcatgccattgcatatacatcaaaacattggaatcctgcacaattaaaatattcaacttttaaaagggaagttttagcaattgttttgtgcatttccaagtttcaatcggatttattaaaccaaaaatttctaatcagggttgattgtaaatcaaccaaagatattttactaaaagatgttaaaaaccttgcctgaaaacaaatttttgcaagatggcaagcaattctaactgtcattgattttgacatagaatatatcaagggcacctcaaactcgttacttgactaccttacc

SEQ ID NO: 9903 - DNA, 1047 bp, Glycine max
  Gm_smallRNAprecursor_2736
cctttttggaaagaaaaatttctagccggtcttcccagatcattaggggacaaggttagagataaaatccgtagtcaatatgccaatggagatattccatatgaaagtttaagctatggtcaattgatttcttatgtccaaaaggtagccttaaagatttgtcaggatgacaaaattcagaggcaattagccaaagaaaaggctcaatcaaaggaagatttaggttccttctgtgaacaatttggtctaccggcttgtccaaaacaaaataagaaacaatcctctagaaaagaaatcaatgagaataaaccggtcaataaaaagagatttccaagaaggagatactcacacaaaccctcaaccagtaaagaaatggaatattcgaaacaaaaaaataaaataaaaaataacatgttacaattgtggaaaacaaggccacattagtaaatattgtagattaaaaaagaagtgaagaaacctcaatagagtttgctagcaaatttcccaaccaaatcttagacaaaacccagttacaaagatttctaggttgtctaaattatgtaggagaatttgtcccctatttaaacaatattgtcaagccattacatgataggctgaagaaaaatctgcctctttggtctgacctccatacacaaacagttaaagaaattaaactcaaagtccaatccattaaatgtttgtatcttcctattccacaggcatttaaaattgtcgaaactgatacatcagacataggttatggtggcatcctcaaacaaagagtccatggccaagatcatgccattgcatatacatcaaaacattggaatcctgcacaattaaaatattcaacttttaaaagggaagttttagcaattgttttgtgcatttccaagtttcaatcggatttattaaaccaaaaatttctaatcagggttgattgtaaatcaaccaaagatattttactaaaagatgttaaaaaccttgcctgaaaacaaatttttgcaagatggcaagcaattctaactgtcattgattttgacatag

SEQ ID NO: 9904 - DNA, 1091 bp, Glycine max
  Gm_smallRNAprecursor_2737
cctttttggaaagaaaaatttctagccggtcttcccagatcattaggggacaaggttagagataaaatccgtagtcaatatgccaatggagatattccatatgaaagtttaagctatggtcaattgatttcttatgtccaaaaggtagccttaaagatttgtcaggatgacaaaattcagaggcaattagccaaagaaaaggctcaatcaaaggaagatttaggttccttctgtgaacaatttggtctaccggcttgtccaaaacaaaataagaaacaatcctctagaaaagaaatcaatgagaataaaccggtcaataaaaagagatttccaagaaggagatactcacacaaaccctcaaccagtaaagaaatggaatattcgaaacaaaaaaataaaataaaaaataacatgttacaattgtggaaaacaaggccacattagtaaatattgtagattaaaaaagaagtgaagaaacctcaatagagtttgctagcaaatttcccaaccaaatcttagacaaaacccagttacaaagatttctaggttgtctaaattatgtaggagaatttgtcccctatttaaacaatattgtcaagccattacatgataggctgaagaaaaatctgcctctttggtctgacctccatacacaaacagttaaagaaattaaactcaaagtccaatccattaaatgtttgtatcttcctattccacaggcatttaaaattgtcgaaactgatacatcagacataggttatggtggcatcctcaaacaaagagtccatggccaagatcatgccattgcatatacatcaaaacattggaatcctgcacaattaaaatattcaacttttaaaagggaagttttagcaattgttttgtgcatttccaagtttcaatcggatttattaaaccaaaaatttctaatcagggttgattgtaaatcaaccaaagatattttactaaaagatgttaaaaaccttgcctgaaaacaaatttttgcaagatggcaagcaattctaactgtcattgattttgacatagaatatatcaagggcacctcaaactcgttacttgactaccttacc

SEQ ID NO: 9905 - DNA, 1073 bp, Glycine max
  Gm_smallRNAprecursor_2738
ttcagaggcaattagccaaagaaaaggctcaatcaaaggaagatttaggttccttctgtgaacaatttggtctaccggcttgtccaaaacaaaataagaaacaatcctctagaaaagaaatcaatgagaataaaccggtcaataaaaagagatttccaagaaggagatactcacacaaaccctcaaccagtaaagaaatggaatattcgaaacaaaaaaataaaataaaaaataacatgttacaattgtggaaaacaaggccacattagtaaatattgtagattaaaaaagaagtgaagaaacctcaatagagtttgctagcaaatttcccaaccaaatcttagacaaaacccagttacaaagatttctaggttgtctaaattatgtaggagaatttgtcccctatttaaacaatattgtcaagccattacatgataggctgaagaaaaatctgcctctttggtctgacctccatacacaaacagttaaagaaattaaactcaaagtccaatccattaaatgtttgtatcttcctattccacaggcatttaaaattgtcgaaactgatacatcagacataggttatggtggcatcctcaaacaaagagtccatggccaagatcatgccattgcatatacatcaaaacattggaatcctgcacaattaaaatattcaacttttaaaagggaagttttagcaattgttttgtgcatttccaagtttcaatcggatttattaaaccaaaaatttctaatcagggttgattgtaaatcaaccaaagatattttactaaaagatgttaaaaaccttgcctgaaaacaaatttttgcaagatggcaagcaattctaactgtcattgattttgacatagaatatatcaagggcacctcaaactcgttacttgactaccttacccgtgaattcttacagaaaagtggtaatgcctcctaaggcatcaggaatctccctaaggggaggacgaagcacaggctaaggacccagattggctcttccatagccaaccactaagaaatcatcaacctcttctgggtcaccaacccaggctgggtca

SEQ ID NO: 9906 - DNA, 1160 bp, Glycine max
  Gm_smallRNAprecursor_2739
ttcagaggcaattagccaaagaaaaggctcaatcaaaggaagatttaggttccttctgtgaacaatttggtctaccggcttgtccaaaacaaaataagaaacaatcctctagaaaagaaatcaatgagaataaaccggtcaataaaaagagatttccaagaaggagatactcacacaaaccctcaaccagtaaagaaatggaatattcgaaacaaaaaaataaaataaaaaataacatgttacaattgtggaaaacaaggccacattagtaaatattgtagattaaaaaagaagtgaagaaacctcaatagagtttgctagcaaatttcccaaccaaatcttagacaaaacccagttacaaagatttctaggttgtctaaattatgtaggagaatttgtcccctatttaaacaatattgtcaagccattacatgataggctgaagaaaaatctgcctctttggtctgacctccatacacaaacagttaaagaaattaaactcaaagtccaatccattaaatgtttgtatcttcctattccacaggcatttaaaattgtcgaaactgatacatcagacataggttatggtggcatcctcaaacaaagagtccatggccaagatcatgccattgcatatacatcaaaacattggaatcctgcacaattaaaatattcaacttttaaaagggaagttttagcaattgttttgtgcatttccaagtttcaatcggatttattaaaccaaaaatttctaatcagggttgattgtaaatcaaccaaagatattttactaaaagatgttaaaaaccttgcctgaaaacaaatttttgcaagatggcaagcaattctaactgtcattgattttgacatagaatatatcaagggcacctcaaactcgttacttgactaccttacccgtgaattcttacagaaaagtggtaatgcctcctaaggcatcaggaatctccctaaggggaggacgaagcacaggctaaggacccagattggctcttccatagccaaccactaagaaatcatcaacctcttctgggtcaccaacccaggctgggtcatccacccagaaaaccaatttagaagggtcatcaacccagattacctcaatcaaacctgagccatccactcaggaatctcccaaacca

SEQ ID NO: 9907 - DNA, 1222 bp, Glycine max
  Gm_smallRNAprecursor_2740
ccaaaacaaaataagaaacaatcctctagaaaagaaatcaatgagaataaaccggtcaataaaaagagatttccaagaaggagatactcacacaaaccctcaaccagtaaagaaatggaatattcgaaacaaaaaaataaaataaaaaataacatgttacaattgtggaaaacaaggccacattagtaaatattgtagattaaaaaagaagtgaagaaacctcaatagagtttgctagcaaatttcccaaccaaatcttagacaaaacccagttacaaagatttctaggttgtctaaattatgtaggagaatttgtcccctatttaaacaatattgtcaagccattacatgataggctgaagaaaaatctgcctctttggtctgacctccatacacaaacagttaaagaaattaaactcaaagtccaatccattaaatgtttgtatcttcctattccacaggcatttaaaattgtcgaaactgatacatcagacataggttatggtggcatcctcaaacaaagagtccatggccaagatcatgccattgcatatacatcaaaacattggaatcctgcacaattaaaatattcaacttttaaaagggaagttttagcaattgttttgtgcatttccaagtttcaatcggatttattaaaccaaaaatttctaatcagggttgattgtaaatcaaccaaagatattttactaaaagatgttaaaaaccttgcctgaaaacaaatttttgcaagatggcaagcaattctaactgtcattgattttgacatagaatatatcaagggcacctcaaactcgttacttgactaccttacccgtgaattcttacagaaaagtggtaatgcctcctaaggcatcaggaatctccctaaggggaggacgaagcacaggctaaggacccagattggctcttccatagccaaccactaagaaatcatcaacctcttctgggtcaccaacccaggctgggtcatccacccagaaaaccaatttagaagggtcatcaacccagattacctcaatcaaacctgagccatccactcaggaatctcccaaaccagcaaccgccaaacaaacattgggcgactatgcatggccaattgaaacccttcaggcccttcaagacatgggtctaacaaaatttccaaaaataatcaaaaaatcttgggcagacattgcctcataatctgatgatgattctgaat

SEQ ID NO: 9908 - DNA, 1115 bp, Glycine max
  Gm_smallRNAprecursor_2741
tcaatagagtttgctagcaaatttcccaaccaaatcttagacaaaacccagttacaaagatttctaggttgtctaaattatgtaggagaatttgtcccctatttaaacaatattgtcaagccattacatgataggctgaagaaaaatctgcctctttggtctgacctccatacacaaacagttaaagaaattaaactcaaagtccaatccattaaatgtttgtatcttcctattccacaggcatttaaaattgtcgaaactgatacatcagacataggttatggtggcatcctcaaacaaagagtccatggccaagatcatgccattgcatatacatcaaaacattggaatcctgcacaattaaaatattcaacttttaaaagggaagttttagcaattgttttgtgcatttccaagtttcaatcggatttattaaaccaaaaatttctaatcagggttgattgtaaatcaaccaaagatattttactaaaagatgttaaaaaccttgcctgaaaacaaatttttgcaagatggcaagcaattctaactgtcattgattttgacatagaatatatcaagggcacctcaaactcgttacttgactaccttacccgtgaattcttacagaaaagtggtaatgcctcctaaggcatcaggaatctccctaaggggaggacgaagcacaggctaaggacccagattggctcttccatagccaaccactaagaaatcatcaacctcttctgggtcaccaacccaggctgggtcatccacccagaaaaccaatttagaagggtcatcaacccagattacctcaatcaaacctgagccatccactcaggaatctcccaaaccagcaaccgccaaacaaacattgggcgactatgcatggccaattgaaacccttcaggcccttcaagacatgggtctaacaaaatttccaaaaataatcaaaaaatcttgggcagacattgcctcataatctgatgatgattctgaatcaaatttacaaacaatgatccaaaatgcatcaatgaccaaaacaactaccaatcctaaagggaaactacctttagccaaagcacaaacaccacctaccaatcaaactaacaact

SEQ ID NO: 9909 - DNA, 1080 bp, Glycine max
  Gm_smallRNAprecursor_2742
aactatatttacaaaaataattttttaactgttttgcatatggaacctgaattttgggacaaaaatcccttcaaggcgacgaccaaggctttcccatcaggatttcactacaaaccaacgaccatcctgaagacaagaactttttatgaattgattttggtagattcaaattcagtatctatcaaatatttcaaagacccaaaaaaccaaacatttaacacccactccacaatccaaatactaaaagttcttcaaccaagacactttggtttggacttgaacaaaggaaagaggttttcagttccatttgatccggtaggttatacctattgggattatgttgatgcttggactaaggtgttttggcaccaaaatactcgcttcaagcattcatggctgatgtatttcaagaccaatacaatttacaattttccaaattggtttttacaatggtgggacttctttggaccaattccaaagatattcccagaaataatccaacaaggatttgctcaatttgagagacaatacaattcgcaggaatcacgaattcctgtagatcttaagtacttctcaagctttgcactgtcatggatcttctcatggcaatatcgttacagcaagactgaaaagacaagccaatatccatcactacaaagacacacatttgtaaaatggtggacacaatttgactcatccaaagcagatccagaacaagtgaaactctggttccaatcccatccagaattcctcaaagcagctgatccaaaaacttctttgtttttgaaccaaaagtctcatttggcagcatttttagcaggaacaaaatcaaaggagatcctaactaaaaatctaaaggaagtattgcaaatgttacagcaggaagaagaaggttcatcctcaaagaaggaagaaacaagttctgctgaagaagaagaagaagaccccttttaccaaaacgaggatgattgttttggtatctgtttagattaaatttaatttcggtcacaaaaccgtctttttgtaattaatgtgtaattaattttggacaatactacttgtcctgtagccattaaagtc

SEQ ID NO: 9910 - DNA, 1189 bp, Glycine max
  Gm_smallRNAprecursor_2743
cacaatccaaatactaaaagttcttcaaccaagacactttggtttggacttgaacaaaggaaagaggttttcagttccatttgatccggtaggttatacctattgggattatgttgatgcttggactaaggtgttttggcaccaaaatactcgcttcaagcattcatggctgatgtatttcaagaccaatacaatttacaattttccaaattggtttttacaatggtgggacttctttggaccaattccaaagatattcccagaaataatccaacaaggatttgctcaatttgagagacaatacaattcgcaggaatcacgaattcctgtagatcttaagtacttctcaagctttgcactgtcatggatcttctcatggcaatatcgttacagcaagactgaaaagacaagccaatatccatcactacaaagacacacatttgtaaaatggtggacacaatttgactcatccaaagcagatccagaacaagtgaaactctggttccaatcccatccagaattcctcaaagcagctgatccaaaaacttctttgtttttgaaccaaaagtctcatttggcagcatttttagcaggaacaaaatcaaaggagatcctaactaaaaatctaaaggaagtattgcaaatgttacagcaggaagaagaaggttcatcctcaaagaaggaagaaacaagttctgctgaagaagaagaagaagaccccttttaccaaaacgaggatgattgttttggtatctgtttagattaaatttaatttcggtcacaaaaccgtctttttgtaattaatgtgtaattaattttggacaatactacttgtcctgtagccattaaagtcccggtcaaaactacttgtcttgtaacaaacagttaaatagttccggtcaaaactaccgagaactactggtctcagatttttggctatataaggagtcctcaactatgttgtgaggcaccctttcatttggccattttttaggtttctgaagggaggtgctctgaaagaaaacttttgtaagcgcttctttcaagtttcaataaatttctatttttcatccctcttctctctctttaccgatcctgtgcggctctgtcgccgcttcggtttctttgtttatgaaaacctgagatttgtaagccggtctccggtgtgcccttgatatctgtttttcaa

SEQ ID NO: 9911 - DNA, 1159 bp, Glycine max
  Gm_smallRNAprecursor_2744
tcccatttttcggggagagttacatcatcctgttttattattctttttaaagaaacattggcttttgttatatcagtgataaataaggtcgtttctcccttttgtggttgcaataggactctagatgcacaagtattcatgaccttgtactggatcctatagatcaaagctgctgggattgatccttctttcatgtcaaggccatgaaagttgatatttaagaacagagagtcaagaatattcttgtccattaaactcactgtcttattcggataacaattgaaatatactggagcttgtcctaaactggtttcgactgttccaattaaggagtcctcaaatttattatgcctaatatctcttagacacattaaaactgttgcatctatgcccatgtcaattaagggcttgatggctacttgtacataaccgatgtgtagatatttatacttacgactatgttcataaattgaattttttgaaagtaaatgaaattcttcccctatatcttgtcctagaggaatattgttttctactattttgattatgtaatcaaagttgtgtttgtccttaattgtttcaggaacatatagttgatcctgagggatttctggaatgttccagtcatccatgttttgattgatatcttcgaatcggacttcctcatcgaagagattgtgtttgggggcaacctcgtggttctggttatcttgatcacttaataaattggaatttcttgaagaagatgatgaggaagaatttgatcgaaaagagatttgggaaaaagagcgcaatagtctagacatgattataacattctctaatatctttgccttcatttggttccatagaaatatttccataaggtcatatgttactgaactccttggatctgagatttttttttttacagataacttagtttgaactctactcctatagccaccagtatattatgtctcaatattttatttgaataatacaccttagccttactgccctttctcatccacgggacttactgctacagtatcattcaactaaaatatcagactgctgtgctttcagaaaatattgttcaaacatatactgtttaaattaaaattactgtacatagtttagatccgtgaggccggtaaacatatgcccttacggacac

SEQ ID NO: 9912 - DNA, 1077 bp, Glycine max
  Gm_smallRNAprecursor_2745
ttagggaataaaaaatctactcattaaactccaaggactaaaacatctacttagtaactatagaaactaaaaaagaaaaatttgaaacttataaagactaaatgaataattaaacataatttttatataaaaaaattgatggcatttataatgatggcttaaggataatctaaattttttatggttctttttctttgccgagtgatgtcttatagacttaggtaccccctatatcctaggctagtttacgatgggaaggaggtcacttccaaaattaaccttataaccttagcattaatttttaggtaaaattgtattttaggttccccaatttatcttcagttttggatttggtctcctaataatttacttcacaaattgggtccttctattttgtaaaatcgtgaaatgttggtctcacaggtcacaattagacattgaccgttagcaagtgatgttgactaccacaagtcacgttcttattggatgatgattgccatgtgtcatgttctgattggatgtcaactccatgaaagataaaatgcattgttgttttcattgaccaatcagaatatgacacgtgacagtcatcatccactaagaatgtgaaatgtggtaatcaacatcacttgctaacggtcaatgtccaattatgggttgggggaccaacattgcatgattttacaaaatatgaggatccaattcgtgaattaaattactaggagaccaaatccgaaactgaagataaactaagggaccaaaaatgcaattttacctaatttttatgtcacaatcaaatcaaaacattgaggaaacatgttcgaaacttggtatacctaatcaaaccatgaaatcagatttgtatccttgaatgttgttatcagtatcagtaataattttggcaaattctaagtcatatgtcctaacttgtaggctaataattgaagaataagatgatttatatggaggaagaataataagatgattagaaacacaactttacagaatctaaacacacatttaatcatagaaaactcaacttttattcataagaatcatggatttattttaatacac

SEQ ID NO: 9913 - DNA, 1121 bp, Glycine max
  Gm_smallRNAprecursor_2746
ttagggaataaaaaatctactcattaaactccaaggactaaaacatctacttagtaactatagaaactaaaaaagaaaaatttgaaacttataaagactaaatgaataattaaacataatttttatataaaaaaattgatggcatttataatgatggcttaaggataatctaaattttttatggttctttttctttgccgagtgatgtcttatagacttaggtaccccctatatcctaggctagtttacgatgggaaggaggtcacttccaaaattaaccttataaccttagcattaatttttaggtaaaattgtattttaggttccccaatttatcttcagttttggatttggtctcctaataatttacttcacaaattgggtccttctattttgtaaaatcgtgaaatgttggtctcacaggtcacaattagacattgaccgttagcaagtgatgttgactaccacaagtcacgttcttattggatgatgattgccatgtgtcatgttctgattggatgtcaactccatgaaagataaaatgcattgttgttttcattgaccaatcagaatatgacacgtgacagtcatcatccactaagaatgtgaaatgtggtaatcaacatcacttgctaacggtcaatgtccaattatgggttgggggaccaacattgcatgattttacaaaatatgaggatccaattcgtgaattaaattactaggagaccaaatccgaaactgaagataaactaagggaccaaaaatgcaattttacctaatttttatgtcacaatcaaatcaaaacattgaggaaacatgttcgaaacttggtatacctaatcaaaccatgaaatcagatttgtatccttgaatgttgttatcagtatcagtaataattttggcaaattctaagtcatatgtcctaacttgtaggctaataattgaagaataagatgatttatatggaggaagaataataagatgattagaaacacaactttacagaatctaaacacacatttaatcatagaaaactcaacttttattcataagaatcatggatttattttaatacacaatatgaaacaatttgagcccttttctctttgaatttcctggtt

SEQ ID NO: 9914 - DNA, 1189 bp, Glycine max
  Gm_smallRNAprecursor_2747
atggaggccggaaacacatacattttatatgagatgcggagagtgtactattactcttcaagacgtctctgtattgttaggtctacgtgtggatggtttaccattaatcggtccaacaaatcttaattgggctgatttatgtgaggaattattgggagtcagaccacaagaaggtgaaattaaagatagtgtggttaaattaagttggctggctcaccattttgcacaaataaataaccacgacgacgaagaacaagtacgaaggtttgcccgtgcatggatactgagattcattggaggtgtcttgttcattgacaaaagcagtaacaaagtttcgctaaggtaccttcaatttttacgtgactttggagactgtagcacatatgcatggggacctgccgtacttgtttttctatacagagagatgtgcagtgccaccaattataaaactaaatcaatcggaggtatgtgcatcttactacaaatgtgggcatgggaacgatgtccaaccttggctccaaagaggactccttcccaagtagaaaataaaccactggggcacaggttagtcatttttaaaagcgtctttcatttcaaaagaataaatggttttagggtatattaaattttaatctttgtaggtggctgcgacgtggaaaccaacatatcgacaatgatgatgtgagagtttttcgtcgcaagttggatattatgaaacgtcatgaggtaagaacatggtattgcatttgtaaaataaaaaatgatatgtgttattttactaaaatgctgacaactatgttgttatatgcagtttgtgtgggagccttacacagcaactgttatatcattgttgcctcccatttgtgtagtcggaagggtcgcgtggtgcgcggtggtgccactaatttgtttccaagttattgaggggcaccaaccggatagagtattgagacaatttggaatgcagcaaccaattccagagtctcattcgcaacccttgaacattcatggcataacactaaaagggaaacatgacgaaaattgggggcaattgttcgccccaataattgatcagtggaacaatcgccatgcttttagggtcgacgcttatcctcgacaagagggcctattgagctttaactcggactacatggtctggtataggtgaaagacaaagatgtttgttgac

SEQ ID NO: 9915 - DNA, 1112 bp, Glycine max
  Gm_smallRNAprecursor_2748
ttccagagtctccttcgcaaccacagaatatccatgggctaacgctgaaaggcaaacaagatgaaaattggttccagctgttgggcccctttatcagtcagtggaataatcgagctgagtttagggtcgacatttatcctcgacaagagggcctattgagttttaactcggattacagggtttggtataggcgaaaaacaaaaatgtttgtcgacccaaacaatgcaaacacggctacattggtatttatttctttttaattatttaacttgaatttattttttaaatcatcgacattaatttgcttaccctaataattgcagggtgaagttaccgagacattgcagtatatggtgtcaccacaagggcgaaacacatggacagttgatgatctcgtgccatatgtggaaaagttagcgattatatcccaagagcaagagaggatcactgagcctgtggcacatggtccggcatcagagcgtcgatttcccccacaatagtttcacatgcttcagtcaagtgttgaaactcgaggatttgacagacgaagggagattgttcacgcggaagatttatcgcagcaaatggaccagcgtggccatggaatgtattacacgccaccaacattttctcagtatccttcgcagatgtatcagtatcctttcgaggatcatgacactgatatgtctgcaagcgaacattcgtttggtggtgttacggaaacacatcctcatttttcatggccgaccatgaccccttcgcagcaacatgatgtcccaatggcaacacctaatgccccattaggtccgcaatgggatgtacccggagcaatacctgatatgggtgacatattaggtgttgatttgcgtcacgagttttctgcagaggctgagcaagaagggcggagacagcgcgcaagaagaaatccggatcgtcaagcccgaaggtgggatcgaccatgtggcacatcctcgcgccatcacggacaccataatgactgattttgatgtctctatttgaaatttgtgttgtatctttgtaatttgaatttcagacttaatttatggtatctgattctacttgttatggaatttgttatggaattgcttttt

SEQ ID NO: 9916 - DNA, 1165 bp, Glycine max
  Gm_smallRNAprecursor_2749
cattgagctccttctgaattttgtggatccccttatcatttatgaacccatagtctttactccactgcctgatggcccctttcaaatatttgagcttattttttagcacaactcccccccatcccccctgctgggcagtgttcaccaaaggcttctgcatcagcattgacactctccaccctcttcggtttatgcttttgtgttttcttctgtgcctcctcgttataaatctcagctttattcgaggttgcaccagaacgatcaccaccaatctgtgcttcttcctcgtctatcaggtcaatatctttcctttcaacttttgttttgtaaattacaatgtagttttcaaaagcaaaggtgaaacgaaagatattgagctggtagaggaggaacaggcacggattggtgctgatccttctagtgggacctccaataaatctgagaattataaggaggaagcatggaagaaaacacagaagcataaaccaaagagggtggagagtgtcaacgctgatgcagaagcctttggtgatgactggaatatttttattgctctatgcattgtgaagctgaagcagtagaacatacgaacaaaagagatacaggccatcaaaatgtggcattggacaataagacaggagattcaactatgctgaagatgggagattcagctaaagttgtgatcaaacaagacatgaagggaagaaggcataaatatgggtttaacaacaatgaacgtgagaaggcacagaagaaaagggtggtggatgatgaaactgccgacaaacatcagctggatgaagtcctatgaagatcctcctcattctcaaagaggggaacgagcaacaatttgaaggttctatattcaggaactaaagaattcaaaatagctagtaataagagggatttgtttttgggattttctgagcaccaagagcggctacgcaagaagtttgcacttgaggagggaaggatatttgcagctaatgaacaagtttcttaactatttgtccttaagattttactgtttctttttgctaatatgtaaatataaatggtataagggtatggcgtaaaaacatggtctatatttacttctaagattgttaggggtaaaaatgaccatgtccctatggcataaccttatattatttatatttacata

SEQ ID NO: 9917 - DNA, 1061 bp, Glycine max
  Gm_smallRNAprecursor_2750
aacaacatggatgatcttggagatgacaaagagggatgaataggtgttgtgggtgcttcggatggtccgtggcggcgatgggcaatagcagtggcggtggaggatgatctctttctcttcttcgatggttctgccatttgatgaagttttagtggatttcaatcggtggaagtgaaagaggagtgaaaaagtggaagattgggctttacgacacgtgttttggtgaagatttgagtaagatacgaaggtttgaagatttagggatggaggaagcacgaggagaggccttggctgcacaacaacactggtttcatgggtatttatagacgaggacgagttgtaatcgattacaaggcttggtaatcgattacaagagtaataagccttatggtaatcgattacaggatgttgtaatcgattacaggctgcctgttcttgtgtaatcgattacactggatggtaatcgattaccagagcataaactaggctagtttctaaaaaattacctatgtctatgctaaatacacctaatattattaattatcactactaatgcacttaattcaagcattcaaatataaaaaacacaggaattcataaattttatcataataacaagaatttaaacaaaatcaatcaaagtaacatacttaacataaacaatcaatcataagagtaaattaatcaatcaatccttatctatctaaatcactaacatctaagaggcctaattcccttctaatagagaagaatgcttctttggggagaggttttgtgaaaatatcagcaagttgattcttagtatcaacaaactctaatacacaatctccctttagaacgtgatctctaagaaaatggtgcctaatttctatatgtttagttctagagtgttgaactggattcttggagagattaattgcacttgtattatcacatctaataggtatatggtcaagaaggatttcataatcagaaagttgttgcttcatccataagatttgtgcacaacaactgccggcagaaatatattccgcttctgtagtggataaagcaacactatt

SEQ ID NO: 9918 - DNA, 1164 bp, Glycine max
  Gm_smallRNAprecursor_2751
acccaattaattatcgcgtgtgttaaagttgtggtttgataatgttttatatttctagcttgttgtagaagcttgtagaagctcttagaaggtgtcctgtaatctgtcaccataggcgaggttgtagccttcatcatgaactattttttgtactatctgttaattctcatgtatatatatatacagagatcagcggaataagagcaaacggacagataggaagtaagaatgcagtatgataaatgaaagcgaaatataaactgtaaagcagatatcaagggcacaccgaaacggcttacaaacccatgtttttgaaaataaagaaaccgaagcggcggcagagccacacaggatcagtgaggggagaagggagatatgaaaaacagaacttgaaatttattgaaaccgaaagaaaagcttacaaagagtttttccctaggcagagcttctctctctaaaaacctgattctgagactatctgaaagggtgcctcacaaagggaacgaggactcctttaaatagactcaatttttactgtttctacagtgtcagtaatgtttaccggaactgttacaaaatttttgcaaattacattaataagaggaaccgtcaaattagttacaataattcatgattactacaactaattaatcttcgtctaatgatatcccaaaacagtcatcttcattctggtagaatggatcatcttcttggtcatcattagtctcggatgattcggcttccttcttggggggttctttttccacttcctgttgaagtagttggaggacttctttaagattctgagcaagactctctttagattttgagcttgctaagaatgctgcaagttgtgacttctgattcagaaacaaagatgtctccggatcagcaggtttgaggaattcaggattactctggaaccagttcttgacttgttctggagcagcctttgaggtatcaaattgtgaccaccattttacaaaggcgtgtctctccaatggtgggtattgtttgctgttttcagtttttccgtatctgtattgccatgaaaaaatccatgacaaggaaaaattggaaaagtactttagatctgccggaattcgtgattccttgctattgtagagcttgttgaattgttggaatccctgttggacttcttct

SEQ ID NO: 9919 - DNA, 1222 bp, Glycine max
  Gm_smallRNAprecursor_2752
tacaaagagtttttccctaggcagagcttctctctctaaaaacctgattctgagactatctgaaagggtgcctcacaaagggaacgaggactcctttaaatagactcaatttttactgtttctacagtgtcagtaatgtttaccggaactgttacaaaatttttgcaaattacattaataagaggaaccgtcaaattagttacaataattcatgattactacaactaattaatcttcgtctaatgatatcccaaaacagtcatcttcattctggtagaatggatcatcttcttggtcatcattagtctcggatgattcggcttccttcttggggggttctttttccacttcctgttgaagtagttggaggacttctttaagattctgagcaagactctctttagattttgagcttgctaagaatgctgcaagttgtgacttctgattcagaaacaaagatgtctccggatcagcaggtttgaggaattcaggattactctggaaccagttcttgacttgttctggagcagcctttgaggtatcaaattgtgaccaccattttacaaaggcgtgtctctccaatggtgggtattgtttgctgttttcagtttttccgtatctgtattgccatgaaaaaatccatgacaaggaaaaattggaaaagtactttagatctgccggaattcgtgattccttgctattgtagagcttgttgaattgttggaatccctgttggacttcttctgggaatatctgtggaattggtccaaagtagttccaccattggaggaaccaatttggaaaattatacacagtattatttttgaagtaaattagccatgaatgcttgaatttactgttttggtgccagaacacattggtccaggcgtcaatgtaatcccaataattatatcctgcggggtcaaatggtgcaaaaaaatttttgggttggtttaagtttgagccataatgtcgtggctgcataacctttaagatttggattgtggaatgggtatttagatttggatctttggggtctttgaagtgtttaatagatactgagttcgtatctattagaatgaattcgtagaatttgcgggttttgtttgtggctattggcctgtaatggaatcctggggggaatactttggcggttgctttgaagggattcttgtcccagtattctggttccatttgtaaaacattgaaaaatttgtttttt

SEQ ID NO: 9920 - DNA, 1148 bp, Glycine max
  Gm_smallRNAprecursor_2753
ggaattcgtgattccttgctattgtagagcttgttgaattgttggaatccctgttggacttcttctgggaatatctgtggaattggtccaaagtagttccaccattggaggaaccaatttggaaaattatacacagtattatttttgaagtaaattagccatgaatgcttgaatttactgttttggtgccagaacacattggtccaggcgtcaatgtaatcccaataattatatcctgcggggtcaaatggtgcaaaaaaatttttgggttggtttaagtttgagccataatgtcgtggctgcataacctttaagatttggattgtggaatgggtatttagatttggatctttggggtctttgaagtgtttaatagatactgagttcgtatctattagaatgaattcgtagaatttgcgggttttgtttgtggctattggcctgtaatggaatcctggggggaatactttggcggttgctttgaagggattcttgtcccagtattctggttccatttgtaaaacattgaaaaatttgttttttgaaatataactattgctgggttgtggtgttgattcttgttgagtcaacgattggcttggtctttggttgcagacagttttggtctgtttggccttttggatttgtttttgcagatctgtttcagaatcatcgtctgattctgaggccatttctgcccaggtctttttggccaattttggtactttggtgaggcctatatcttctaaggccaagagagtttgtattgaccaggcatagtcagccacggtctgtttggttgttgttggttttggggattcctgagttgatgactcaggtttgatggtagttatctgggtcaatgacccttcaagctttcctttctgggttgatgacccagtctgggtaggtgacccagaagatgatgtagttgtctttttggttactggctctggtagagccaatggaacctcttttccttttgtactggatctccctcctctgccggaggaactagacaccttaggaggcactgggaattttctgtaaaaattcacgggtgaggtagtcaggtagagagttggaagagcccttgatatattctatattaaaatcaaagacgcttaaaattgcttgccatcttgcaa

SEQ ID NO: 9921 - DNA, 1149 bp, Glycine max
  Gm_smallRNAprecursor_2754
ggaattcgtgattccttgctattgtagagcttgttgaattgttggaatccctgttggacttcttctgggaatatctgtggaattggtccaaagtagttccaccattggaggaaccaatttggaaaattatacacagtattatttttgaagtaaattagccatgaatgcttgaatttactgttttggtgccagaacacattggtccaggcgtcaatgtaatcccaataattatatcctgcggggtcaaatggtgcaaaaaaatttttgggttggtttaagtttgagccataatgtcgtggctgcataacctttaagatttggattgtggaatgggtatttagatttggatctttggggtctttgaagtgtttaatagatactgagttcgtatctattagaatgaattcgtagaatttgcgggttttgtttgtggctattggcctgtaatggaatcctggggggaatactttggcggttgctttgaagggattcttgtcccagtattctggttccatttgtaaaacattgaaaaatttgttttttgaaatataactattgctgggttgtggtgttgattcttgttgagtcaacgattggcttggtctttggttgcagacagttttggtctgtttggccttttggatttgtttttgcagatctgtttcagaatcatcgtctgattctgaggccatttctgcccaggtctttttggccaattttggtactttggtgaggcctatatcttctaaggccaagagagtttgtattgaccaggcatagtcagccacggtctgtttggttgttgttggttttggggattcctgagttgatgactcaggtttgatggtagttatctgggtcaatgacccttcaagctttcctttctgggttgatgacccagtctgggtaggtgacccagaagatgatgtagttgtctttttggttactggctctggtagagccaatggaacctcttttccttttgtactggatctccctcctctgccggaggaactagacaccttaggaggcactgggaattttctgtaaaaattcacgggtgaggtagtcaggtagagagttggaagagcccttgatatattctatattaaaatcaaagacgcttaaaattgcttgccatcttgcaaa

SEQ ID NO: 9922 - DNA, 1147 bp, Glycine max
  Gm_smallRNAprecursor_2755
gaattcgtgattccttgctattgtagagcttgttgaattgttggaatccctgttggacttcttctgggaatatctgtggaattggtccaaagtagttccaccattggaggaaccaatttggaaaattatacacagtattatttttgaagtaaattagccatgaatgcttgaatttactgttttggtgccagaacacattggtccaggcgtcaatgtaatcccaataattatatcctgcggggtcaaatggtgcaaaaaaatttttgggttggtttaagtttgagccataatgtcgtggctgcataacctttaagatttggattgtggaatgggtatttagatttggatctttggggtctttgaagtgtttaatagatactgagttcgtatctattagaatgaattcgtagaatttgcgggttttgtttgtggctattggcctgtaatggaatcctggggggaatactttggcggttgctttgaagggattcttgtcccagtattctggttccatttgtaaaacattgaaaaatttgttttttgaaatataactattgctgggttgtggtgttgattcttgttgagtcaacgattggcttggtctttggttgcagacagttttggtctgtttggccttttggatttgtttttgcagatctgtttcagaatcatcgtctgattctgaggccatttctgcccaggtctttttggccaattttggtactttggtgaggcctatatcttctaaggccaagagagtttgtattgaccaggcatagtcagccacggtctgtttggttgttgttggttttggggattcctgagttgatgactcaggtttgatggtagttatctgggtcaatgacccttcaagctttcctttctgggttgatgacccagtctgggtaggtgacccagaagatgatgtagttgtctttttggttactggctctggtagagccaatggaacctcttttccttttgtactggatctccctcctctgccggaggaactagacaccttaggaggcactgggaattttctgtaaaaattcacgggtgaggtagtcaggtagagagttggaagagcccttgatatattctatattaaaatcaaagacgcttaaaattgcttgccatcttgcaa

SEQ ID NO: 9923 - DNA, 1159 bp, Glycine max
  Gm_smallRNAprecursor_2756
acccatctttcgggaagagttacctcatcccattttatttttcttgggagagaaacgttagcctttgtcatatcagtgataaacaaggttgtttctcctttttgaggttttaacaggactctagatgcacaagtattcatgaccttgtactggatcctataaattaaggctgatgggattgatccttctttcatgtcaaggccatgaaagtggatgtttaagaacagagagtcaagaatgtttctgtccatcagactcactgttttgtttggataacagttaaaatatattggaccttgtcctaggctggtttcaactgttccaattagggagtcttcaaattgattatgcctaatgtctcttagacacattaagactactgcatctatgcccatatcaattaagggcttgatggctacttgtacacaaccgatgtgtagatatttatacttacggctatgtttataaattgaattttttgaaagtaaatgaaattcttcccctatatcttgtcctagaggaatattgttttctactattttgattatgtaatcaaagttgtgtttgtcctttattgtttcaggaacgtatagttgatcctgagggatttctggaatgttccagtcatccatgttttgattgatatcttcgaatcggacttcctcatcgaagagattgtgttttgggacgacctcttgggtctggttatcttgatcatttaataaattggagtttcttgaagaagatgatgaggaggagtttgagcgaaaagagatacgggaatcctttgttgcatattttcatacccaacggcatcgtctgctaccgcacctatctccaacaatacccaaatcagggttgtctctttcagcgcatcccaaccaaggaggtcttgcagtcagaaacctcaacacactcccacgtgccacttcttcacacgtcattctcaggtacgtgcgtcccacatgtggcgtccctaaattaatgactggtttaatagtaataatttaaataacaaaaaccatggtaatttttttttcttctttttttttttcatttctttctcttttcaccataactaggtttagaaggaaaatcctcactataaagtcctgaatgaccagttcacaactctattcggagtcatttctttcttacc

SEQ ID NO: 9924 - DNA, 1165 bp, Glycine max
  Gm_smallRNAprecursor_2757
tccaggacatttgtccccatcacaactccatactgcttctttgatctccaaatctgaaaaaggaacaaccaaagactccctctgctcctggtttagtgaagagaaatgcactccatcaagagtgggtctacaaagctgctgctcagaaaatctgttaaggaaaaaattcacagcttccttcttaacttcattggggttctggatccattcaccctgaatgagaattccatgaagaccattataatgtcttttgaaattgatgactttatggaaataagccgaatttcgtctatcaggtcaatatctttcctttcaacttttgttttgtaaattacaatgtagttttcaaaagcaaaggtgaaacgaaagatattgagctggtagaggaggaacaagcacggattggtgttgatccttctagtgggacctccaataaatctgagaattataaggaggaagcatggaagaaaacacagaagcataaaccaaagagggtggagagtgtcaacgctgatgcagaagcctttggtgatgactggaaaattctgattgctctatgcattgtgaagctgaagcagtagaacatacgaacaaaagagatacaggccatcaaaatgtggcattggacaataagacaggagattcaactatgctgaagatgggagattcagctaaagttgtgatcaaacaagacatgaagggaagaaggcctaaatatgggtttaacaacaatgaacgtgagaaggcacagaagaaaagggtggtggatgatgaaactgccgacaaacatgagctggatgaagtcctatgaagatcctcctcattctcaaagaggggaacgagcaacaatttgaaggttgtatattcaggaactaaagaattcaaaatagcaagtaataagagggatttgtttttgggattttctgagcaccaagagcggctatgcaagaagtttgcacttgaggagggaaggatatttgcagctaatgaacaagtttcttaactatttgtccttaagattttactgtttctttttgctaatatgtaaatataaatggtataagggtatggcgtaaaaacatggtctatatttacttctaagattgttaggggtaaaaatgaccatgtccctatggcataaccttatattatttatatttacata

SEQ ID NO: 9925 - DNA, 1183 bp, Glycine max
  Gm_smallRNAprecursor_2758
cgttgacatcggttttctagaaaaacggatgttaagggcatacattaacatcggttattctagaaaaccgatgttaaactaacatattaacatcggttttactggaaaaccgatgtcaacgttcatcatgcctacactttttttgctgttgttcattgtgtttaacatcgggtatttggagaattaatgttgtcatatgtatgttaacatcggttttccaaaaccgatgttaacattcatacattcaacatcgtcactttcaacatcggttttagaaccgatgtagaatgttctaaataaccgatgttgaaagtgtattttctagtagtgtaacttattcctaaatacccattttgttcctatgatggggtagtttttaggtttctctactagttcccacacattgtttctctcaaactaatttagttcttcttgcatagcaactatccaatgataatctattatggcttcatttaaatttttaggttcaatcatagacacaaaagtcatattattgcataagtctttaagaaaatgtctagttgttaccccttttgagatatcaccaataatgttgtcaaggggatgatcttttgaagctttccattctcttggaagttcatcatttgatttggcttcttctagaggatcttcattgcttcctttcccttttcctttagaatcttgtccatgaatatgcatttgttctaaagattctgcaatatcatctaaaatatcctttcttggagaaatagcattagcctcatcaaaggaaacatgaatagattcttcaatagtcatagttcacttattatatattctataagctttactatgcaaggaataaccaaggaaaattcctttatctgacttagcatcaaactttcctaagttttcttttccattgtttaatacaaagcatttgcaaccaaaaacatgaaggtgtgaaatgttgggttttctaccattaaacagttcatatggagttttctttaaaatgagtcttattaaagccctattcatgatatagcatgcaatattaacggcttcagcccaaaaatattttggaagaggagtgtcatttaataaggttctagcaatttcttccaaagatctatttttcctttcaacaactccgttttgttgaggggttctaggtgcagaaaagttatgttcaatgcca

SEQ ID NO: 9926 - DNA, 1035 bp, Glycine max
  Gm_smallRNAprecursor_2759
atgtagccgtgtttgcattttatgggtcaacaaacatctttgtctttcgcctataccagaccatgtagtctgagttaaagctcaataggccttcttagtcgagagacaagcatcaaccctaaatgcatggcgattattccactgatgaatcattggggtgaacaattgcccccaatttttgtcatgtttcccttttaatgttatgccatgaatgtttaagggttgtgaaggagactctggaattggttgctgcatcccaaattgtctcaatactctgtccggttggtgccactcaataacttggaaacaaattagtggcaccaccgcgtaccacgcgagacttccgactaaacaaacgggaggcaacaatgatataacggttgatgtgtaaggctcccacacaaattgcatataacaacatagttgtgaacattttagtaaaataacacatataattttttattttacaaatacaatagcatgttcttacctcatgacgtttcataatatccaacttgcgacgaaaagctctcacatcatcattgccgatatgttggtttccacgtttcagccacctacaaagattaaaatttaatataccctaaaaccatttattctattgaaatgaaagacgctgttaaaaatgactaacctgtgccccagtggtgtattttctacttgggaaggagtcctctttggagccaaggttggacatcgttcccatgcccacatttgtagtaagatgcacatacctccgattgatttagttttataatcggtggcactgcacatctctctgtatagaaaaccaagtgcggaagctccccatgcatatgtgccacattcttcaaagtcatgtaaaaattgaaggtaccttagcgaaactttgttactgcttttgtcaacgaacaggacacctccaatgaatctcagtatccatgcacgggcaaaccttcgtacttgttcttcttcgtcgtcgttatttatttgtgcaaaatggtgagccagccaacttaatttaaccacactaccttt

SEQ ID NO: 9927 - DNA, 1157 bp, Glycine max
  Gm_smallRNAprecursor_2760
aggcaacaatgatataacggttgatgtgtaaggctcccacacaaattgcatataacaacatagttgtgaacattttagtaaaataacacatataattttttattttacaaatacaatagcatgttcttacctcatgacgtttcataatatccaacttgcgacgaaaagctctcacatcatcattgccgatatgttggtttccacgtttcagccacctacaaagattaaaatttaatataccctaaaaccatttattctattgaaatgaaagacgctgttaaaaatgactaacctgtgccccagtggtgtattttctacttgggaaggagtcctctttggagccaaggttggacatcgttcccatgcccacatttgtagtaagatgcacatacctccgattgatttagttttataatcggtggcactgcacatctctctgtatagaaaaccaagtgcggaagctccccatgcatatgtgccacattcttcaaagtcatgtaaaaattgaaggtaccttagcgaaactttgttactgcttttgtcaacgaacaggacacctccaatgaatctcagtatccatgcacgggcaaaccttcgtacttgttcttcttcgtcgtcgttatttatttgtgcaaaatggtgagccagccaacttaatttaaccacactacctttaatttcaccttcttgtagtctgactcccaataattcctcacataaatcagcccaatcaagatttgttggaccgactaatggtaaaccatccacacttatacctaacaatacagagaagtcttggagagtaataatacactctccgcatctcatgtgaacgtatgtgtttccggcctctatctttctatcagagcactaattaatgaggcatttatttttaagtatcccatcttgataatccaggcgaaaccagattgtcgaagaaaaggaaaaatttgctctggaatttgttcttccccttgatacgtggggatagctcatctgatatgtaatttccgatcttcttccccattccaaacatgttctaaaacatgcttaggttgcatccataatacatcagcatcgatggggctagacttaatgttaatatgtgatgaagatgatgatgaagatgtcattgctactgcaaaataaaatataat

SEQ ID NO: 9928 - DNA, 1158 bp, Glycine max
  Gm_smallRNAprecursor_2761
aggcaacaatgatataacggttgatgtgtaaggctcccacacaaattgcatataacaacatagttgtgaacattttagtaaaataacacatataattttttattttacaaatacaatagcatgttcttacctcatgacgtttcataatatccaacttgcgacgaaaagctctcacatcatcattgccgatatgttggtttccacgtttcagccacctacaaagattaaaatttaatataccctaaaaccatttattctattgaaatgaaagacgctgttaaaaatgactaacctgtgccccagtggtgtattttctacttgggaaggagtcctctttggagccaaggttggacatcgttcccatgcccacatttgtagtaagatgcacatacctccgattgatttagttttataatcggtggcactgcacatctctctgtatagaaaaccaagtgcggaagctccccatgcatatgtgccacattcttcaaagtcatgtaaaaattgaaggtaccttagcgaaactttgttactgcttttgtcaacgaacaggacacctccaatgaatctcagtatccatgcacgggcaaaccttcgtacttgttcttcttcgtcgtcgttatttatttgtgcaaaatggtgagccagccaacttaatttaaccacactacctttaatttcaccttcttgtagtctgactcccaataattcctcacataaatcagcccaatcaagatttgttggaccgactaatggtaaaccatccacacttatacctaacaatacagagaagtcttggagagtaataatacactctccgcatctcatgtgaacgtatgtgtttccggcctctatctttctatcagagcactaattaatgaggcatttatttttaagtatcccatcttgataatccaggcgaaaccagattgtcgaagaaaaggaaaaatttgctctggaatttgttcttccccttgatacgtggggatagctcatctgatatgtaatttccgatcttcttccccattccaaacatgttctaaaacatgcttaggttgcatccataatacatcagcatcgatggggctagacttaatgttaatatgtgatgaagatgatgatgaagatgtcattgctactgcaaaataaaatataata

SEQ ID NO: 9929 - DNA, 1155 bp, Glycine max
  Gm_smallRNAprecursor_2762
gcaacaatgatataacggttgatgtgtaaggctcccacacaaattgcatataacaacatagttgtgaacattttagtaaaataacacatataattttttattttacaaatacaatagcatgttcttacctcatgacgtttcataatatccaacttgcgacgaaaagctctcacatcatcattgccgatatgttggtttccacgtttcagccacctacaaagattaaaatttaatataccctaaaaccatttattctattgaaatgaaagacgctgttaaaaatgactaacctgtgccccagtggtgtattttctacttgggaaggagtcctctttggagccaaggttggacatcgttcccatgcccacatttgtagtaagatgcacatacctccgattgatttagttttataatcggtggcactgcacatctctctgtatagaaaaccaagtgcggaagctccccatgcatatgtgccacattcttcaaagtcatgtaaaaattgaaggtaccttagcgaaactttgttactgcttttgtcaacgaacaggacacctccaatgaatctcagtatccatgcacgggcaaaccttcgtacttgttcttcttcgtcgtcgttatttatttgtgcaaaatggtgagccagccaacttaatttaaccacactacctttaatttcaccttcttgtagtctgactcccaataattcctcacataaatcagcccaatcaagatttgttggaccgactaatggtaaaccatccacacttatacctaacaatacagagaagtcttggagagtaataatacactctccgcatctcatgtgaacgtatgtgtttccggcctctatctttctatcagagcactaattaatgaggcatttatttttaagtatcccatcttgataatccaggcgaaaccagattgtcgaagaaaaggaaaaatttgctctggaatttgttcttccccttgatacgtggggatagctcatctgatatgtaatttccgatcttcttccccattccaaacatgttctaaaacatgcttaggttgcatccataatacatcagcatcgatggggctagacttaatgttaatatgtgatgaagatgatgatgaagatgtcattgctactgcaaaataaaatataat

SEQ ID NO: 9930 - DNA, 1036 bp, Glycine max
  Gm_smallRNAprecursor_2763
tgttcttacctcatgacgtttcataatatccaacttgcgacgaaaagctctcacatcatcattgccgatatgttggtttccacgtttcagccacctacaaagattaaaatttaatataccctaaaaccatttattctattgaaatgaaagacgctgttaaaaatgactaacctgtgccccagtggtgtattttctacttgggaaggagtcctctttggagccaaggttggacatcgttcccatgcccacatttgtagtaagatgcacatacctccgattgatttagttttataatcggtggcactgcacatctctctgtatagaaaaccaagtgcggaagctccccatgcatatgtgccacattcttcaaagtcatgtaaaaattgaaggtaccttagcgaaactttgttactgcttttgtcaacgaacaggacacctccaatgaatctcagtatccatgcacgggcaaaccttcgtacttgttcttcttcgtcgtcgttatttatttgtgcaaaatggtgagccagccaacttaatttaaccacactacctttaatttcaccttcttgtagtctgactcccaataattcctcacataaatcagcccaatcaagatttgttggaccgactaatggtaaaccatccacacttatacctaacaatacagagaagtcttggagagtaataatacactctccgcatctcatgtgaacgtatgtgtttccggcctctatctttctatcagagcactaattaatgaggcatttatttttaagtatcccatcttgataatccaggcgaaaccagattgtcgaagaaaaggaaaaatttgctctggaatttgttcttccccttgatacgtggggatagctcatctgatatgtaatttccgatcttcttccccattccaaacatgttctaaaacatgcttaggttgcatccataatacatcagcatcgatggggctagacttaatgttaatatgtgatgaagatgatgatgaagatgtcattgctactgcaaaataaaatataat

SEQ ID NO: 9931 - DNA, 1037 bp, Glycine max
  Gm_smallRNAprecursor_2764
tgttcttacctcatgacgtttcataatatccaacttgcgacgaaaagctctcacatcatcattgccgatatgttggtttccacgtttcagccacctacaaagattaaaatttaatataccctaaaaccatttattctattgaaatgaaagacgctgttaaaaatgactaacctgtgccccagtggtgtattttctacttgggaaggagtcctctttggagccaaggttggacatcgttcccatgcccacatttgtagtaagatgcacatacctccgattgatttagttttataatcggtggcactgcacatctctctgtatagaaaaccaagtgcggaagctccccatgcatatgtgccacattcttcaaagtcatgtaaaaattgaaggtaccttagcgaaactttgttactgcttttgtcaacgaacaggacacctccaatgaatctcagtatccatgcacgggcaaaccttcgtacttgttcttcttcgtcgtcgttatttatttgtgcaaaatggtgagccagccaacttaatttaaccacactacctttaatttcaccttcttgtagtctgactcccaataattcctcacataaatcagcccaatcaagatttgttggaccgactaatggtaaaccatccacacttatacctaacaatacagagaagtcttggagagtaataatacactctccgcatctcatgtgaacgtatgtgtttccggcctctatctttctatcagagcactaattaatgaggcatttatttttaagtatcccatcttgataatccaggcgaaaccagattgtcgaagaaaaggaaaaatttgctctggaatttgttcttccccttgatacgtggggatagctcatctgatatgtaatttccgatcttcttccccattccaaacatgttctaaaacatgcttaggttgcatccataatacatcagcatcgatggggctagacttaatgttaatatgtgatgaagatgatgatgaagatgtcattgctactgcaaaataaaatataata

SEQ ID NO: 9932 - DNA, 1043 bp, Glycine max
  Gm_smallRNAprecursor_2765
acaaattcatcatggcttcattccttaggtgctgaagcactttaacttatgaaagaagacacattcaatgtgtgtgattatcaattataatgtgtgtggtgaaacaaataaacgacattagttgaacctaggtatttgacttgagtaatgaggagcaatttcgggagacaatgtgcaatgagaaagccaagggtaagagagcacacagatgagaacataccggtttggcaaactcgtgtgtttggtttactgttgggaggcccccaaacggtcgtcaatctaaagttgaaccaaacacactcagtcttcaaggaacagccttagagagaagccttggaatgtgttcttgacatcacaatgactgggatcaaagaaatgtgaaaaaacgcaggtaagggggtacgacaaaattaatggtttattctacaaataaaaaaatccctatataattagtattgttgtgggtgaatatgatctatgaagcacggacacttcagccctttgccgtgtccggtgtccgacacgcgtccgtgtcagtgtcagtgtccgacaccgacacgacacccgtattacgttctatattttggacattacagatatctacgtgtccgtgtcgtgtccggtgtccatgtcggtgcttcatattatatgataacgaaagaactcaagagaagccaaaatttactaacttctcaatcattacaagagcgctactcctaataattgtatccctgatttagtaaaatttaatatgacaatcaaatggcactacaggcttataatactagtaaacgctttctcagtttggaaagccagaaattagcaaaagaaacccaaatttattttgccatggccacacgttacattacaagtaatttacataccagtggaacactggtgatgaattcaaatatcacacgtgatccaaagtggttcttgaaactcacccttcaacttatcccaatcctgacctccttcgccatcatcttctctaggagcacacagcgccaaatccccatggtgccacgtgggcgtcccattct

SEQ ID NO: 9933 - DNA, 1044 bp, Glycine max
  Gm_smallRNAprecursor_2766
acaaattcatcatggcttcattccttaggtgctgaagcactttaacttatgaaagaagacacattcaatgtgtgtgattatcaattataatgtgtgtggtgaaacaaataaacgacattagttgaacctaggtatttgacttgagtaatgaggagcaatttcgggagacaatgtgcaatgagaaagccaagggtaagagagcacacagatgagaacataccggtttggcaaactcgtgtgtttggtttactgttgggaggcccccaaacggtcgtcaatctaaagttgaaccaaacacactcagtcttcaaggaacagccttagagagaagccttggaatgtgttcttgacatcacaatgactgggatcaaagaaatgtgaaaaaacgcaggtaagggggtacgacaaaattaatggtttattctacaaataaaaaaatccctatataattagtattgttgtgggtgaatatgatctatgaagcacggacacttcagccctttgccgtgtccggtgtccgacacgcgtccgtgtcagtgtcagtgtccgacaccgacacgacacccgtattacgttctatattttggacattacagatatctacgtgtccgtgtcgtgtccggtgtccatgtcggtgcttcatattatatgataacgaaagaactcaagagaagccaaaatttactaacttctcaatcattacaagagcgctactcctaataattgtatccctgatttagtaaaatttaatatgacaatcaaatggcactacaggcttataatactagtaaacgctttctcagtttggaaagccagaaattagcaaaagaaacccaaatttattttgccatggccacacgttacattacaagtaatttacataccagtggaacactggtgatgaattcaaatatcacacgtgatccaaagtggttcttgaaactcacccttcaacttatcccaatcctgacctccttcgccatcatcttctctaggagcacacagcgccaaatccccatggtgccacgtgggcgtcccattctc

SEQ ID NO: 9934 - DNA, 1045 bp, Glycine max
  Gm_smallRNAprecursor_2767
acaaattcatcatggcttcattccttaggtgctgaagcactttaacttatgaaagaagacacattcaatgtgtgtgattatcaattataatgtgtgtggtgaaacaaataaacgacattagttgaacctaggtatttgacttgagtaatgaggagcaatttcgggagacaatgtgcaatgagaaagccaagggtaagagagcacacagatgagaacataccggtttggcaaactcgtgtgtttggtttactgttgggaggcccccaaacggtcgtcaatctaaagttgaaccaaacacactcagtcttcaaggaacagccttagagagaagccttggaatgtgttcttgacatcacaatgactgggatcaaagaaatgtgaaaaaacgcaggtaagggggtacgacaaaattaatggtttattctacaaataaaaaaatccctatataattagtattgttgtgggtgaatatgatctatgaagcacggacacttcagccctttgccgtgtccggtgtccgacacgcgtccgtgtcagtgtcagtgtccgacaccgacacgacacccgtattacgttctatattttggacattacagatatctacgtgtccgtgtcgtgtccggtgtccatgtcggtgcttcatattatatgataacgaaagaactcaagagaagccaaaatttactaacttctcaatcattacaagagcgctactcctaataattgtatccctgatttagtaaaatttaatatgacaatcaaatggcactacaggcttataatactagtaaacgctttctcagtttggaaagccagaaattagcaaaagaaacccaaatttattttgccatggccacacgttacattacaagtaatttacataccagtggaacactggtgatgaattcaaatatcacacgtgatccaaagtggttcttgaaactcacccttcaacttatcccaatcctgacctccttcgccatcatcttctctaggagcacacagcgccaaatccccatggtgccacgtgggcgtcccattctca

SEQ ID NO: 9935 - DNA, 1041 bp, Glycine max
  Gm_smallRNAprecursor_2768
caaattcatcatggcttcattccttaggtgctgaagcactttaacttatgaaagaagacacattcaatgtgtgtgattatcaattataatgtgtgtggtgaaacaaataaacgacattagttgaacctaggtatttgacttgagtaatgaggagcaatttcgggagacaatgtgcaatgagaaagccaagggtaagagagcacacagatgagaacataccggtttggcaaactcgtgtgtttggtttactgttgggaggcccccaaacggtcgtcaatctaaagttgaaccaaacacactcagtcttcaaggaacagccttagagagaagccttggaatgtgttcttgacatcacaatgactgggatcaaagaaatgtgaaaaaacgcaggtaagggggtacgacaaaattaatggtttattctacaaataaaaaaatccctatataattagtattgttgtgggtgaatatgatctatgaagcacggacacttcagccctttgccgtgtccggtgtccgacacgcgtccgtgtcagtgtcagtgtccgacaccgacacgacacccgtattacgttctatattttggacattacagatatctacgtgtccgtgtcgtgtccggtgtccatgtcggtgcttcatattatatgataacgaaagaactcaagagaagccaaaatttactaacttctcaatcattacaagagcgctactcctaataattgtatccctgatttagtaaaatttaatatgacaatcaaatggcactacaggcttataatactagtaaacgctttctcagtttggaaagccagaaattagcaaaagaaacccaaatttattttgccatggccacacgttacattacaagtaatttacataccagtggaacactggtgatgaattcaaatatcacacgtgatccaaagtggttcttgaaactcacccttcaacttatcccaatcctgacctccttcgccatcatcttctctaggagcacacagcgccaaatccccatggtgccacgtgggcgtcccattc

SEQ ID NO: 9936 - DNA, 1041 bp, Glycine max; identical to SEQ ID NO: 9935
  Gm_smallRNAprecursor_2769

SEQ ID NO: 9937 - DNA, 1042 bp, Glycine max
  Gm_smallRNAprecursor_2770
caaattcatcatggcttcattccttaggtgctgaagcactttaacttatgaaagaagacacattcaatgtgtgtgattatcaattataatgtgtgtggtgaaacaaataaacgacattagttgaacctaggtatttgacttgagtaatgaggagcaatttcgggagacaatgtgcaatgagaaagccaagggtaagagagcacacagatgagaacataccggtttggcaaactcgtgtgtttggtttactgttgggaggcccccaaacggtcgtcaatctaaagttgaaccaaacacactcagtcttcaaggaacagccttagagagaagccttggaatgtgttcttgacatcacaatgactgggatcaaagaaatgtgaaaaaacgcaggtaagggggtacgacaaaattaatggtttattctacaaataaaaaaatccctatataattagtattgttgtgggtgaatatgatctatgaagcacggacacttcagccctttgccgtgtccggtgtccgacacgcgtccgtgtcagtgtcagtgtccgacaccgacacgacacccgtattacgttctatattttggacattacagatatctacgtgtccgtgtcgtgtccggtgtccatgtcggtgcttcatattatatgataacgaaagaactcaagagaagccaaaatttactaacttctcaatcattacaagagcgctactcctaataattgtatccctgatttagtaaaatttaatatgacaatcaaatggcactacaggcttataatactagtaaacgctttctcagtttggaaagccagaaattagcaaaagaaacccaaatttattttgccatggccacacgttacattacaagtaatttacataccagtggaacactggtgatgaattcaaatatcacacgtgatccaaagtggttcttgaaactcacccttcaacttatcccaatcctgacctccttcgccatcatcttctctaggagcacacagcgccaaatccccatggtgccacgtgggcgtcccattct

SEQ ID NO: 9938 - DNA, 1043 bp, Glycine max
  Gm_smallRNAprecursor_2771
caaattcatcatggcttcattccttaggtgctgaagcactttaacttatgaaagaagacacattcaatgtgtgtgattatcaattataatgtgtgtggtgaaacaaataaacgacattagttgaacctaggtatttgacttgagtaatgaggagcaatttcgggagacaatgtgcaatgagaaagccaagggtaagagagcacacagatgagaacataccggtttggcaaactcgtgtgtttggtttactgttgggaggcccccaaacggtcgtcaatctaaagttgaaccaaacacactcagtcttcaaggaacagccttagagagaagccttggaatgtgttcttgacatcacaatgactgggatcaaagaaatgtgaaaaaacgcaggtaagggggtacgacaaaattaatggtttattctacaaataaaaaaatccctatataattagtattgttgtgggtgaatatgatctatgaagcacggacacttcagccctttgccgtgtccggtgtccgacacgcgtccgtgtcagtgtcagtgtccgacaccgacacgacacccgtattacgttctatattttggacattacagatatctacgtgtccgtgtcgtgtccggtgtccatgtcggtgcttcatattatatgataacgaaagaactcaagagaagccaaaatttactaacttctcaatcattacaagagcgctactcctaataattgtatccctgatttagtaaaatttaatatgacaatcaaatggcactacaggcttataatactagtaaacgctttctcagtttggaaagccagaaattagcaaaagaaacccaaatttattttgccatggccacacgttacattacaagtaatttacataccagtggaacactggtgatgaattcaaatatcacacgtgatccaaagtggttcttgaaactcacccttcaacttatcccaatcctgacctccttcgccatcatcttctctaggagcacacagcgccaaatccccatggtgccacgtgggcgtcccattctc

SEQ ID NO: 9939 - DNA, 1108 bp, Glycine max
  Gm_smallRNAprecursor_2772
caaattcatcatggcttcattccttaggtgctgaagcactttaacttatgaaagaagacacattcaatgtgtgtgattatcaattataatgtgtgtggtgaaacaaataaacgacattagttgaacctaggtatttgacttgagtaatgaggagcaatttcgggagacaatgtgcaatgagaaagccaagggtaagagagcacacagatgagaacataccggtttggcaaactcgtgtgtttggtttactgttgggaggcccccaaacggtcgtcaatctaaagttgaaccaaacacactcagtcttcaaggaacagccttagagagaagccttggaatgtgttcttgacatcacaatgactgggatcaaagaaatgtgaaaaaacgcaggtaagggggtacgacaaaattaatggtttattctacaaataaaaaaatccctatataattagtattgttgtgggtgaatatgatctatgaagcacggacacttcagccctttgccgtgtccggtgtccgacacgcgtccgtgtcagtgtcagtgtccgacaccgacacgacacccgtattacgttctatattttggacattacagatatctacgtgtccgtgtcgtgtccggtgtccatgtcggtgcttcatattatatgataacgaaagaactcaagagaagccaaaatttactaacttctcaatcattacaagagcgctactcctaataattgtatccctgatttagtaaaatttaatatgacaatcaaatggcactacaggcttataatactagtaaacgctttctcagtttggaaagccagaaattagcaaaagaaacccaaatttattttgccatggccacacgttacattacaagtaatttacataccagtggaacactggtgatgaattcaaatatcacacgtgatccaaagtggttcttgaaactcacccttcaacttatcccaatcctgacctccttcgccatcatcttctctaggagcacacagcgccaaatccccatggtgccacgtgggcgtcccattctcatacgcattacacgtcagcctcctcaacccactcccatccaacctcaccacatacaaatccccat

SEQ ID NO: 9940 - DNA, 1108 bp, Glycine max; identical to SEQ ID NO: 9939
  Gm_smallRNAprecursor_2773

SEQ ID NO: 9941 - DNA, 1040 bp, Glycine max
  Gm_smallRNAprecursor_2774
aaattcatcatggcttcattccttaggtgctgaagcactttaacttatgaaagaagacacattcaatgtgtgtgattatcaattataatgtgtgtggtgaaacaaataaacgacattagttgaacctaggtatttgacttgagtaatgaggagcaatttcgggagacaatgtgcaatgagaaagccaagggtaagagagcacacagatgagaacataccggtttggcaaactcgtgtgtttggtttactgttgggaggcccccaaacggtcgtcaatctaaagttgaaccaaacacactcagtcttcaaggaacagccttagagagaagccttggaatgtgttcttgacatcacaatgactgggatcaaagaaatgtgaaaaaacgcaggtaagggggtacgacaaaattaatggtttattctacaaataaaaaaatccctatataattagtattgttgtgggtgaatatgatctatgaagcacggacacttcagccctttgccgtgtccggtgtccgacacgcgtccgtgtcagtgtcagtgtccgacaccgacacgacacccgtattacgttctatattttggacattacagatatctacgtgtccgtgtcgtgtccggtgtccatgtcggtgcttcatattatatgataacgaaagaactcaagagaagccaaaatttactaacttctcaatcattacaagagcgctactcctaataattgtatccctgatttagtaaaatttaatatgacaatcaaatggcactacaggcttataatactagtaaacgctttctcagtttggaaagccagaaattagcaaaagaaacccaaatttattttgccatggccacacgttacattacaagtaatttacataccagtggaacactggtgatgaattcaaatatcacacgtgatccaaagtggttcttgaaactcacccttcaacttatcccaatcctgacctccttcgccatcatcttctctaggagcacacagcgccaaatccccatggtgccacgtgggcgtcccattc

SEQ ID NO: 9942 - DNA, 1040 bp, Glycine max; identical to SEQ ID NO: 9941
  Gm_smallRNAprecursor_2775

SEQ ID NO: 9943 - DNA, 1041 bp, Glycine max
  Gm_smallRNAprecursor_2776
aaattcatcatggcttcattccttaggtgctgaagcactttaacttatgaaagaagacacattcaatgtgtgtgattatcaattataatgtgtgtggtgaaacaaataaacgacattagttgaacctaggtatttgacttgagtaatgaggagcaatttcgggagacaatgtgcaatgagaaagccaagggtaagagagcacacagatgagaacataccggtttggcaaactcgtgtgtttggtttactgttgggaggcccccaaacggtcgtcaatctaaagttgaaccaaacacactcagtcttcaaggaacagccttagagagaagccttggaatgtgttcttgacatcacaatgactgggatcaaagaaatgtgaaaaaacgcaggtaagggggtacgacaaaattaatggtttattctacaaataaaaaaatccctatataattagtattgttgtgggtgaatatgatctatgaagcacggacacttcagccctttgccgtgtccggtgtccgacacgcgtccgtgtcagtgtcagtgtccgacaccgacacgacacccgtattacgttctatattttggacattacagatatctacgtgtccgtgtcgtgtccggtgtccatgtcggtgcttcatattatatgataacgaaagaactcaagagaagccaaaatttactaacttctcaatcattacaagagcgctactcctaataattgtatccctgatttagtaaaatttaatatgacaatcaaatggcactacaggcttataatactagtaaacgctttctcagtttggaaagccagaaattagcaaaagaaacccaaatttattttgccatggccacacgttacattacaagtaatttacataccagtggaacactggtgatgaattcaaatatcacacgtgatccaaagtggttcttgaaactcacccttcaacttatcccaatcctgacctccttcgccatcatcttctctaggagcacacagcgccaaatccccatggtgccacgtgggcgtcccattct

SEQ ID NO: 9944 - DNA, 1107 bp, Glycine max
  Gm_smallRNAprecursor_2777
aaattcatcatggcttcattccttaggtgctgaagcactttaacttatgaaagaagacacattcaatgtgtgtgattatcaattataatgtgtgtggtgaaacaaataaacgacattagttgaacctaggtatttgacttgagtaatgaggagcaatttcgggagacaatgtgcaatgagaaagccaagggtaagagagcacacagatgagaacataccggtttggcaaactcgtgtgtttggtttactgttgggaggcccccaaacggtcgtcaatctaaagttgaaccaaacacactcagtcttcaaggaacagccttagagagaagccttggaatgtgttcttgacatcacaatgactgggatcaaagaaatgtgaaaaaacgcaggtaagggggtacgacaaaattaatggtttattctacaaataaaaaaatccctatataattagtattgttgtgggtgaatatgatctatgaagcacggacacttcagccctttgccgtgtccggtgtccgacacgcgtccgtgtcagtgtcagtgtccgacaccgacacgacacccgtattacgttctatattttggacattacagatatctacgtgtccgtgtcgtgtccggtgtccatgtcggtgcttcatattatatgataacgaaagaactcaagagaagccaaaatttactaacttctcaatcattacaagagcgctactcctaataattgtatccctgatttagtaaaatttaatatgacaatcaaatggcactacaggcttataatactagtaaacgctttctcagtttggaaagccagaaattagcaaaagaaacccaaatttattttgccatggccacacgttacattacaagtaatttacataccagtggaacactggtgatgaattcaaatatcacacgtgatccaaagtggttcttgaaactcacccttcaacttatcccaatcctgacctccttcgccatcatcttctctaggagcacacagcgccaaatccccatggtgccacgtgggcgtcccattctcatacgcattacacgtcagcctcctcaacccactcccatccaacctcaccacatacaaatccccat

SEQ ID NO: 9945 - DNA, 1107 bp, Glycine max; identical to SEQ ID NO: 9944
  Gm_smallRNAprecursor_2778

SEQ ID NO: 9946 - DNA, 1107 bp, Glycine max; identical to SEQ ID NO: 9944
  Gm_smallRNAprecursor_2779

SEQ ID NO: 9947 - DNA, 1100 bp, Glycine max
  Gm_smallRNAprecursor_2780
aattcatcatggcttcattccttaggtgctgaagcactttaacttatgaaagaagacacattcaatgtgtgtgattatcaattataatgtgtgtggtgaaacaaataaacgacattagttgaacctaggtatttgacttgagtaatgaggagcaatttcgggagacaatgtgcaatgagaaagccaagggtaagagagcacacagatgagaacataccggtttggcaaactcgtgtgtttggtttactgttgggaggcccccaaacggtcgtcaatctaaagttgaaccaaacacactcagtcttcaaggaacagccttagagagaagccttggaatgtgttcttgacatcacaatgactgggatcaaagaaatgtgaaaaaacgcaggtaagggggtacgacaaaattaatggtttattctacaaataaaaaaatccctatataattagtattgttgtgggtgaatatgatctatgaagcacggacacttcagccctttgccgtgtccggtgtccgacacgcgtccgtgtcagtgtcagtgtccgacaccgacacgacacccgtattacgttctatattttggacattacagatatctacgtgtccgtgtcgtgtccggtgtccatgtcggtgcttcatattatatgataacgaaagaactcaagagaagccaaaatttactaacttctcaatcattacaagagcgctactcctaataattgtatccctgatttagtaaaatttaatatgacaatcaaatggcactacaggcttataatactagtaaacgctttctcagtttggaaagccagaaattagcaaaagaaacccaaatttattttgccatggccacacgttacattacaagtaatttacataccagtggaacactggtgatgaattcaaatatcacacgtgatccaaagtggttcttgaaactcacccttcaacttatcccaatcctgacctccttcgccatcatcttctctaggagcacacagcgccaaatccccatggtgccacgtgggcgtcccattctcatacgcattacacgtcagcctcctcaacccactcccatccaacctcaccacatacaaat

SEQ ID NO: 9948 - DNA, 1039 bp, Glycine max
  Gm_smallRNAprecursor_2781
atcatggcttcattccttaggtgctgaagcactttaacttatgaaagaagacacattcaatgtgtgtgattatcaattataatgtgtgtggtgaaacaaataaacgacattagttgaacctaggtatttgacttgagtaatgaggagcaatttcgggagacaatgtgcaatgagaaagccaagggtaagagagcacacagatgagaacataccggtttggcaaactcgtgtgtttggtttactgttgggaggcccccaaacggtcgtcaatctaaagttgaaccaaacacactcagtcttcaaggaacagccttagagagaagccttggaatgtgttcttgacatcacaatgactgggatcaaagaaatgtgaaaaaacgcaggtaagggggtacgacaaaattaatggtttattctacaaataaaaaaatccctatataattagtattgttgtgggtgaatatgatctatgaagcacggacacttcagccctttgccgtgtccggtgtccgacacgcgtccgtgtcagtgtcagtgtccgacaccgacacgacacccgtattacgttctatattttggacattacagatatctacgtgtccgtgtcgtgtccggtgtccatgtcggtgcttcatattatatgataacgaaagaactcaagagaagccaaaatttactaacttctcaatcattacaagagcgctactcctaataattgtatccctgatttagtaaaatttaatatgacaatcaaatggcactacaggcttataatactagtaaacgctttctcagtttggaaagccagaaattagcaaaagaaacccaaatttattttgccatggccacacgttacattacaagtaatttacataccagtggaacactggtgatgaattcaaatatcacacgtgatccaaagtggttcttgaaactcacccttcaacttatcccaatcctgacctccttcgccatcatcttctctaggagcacacagcgccaaatccccatggtgccacgtgggcgtcccattctcata

SEQ ID NO: 9949 - DNA, 1038 bp, Glycine max
  Gm_smallRNAprecursor_2782
tcatggcttcattccttaggtgctgaagcactttaacttatgaaagaagacacattcaatgtgtgtgattatcaattataatgtgtgtggtgaaacaaataaacgacattagttgaacctaggtatttgacttgagtaatgaggagcaatttcgggagacaatgtgcaatgagaaagccaagggtaagagagcacacagatgagaacataccggtttggcaaactcgtgtgtttggtttactgttgggaggcccccaaacggtcgtcaatctaaagttgaaccaaacacactcagtcttcaaggaacagccttagagagaagccttggaatgtgttcttgacatcacaatgactgggatcaaagaaatgtgaaaaaacgcaggtaagggggtacgacaaaattaatggtttattctacaaataaaaaaatccctatataattagtattgttgtgggtgaatatgatctatgaagcacggacacttcagccctttgccgtgtccggtgtccgacacgcgtccgtgtcagtgtcagtgtccgacaccgacacgacacccgtattacgttctatattttggacattacagatatctacgtgtccgtgtcgtgtccggtgtccatgtcggtgcttcatattatatgataacgaaagaactcaagagaagccaaaatttactaacttctcaatcattacaagagcgctactcctaataattgtatccctgatttagtaaaatttaatatgacaatcaaatggcactacaggcttataatactagtaaacgctttctcagtttggaaagccagaaattagcaaaagaaacccaaatttattttgccatggccacacgttacattacaagtaatttacataccagtggaacactggtgatgaattcaaatatcacacgtgatccaaagtggttcttgaaactcacccttcaacttatcccaatcctgacctccttcgccatcatcttctctaggagcacacagcgccaaatccccatggtgccacgtgggcgtcccattctcata

SEQ ID NO: 9950 - DNA, 1060 bp, Glycine max
  Gm_smallRNAprecursor_2783
aacttatgaaagaagacacattcaatgtgtgtgattatcaattataatgtgtgtggtgaaacaaataaacgacattagttgaacctaggtatttgacttgagtaatgaggagcaatttcgggagacaatgtgcaatgagaaagccaagggtaagagagcacacagatgagaacataccggtttggcaaactcgtgtgtttggtttactgttgggaggcccccaaacggtcgtcaatctaaagttgaaccaaacacactcagtcttcaaggaacagccttagagagaagccttggaatgtgttcttgacatcacaatgactgggatcaaagaaatgtgaaaaaacgcaggtaagggggtacgacaaaattaatggtttattctacaaataaaaaaatccctatataattagtattgttgtgggtgaatatgatctatgaagcacggacacttcagccctttgccgtgtccggtgtccgacacgcgtccgtgtcagtgtcagtgtccgacaccgacacgacacccgtattacgttctatattttggacattacagatatctacgtgtccgtgtcgtgtccggtgtccatgtcggtgcttcatattatatgataacgaaagaactcaagagaagccaaaatttactaacttctcaatcattacaagagcgctactcctaataattgtatccctgatttagtaaaatttaatatgacaatcaaatggcactacaggcttataatactagtaaacgctttctcagtttggaaagccagaaattagcaaaagaaacccaaatttattttgccatggccacacgttacattacaagtaatttacataccagtggaacactggtgatgaattcaaatatcacacgtgatccaaagtggttcttgaaactcacccttcaacttatcccaatcctgacctccttcgccatcatcttctctaggagcacacagcgccaaatccccatggtgccacgtgggcgtcccattctcatacgcattacacgtcagcctcctcaacccactcccatccaacctcaccacatacaaat

SEQ ID NO: 9951 - DNA, 1071 bp, Glycine max
  Gm_smallRNAprecursor_2784
aacttatgaaagaagacacattcaatgtgtgtgattatcaattataatgtgtgtggtgaaacaaataaacgacattagttgaacctaggtatttgacttgagtaatgaggagcaatttcgggagacaatgtgcaatgagaaagccaagggtaagagagcacacagatgagaacataccggtttggcaaactcgtgtgtttggtttactgttgggaggcccccaaacggtcgtcaatctaaagttgaaccaaacacactcagtcttcaaggaacagccttagagagaagccttggaatgtgttcttgacatcacaatgactgggatcaaagaaatgtgaaaaaacgcaggtaagggggtacgacaaaattaatggtttattctacaaataaaaaaatccctatataattagtattgttgtgggtgaatatgatctatgaagcacggacacttcagccctttgccgtgtccggtgtccgacacgcgtccgtgtcagtgtcagtgtccgacaccgacacgacacccgtattacgttctatattttggacattacagatatctacgtgtccgtgtcgtgtccggtgtccatgtcggtgcttcatattatatgataacgaaagaactcaagagaagccaaaatttactaacttctcaatcattacaagagcgctactcctaataattgtatccctgatttagtaaaatttaatatgacaatcaaatggcactacaggcttataatactagtaaacgctttctcagtttggaaagccagaaattagcaaaagaaacccaaatttattttgccatggccacacgttacattacaagtaatttacataccagtggaacactggtgatgaattcaaatatcacacgtgatccaaagtggttcttgaaactcacccttcaacttatcccaatcctgacctccttcgccatcatcttctctaggagcacacagcgccaaatccccatggtgccacgtgggcgtcccattctcatacgcattacacgtcagcctcctcaacccactcccatccaacctcaccacatacaaatccccatacggc

SEQ ID NO: 9952 - DNA, 1241 bp, Glycine max
  Gm_smallRNAprecursor_2785
gttttgtaacagttccggtaaacattaccgatactgtagaaacagtaaaaattgggtctatttaaaggagtcctcgtcccctttgtgaggcaccctttgagatagtctcagaatcaggttttagagagagaagctctgcctagggaaaaactctttgtaagcttttctttcggtttcaataaatttcaagttctatttttcatatctcccttctcccctcaccgatcctgtgcggctctgccgccgcttcggtttctttgttttcaaaaacctgggtttgtaagccgtttcggtgtgcccttgatatctgctttacaagtttataattcttacgtttaattttatcatactgcattcttacttcctatctggtatcagagcctgatggggaagtaggaatactgtccataaggacatatgttaacgaattttatggatctgaaactaaaagttttgtatagtacatttaatattttactttgatttgtacagtaagtgtttgaacagtacttcctggaagtacagcagtctaatattttagttgaatggtactgtagcagtaagacccgtgctggataaagggcagtaaggctaaggtgtactgtttaaccaaaatatcaagacataatacactggtggctataggattgccgttcaaactatttttcaaaaaaagaaaagagtttttcttaaaaataattcagatccagaaaaattttgtgacatacttacttacagagatatttctatggaaccaaatgagggcaaagatattagagaatatcataatcatgtctagactcttacgatctttttctcgtatctcttttcactcaaactcctccttatcatcttcttcaagaaactccaatctattaaatgatcaagacaaccagacccaagaggtcgccccaaaacacaatctcttcgatgaggaagtccgattcgaagatatcaatcaaaatatggatgactggaacattccagaaatccctcaggatcaactatacgttcctgagacaataaaagacaaacacaactttgattacataatcaaaacagtagaaaacaatattcctctaggacaagaagtaggggaagaatttcatttactttcaaaaaattcaatttatgaacatagccgtaagtataaatatctacacatcggttgtgtacaagtagccatcaagcccttaattgatatgggcatagatgcagcagttttaatgtgtctaagagac

SEQ ID NO: 9953 - DNA, 1182 bp, Glycine max
  Gm_smallRNAprecursor_2786
aaacggctcaaaattaaaaattaattttaagctatcaaatgcaatcattgaaaaccaaggtcttaggatcaacacaaactttcttctggtaaaaaaccttaagaatgaagtaatcttaggaacgcccttcattagagccctatttcccatccaaatatctaatgaaggaataaccacaaattatttaggaagaaagattatatttaatttttctactaaaccaatttccagaaatataaatttcatagaaaataggattaatcaaattaacttcttaaaagaagaagtatcttttaataatattcagatacaactaggaaaaccccaagtaaaagataaaattcaatctttactaaatcatattgaatcaactgtctgttctgattttccacatgcattttgggacagaaagaaacatattgttgatctcccctatgagaaagactttagggaaaaacaaattcccacaaaagccagaccgatccaaaatgaatgaagaacttcttcaatactgtcaaaaggaaatcaaggatttgcttgataaaggcctaatccggaaaagcaaaagcccatggtcttgtgcggctttttatgtcaacaaacaatctgagattgagcgtggaacaccccgcttagtcataaattacaaaccactaaatcaagcattacaatggattagatatcctattccaaacaaaagagatttgcttaacagattaaattctgcaaagatattttcaaagtttgatatgaaatctggattttggcaaatccaaatccaagaatcagataggtacaaaacagcgtttactgtacctttcgggcaatatgagtggaacgtaatgccattcggactgaagaatgccccttgagaatttcaaaaaattatgaatgatatttttaatccctattcaaaatttgtcattgtctacatagatgatgttttaatcttttcccaaaacattgaccagcatttcaaacatctccaaactttcatccatatcatcaaacaaaatggtttggcagtctccaaatcaaaaatcaatcttttccaaacacgaattcgattccttggtcacaatatttatcaaggtacaattgttccaatcgaaaggtcaattgagtttgctagcaaattccccaaccaaatcttagacaaaacccagttacaaagatttctag

SEQ ID NO: 9954 - DNA, 1234 bp, Glycine max
  Gm_smallRNAprecursor_2787
cagaaagaaacatattgttgatctcccctatgagaaagactttagggaaaaacaaattcccacaaaagccagaccgatccaaaatgaatgaagaacttcttcaatactgtcaaaaggaaatcaaggatttgcttgataaaggcctaatccggaaaagcaaaagcccatggtcttgtgcggctttttatgtcaacaaacaatctgagattgagcgtggaacaccccgcttagtcataaattacaaaccactaaatcaagcattacaatggattagatatcctattccaaacaaaagagatttgcttaacagattaaattctgcaaagatattttcaaagtttgatatgaaatctggattttggcaaatccaaatccaagaatcagataggtacaaaacagcgtttactgtacctttcgggcaatatgagtggaacgtaatgccattcggactgaagaatgccccttgagaatttcaaaaaattatgaatgatatttttaatccctattcaaaatttgtcattgtctacatagatgatgttttaatcttttcccaaaacattgaccagcatttcaaacatctccaaactttcatccatatcatcaaacaaaatggtttggcagtctccaaatcaaaaatcaatcttttccaaacacgaattcgattccttggtcacaatatttatcaaggtacaattgttccaatcgaaaggtcaattgagtttgctagcaaattccccaaccaaatcttagacaaaacccagttacaaagatttctaggttgtctaaattacgtaggtgaatttgtcccctacttaaacaatattgtcaaaccattgcatggtaggctaaagaaaaacctgcctccttggtctgacctccatacccaaacagttaaagaaatcaaagtcaaagtccaatccataaaatgtctgtatcttcccattccacaggcattcaaaattgtcgaaactgatgcatcagacatcggctacggtggcatcctcaaacaacaagtacatggtcaagaacatgtcatcgcatatacttcaaaacactggaatcctgcacaattaaagtatccaactgttaaaaaagaagttttagcaattgttttgtgcatttccaaatttcaatcggatttattaaatcaaaaatttttagtaagagttgactgcaaatcagccaaagatattttacagaaggatgtaaaaaacgtggaacacgcatcccgcga

SEQ ID NO: 9955 - DNA, 1157 bp, Glycine max
  Gm_smallRNAprecursor_2788
cctattccaaacaaaagagatttgcttaacagattaaattctgcaaagatattttcaaagtttgatatgaaatctggattttggcaaatccaaatccaagaatcagataggtacaaaacagcgtttactgtacctttcgggcaatatgagtggaacgtaatgccattcggactgaagaatgccccttgagaatttcaaaaaattatgaatgatatttttaatccctattcaaaatttgtcattgtctacatagatgatgttttaatcttttcccaaaacattgaccagcatttcaaacatctccaaactttcatccatatcatcaaacaaaatggtttggcagtctccaaatcaaaaatcaatcttttccaaacacgaattcgattccttggtcacaatatttatcaaggtacaattgttccaatcgaaaggtcaattgagtttgctagcaaattccccaaccaaatcttagacaaaacccagttacaaagatttctaggttgtctaaattacgtaggtgaatttgtcccctacttaaacaatattgtcaaaccattgcatggtaggctaaagaaaaacctgcctccttggtctgacctccatacccaaacagttaaagaaatcaaagtcaaagtccaatccataaaatgtctgtatcttcccattccacaggcattcaaaattgtcgaaactgatgcatcagacatcggctacggtggcatcctcaaacaacaagtacatggtcaagaacatgtcatcgcatatacttcaaaacactggaatcctgcacaattaaagtatccaactgttaaaaaagaagttttagcaattgttttgtgcatttccaaatttcaatcggatttattaaatcaaaaatttttagtaagagttgactgcaaatcagccaaagatattttacagaaggatgtaaaaaacgtggaacacgcatcccgcgagtctcgcgtcgccctcccgccgaagggtaggttgcgacaagaatatatcaagggctcttccaactctctacctgactacctcacccgtgaatttttacagaaaattcccgatgcctcctaaggtgtctagttcctccggtagaggaggaagatccagtacgaaaggtaaagaagttctactggctctaccagagccaataa

SEQ ID NO: 9956 - DNA, 1038 bp, Glycine max
  Gm_smallRNAprecursor_2789
tacctttcgggcaatatgagtggaacgtaatgccattcggactgaagaatgccccttgagaatttcaaaaaattatgaatgatatttttaatccctattcaaaatttgtcattgtctacatagatgatgttttaatcttttcccaaaacattgaccagcatttcaaacatctccaaactttcatccatatcatcaaacaaaatggtttggcagtctccaaatcaaaaatcaatcttttccaaacacgaattcgattccttggtcacaatatttatcaaggtacaattgttccaatcgaaaggtcaattgagtttgctagcaaattccccaaccaaatcttagacaaaacccagttacaaagatttctaggttgtctaaattacgtaggtgaatttgtcccctacttaaacaatattgtcaaaccattgcatggtaggctaaagaaaaacctgcctccttggtctgacctccatacccaaacagttaaagaaatcaaagtcaaagtccaatccataaaatgtctgtatcttcccattccacaggcattcaaaattgtcgaaactgatgcatcagacatcggctacggtggcatcctcaaacaacaagtacatggtcaagaacatgtcatcgcatatacttcaaaacactggaatcctgcacaattaaagtatccaactgttaaaaaagaagttttagcaattgttttgtgcatttccaaatttcaatcggatttattaaatcaaaaatttttagtaagagttgactgcaaatcagccaaagatattttacagaaggatgtaaaaaacgtggaacacgcatcccgcgagtctcgcgtcgccctcccgccgaagggtaggttgcgacaagaatatatcaagggctcttccaactctctacctgactacctcacccgtgaatttttacagaaaattcccgatgcctcctaaggtgtctagttcctccggtagaggaggaagatccagtacgaaaggtaaagaagttctactggctctaccagagccaataaccaaaaaggca

SEQ ID NO: 9957 - DNA, 1131 bp, Glycine max
  Gm_smallRNAprecursor_2790
caatgttttacaaatggaaccagaatattgggacaagaatcctatcaaagcaaccgccaaagtattcccccagggattccattacaggccaatagccgcaaacaaaacccgcaaattctacgaattcatcctaatagatacaaactcagtatctattaaacacttcaaagaccccaatgatccaaatttaaatacccattccacaatccaaatcctgaaggttatgcagccacgacattatggctcaaacttaaaccaacccaaaaaattctctgcaccatttgatcctgcagggtataattattgggattacgttgacgcatggacaaatgtgttctggcatcaaaatagtaagttcaagcattcatggctgatttacttcaaaaataatactgcatataattttccaaattggttcctccaatggtggaactacttcggaccaattccacaaatatttccagaagaagtccaacagggattcgaacaattcaacaagctctataatagcaaggaatcacgaattccggcagatttaaagtatttttccagttttgccttgtcatcgatcttttcatggcaatacagatacagaaaaactgaaaacaacaagcaatatccaccgttacagagacacgcctttgtaaaatggtggtcacaattcgatacttcaaaggctgctccagattaagtcaagaactggttccagagcaatcctgagttccttaaacctactgatccggagacatctttgtttctaaatcagaagtcgcaactggcagcattcttagcaagctcaaaatctaaagaaagtcttgctcagaatctcaaagaagttctccaactacttcaacaggaagtggaagaagaaccttccaagaaggttgctgaatcatcagagactaatgatgaccaagacgatgatccattctaccagaatgaagatgactgttttggtatatcattggacgacgattaattagttgtaataatcatgaattattgtaactaatttgtcagtttcttttaaataatgtaatttgtaaaaatttttgtaacagttctggtaaacattaccgatactgtagaaacagtaaaaattgggtctatttaaaggagtcctcgtcccct

SEQ ID NO: 9958 - DNA, 1131 bp, Glycine max; identical to SEQ ID NO: 9957
  Gm_smallRNAprecursor_2791

SEQ ID NO: 9959 - DNA, 1121 bp, Glycine max
  Gm_smallRNAprecursor_2792
cattccacaatccaaatcctgaaggttatgcagccacgacattatggctcaaacttaaaccaacccaaaaaattctctgcaccatttgatcctgcagggtataattattgggattacgttgacgcatggacaaatgtgttctggcatcaaaatagtaagttcaagcattcatggctgatttacttcaaaaataatactgcatataattttccaaattggttcctccaatggtggaactacttcggaccaattccacaaatatttccagaagaagtccaacagggattcgaacaattcaacaagctctataatagcaaggaatcacgaattccggcagatttaaagtatttttccagttttgccttgtcatcgatcttttcatggcaatacagatacagaaaaactgaaaacaacaagcaatatccaccgttacagagacacgcctttgtaaaatggtggtcacaattcgatacttcaaaggctgctccagattaagtcaagaactggttccagagcaatcctgagttccttaaacctactgatccggagacatctttgtttctaaatcagaagtcgcaactggcagcattcttagcaagctcaaaatctaaagaaagtcttgctcagaatctcaaagaagttctccaactacttcaacaggaagtggaagaagaaccttccaagaaggttgctgaatcatcagagactaatgatgaccaagacgatgatccattctaccagaatgaagatgactgttttggtatatcattggacgacgattaattagttgtaataatcatgaattattgtaactaatttgtcagtttcttttaaataatgtaatttgtaaaaatttttgtaacagttctggtaaacattaccgatactgtagaaacagtaaaaattgggtctatttaaaggagtcctcgtcccctttgtgaggcaccctttgagatagtcttagaatcaggttttagagagagaagctctgcctagggaaaaactctttatatatatatatacagcaggttacctcgcctgggcgagcaactcctgcaccaaaaatattgaaacgagggaggggaacgtttttgcattcaaaaactgcttcccccctcatt

SEQ ID NO: 9960 - DNA, 1048 bp, Glycine max
  Gm_smallRNAprecursor_2793
attccacaatccaaatcctgaaggttatgcagccacgacattatggctcaaacttaaaccaacccaaaaaattctctgcaccatttgatcctgcagggtataattattgggattacgttgacgcatggacaaatgtgttctggcatcaaaatagtaagttcaagcattcatggctgatttacttcaaaaataatactgcatataattttccaaattggttcctccaatggtggaactacttcggaccaattccacaaatatttccagaagaagtccaacagggattcgaacaattcaacaagctctataatagcaaggaatcacgaattccggcagatttaaagtatttttccagttttgccttgtcatcgatcttttcatggcaatacagatacagaaaaactgaaaacaacaagcaatatccaccgttacagagacacgcctttgtaaaatggtggtcacaattcgatacttcaaaggctgctccagattaagtcaagaactggttccagagcaatcctgagttccttaaacctactgatccggagacatctttgtttctaaatcagaagtcgcaactggcagcattcttagcaagctcaaaatctaaagaaagtcttgctcagaatctcaaagaagttctccaactacttcaacaggaagtggaagaagaaccttccaagaaggttgctgaatcatcagagactaatgatgaccaagacgatgatccattctaccagaatgaagatgactgttttggtatatcattggacgacgattaattagttgtaataatcatgaattattgtaactaatttgtcagtttcttttaaataatgtaatttgtaaaaatttttgtaacagttctggtaaacattaccgatactgtagaaacagtaaaaattgggtctatttaaaggagtcctcgtcccctttgtgaggcaccctttgagatagtcttagaatcaggttttagagagagaagctctgcctagggaaaaactctttatatatatatatacagcaggttacctcgcctgggcgagca

SEQ ID NO: 9961 - DNA, 1048 bp, Glycine max; identical to SEQ ID NO: 9960
  Gm_smallRNAprecursor_2794

SEQ ID NO: 9962 - DNA, 1080 bp, Glycine max
  Gm_smallRNAprecursor_2795
attccacaatccaaatcctgaaggttatgcagccacgacattatggctcaaacttaaaccaacccaaaaaattctctgcaccatttgatcctgcagggtataattattgggattacgttgacgcatggacaaatgtgttctggcatcaaaatagtaagttcaagcattcatggctgatttacttcaaaaataatactgcatataattttccaaattggttcctccaatggtggaactacttcggaccaattccacaaatatttccagaagaagtccaacagggattcgaacaattcaacaagctctataatagcaaggaatcacgaattccggcagatttaaagtatttttccagttttgccttgtcatcgatcttttcatggcaatacagatacagaaaaactgaaaacaacaagcaatatccaccgttacagagacacgcctttgtaaaatggtggtcacaattcgatacttcaaaggctgctccagattaagtcaagaactggttccagagcaatcctgagttccttaaacctactgatccggagacatctttgtttctaaatcagaagtcgcaactggcagcattcttagcaagctcaaaatctaaagaaagtcttgctcagaatctcaaagaagttctccaactacttcaacaggaagtggaagaagaaccttccaagaaggttgctgaatcatcagagactaatgatgaccaagacgatgatccattctaccagaatgaagatgactgttttggtatatcattggacgacgattaattagttgtaataatcatgaattattgtaactaatttgtcagtttcttttaaataatgtaatttgtaaaaatttttgtaacagttctggtaaacattaccgatactgtagaaacagtaaaaattgggtctatttaaaggagtcctcgtcccctttgtgaggcaccctttgagatagtcttagaatcaggttttagagagagaagctctgcctagggaaaaactctttatatatatatatacagcaggttacctcgcctgggcgagcaactcctgcaccaaaaatattgaaacgagggag

SEQ ID NO: 9963 - DNA, 1120 bp, Glycine max
  Gm_smallRNAprecursor_2796
attccacaatccaaatcctgaaggttatgcagccacgacattatggctcaaacttaaaccaacccaaaaaattctctgcaccatttgatcctgcagggtataattattgggattacgttgacgcatggacaaatgtgttctggcatcaaaatagtaagttcaagcattcatggctgatttacttcaaaaataatactgcatataattttccaaattggttcctccaatggtggaactacttcggaccaattccacaaatatttccagaagaagtccaacagggattcgaacaattcaacaagctctataatagcaaggaatcacgaattccggcagatttaaagtatttttccagttttgccttgtcatcgatcttttcatggcaatacagatacagaaaaactgaaaacaacaagcaatatccaccgttacagagacacgcctttgtaaaatggtggtcacaattcgatacttcaaaggctgctccagattaagtcaagaactggttccagagcaatcctgagttccttaaacctactgatccggagacatctttgtttctaaatcagaagtcgcaactggcagcattcttagcaagctcaaaatctaaagaaagtcttgctcagaatctcaaagaagttctccaactacttcaacaggaagtggaagaagaaccttccaagaaggttgctgaatcatcagagactaatgatgaccaagacgatgatccattctaccagaatgaagatgactgttttggtatatcattggacgacgattaattagttgtaataatcatgaattattgtaactaatttgtcagtttcttttaaataatgtaatttgtaaaaatttttgtaacagttctggtaaacattaccgatactgtagaaacagtaaaaattgggtctatttaaaggagtcctcgtcccctttgtgaggcaccctttgagatagtcttagaatcaggttttagagagagaagctctgcctagggaaaaactctttatatatatatatacagcaggttacctcgcctgggcgagcaactcctgcaccaaaaatattgaaacgagggaggggaacgtttttgcattcaaaaactgcttcccccctcatt

SEQ ID NO: 9964 - DNA, 1070 bp, Glycine max
  Gm_smallRNAprecursor_2797
tcaaacttaaaccaacccaaaaaattctctgcaccatttgatcctgcagggtataattattgggattacgttgacgcatggacaaatgtgttctggcatcaaaatagtaagttcaagcattcatggctgatttacttcaaaaataatactgcatataattttccaaattggttcctccaatggtggaactacttcggaccaattccacaaatatttccagaagaagtccaacagggattcgaacaattcaacaagctctataatagcaaggaatcacgaattccggcagatttaaagtatttttccagttttgccttgtcatcgatcttttcatggcaatacagatacagaaaaactgaaaacaacaagcaatatccaccgttacagagacacgcctttgtaaaatggtggtcacaattcgatacttcaaaggctgctccagattaagtcaagaactggttccagagcaatcctgagttccttaaacctactgatccggagacatctttgtttctaaatcagaagtcgcaactggcagcattcttagcaagctcaaaatctaaagaaagtcttgctcagaatctcaaagaagttctccaactacttcaacaggaagtggaagaagaaccttccaagaaggttgctgaatcatcagagactaatgatgaccaagacgatgatccattctaccagaatgaagatgactgttttggtatatcattggacgacgattaattagttgtaataatcatgaattattgtaactaatttgtcagtttcttttaaataatgtaatttgtaaaaatttttgtaacagttctggtaaacattaccgatactgtagaaacagtaaaaattgggtctatttaaaggagtcctcgtcccctttgtgaggcaccctttgagatagtcttagaatcaggttttagagagagaagctctgcctagggaaaaactctttatatatatatatacagcaggttacctcgcctgggcgagcaactcctgcaccaaaaatattgaaacgagggaggggaacgtttttgcattcaaaaactgcttcccccctc

SEQ ID NO: 9965 - DNA, 1071 bp, Glycine max
  Gm_smallRNAprecursor_2798
tcaaacttaaaccaacccaaaaaattctctgcaccatttgatcctgcagggtataattattgggattacgttgacgcatggacaaatgtgttctggcatcaaaatagtaagttcaagcattcatggctgatttacttcaaaaataatactgcatataattttccaaattggttcctccaatggtggaactacttcggaccaattccacaaatatttccagaagaagtccaacagggattcgaacaattcaacaagctctataatagcaaggaatcacgaattccggcagatttaaagtatttttccagttttgccttgtcatcgatcttttcatggcaatacagatacagaaaaactgaaaacaacaagcaatatccaccgttacagagacacgcctttgtaaaatggtggtcacaattcgatacttcaaaggctgctccagattaagtcaagaactggttccagagcaatcctgagttccttaaacctactgatccggagacatctttgtttctaaatcagaagtcgcaactggcagcattcttagcaagctcaaaatctaaagaaagtcttgctcagaatctcaaagaagttctccaactacttcaacaggaagtggaagaagaaccttccaagaaggttgctgaatcatcagagactaatgatgaccaagacgatgatccattctaccagaatgaagatgactgttttggtatatcattggacgacgattaattagttgtaataatcatgaattattgtaactaatttgtcagtttcttttaaataatgtaatttgtaaaaatttttgtaacagttctggtaaacattaccgatactgtagaaacagtaaaaattgggtctatttaaaggagtcctcgtcccctttgtgaggcaccctttgagatagtcttagaatcaggttttagagagagaagctctgcctagggaaaaactctttatatatatatatacagcaggttacctcgcctgggcgagcaactcctgcaccaaaaatattgaaacgagggaggggaacgtttttgcattcaaaaactgcttcccccctca

SEQ ID NO: 9966 - DNA, 1041 bp, Glycine max
  Gm_smallRNAprecursor_2799
tgcaccatttgatcctgcagggtataattattgggattacgttgacgcatggacaaatgtgttctggcatcaaaatagtaagttcaagcattcatggctgatttacttcaaaaataatactgcatataattttccaaattggttcctccaatggtggaactacttcggaccaattccacaaatatttccagaagaagtccaacagggattcgaacaattcaacaagctctataatagcaaggaatcacgaattccggcagatttaaagtatttttccagttttgccttgtcatcgatcttttcatggcaatacagatacagaaaaactgaaaacaacaagcaatatccaccgttacagagacacgcctttgtaaaatggtggtcacaattcgatacttcaaaggctgctccagattaagtcaagaactggttccagagcaatcctgagttccttaaacctactgatccggagacatctttgtttctaaatcagaagtcgcaactggcagcattcttagcaagctcaaaatctaaagaaagtcttgctcagaatctcaaagaagttctccaactacttcaacaggaagtggaagaagaaccttccaagaaggttgctgaatcatcagagactaatgatgaccaagacgatgatccattctaccagaatgaagatgactgttttggtatatcattggacgacgattaattagttgtaataatcatgaattattgtaactaatttgtcagtttcttttaaataatgtaatttgtaaaaatttttgtaacagttctggtaaacattaccgatactgtagaaacagtaaaaattgggtctatttaaaggagtcctcgtcccctttgtgaggcaccctttgagatagtcttagaatcaggttttagagagagaagctctgcctagggaaaaactctttatatatatatatacagcaggttacctcgcctgggcgagcaactcctgcaccaaaaatattgaaacgagggaggggaacgtttttgcattcaaaaactgcttcccccctc

SEQ ID NO: 9967 - DNA, 1172 bp, Glycine max
  Gm_smallRNAprecursor_2800
gacaaatgtgttctggcatcaaaatagtaagttcaagcattcatggctgatttacttcaaaaataatactgcatataattttccaaattggttcctccaatggtggaactacttcggaccaattccacaaatatttccagaagaagtccaacagggattcgaacaattcaacaagctctataatagcaaggaatcacgaattccggcagatttaaagtatttttccagttttgccttgtcatcgatcttttcatggcaatacagatacagaaaaactgaaaacaacaagcaatatccaccgttacagagacacgcctttgtaaaatggtggtcacaattcgatacttcaaaggctgctccagattaagtcaagaactggttccagagcaatcctgagttccttaaacctactgatccggagacatctttgtttctaaatcagaagtcgcaactggcagcattcttagcaagctcaaaatctaaagaaagtcttgctcagaatctcaaagaagttctccaactacttcaacaggaagtggaagaagaaccttccaagaaggttgctgaatcatcagagactaatgatgaccaagacgatgatccattctaccagaatgaagatgactgttttggtatatcattggacgacgattaattagttgtaataatcatgaattattgtaactaatttgtcagtttcttttaaataatgtaatttgtaaaaatttttgtaacagttctggtaaacattaccgatactgtagaaacagtaaaaattgggtctatttaaaggagtcctcgtcccctttgtgaggcaccctttgagatagtcttagaatcaggttttagagagagaagctctgcctagggaaaaactctttatatatatatatacagcaggttacctcgcctgggcgagcaactcctgcaccaaaaatattgaaacgagggaggggaacgtttttgcattcaaaaactgcttcccccctcatttcaaaagcaatactcacgggatttacgagtttgcagccctagggtcatcatttttcgcattttttgattccattttgcgctttaattcgtcaccaacaagtaagtattccatccttaagctttctagctttccattggtgtattttgatcttcctttggtgctctagattgtgggaatg

SEQ ID NO: 9968 - DNA, 1157 bp, Glycine max
  Gm_smallRNAprecursor_2801
aggcaacaatgatataacagttgttgtgtaaggctcctacacaaactgcatataacaacatagttgtcagcattttaataaaataacacatattattttttattttacaaatacaataccatgttcttaccttatgacatttcataatatcaaacttgcgacgaaaaactctcacatcatcattgccgatatgttgatttccacgtcgcagccacctacaaagattaaaatttaatataccctaaaaccatttattcttttgaaatgaaacacgcttttaaaaatgactaacttgtgcccgagtggtttattttatacttgggaaggagtcctctttggagccaaggttatacatcgttctcatgcccacatttgtagtaagatgcacatacctttgattgatttagttttataattggtggcactgcacatctctctatatagaaaagcaagtgcggcaagtccccatgcatatgtgctaccgtctccaaagtcacgtaaaaattgaaggtaccttagcgaaactttgttactgcttttgtcaacgaacaagacacctccaatgaatcttagtatccatgctcgggcaaaccttcgtacatgttcttcgtcgtcgtggttatttatttgtgcaaaatggtgagccagccaacttaatttaaccacactacctttaatttcaccttcttgtagtctaactcccaataattcctcacataaatcagcctaattaagatttgttggaccgattaatggtaaaccatccacacgtagacctaacaatacagagacgtcttgaagagtaatagtacactctccgcatctcatgtgaaacatatgtgtttccggcctccatctttctatcaaagcactaattaatgagacatttatttttaagtatctcatcttcataatccagtaaaaaccagattgtcgaaggaaaggaaaaatttgctctggtatttcttcttccccttgataagtggggacagctcttctgatgtgtaatttgcggtcttcttccccattccaaacatgttctgaaatatgcttagcttgcgtacataatacgtcactatcgatcgggccaaacttaattttaatatttgatggacatgacgacgaagatgtcattgatactgcaaaataaaatataa

SEQ ID NO: 9969 - DNA, 1158 bp, Glycine max
  Gm_smallRNAprecursor_2802
aggcaacaatgatataacagttgttgtgtaaggctcctacacaaactgcatataacaacatagttgtcagcattttaataaaataacacatattattttttattttacaaatacaataccatgttcttaccttatgacatttcataatatcaaacttgcgacgaaaaactctcacatcatcattgccgatatgttgatttccacgtcgcagccacctacaaagattaaaatttaatataccctaaaaccatttattcttttgaaatgaaacacgcttttaaaaatgactaacttgtgcccgagtggtttattttatacttgggaaggagtcctctttggagccaaggttatacatcgttctcatgcccacatttgtagtaagatgcacatacctttgattgatttagttttataattggtggcactgcacatctctctatatagaaaagcaagtgcggcaagtccccatgcatatgtgctaccgtctccaaagtcacgtaaaaattgaaggtaccttagcgaaactttgttactgcttttgtcaacgaacaagacacctccaatgaatcttagtatccatgctcgggcaaaccttcgtacatgttcttcgtcgtcgtggttatttatttgtgcaaaatggtgagccagccaacttaatttaaccacactacctttaatttcaccttcttgtagtctaactcccaataattcctcacataaatcagcctaattaagatttgttggaccgattaatggtaaaccatccacacgtagacctaacaatacagagacgtcttgaagagtaatagtacactctccgcatctcatgtgaaacatatgtgtttccggcctccatctttctatcaaagcactaattaatgagacatttatttttaagtatctcatcttcataatccagtaaaaaccagattgtcgaaggaaaggaaaaatttgctctggtatttcttcttccccttgataagtggggacagctcttctgatgtgtaatttgcggtcttcttccccattccaaacatgttctgaaatatgcttagcttgcgtacataatacgtcactatcgatcgggccaaacttaattttaatatttgatggacatgacgacgaagatgtcattgatactgcaaaataaaatataat

SEQ ID NO: 9970 - DNA, 1155 bp, Glycine max
  Gm_smallRNAprecursor_2803
gcaacaatgatataacagttgttgtgtaaggctcctacacaaactgcatataacaacatagttgtcagcattttaataaaataacacatattattttttattttacaaatacaataccatgttcttaccttatgacatttcataatatcaaacttgcgacgaaaaactctcacatcatcattgccgatatgttgatttccacgtcgcagccacctacaaagattaaaatttaatataccctaaaaccatttattcttttgaaatgaaacacgcttttaaaaatgactaacttgtgcccgagtggtttattttatacttgggaaggagtcctctttggagccaaggttatacatcgttctcatgcccacatttgtagtaagatgcacatacctttgattgatttagttttataattggtggcactgcacatctctctatatagaaaagcaagtgcggcaagtccccatgcatatgtgctaccgtctccaaagtcacgtaaaaattgaaggtaccttagcgaaactttgttactgcttttgtcaacgaacaagacacctccaatgaatcttagtatccatgctcgggcaaaccttcgtacatgttcttcgtcgtcgtggttatttatttgtgcaaaatggtgagccagccaacttaatttaaccacactacctttaatttcaccttcttgtagtctaactcccaataattcctcacataaatcagcctaattaagatttgttggaccgattaatggtaaaccatccacacgtagacctaacaatacagagacgtcttgaagagtaatagtacactctccgcatctcatgtgaaacatatgtgtttccggcctccatctttctatcaaagcactaattaatgagacatttatttttaagtatctcatcttcataatccagtaaaaaccagattgtcgaaggaaaggaaaaatttgctctggtatttcttcttccccttgataagtggggacagctcttctgatgtgtaatttgcggtcttcttccccattccaaacatgttctgaaatatgcttagcttgcgtacataatacgtcactatcgatcgggccaaacttaattttaatatttgatggacatgacgacgaagatgtcattgatactgcaaaataaaatataa

SEQ ID NO: 9971 - DNA, 1036 bp, Glycine max
  Gm_smallRNAprecursor_2804
tgttcttaccttatgacatttcataatatcaaacttgcgacgaaaaactctcacatcatcattgccgatatgttgatttccacgtcgcagccacctacaaagattaaaatttaatataccctaaaaccatttattcttttgaaatgaaacacgcttttaaaaatgactaacttgtgcccgagtggtttattttatacttgggaaggagtcctctttggagccaaggttatacatcgttctcatgcccacatttgtagtaagatgcacatacctttgattgatttagttttataattggtggcactgcacatctctctatatagaaaagcaagtgcggcaagtccccatgcatatgtgctaccgtctccaaagtcacgtaaaaattgaaggtaccttagcgaaactttgttactgcttttgtcaacgaacaagacacctccaatgaatcttagtatccatgctcgggcaaaccttcgtacatgttcttcgtcgtcgtggttatttatttgtgcaaaatggtgagccagccaacttaatttaaccacactacctttaatttcaccttcttgtagtctaactcccaataattcctcacataaatcagcctaattaagatttgttggaccgattaatggtaaaccatccacacgtagacctaacaatacagagacgtcttgaagagtaatagtacactctccgcatctcatgtgaaacatatgtgtttccggcctccatctttctatcaaagcactaattaatgagacatttatttttaagtatctcatcttcataatccagtaaaaaccagattgtcgaaggaaaggaaaaatttgctctggtatttcttcttccccttgataagtggggacagctcttctgatgtgtaatttgcggtcttcttccccattccaaacatgttctgaaatatgcttagcttgcgtacataatacgtcactatcgatcgggccaaacttaattttaatatttgatggacatgacgacgaagatgtcattgatactgcaaaataaaatataa

SEQ ID NO: 9972 - DNA, 1037 bp, Glycine max
  Gm_smallRNAprecursor_2805
tgttcttaccttatgacatttcataatatcaaacttgcgacgaaaaactctcacatcatcattgccgatatgttgatttccacgtcgcagccacctacaaagattaaaatttaatataccctaaaaccatttattcttttgaaatgaaacacgcttttaaaaatgactaacttgtgcccgagtggtttattttatacttgggaaggagtcctctttggagccaaggttatacatcgttctcatgcccacatttgtagtaagatgcacatacctttgattgatttagttttataattggtggcactgcacatctctctatatagaaaagcaagtgcggcaagtccccatgcatatgtgctaccgtctccaaagtcacgtaaaaattgaaggtaccttagcgaaactttgttactgcttttgtcaacgaacaagacacctccaatgaatcttagtatccatgctcgggcaaaccttcgtacatgttcttcgtcgtcgtggttatttatttgtgcaaaatggtgagccagccaacttaatttaaccacactacctttaatttcaccttcttgtagtctaactcccaataattcctcacataaatcagcctaattaagatttgttggaccgattaatggtaaaccatccacacgtagacctaacaatacagagacgtcttgaagagtaatagtacactctccgcatctcatgtgaaacatatgtgtttccggcctccatctttctatcaaagcactaattaatgagacatttatttttaagtatctcatcttcataatccagtaaaaaccagattgtcgaaggaaaggaaaaatttgctctggtatttcttcttccccttgataagtggggacagctcttctgatgtgtaatttgcggtcttcttccccattccaaacatgttctgaaatatgcttagcttgcgtacataatacgtcactatcgatcgggccaaacttaattttaatatttgatggacatgacgacgaagatgtcattgatactgcaaaataaaatataat

SEQ ID NO: 9973 - DNA, 1038 bp, Glycine max
  Gm_smallRNAprecursor_2806
tgacacctctctttttctacccttatttcaaagtttttttttttaactttagcacttatggcacttttttttgcccttatttgcaatcttttttattttcttcttttttttatataagaatactttgggcttacaagcttctgaaggtgccctattgtgtgcccttgaaaggattcttgtcccagtattctggttccatttgtaagacattgaagaatttgtttttggaaataacaccccagacacggatacgattccttgggcacaatatataccaaggcacaatcatcccaatagaaagatcaatagagtttgccagcaaattccctgaccaaatcttggataagacccaattacaacgatttctggggtgcctaaattatgtaggagaatttgtcccctatctaaacaatattgtcaaaccattacatgataggctgaaaaagaatctgcctccttggtctgacctccatactcaaacagttaaagaaatcaaagtcaaagtccaatccataaaatgtctatatctccccattccacaggcattcaaaattgtcgaaactgatgcatcagacatcggttatggtggcatcctcaaacagcaagtttacatcctcaaacatcctcaaacaccggaaaattctatgaattcattctaatagatacaaactctgtatctattaaacatttcaaagaccccaaagatccaaatctaaacacccactccacaatccagatcctaaaggtgatgcagccacgacattatggctcaaacttaaaccaacccaaaaaattttatgcaccttttgaccctgcaggatatagttattgggattacattgacgcctggaccaatgtgttctggcatcaaaatagtaaattcaagcattcatggctaatttacttcaaaaataacaccgtgtataattttccaaattggttcctccaatggtggaactacttcagaccaattccacagatatttccacaagaagtccaacagggattccaacaattcagcaagctcttcaatagcaa

SEQ ID NO: 9974 - DNA, 1071 bp, Glycine max
  Gm_smallRNAprecursor_2807
aaccattacatgataggctgaaaaagaatctgcctccttggtctgacctccatactcaaacagttaaagaaatcaaagtcaaagtccaatccataaaatgtctatatctccccattccacaggcattcaaaattgtcgaaactgatgcatcagacatcggttatggtggcatcctcaaacagcaagtttacatcctcaaacatcctcaaacaccggaaaattctatgaattcattctaatagatacaaactctgtatctattaaacatttcaaagaccccaaagatccaaatctaaacacccactccacaatccagatcctaaaggtgatgcagccacgacattatggctcaaacttaaaccaacccaaaaaattttatgcaccttttgaccctgcaggatatagttattgggattacattgacgcctggaccaatgtgttctggcatcaaaatagtaaattcaagcattcatggctaatttacttcaaaaataacaccgtgtataattttccaaattggttcctccaatggtggaactacttcagaccaattccacagatatttccacaagaagtccaacagggattccaacaattcagcaagctcttcaatagcaaggaatcaagaatttcggcagatttaaagtacttttccagtttttccttgtcatggattttttcatggcaatacagatatggaaaaattgaaaatagcaaacagtatccaccattgtagagacatgcctttgtaaaatggtggtcacaattcgatacctcaaaggctgctccagaacaagtcaagaactggtttcagagcaaccctgagtttctcaaacctgctgatccagagacatctttgtttctgaatcagaagtctcaacttgcagcattcttggcaagctcaaaatctaaagagagtcttgctcagaatcttaaggaagttctccaactacttcaacaggaagaagaagaagaaccccccaagaaggaagccgaatcatccgaaaataatgatgaccaagaagatgatccattctaccagaatgaggatgactgttttggcatatcgtt

SEQ ID NO: 9975 - DNA, 1157 bp, Glycine max
  Gm_smallRNAprecursor_2808
gatccaaatctaaacacccactccacaatccagatcctaaaggtgatgcagccacgacattatggctcaaacttaaaccaacccaaaaaattttatgcaccttttgaccctgcaggatatagttattgggattacattgacgcctggaccaatgtgttctggcatcaaaatagtaaattcaagcattcatggctaatttacttcaaaaataacaccgtgtataattttccaaattggttcctccaatggtggaactacttcagaccaattccacagatatttccacaagaagtccaacagggattccaacaattcagcaagctcttcaatagcaaggaatcaagaatttcggcagatttaaagtacttttccagtttttccttgtcatggattttttcatggcaatacagatatggaaaaattgaaaatagcaaacagtatccaccattgtagagacatgcctttgtaaaatggtggtcacaattcgatacctcaaaggctgctccagaacaagtcaagaactggtttcagagcaaccctgagtttctcaaacctgctgatccagagacatctttgtttctgaatcagaagtctcaacttgcagcattcttggcaagctcaaaatctaaagagagtcttgctcagaatcttaaggaagttctccaactacttcaacaggaagaagaagaagaaccccccaagaaggaagccgaatcatccgaaaataatgatgaccaagaagatgatccattctaccagaatgaggatgactgttttggcatatcgttagacgatgattagttagttgtagtaatcacgaattattgtaactaattactcggtacccggtaataatgtaatttgtaacagttccggtaaacattaccgacactgtagatacagtgaaatcgtgggtctatttaaaggagtcctcgttccctttgtgaggcaccctttcagatagtctcataaccaggttttagagagagaagctctgcctagggaaaaactctttgtaagctttttcgattgaaataaattcaaagttctatttttacatctcccttctcccttcaccgatcctgtgcggctctgccgccgcttcggtttctttgttttcaaaaacctgggttttgtaagccggactccggtgtgcc

SEQ ID NO: 9976 - DNA, 1043 bp, Glycine max
  Gm_smallRNAprecursor_2809
tattaagttgatgtgtttaaacttggttattttgttgatatatgattatgactgaaatttatgaatgttttattaaaattatgttttgtgtatgttttaaaattatttatgtatgattttattttttcacgcactttggctttttgatgttgccaaatggggagagaaaaatgggtatttcagaaatcaagatattatatttactaagttttaaattaagcataaattcaaaaagaaagggggaaagagagatgagtgaacgataaaacaaatcttacatgtattctcttgatttcacgtttgtcatcatcaaaaagggggagattgtagaagcaaagcttccaagattattttgatgatgccaaagatttttaaagagatacattcaaacaagattaaaagaatcaaggcaaaattgcacttttggtccctcagtttatctccaatttcatatttggtcctcctataatttaattcacaaatttggtcccctagttttctaaatccctgcaaaattggtcctggaaacccgatttggacgttgaccgttaacctcagacgttgactgccacgtgtcaatgccatgtgtcaacgtctgagtggttccctgtaaaggcttcattttttgtaggtaaaattgtacttttagtcccccagttttactccaattttgattttggtctccttataatttaattcgcacatttggtcccccagttttataaatccctttataaattcagccaaatttcattactagagaagttgtatttcaaatttcaaacaaaaataccattgtcatacataggctgcttaagcaatcatatacacataataccgcatgggggagcaaaaaaagaaaaaaaaatagggggttattacagaacctgttaaagtaagagatcagaaaatttcacacccaggttgggattcatgcgccactttcccaagttgaacaaccccgaaagtgggagagagacaaagagtgatttttctctgggttccaagtgagtggaaaacttgcgatgaaaaagaagtgcgag

SEQ ID NO: 9977 - DNA, 1036 bp, Glycine max
  Gm_smallRNAprecursor_2810
tttggatattaattaaacgttaactacaattagtgtacacacacataaaatatatataagtagaacttttatttaaatcacttaccttaacaacaatccacctagcagcagccttggatttcggttgtggagtatcatcaagtcctttcaaagcactagtgttgaatatgagaaacattaaaatattgatgttgttgagttatgccaatgaaaatgtattgaaaacaatactgacctgttaattattcccttaaggtagttgtctggcctgttatgtaaagaacaaaattagacaactaggttttccttagggagaatgacaaccatttgctagtgtccattgcagtagagacgaatatgggttattgtagtagtatagattatttaaattcaattattgtgtttgacttacccattcaggtaatctccaaggtaaacatctcgttttgaactctgtatccaactcttgatgtaactttcggattcaaattatgattgcccagatctctgaatggactgtggctcgaggaatccatacacatcagaattccccgctcgcacacttgtctcagtcagatgattgtgttgttaagtgaaagttaattctgtatgaatttaaaacaattactttggtaattaatagtaatctaaaatgacttacaaaatccacaactgtataacagatatgctgacacattgaccaccgtgtgcaatttcagagagatcttcatgctttatataaaacgggaagttttgattaaacaccccgaatatggtagcatcccacataacctggagaggcttcaaaaacagttgtgggatggtgaatgtcatcaggtacaagggattatcgacctcttcatccgggctttctggaggttttgttggagacacagctgtctgttgataaaacatagttaattagcaagttttgattacagtgaacaaattaattgaaataaataaacatataatcagagcaaaatacatgttctgataaatgcttcacaagatgtgttggccaagcaaggaaggt

SEQ ID NO: 9978 - DNA, 1041 bp, Glycine max
  Gm_smallRNAprecursor_2811
tggatccctcataaagtcttcctagggcaactaggcgggaaggattttcttcaatgtatagcccgcatttgtctgagtcacccgttcctggatcgttccctaagggagcaacacaactctcctttgtgctggcacgaggacctgagggaccaacctctggctatggaggtagtgcaagcccctgtgattgcatctgagactgaaactgagactgcatctggctgaaggatgccatcatctttcgagtcactttttctgtgattgactcctccagttggttagctgttctaggtcttcaggaggcatggagaaagaactgcgagacgttcgtgaagccgatccaaagtattgttttatggtgacaccggctccaatagcacgaacacggccagggtgctctggtcgcccaatggcagcagtcaggatatcctgacgtccatgggggacgaacgatccctatgacgcctgctcgtccaaagaatcctgtaccgaacacatatttgtccaaggaattcacagaatacacaaagataattacaattattaattaaaaatgacttacaatcctgtcatctatttcctttgttgcctcggacgtcatctatccagttttcttcgtgcgagccatcttccatttcacgtggcgtctgatgcgagatggagggtcaatgatgccctcagtgcttccagactgggcagcttcttctagtcttttctttgtcttctcagccatgagcctttcttctaaatattcataacccccacgagacaatacatggggggcagtgttttgcttctgggaggcctgtgccttttttcgcacatcctgcaaaagtttaacattaatgaaaatgattattacaataaattataagaagtgattttgttgtggaaaacaactaaaatgacaaagtacatacctcccatgaggggtttctacgggtctgacaaaactgggtctatttctccttgctaatgccatatttttcacagacaatgtcgtccacaccgtccttgtcaactacaagtgcccatttccta

SEQ ID NO: 9979 - DNA, 1195 bp, Glycine max
  Gm_smallRNAprecursor_2812
ttttacatatgatatcagagcatctgttatgaaatttatgattcttcaagaatgatttaatttctcccaattatgcatgaaccctaattatgaaatttagggattttatttttactttccgctgctagtatgaaatcttatattgaagagggtatgaatgcgtaaaattatattattatgattgcgttcaattaagaaaaacttattatgtttgtagtactttgaattgtatatattaaatttgggaaaatatttcatatttatcgttttgtactatgtaatttaatttgatgataatgtctagagaaagacttttcctttaacatatattgaatggagaaagaaagtcattaacgctatttctgtttcgagtgttgctaggtgcacccagcattattgctggtgcacccaacattctttaaaaatggcaaaattatccttgccttctttctccctctacggatcaagttgatccgcaagttgatttttaagacttacagatcaagttgattcgtaagtcttttacggatcaagttgattcctaagtattgaatggagaaagaaagatccgtaagaagcttgcagcgagtgttgctaggtgcacccagcattattgctggtgcacccataagtcttaaaaatcaactagcggatcaacttgatctgtaagaagcttacggatcaagttgatttgtaaaagacttacggatcaagttgatccgtaagtcttaaaaatcaacttgtagatcaacttgatccgtaaaagacttatggatcaacttgatccgtaagtcttaaaaatctacttgcggatcaacttgatcgtaagaagcttgcggatcatctatatcaattgcggatcaactaatacctatgcggatcaactcattgcatatgcggatcaacctgaatgagctgggtgcacaaaaatatttttaaaaatacataggggtatttttgtcatttcatgttaagtgttgggtgcaccagcaataatgctaggtgcacctagcaacacccttctgtttctaacggagaaaacatccgcagccctgcacgtacgttgttgataggggtgaaggaattttgaaattgctatttgcaacccaattttgctattttcagtcccagttgttttttttttcaaaaattattattgaatgtcattaaaggactgaaagcttatgtcttagaa

SEQ ID NO: 9980 - DNA, 1197 bp, Glycine max
  Gm_smallRNAprecursor_2813
ttttacatatgatatcagagcatctgttatgaaatttatgattcttcaagaatgatttaatttctcccaattatgcatgaaccctaattatgaaatttagggattttatttttactttccgctgctagtatgaaatcttatattgaagagggtatgaatgcgtaaaattatattattatgattgcgttcaattaagaaaaacttattatgtttgtagtactttgaattgtatatattaaatttgggaaaatatttcatatttatcgttttgtactatgtaatttaatttgatgataatgtctagagaaagacttttcctttaacatatattgaatggagaaagaaagtcattaacgctatttctgtttcgagtgttgctaggtgcacccagcattattgctggtgcacccaacattctttaaaaatggcaaaattatccttgccttctttctccctctacggatcaagttgatccgcaagttgatttttaagacttacagatcaagttgattcgtaagtcttttacggatcaagttgattcctaagtattgaatggagaaagaaagatccgtaagaagcttgcagcgagtgttgctaggtgcacccagcattattgctggtgcacccataagtcttaaaaatcaactagcggatcaacttgatctgtaagaagcttacggatcaagttgatttgtaaaagacttacggatcaagttgatccgtaagtcttaaaaatcaacttgtagatcaacttgatccgtaaaagacttatggatcaacttgatccgtaagtcttaaaaatctacttgcggatcaacttgatcgtaagaagcttgcggatcatctatatcaattgcggatcaactaatacctatgcggatcaactcattgcatatgcggatcaacctgaatgagctgggtgcacaaaaatatttttaaaaatacataggggtatttttgtcatttcatgttaagtgttgggtgcaccagcaataatgctaggtgcacctagcaacacccttctgtttctaacggagaaaacatccgcagccctgcacgtacgttgttgataggggtgaaggaattttgaaattgctatttgcaacccaattttgctattttcagtcccagttgttttttttttcaaaaattattattgaatgtcattaaaggactgaaagcttatgtcttagaatt

SEQ ID NO: 9981 - DNA, 1194 bp, Glycine max
  Gm_smallRNAprecursor_2814
cagagcatctgttatgaaatttatgattcttcaagaatgatttaatttctcccaattatgcatgaaccctaattatgaaatttagggattttatttttactttccgctgctagtatgaaatcttatattgaagagggtatgaatgcgtaaaattatattattatgattgcgttcaattaagaaaaacttattatgtttgtagtactttgaattgtatatattaaatttgggaaaatatttcatatttatcgttttgtactatgtaatttaatttgatgataatgtctagagaaagacttttcctttaacatatattgaatggagaaagaaagtcattaacgctatttctgtttcgagtgttgctaggtgcacccagcattattgctggtgcacccaacattctttaaaaatggcaaaattatccttgccttctttctccctctacggatcaagttgatccgcaagttgatttttaagacttacagatcaagttgattcgtaagtcttttacggatcaagttgattcctaagtattgaatggagaaagaaagatccgtaagaagcttgcagcgagtgttgctaggtgcacccagcattattgctggtgcacccataagtcttaaaaatcaactagcggatcaacttgatctgtaagaagcttacggatcaagttgatttgtaaaagacttacggatcaagttgatccgtaagtcttaaaaatcaacttgtagatcaacttgatccgtaaaagacttatggatcaacttgatccgtaagtcttaaaaatctacttgcggatcaacttgatcgtaagaagcttgcggatcatctatatcaattgcggatcaactaatacctatgcggatcaactcattgcatatgcggatcaacctgaatgagctgggtgcacaaaaatatttttaaaaatacataggggtatttttgtcatttcatgttaagtgttgggtgcaccagcaataatgctaggtgcacctagcaacacccttctgtttctaacggagaaaacatccgcagccctgcacgtacgttgttgataggggtgaaggaattttgaaattgctatttgcaacccaattttgctattttcagtcccagttgttttttttttcaaaaattattattgaatgtcattaaaggactgaaagcttatgtcttagaattaaattaacgtga

SEQ ID NO: 9982 - DNA, 1088 bp, Glycine max
  Gm_smallRNAprecursor_2815
tggatattgtgacattaattaaatgtgtaatttcatttgcttgctttatttaagatttttaattttaatgaaaaagttgttttaactttttactacaaaagattaatatcttctttttaaaaaaagagtaatatctaatttgattcttgagaaaaaaatcactcaacctaatttaatttatgagaaaaaaaaaggagactaaatattctatcaagattataaatataggttattaataatttcttaaggaataaattagtacacgttcactattttaaagactaaagtgtctatgcatgattgtactgttgagatactattttattaattaagcatttttttgtatttttcataaacaacaaaatatttttttaatgtaaatttgaataaataaacttatacatatgtcaaattattggcatgtcccgtcattcttattgacggcatgcttttagcgagatcagtgtctcgcaggtgccaatggcgggactgtccacgttggcacgtcccgccagcaccaatgacggtaccccctctctcctagtcagcctgtctcactgctacgaatagtggcatcccctatcctaccattgtcactggcggttcaagcttcccgccaatgtcaatggcgacacccacgtacagaagagacccccttgcaatttgttttaaaagagaccctcttccataaattgtttttaaaagtaaccccctatattaaatttgccccatctagtaggcaactttaaaaaattaagttagttggatttgggttgggtcgacataaacatccatcccgtttgataactgacttttttggttatctcaacctgaagcccgaatctgactgcccgaaaccgttatttttttaatcggctttcttggtttctggtcagattagatgtttttgctcactcctataaatgagaaggaaaaaaatggagaaatttgttgctttggaatttggatggcaatataaattataaattagtaaaaaaaagttaaaagaaattattaaagatattttataatgtagagttacttattattattttatgttataaagtaaccatagaattgtttataaa

SEQ ID NO: 9983 - DNA, 1088 bp, Glycine max; identical to SEQ ID NO: 9982
  Gm_smallRNAprecursor_2816

SEQ ID NO: 9984 - DNA, 1089 bp, Glycine max
  Gm_smallRNAprecursor_2817
tggatattgtgacattaattaaatgtgtaatttcatttgcttgctttatttaagatttttaattttaatgaaaaagttgttttaactttttactacaaaagattaatatcttctttttaaaaaaagagtaatatctaatttgattcttgagaaaaaaatcactcaacctaatttaatttatgagaaaaaaaaaggagactaaatattctatcaagattataaatataggttattaataatttcttaaggaataaattagtacacgttcactattttaaagactaaagtgtctatgcatgattgtactgttgagatactattttattaattaagcatttttttgtatttttcataaacaacaaaatatttttttaatgtaaatttgaataaataaacttatacatatgtcaaattattggcatgtcccgtcattcttattgacggcatgcttttagcgagatcagtgtctcgcaggtgccaatggcgggactgtccacgttggcacgtcccgccagcaccaatgacggtaccccctctctcctagtcagcctgtctcactgctacgaatagtggcatcccctatcctaccattgtcactggcggttcaagcttcccgccaatgtcaatggcgacacccacgtacagaagagacccccttgcaatttgttttaaaagagaccctcttccataaattgtttttaaaagtaaccccctatattaaatttgccccatctagtaggcaactttaaaaaattaagttagttggatttgggttgggtcgacataaacatccatcccgtttgataactgacttttttggttatctcaacctgaagcccgaatctgactgcccgaaaccgttatttttttaatcggctttcttggtttctggtcagattagatgtttttgctcactcctataaatgagaaggaaaaaaatggagaaatttgttgctttggaatttggatggcaatataaattataaattagtaaaaaaaagttaaaagaaattattaaagatattttataatgtagagttacttattattattttatgttataaagtaaccatagaattgtttataaaa

SEQ ID NO: 9985 - DNA, 1146 bp, Glycine max
  Gm_smallRNAprecursor_2818
ttttagtgaggatgaagatcaatagttctttgatcacatcaatcaccaacgcgatgacgacgagggtgttggtggaccacctaggtgttcggtagacttgaaccttgaccacctaccacactacattgatcgagatcatttcgttcagcaacaacataatgtacaaccaccaactggtgcacttaaggttggcatgaacttcgatgaaaaagcacaatgtattcgagcagttaaagaatgcaacatcaaaaattattttgattgcagaacaatatattatgaccacagaaggctaaactttgtgtgtaaatcacatgaaaatggttgtacatgaagcttaggcacatgcaattcaaagaggtataagaaatgtattatcaagagtatcagaggtcatcacacttgtctcgcgccaatgcttagacaagatcatcggcaactcgacaaacacatcataacataaatcatacaaccaattgtcaaaacaaacctaattgtctccatcaagacgttgattgcagagatcaaaacgttgatgagttataccccatcctacaaaaagacatgattagcaaagcaaagagtgttggagatgattcatgttaacagggaagaatcatgtgtcaagctaccaaaacttttaggagctttgcaatcttgtgttcctgggactgtggtagcttctcaaacaaaatctgtgtttgagggaggagaaatcgtatcgggcaaaaacatgcttaaaaaaacgtgtcttttggtcatttgatccatgcattaatgggtttgcatattgcaaaaccatagtacaagtagatgatacatgtttttagggaaagtatactgacacattgttgatgcacaagatgaagctaaccatatcttctcgattgcctatgccattgtagaatgggagacaacttcagtgtggggtttttcctaaagaatttgataagacatgttatttgaatatgtgtttattttgaacttgcagtaacaccaaccaacaaaggtagccaaaagtgacataaaattgaattctgccattcctaatctctggtgaaaagaaaactcctaaacaagtatgaaaccctctccataatgttgtgcaattactccactaaaattatgcaccctttccataggaaa

SEQ ID NO: 9986 - DNA, 1191 bp, Glycine max
  Gm_smallRNAprecursor_2819
tgtgcattaaatatacattagaaattttagtattatatataacgacattaattattttataacataattgtctattaactcagttggttaaaactttgtgttaatatcgttcaaatccatgaaaatcttaaacctacaagagttaatgtgtcttcaactagaatataattcaaaggctcctactatttcgcgaaaagataatcactttgtcttaacctatcttatatcttatcaagagaggtttataaaagtcaataatattagggtgttgctaggtgacccaacattattgctggtgcactcagtattttttaaaaataccaaaactgttcctgttttttttttgcatttgtgataggtgtgcgtgagggtggtctgtaaatcgtacggatcaagttgatcagtaaggttgatacggatcaagttgatccgtaagacttctatggatcaagttgatccgtgttgttccgtaaaaggcttacggatcaagttgattcgtaaaaagcttacggatcaagttgattcataaaaagcttagggatcaacttgatttgtaagccttttacaaaataacacaaatcaacttcattcgtagaagccttacggataaatttgatctgtaaaaggcttacggatcaagttgatccgtaaggcttctacggatcaagttgatccataaaaggcttgcggatcaagttgatctgtaagccttttacagatcaacttaaaagacttagggatcaaggatatttttgtcatttcatcttaagtgttgggtgcaccagcaataaagctggtgcacttagcaacacccaaactattttcgtttatagaatgggccttttcgcttcagcagactgggtcaaccggccaggcctatacttgtatatatattattagtctgttgcatatttagtagtaatgtttttaaaattaaattggtcaagacacaaatttaaaatttaatggttctggtagaactggaattaataaaataataataataataaaataatacgtactatataaaatcatagtcaagaaacataatattatttttataacactaaaaagtaaaaataaaacagaattttataagtttttaacatttaaagtacatacaaaaagttcataatacttaagcataagtttcagcagcacataatatgtattaataattacaagtttatt

SEQ ID NO: 9987 - DNA, 1079 bp, Glycine max
  Gm_smallRNAprecursor_2820
taaggaaattcctagaaccttctcttcttctagaagtttctccataatttttctttcctctattttctttgttttggggctgaaatttaaactttgactggaaggcatttttaattgtatcttctttatgcctatacagtctttgctcatatgcttcaagagagcccacaagttctgtctctgatagagtggacagatctttggtttcctcaatcgttgtcacgattgggtcaaacttttggggcatagtaattagaattttctcaacaattttcttgtcaagaatatcttccccaaaagctctcatttgattaactatttctttaactttagaatagtaatctttaactgtctcagactccttcatcttcaatagttcaaaatcccttcttagagattgaagtttaacggcacgtaccttaacacttccttgaaactcctcctgcaatgtgttccacacttctttggcagtcttagctcccataattattgggaagattggatcagtcaccgcttgttgcaaggtgaacaatgcctttgaatttttctgtttatttttcttcaactctttttcttgagatgcattaagagctgaagtatccgcgggaatggtgaagccttcttctactatgtcccataaatcttgagatgaaaaatatgtttccattttaacacgccagaaatcataattttcaccattgaagatagggatagaaatagttgacgattgagtagtgttatccatagcttagaaaaaatattattagagtgggttaatagtacaaaggaaatttttgaagtagttgggaggattttggaatggtaggtaggtaatataactacgcccaatgtatgaccgaacgtggctctgataccactgttggtagttgattagatgatagttgatagttgatagttgatagttttagagaattgttttagaaagaaggctatgtcattgatttcttggattgtcaattacaacataccaattgcctatttataggctcaagtcatcaacctctcaatggtggtgaatgtttctacattactttagatctttctagagttttcatgat

SEQ ID NO: 9988 - DNA, 1221 bp, Glycine max
  Gm_smallRNAprecursor_2821
attcatgatgacaaattttaataaaaaaaatattttaaaaatatttttatttcttaattgagattaaaaaaattaaataatatcaaattaattttcttaattagtatgaaattagttatatttgtttgtatataaatccatgttctaaagttagcaattatttctcattattcttaggatattgattaaagaattaaaaagaaaaaaatatttattgtgaaaattatataataacataaataaaatcatctgcaatataattctatacatttcaattaaaatatttatctttttagttttttaatcaatgtttctaaagacattgattaatatttttctaaaagttttggtaattatgtactctagatgttctaggttttttgtataattaatttaatgaaattaattataaatcaagaaaagtgattagaattgttaagaatagtctcacatcggataattcatgaacataataagtgcttatatagctgggtagaccacccccttatgaaccggtttttaaggggacctttcggatgccttgactgcactataaaatttaatatggtatcagagccatattctgcttctgtccggtgggtgccgccagccctcgctttgtggtgacgagccctggcttgagggggcgtgttaagaatagtcccacatcggataattcatgaacataataagtgcttatatagctgggtagaccacccccttatgaaccggtttttaaggggacctttcgaatgacttggctgcactataaaatttaataagaatgtgtgtttatataggttttgcgttagaattctagacttctagttagagaataggttttcataaatatgactttcattataaaagttttgtctatctacaactcttgagttctttaaacttcattcattaggggcatgggattccttttggggaaatctttattatggtggagatttaccactataggaatatacggttgaacttccgtgtatttgctattgacaaggtattcatgaggtgttgttttttttttaaataattttttccttgaaaagaaaaaaaatttcatgaattaaaattaactcatgcataagtgaaaaataagtttttgaagaagttaatacaaaaaagtttctataaatcaacttttatacaagttagttttaacctatgaagaagttaatttcaattttaatttttatttttattttttct

SEQ ID NO: 9989 - DNA, 1213 bp, Glycine max
  Gm_smallRNAprecursor_2822
atgatgacaaattttaataaaaaaaatattttaaaaatatttttatttcttaattgagattaaaaaaattaaataatatcaaattaattttcttaattagtatgaaattagttatatttgtttgtatataaatccatgttctaaagttagcaattatttctcattattcttaggatattgattaaagaattaaaaagaaaaaaatatttattgtgaaaattatataataacataaataaaatcatctgcaatataattctatacatttcaattaaaatatttatctttttagttttttaatcaatgtttctaaagacattgattaatatttttctaaaagttttggtaattatgtactctagatgttctaggttttttgtataattaatttaatgaaattaattataaatcaagaaaagtgattagaattgttaagaatagtctcacatcggataattcatgaacataataagtgcttatatagctgggtagaccacccccttatgaaccggtttttaaggggacctttcggatgccttgactgcactataaaatttaatatggtatcagagccatattctgcttctgtccggtgggtgccgccagccctcgctttgtggtgacgagccctggcttgagggggcgtgttaagaatagtcccacatcggataattcatgaacataataagtgcttatatagctgggtagaccacccccttatgaaccggtttttaaggggacctttcgaatgacttggctgcactataaaatttaataagaatgtgtgtttatataggttttgcgttagaattctagacttctagttagagaataggttttcataaatatgactttcattataaaagttttgtctatctacaactcttgagttctttaaacttcattcattaggggcatgggattccttttggggaaatctttattatggtggagatttaccactataggaatatacggttgaacttccgtgtatttgctattgacaaggtattcatgaggtgttgttttttttttaaataattttttccttgaaaagaaaaaaaatttcatgaattaaaattaactcatgcataagtgaaaaataagtttttgaagaagttaatacaaaaaagtttctataaatcaacttttatacaagttagttttaacctatgaagaagttaatttcaattttaatttttatttttatttt

SEQ ID NO: 9990 - DNA, 1109 bp, Glycine max
  Gm_smallRNAprecursor_2823
tccttttttctgtactgattttatctatgcacttattctgtgctaaatttgaaattctgtattaaaagtgactccccttctttaaaaatcactgtgaaaatatgaaagagggaatggaactgacccttagaatcattagcattcttgtctggatggtatatgaaatgaagtagaattagctaattattaaattaaccaactcttttcagatgaaaagataggaagaacagtccattagagtaaccaggtgcacctgaaagaatattaatctattcttgtaaaactcctttatttcattaagttttattgattagttgttaggtccggatatcaaatgtatgaaaccaatataatggcatgatgatagaccagagacccccttttactaaggggtgtatgctaggaaaaataggaagtgatgtagggaatcatgactctaagaagactaacggaatgattgatttgttgatagttgtactcagagagttgttaagcagttaaggggtggtagttacaggaatgataaatagagaagaggaaagtggaatggtatcacaatacgtaaagtgatttgaggagagaacttgtctctcaaaaacctgtgctgtaccatctcttaccctaagtccctacccaaatcttcaaccacaaattgggaaattagagtttctgcacaataataccaattaattattcttcttattgttgttgattaatataataaagagaaggaaggaaagtggaatggtatcacattacatgttctgttaattggagctggacatttctttgttcccttttctcaaattttctgaattcaatagatcaaaacccaaattctctcaatttcagttttcatcctccaaaaacctctctctctaacttctcaaaaggttttccccatttacaagcttaacccacaggttctttcttcctctgttactcaattttcagtttgtttttttgcttttaatctgaccccatagctatgatgttctgcgaattagattccatgatagtaatgttgactgttgctaagactggaacatggtaaatgccactgtcagtgctcctttagatatctgaattgtggaaatcttggataaaca

SEQ ID NO: 9991 - DNA, 1042 bp, Glycine max
  Gm_smallRNAprecursor_2824
attggcaattaatactaaatagctgggttgccaacaaaaacaaatcggtttcataggagagttggtaaatacctgaacttgaatgttgttttaaaaaaagtggctggctgatgggtggggtgggctaggacagcccattaaataggtgcacttcctctaactttaatttttctataaaatttggctgattggacctagccacaaggccatattgccttttggccctggcccatgttaatgtttcttggtgtgaagaatacaactaacattttttgggaccagtattttttgtgaaaagtgtgagtgtgagagttcttaaggatatcttcaaggagattcaacttttttattctgaatatctgctatttaccgatctggaaactgccttactcaaatttctatcattaaatattaataaaataacatacttgtaattttttccattttcatttgttttgattgttttactgtatagttttttcatattcttaaatggttctcttggttgttctacattttgtattaagctgaatcttagacagcttcatctttgccacaaccataaccttagcctccagttgacatgagtatatttcttagaaggtttctgggtttaagtttgtgcattgaattttctttctttttaaaataattagattaataaaaaaaaattgtgctcatattataaaaataaaaaataaatgctcatgtgcatatcacgtttaaatataaaacttgattgctatgttaactttagacaactggggatgggggactaagtgcatcttaacatgagatacatgaatatactatttcctcaggacatttactattatttccaacaactataatatacattgtttaatgatttaattgttgattttatttgttgactagtgtaggagtgcatatgctttttgcccatatagacataagaattatgttatttggttaaagttaaagtgctgggtatgaggacaagaacatagaactgagtgaggcatggaatgaagtttgattgaaccccaactggtggtggtgg

SEQ ID NO: 9992 - DNA, 1081 bp, Glycine max
  Gm_smallRNAprecursor_2825
ggggagggagcaatttctcttttattatgatatatcattgtttaattctttacatgcatttgatgtaaacaacttagcgccggtttacaaactaaataatttatcagatttaaattgttgaagattttattatttaatttctattttttggtccattttttttattaatttatattcaataaaaatgtaaatataaaattgagaaaccttcgaattcatggtccacttgaatattcttggtgacacgaacgacttcggccttattaacctttgggcctcccaatatattttggagtgttgctaggtgcacccaacattattgctgatgcacccagcatttaattaaaatatcaaaactgtccctgtactttttttgcatttgtgatgggtgtgtgtaagggtgatccgtaaatcgtacggatcaacttgatccgtaagattgatacaaatcaactttatccgtaagctttttacggaacaatactgatcaacatgatctgtaaaagtcttacggatcaagttgatccataaaaagcttacggatcatgttgatccatattattccgtaaaaggcttacggatcaagttgatccgtaagatttctacggatcaagttgattcgtaagacttttacgaatcaatttaaatggcttacggatcaagggtattttcgtcattttaccttaagtgctgggtgcacctagcaacaccctatattttgaggtctgggagacttttcgtggtccaaaaacaagcctgggtttcttattgaggagtcttgtcaacaactttggataaagaaaaaatccaaagtttagacatgcgcccatgcttcaaattggcacaaatcattctcctatgctttttgtaacagcgaaaactaaatggcattttctaatcatagttttctaacgaagcaagcatatttttctcttgaaaaaacgaagtaagcatattttgacatattaccatatttgatggtacttattgtataagcaattattattcgttagttgaaaagatacttaaagatataaaaacgctacataacaatgctataataaaacattcgtaattacat

SEQ ID NO: 9993 - DNA, 1060 bp, Glycine max
  Gm_smallRNAprecursor_2826
atctcgaacggtacaactttttttttctcagtttgctccatgactagaagatagagcactagcatatttccaacaaatggtattcccttgaactagcatgtttgatccacagtattgcaataaatgtaaaaaaatgttaaagaagaaagaggggcaagcagaaaagaaaagaaaaagtgtacttctcaagtctagggtatatttggggagggtggatagaaaagaggaacaaataaaaagctcccttccccacctttcccttgggcaaaaagtccatcagagaaaatcaattgacactgtgcatcactataacatacacacacaaattaaatgagtagcccataaaattaggagtgaatggagaaaaccttgtttagccgtaatagagtcagagactgtggatgaataaaaaaaggtccccgtcagctaaaatcaaattgaagaactcgtcagcgttatcttccttaacaatagtttcaaacgaaaacagtgtatcgttgttttcattttaaaataggcattgggataggaaaggaaaaggaggaacaagaagggaccccaatgcctattttaaaaatgaaaatagcaaagccctgcttccattcgaaatggaatgtactgagaaggaaggcaaggcggtcttgaatttgatttcaagtgaagaggacaagggcgcctcatcttcttcttcatcttcttcttcatcttcttcttcatcttcttcttcttctcccacaaacctaaaactcttgtctttcagatctaactttcttttccttcgttcggctagttgatttccagatccgcataacaccaaaataaataggcttcatcccgtctttatcacgtcagccctagcttcaattcgtgtgcttttagataaatattaataataatttaatgaaaccactatttaacatgctcatttgtgtctaagttcatcgctctccttcatctaataattaaggattctaattttaagtataaaataaattatattaaaagaaaaatatttattttatatctctttataaaagattaatcataatttataacaatg

SEQ ID NO: 9994 - DNA, 1058 bp, Glycine max
  Gm_smallRNAprecursor_2827
taaataatgtaaaacaattaaatgtaaaagcaagagaaatatgggatattgtcagctaaaaaaaaagatgaacctttaaacagaagcaaagtaaacgtaaagaaaaatttatctttgcctattgccacttgatccgcctctaactaccaccctgaaaagaaaaaacaaaagttaaaacaaattttctacctaccatgccaattcacactattccacatcaaaaaactgatcaccacttttcggagacacacaaaaacatgctaataaggtggccaccgcaaagtagcaagcatgatgaagatcaaatctgcagaagaagataaaaagcaattaatggcacttactctctttgtcaacattcatttacagttccattgctacttatgaactctaagaacatgcaacaatcaacatataaaataataataaaaaaaaaccttgtgctgcagatttccatatacagagaagaaaaatgtgatagcccgagatcaataacatgtgatattggcacggctcaatcaaataacacagagcttttggatcataaaacactgccttctgattgaaccgcaccaatatctcaagttcttaaattatacgttggaagtgtgatcctccaccacttttcattcctgcgctttctaaagaaacaaagaaccattggttaataatgaatgtgacaagaaaagcttacccctatggtaactccaatatatccatcaccagaaaacataatacttggaaagtttgatgaagaaggtggtattatgttcccttggagtaactatagtgtcctgtgagattcttaaaatataatggaagagagagggatggacagagacagagtgatgcagagcgtcaaataaggtggcatttaatttgccaacgaccaagcaaaaaataggaggggcacattaaattttgagagtggaaacaaatggagaaaggcatattttgaattgtgactagaagagaaggccagtgagacaagaaaccgagccttgcttccaggtttttatatttatgagccttagagggtaagttggtctgctgccaac

SEQ ID NO: 9995 - DNA, 1046 bp, Glycine max
  Gm_smallRNAprecursor_2828
cacttgtcacaaacatggcaactggacaagcttctatttgtgcttgctatatgttatatgactactacgtctggagaaaagtaactgagcctgcaatggttcttcaactcaaggaaaataacagattatgtcaatgcatccatacaagaagatgattcatcccattatatttatgtccatttcctataaatctccttttttttacttgaattgaaccatgttcttgttagaacttaatccacattttactaatcattaactttcaaaagcatcatgcatgaatggtatgttacgagaaactcatggccgttttagttatgctcctaaggctacataattttgaacatattagtcaagcaggaacttgtgtaatttcataggtaaccatagaaatcaaatgatgcgagccaaggtagtttattggggactatagtggcacgggagagttacttggatctgttatagcctatgaagcaccgacacggacactggacacgacacggacacggacacgtggacacctgtaatgttcaaaatatagaacgtagtacgggtgtcgtgtcggtgtcgaaacgcgtgtcggacaccggacacggcaagggactgaagtgtccgtgcttcataggttatagcctatgacagggttttaaatatcggtcatgatcgtgatttagatcgtaacatcaaagttttttaattgtctgtgacagcaatgtgaccgcagttaggactgtatcgatcatatttatccacaatttgtcgtgatatcaaccaacgcgacaaagtcataggacgatagtgatcactatttaaaaccttggcctgtgaccactgcaatagcctgtggccacaacaagttctgttttcaccgttacattcttcatgaatccgtgactgaagatctcatatatagtaggacttgggataaaaacccaatacgcacataaacataaattagagaattagataatataataaataaagtaagaaagatagaaccgtgacgaataagtttgaacaacaccaataagattttctattatatt

SEQ ID NO: 9996 - DNA, 1039 bp, Glycine max
  Gm_smallRNAprecursor_2829
tatatgttatatgactactacgtctggagaaaagtaactgagcctgcaatggttcttcaactcaaggaaaataacagattatgtcaatgcatccatacaagaagatgattcatcccattatatttatgtccatttcctataaatctccttttttttacttgaattgaaccatgttcttgttagaacttaatccacattttactaatcattaactttcaaaagcatcatgcatgaatggtatgttacgagaaactcatggccgttttagttatgctcctaaggctacataattttgaacatattagtcaagcaggaacttgtgtaatttcataggtaaccatagaaatcaaatgatgcgagccaaggtagtttattggggactatagtggcacgggagagttacttggatctgttatagcctatgaagcaccgacacggacactggacacgacacggacacggacacgtggacacctgtaatgttcaaaatatagaacgtagtacgggtgtcgtgtcggtgtcgaaacgcgtgtcggacaccggacacggcaagggactgaagtgtccgtgcttcataggttatagcctatgacagggttttaaatatcggtcatgatcgtgatttagatcgtaacatcaaagttttttaattgtctgtgacagcaatgtgaccgcagttaggactgtatcgatcatatttatccacaatttgtcgtgatatcaaccaacgcgacaaagtcataggacgatagtgatcactatttaaaaccttggcctgtgaccactgcaatagcctgtggccacaacaagttctgttttcaccgttacattcttcatgaatccgtgactgaagatctcatatatagtaggacttgggataaaaacccaatacgcacataaacataaattagagaattagataatataataaataaagtaagaaagatagaaccgtgacgaataagtttgaacaacaccaataagattttctattatattcttaattattctttaaagttgtctagagttgggtttgttt

SEQ ID NO: 9997 - DNA, 1206 bp, Glycine max
  Gm_smallRNAprecursor_2830
ctttgctttcttcttcaattttcgtgtgctctttctcctccataattactggtaagtaatttttaatttaatacttatgtattctgttcaatattataaaaagattaagttagttagtattaataggtattttaagattaggttagttagttttaatatgtattctattgttaatttttatgtattaataggtattcgaaggttaggttaattaacatgaaaatattatttggttagttagtatgaaaatattatttgattattgtatatattctgagatattacatgtgttgtatatgtatgatattttagttagacatattagttttagttaggcacatgtaatattagtttttgtaatattagacacaagttaatattagttttaggtatatatatctaaaatttaggcacacgtaaattttgagcttttgtaatattaagctaaataattttgagtttttgtaataatattaggctaaacaattttgagttttaaataaatgagttgataagttatattatttgatttagttaattttagtttgaattttttttaaatatatatatatatatatgatagggtagtttacgttagtatatggtaggttttatttttagtttgtaggttaatattttttgttttacgaaatttacgttattaaatatatattatgagatattatatgtgttatatatgtatgatattttagttagacatattagctttagttaggtacacgtaatattaacttttgtagtaatattaggctaaacaattttgagttttaaataaatgagttcattagttatattatttgatttagttatttttagtttgaatttttttaatatatatatatatatatatatatatatatatatatatatatatatatatatatatatatatatatatatatatatatatatatatatatatatatgatagggtaatttacaaaattaatacacttaaatttgagcttcaaattttattctaaccataaaatttattacttcaaaataaaaaatttgtacatgataaataaacaaaactaaagaaggctttctttaaataaatacaaaatatgcttactatagaatcagcaaacttcaaacgaaagtctttcttcctctcttcacactactttcttactctcttcggtgtcaaatattgcaagtgttgagtgtcattgcaagtgc

SEQ ID NO: 9998 - DNA, 1170 bp, Glycine max
  Gm_smallRNAprecursor_2831
ttggatctttgtcaatatctgcaaggtctatgattggaataacatggcttttgttgcctatatttgaggccttctcaaacttctcagtttggtgatggaagaaggtaggaacattcttaacacctacatcaacaagccctttcacaccagcttttgtttcatcaaatgctttgcgttgactcaaaacataatcaaagttaaggtcagttgttgttcccatgttccttttggttttgtgtggccttggagctagaagagtgggtggaagagccaaagaaaaattaagtagcagctaagacttaaaactgtgctgatggaggataacgaagcaaaagtgatcccaaactctcaatcttctcccacctctttgacggcaaaataaaaacaaaaatgaatgtgtaactcttgtgatgcatatttcatgtttttaaattaaaagcatcttttatttatttatatatatatcatactgcattcttacttcctatttgtccgtttgatcttaaaactaagactgatgggaaagtaggaatactgtccgtaaggacatatgttaacaaatttttatggatctggaactaaaagtacatttaatattttactttgatttgtacagtaagtgtttgaacagtacttcctggaagtacagcagtctaatattttagttgaatggtactgtagcagtaagacccgtgttggataaaggacagtaagactaaggtgtactgtttaatcaaaatatcaagacataatacactggtggctataggattgccgttcaaactatttttcaaaaaaaaaaaaagagtttttcttaaaaataattcagatccagaaaaattttgtgacatatttacttacggagatatttctatggaaccaaatgagggcaaagatattagagaatatcataatcatgtctagactcttacgatctttttctcgtatctcttttcgctcaaactcctcctcatcatcttcttcaagaaactccaatctattaaatgatcaagacaaccagacccaagaggtcgccccaaaacacaatctcttcgatgaggaagtctgattcgaagatatcaatcaaaacatggatgactggaacattccagaaatccctcaggatcaactatacgttcctgagacaataaaagacaaacacaactttga

SEQ ID NO: 9999 - DNA, 1047 bp, Glycine max
  Gm_smallRNAprecursor_2832
cataatacactggtggctataggattgccgttcaaactatttttcaaaaaaaaaaaaagagtttttcttaaaaataattcagatccagaaaaattttgtgacatatttacttacggagatatttctatggaaccaaatgagggcaaagatattagagaatatcataatcatgtctagactcttacgatctttttctcgtatctcttttcgctcaaactcctcctcatcatcttcttcaagaaactccaatctattaaatgatcaagacaaccagacccaagaggtcgccccaaaacacaatctcttcgatgaggaagtctgattcgaagatatcaatcaaaacatggatgactggaacattccagaaatccctcaggatcaactatacgttcctgagacaataaaagacaaacacaactttgattacataatcaaaacagtagaaaacaatattcctctaggacaagatgtaggggaagaatttcatttactttcaaaaaattcaatttatgaacatagccgtaagtataaatatctacacatcggttgtgtacaagtagccatcaagcccttaattgatatgggcatagatgcagcagttttaatgtgtctaagagacattaggcataaccaatttgaagactccctaattggaacagtcgaaaccagcctaggacaaggtccaatatattttaattgttatccaaacaaaacagtgagtctgatggacagaaacattcttgactctctgttcttaaacatccactttcatggccttgacatgaaagaaggatcaatcccaacagccttaatatataggatccagtacaaggtcatgaatacttgtgcatctagagtcctgttaaaacctcaaaaaggagaaacaactttgtttatcactgatatgacgaaggctaacgtttctcttccaagaaaaataaaatgggatgaagtaactcttcccgaaagatgggttatggataaggcaacaccgtctattccccgacccgctccaaccatagagcatattaaacaagataactccgg

SEQ ID NO: 10000 - DNA, 1126 bp, Glycine max
  Gm_smallRNAprecursor_2833
aggatcaacacaaactttcttctggtaaaaaaccttaaaaatgaagtaatcttaggaacgcccttcattagagccctgtttcccatccaaatatctaatgaaggaataaccacaaattatttaggaagaaagattatatttaatttttctactaaaccaatttccagaaatataaatttcatagaaaataagattaatcaaattaacttcttaaaagaagaagtatcttttaataatattcagatacaactaggaaaaccccaagtaaaagagaaaattcaatctttattaaatcatattgaatcaattgtctgttctgatttgccacatgcattttgggacagaaagaaacatattgttgatctcccctatgagaaagactttagggaaaaacaaattcccacaaaagccagaccgatccaaatgaatgaagaacttcttcaatactgtcaaaaggaaatcaaggatttgcttgataaaggcctaatccggaaaagcaaaagcccatggtcttgtgcggctttttatgtcaacaaacaatctgagattgagcgtggaacaccccgcttagtcataaattacaaaccactaaatcaagcattacaatggattagatatcctattccaaacaaaaaagatttgcttaacagattaaattctgcaaagatattttcaaagtttgatatgaaatctggattttggcaaatccaaatccaagaatcagataggtacaaaacagcgtttactgtacctttcgggcaatatgagtggaacgtaatgccattcggactgaagaatgccccatcaaaatttcaaaaaattatgaatgatatttttaatccctattcaaaatttgtcattgtctacatagatgatgttttaatcttttcccaaaacattgaccagcatttcaaacatctccaaaccttcatccatatcatcaaacaaaatggtttggcagtctccaaatcaaaaatcaatcttttccaaagacgaattcgattccttggtcacaatatttatcaaggtacaattgttccaatcgaaaggtcaattgagtttgctagcaaattccccagccaaatcttagacaaaacccagttacaaagatttctaggttgtctaa

SEQ ID NO: 10001 - DNA, 1150 bp, Glycine max
  Gm_smallRNAprecursor_2834
aaccttgcctcaaaacagatttttgcaagatggcaagcaattttaagtgtctttgattttaatatagaatatatcaagggctcttccaactctctacctgactacctcacccgtgaatttttacagaaaattcccgatgcctcctaaggtgtctagttcctccggcagaggaggaagatccagtacgaaaggtaaagaagttctactggctctaccagagccaataaccaaaaaggcaactacaacatcttctaggtcacctacccagactgggtcatcaacccagaaaggaaaacttgaagggtcattgacccagacaactaccgtcaaatctgagtcatcaactcaggaatctccaaaaccaacaacaaccaaacaaaccgtggctgactatgcctggtcaatacaaactctcctggccttagaggatataggcctcacaaaaataccaaaattagccaaaaagacctgggcagaaatggcctcagaatcagacgatgattctgaaacagatctgcaaaaacaaatccaaaaagccaaacagaccaaaaccgtctgtaaccaaaaaccaagccaatcgttgactcaacaagaatcaacaccacaacccggtaacagttacatttcaaaaaacaaatttttcaatgttttacaaatggaaccagaatactgggacaagaatcctttcaaagcaaccaccaaagtattcccccagggattccattacaggccaatagccgcaaacaaaacccgcaaattctacgaattcatcctaatagatacaaactcagtatctataaaacacttcaaagaccccaaagatccaaatctaaatacccattccacaatccaaatcctgaaggttatgcagccacgacattatgactcaaacttaaaccaacccaaaaaattctctgcaccatttgaccctacaggatataattattgggattacgttgacgcttggaccaatgtgttctggcatcaaaatagtaaattcaagcattcatggctgatttacttcaaaaataatactgcatataattttccaaattggttcctccaatggtggaactacttcggaccaattccacaaatatttccagaagaagtccaacagggattcgaacaattcaacaagctctataat

SEQ ID NO: 10002 - DNA, 1148 bp, Glycine max
  Gm_smallRNAprecursor_2835
accttgcctcaaaacagatttttgcaagatggcaagcaattttaagtgtctttgattttaatatagaatatatcaagggctcttccaactctctacctgactacctcacccgtgaatttttacagaaaattcccgatgcctcctaaggtgtctagttcctccggcagaggaggaagatccagtacgaaaggtaaagaagttctactggctctaccagagccaataaccaaaaaggcaactacaacatcttctaggtcacctacccagactgggtcatcaacccagaaaggaaaacttgaagggtcattgacccagacaactaccgtcaaatctgagtcatcaactcaggaatctccaaaaccaacaacaaccaaacaaaccgtggctgactatgcctggtcaatacaaactctcctggccttagaggatataggcctcacaaaaataccaaaattagccaaaaagacctgggcagaaatggcctcagaatcagacgatgattctgaaacagatctgcaaaaacaaatccaaaaagccaaacagaccaaaaccgtctgtaaccaaaaaccaagccaatcgttgactcaacaagaatcaacaccacaacccggtaacagttacatttcaaaaaacaaatttttcaatgttttacaaatggaaccagaatactgggacaagaatcctttcaaagcaaccaccaaagtattcccccagggattccattacaggccaatagccgcaaacaaaacccgcaaattctacgaattcatcctaatagatacaaactcagtatctataaaacacttcaaagaccccaaagatccaaatctaaatacccattccacaatccaaatcctgaaggttatgcagccacgacattatgactcaaacttaaaccaacccaaaaaattctctgcaccatttgaccctacaggatataattattgggattacgttgacgcttggaccaatgtgttctggcatcaaaatagtaaattcaagcattcatggctgatttacttcaaaaataatactgcatataattttccaaattggttcctccaatggtggaactacttcggaccaattccacaaatatttccagaagaagtccaacagggattcgaacaattcaacaagctctataa

SEQ ID NO: 10003 - DNA, 1149 bp, Glycine max
  Gm_smallRNAprecursor_2836
accttgcctcaaaacagatttttgcaagatggcaagcaattttaagtgtctttgattttaatatagaatatatcaagggctcttccaactctctacctgactacctcacccgtgaatttttacagaaaattcccgatgcctcctaaggtgtctagttcctccggcagaggaggaagatccagtacgaaaggtaaagaagttctactggctctaccagagccaataaccaaaaaggcaactacaacatcttctaggtcacctacccagactgggtcatcaacccagaaaggaaaacttgaagggtcattgacccagacaactaccgtcaaatctgagtcatcaactcaggaatctccaaaaccaacaacaaccaaacaaaccgtggctgactatgcctggtcaatacaaactctcctggccttagaggatataggcctcacaaaaataccaaaattagccaaaaagacctgggcagaaatggcctcagaatcagacgatgattctgaaacagatctgcaaaaacaaatccaaaaagccaaacagaccaaaaccgtctgtaaccaaaaaccaagccaatcgttgactcaacaagaatcaacaccacaacccggtaacagttacatttcaaaaaacaaatttttcaatgttttacaaatggaaccagaatactgggacaagaatcctttcaaagcaaccaccaaagtattcccccagggattccattacaggccaatagccgcaaacaaaacccgcaaattctacgaattcatcctaatagatacaaactcagtatctataaaacacttcaaagaccccaaagatccaaatctaaatacccattccacaatccaaatcctgaaggttatgcagccacgacattatgactcaaacttaaaccaacccaaaaaattctctgcaccatttgaccctacaggatataattattgggattacgttgacgcttggaccaatgtgttctggcatcaaaatagtaaattcaagcattcatggctgatttacttcaaaaataatactgcatataattttccaaattggttcctccaatggtggaactacttcggaccaattccacaaatatttccagaagaagtccaacagggattcgaacaattcaacaagctctataat

SEQ ID NO: 10004 - DNA, 1231 bp, Glycine max
  Gm_smallRNAprecursor_2837
taaatacccattccacaatccaaatcctgaaggttatgcagccacgacattatgactcaaacttaaaccaacccaaaaaattctctgcaccatttgaccctacaggatataattattgggattacgttgacgcttggaccaatgtgttctggcatcaaaatagtaaattcaagcattcatggctgatttacttcaaaaataatactgcatataattttccaaattggttcctccaatggtggaactacttcggaccaattccacaaatatttccagaagaagtccaacagggattcgaacaattcaacaagctctataatagcaaggaatcacgaattccggcagatttaaagtacttttccagttttgccttgtcatggatcttttcatggcaatacagatacggaaaaactgaaaacaacaagcaatatccaccgttacagagacacgcctttgtaaaatggtggtcacaattcgatacttcaaaggctgctccagatcaagtcaagaactggttccagagcaatcctgagttccttaaacctgctgatctggagacatctttgtttctaaattagaagtcgcaactggcagcattcttagcaagctcaaaatctaaagagagtcttgctcagaatctcaaagaagttctccaactacttcaacaggaagtggaagaagaaccttccaagaaggaagctgaatcatccgagactaatgatgaccaagaagatgatccattctaccagaatgaagatgattgttttggtatatcattggacgacgattaattagttgtaataatcatgaattattgtaactaatttgtcagtttcttttaaataatgtaatttgtaaaaagttttgtaacagttccggtaaacattaccgatactgtagaaacagtaaaaattgggtctatttaaaggagtcctcgtcccctttgtgaggcaccctttcagatagactcagaatcaggtttttagagagagaagctctgcctagggaaaaactctttgtaagcttttctttcggtttcaataaatttcaagttctatttttcatatctcccttctcccctcaccgatcctgtgcggctctgccgccgcttcggtttctttgttttcaaaaacttgggtttgtaagccgtttcggtgtgcccttgatatctgcttttacaagttaataattcttacgtttaatcttatcatactgcattcttacttcttat

SEQ ID NO: 10005 - DNA, 1124 bp, Glycine max
  Gm_smallRNAprecursor_2838
attccacaatccaaatcctgaaggttatgcagccacgacattatgactcaaacttaaaccaacccaaaaaattctctgcaccatttgaccctacaggatataattattgggattacgttgacgcttggaccaatgtgttctggcatcaaaatagtaaattcaagcattcatggctgatttacttcaaaaataatactgcatataattttccaaattggttcctccaatggtggaactacttcggaccaattccacaaatatttccagaagaagtccaacagggattcgaacaattcaacaagctctataatagcaaggaatcacgaattccggcagatttaaagtacttttccagttttgccttgtcatggatcttttcatggcaatacagatacggaaaaactgaaaacaacaagcaatatccaccgttacagagacacgcctttgtaaaatggtggtcacaattcgatacttcaaaggctgctccagatcaagtcaagaactggttccagagcaatcctgagttccttaaacctgctgatctggagacatctttgtttctaaattagaagtcgcaactggcagcattcttagcaagctcaaaatctaaagagagtcttgctcagaatctcaaagaagttctccaactacttcaacaggaagtggaagaagaaccttccaagaaggaagctgaatcatccgagactaatgatgaccaagaagatgatccattctaccagaatgaagatgattgttttggtatatcattggacgacgattaattagttgtaataatcatgaattattgtaactaatttgtcagtttcttttaaataatgtaatttgtaaaaagttttgtaacagttccggtaaacattaccgatactgtagaaacagtaaaaattgggtctatttaaaggagtcctcgtcccctttgtgaggcaccctttcagatagactcagaatcaggtttttagagagagaagctctgcctagggaaaaactctttgtaagcttttctttcggtttcaataaatttcaagttctatttttcatatctcccttctcccctcaccgatcctgtgcggctctgccgccgcttcggtttctttgttttcaaaaac

SEQ ID NO: 10006 - DNA, 1123 bp, Glycine max
  Gm_smallRNAprecursor_2839
ttccacaatccaaatcctgaaggttatgcagccacgacattatgactcaaacttaaaccaacccaaaaaattctctgcaccatttgaccctacaggatataattattgggattacgttgacgcttggaccaatgtgttctggcatcaaaatagtaaattcaagcattcatggctgatttacttcaaaaataatactgcatataattttccaaattggttcctccaatggtggaactacttcggaccaattccacaaatatttccagaagaagtccaacagggattcgaacaattcaacaagctctataatagcaaggaatcacgaattccggcagatttaaagtacttttccagttttgccttgtcatggatcttttcatggcaatacagatacggaaaaactgaaaacaacaagcaatatccaccgttacagagacacgcctttgtaaaatggtggtcacaattcgatacttcaaaggctgctccagatcaagtcaagaactggttccagagcaatcctgagttccttaaacctgctgatctggagacatctttgtttctaaattagaagtcgcaactggcagcattcttagcaagctcaaaatctaaagagagtcttgctcagaatctcaaagaagttctccaactacttcaacaggaagtggaagaagaaccttccaagaaggaagctgaatcatccgagactaatgatgaccaagaagatgatccattctaccagaatgaagatgattgttttggtatatcattggacgacgattaattagttgtaataatcatgaattattgtaactaatttgtcagtttcttttaaataatgtaatttgtaaaaagttttgtaacagttccggtaaacattaccgatactgtagaaacagtaaaaattgggtctatttaaaggagtcctcgtcccctttgtgaggcaccctttcagatagactcagaatcaggtttttagagagagaagctctgcctagggaaaaactctttgtaagcttttctttcggtttcaataaatttcaagttctatttttcatatctcccttctcccctcaccgatcctgtgcggctctgccgccgcttcggtttctttgttttcaaaaac

SEQ ID NO: 10007 - DNA, 1188 bp, Glycine max
  Gm_smallRNAprecursor_2840
cttcaatgatgttctgcagggaaacatgaaaacattaggcattagatattttttttatttggaataagagaaaaggaaaactggttgggattgttaatgttgaccttgtgaacacgaaatgctgctgtaaatcgtgtccttgccatcgaatttgatgggccctatagcacaacattgaatgtaattagttacataacaaaataaaaaaacaacatatacgaaagcacaaaaattgattccaaaatgcaaacaacctataatgaagttatacataaatatacataaagaagatagataaaaaacataacagaaaccatggaaggtaatgatgaaaaacgtgaaaatcgtccatattaggcatacaaatatgaagtcaataaccaatttataaggaacaaacacatataagaagcaacacacaaatgacatacaatatacaaaaataggcatgacaacacgatgaatatcctagtcgacaaaattacaaacatcaccgtgaatatgtagtctataatcagcataaacatataatatagatataataaccatgaaatgaataacagagtgtaaaatagagtatcatcattgtaaggatgtctgatgaaacaaatgtcaaaagctaaacataaataagaaaaaaaagaggaaggattagaatgctaaagaacttactgcattagagaagattgatgattgtgtacttatactattaagggttgagtgatgttggagaaatgagaaaaagaaatgtggacaactgttggttatgatttgatatacctgagattttgtaatttgtattgaatgagctttagtaaatacataatgtagttgtcgaataagttattacacattggaaaccgcttttagttacgtctcttcgtatacattggaaactgcttttaatttgggagttttttacaatttccgtacccgttttttgaattttgaaaatattaattaataattaggaggctttaacaattctcgtactcggtttctttgataatggtgaatatatatatatatatatatatatatatatatatatatatatatatatatatatatatatattaattgggaggctttaacaattcccgtactgattttgtttcataatggtgaaaacaattattacctttctgacttgtgaaatatgattagacatgtagaactttgtagaga

SEQ ID NO: 10008 - DNA, 1035 bp, Glycine max
  Gm_smallRNAprecursor_2841
gagaacaagggagggtacatcccttgtggatcttttcttgtaaaaggatttttacaaggttgaaagaaatcttttcttaattattatgaggccactcgatccaacattatagatgcaacctaagcatgtttcagaacatgtttggaatggggaagaagatcggaaattacatatcagacgagttgtccctacgaatcaaggggaagaagaaattccagagcaaaattttccttttcttcgacaatctggtttttactggattatgaagatgggatacttaaaaataaatgcctcattaattagtgctttgatagaaagatggaggccggaaacacatacgtttcacataagatgcggagagtgtactattactctccaagacgtctctgtattgttaggtctattatgtgtggatggtttaccattaatcggtccaacaaatcttaattgggctgatttatgtgaggaattattgggagtcagaccacaagaaggtgaaattaaaggtagtgtggttaaattaagttggctggctcaccattttgcacaaataaataaccacaacgacgaagaacaagtacgaaggtttgcccgtgcatggatactaagattcattggaggtgtcttattcgttgacaaaagcagtaacaaagtttcgctaagttaccttcaatttttacgtgactttgatgactgtagcacatatgcatggggacctaccgtacttgtttttctatacagagagatgtgcagtgccaccgattataaaactaaattaattagaggtatgtgcatcttactacaaatgtgggcataggaacgatgtccaaccttggctccaaagaggactccttcccaagtaaaaaataaaccactggggcacaggttagtcatttttaaaagcatatttcatttcaaaagaataaatagttttagggtatattaaattttaatctttgtaggtggttgcgacatggaaaccaacatatcagcaataatgatgtgagagtttttcgtcgcaagttggatattatg

SEQ ID NO: 10009 - DNA, 1190 bp, Glycine max
  Gm_smallRNAprecursor_2842
tcaattgtagagattgaaaaaaatattgttgacctgcatctatgaatgattgtcagtagtacattttatccagtaattgatcgttggttagttgaagggtgttgtgcattctacgcttgagtgtatcaaaagaacaattgttaggaactcgcattggtgttggagtgagactttgaaaataaacaccaatttggttgtgagtgattgatccatttggaaaaatgaaagctaatctggagttagcaatggtctgactgcttgtttctcccaaaaatgacatagtaataagattgaatttggtttgtgaaattatgttgtgagattgtgtgtttgtattgtgtatgtgttgtgttatttatggttgtatgagtattctgccacgttgatgtgtattggaatccaatgtttctttttccctagtaagtgatgtagcagacgtccattataatttcagagtgaacaaagagattatgagttgtccatctaatgtcagttttgtacacgtctctaaaaattaaatgtctcacctgcaaaactaacatgaaatggacaactcataatgcagagtgttgtcaatttggactgtgatttttcccatgtaattaaagcagcagacgttcatgatgattttcaaagtgaacaaagagattatgagttgtctatttcatgtctgttttgcaggtgagacatttaatttttagagacgtgtgaaaattgcagagtattgccaatttggactgtgatttttcccttataattaaagcaccaaacgtccataattattttcaaagtgaacaaagagattatgagttgtccatttcatgtcagttttgtcgatgagacatttaatttttagaaacagtgtagtgtaaatggcaaagtattgtgaattttgacagttatgttactatgtaacctactgcagtaaaagtgggtaaactgaaaattgctaatttaaatttaaaggaaaaattatttcaatacgtaaagtgataactgaagatggacataagacattacatgaaaatctcaaagaaaaaataacttaggcatgaatgatccatagattactaatcccgtttgaatataggttcgtgggatggagacaggttacttccttcgggcccggaagaggagtcaatatcactatcatggtttttgacccaacaagtctcgtattcatctgataa

SEQ ID NO: 10010 - DNA, 1158 bp, Glycine max
  Gm_smallRNAprecursor_2843
cctgaaaatagaatttcttgattcaaagaaagaaaatgattctggaaataaaattatgaataatcggaactccactctagagatcaggttaaaccaaatagaaaagacggtagattttctttatgaaaatttcgaaaaagaaaaaaatctaaacttttctgaagaacatactagtggacttatggcattacaaaacaaagattgcattcctataatttgtaataaagagaaaaacaaaagcctacacattttagtcaaaataaattttcctaaaataaataaatttaaccaaaccgaaataattctgcaagccttggtagatactggttgttcttttacttctatatgccaaagtgttgtgcccaagcacaattgtttcaaaagtaatataataaccaaaactagaacaatgtctggagacataataacaaatgatacagaaacacgaaatttcactattcaattatccacaaattgtgaaattttttgtaataaaatttttataaataaagcagatgtggtagacttacgacctgctaaagaaaaaatgattttaggacttgattttattatacataataatagatcaattactattacaaaagattaccgattaatctctacgaactcacaaatgtcacctataatagataaaatcacatcagagttacgaacaaagcgtggtgatgcccccaccaatgataaacaatgtccttgtgatacacccggtagttgtaaaataaaagaataaaaaaatcatggcaatataaacactatagaaacatacgacacatcccatgattcttactatgaaagtattttagaaagcataaaaacagaaacagagctacaatatgagttagctgtagcagaatctgattacaaatctgtcaaaattaacaaaattataacctttgataatatacaacaaattatagatggattgaataaaactagcataataggagaagaccctacaaaatattgggaaaaagatccagttatatgcaaattagaaatcataaacctagatctgataattaaaaccaaagatattcagtatgggaatttcgaacaacaggaatgtaaaagccacataaaaaccctattagatctaaaagttatatcacctagtactagtcctcatagaagccctgc

SEQ ID NO: 10011 - DNA, 1062 bp, Glycine max
  Gm_smallRNAprecursor_2844
ctcacaaatgtcacctataatagataaaatcacatcagagttacgaacaaagcgtggtgatgcccccaccaatgataaacaatgtccttgtgatacacccggtagttgtaaaataaaagaataaaaaaatcatggcaatataaacactatagaaacatacgacacatcccatgattcttactatgaaagtattttagaaagcataaaaacagaaacagagctacaatatgagttagctgtagcagaatctgattacaaatctgtcaaaattaacaaaattataacctttgataatatacaacaaattatagatggattgaataaaactagcataataggagaagaccctacaaaatattgggaaaaagatccagttatatgcaaattagaaatcataaacctagatctgataattaaaaccaaagatattcagtatgggaatttcgaacaacaggaatgtaaaagccacataaaaaccctattagatctaaaagttatatcacctagtactagtcctcatagaagccctgcttttgttgttaataaacactcagaacaaaaaggaggaaagactagaatggtctataattacaaaaggcttaacaataacacccacatagatggatatactatcccctctaaagatgtgttgataaataggatacagaaagctaaacggttttcaaaattcgatttaaaatcaggatttcaccaagtaaaaatgcatcctgattcaataaaatggactgctttttcttgttcagaaagattatttgaatggaaagtaatgtcgtttggactaaaaaatgcgccacaaatttttcaaagaaaaatggataagatttttggaaattataaagaattcacttgtacgtatatagatgacgtacttgtcttttcaaaaactaaagaagaacattatttgcatctcaaacaagttcttcatttatttgaaaaatttgggttgcttatttcaaaatcaaaaatggaaatttgtaaaacacatatttcctttttaggaacagaaataggaaacggaaagataaggctacaacctcatat

SEQ ID NO: 10012 - DNA, 1037 bp, Glycine max
  Gm_smallRNAprecursor_2845
cagagaaatcaaatgttgtggtcctatttatctgcgctgactgtaattatactgtgccagttggagatgtattttactttgattatatgtttatttttttcaattaatttgttcactgtaatcaaaacttgctaattaactatgttttatcaataggcagttgtgtatccagcaaaacctccagaaagcccggatgaagaggtcgatgatcccctgtacctgattgacattgaccatcccacaaccttttttgaagttgctccaggttatgtgggatgctaccatattcggggtgtttaatcaaaacttcccgttgtatataaagcacgaagatctctctgaaattgcacatgttggtcaatgtctcagcatatctattatacaattgtggattctgtaagtcattttagattactattaattaccaaagtaattgttttaaattcatacataattaactttgacttaacaacacagccatctgactgagacaagtgtgcgagcggggaattctgatgtgtatggatttctcgagccacagtccattcagagatctgggcaatcacaatttgaatccgaaagttacatcaagagttggatacagagttcaaaacgagatgtttaccttggagcctatctgaataggtaagtcaaacacaataattgaatttaaataatctatactactacaataacccatattcgtctctactgtagtggacactggcaaatggtcgtcattctacctaaggaaaacctagttgtctggttttgttctttgcataacaggccagacaacttaagggaataattaacaggtcagtattgttttcaatacattttcattggcataactcaacaacatcaatattttaatgttccttatattcaacactagtgctttgaaaggacttgatgatactccacaactgaaatccaaggctgctgctaggtggattgttgttaaggtacgtgatttaaataaaagttctacttatatagattttatgtgtgtgtacactaattgtagttaacat

SEQ ID NO: 10013 - DNA, 1051 bp, Glycine max
  Gm_smallRNAprecursor_2846
tttaaagttaacatctatattagtttgagcattattgtattttttatttaaatttatttgaattctttatttgttagtaactattttcattttattcatattatgtaagtgttgtctcgaatggaagcacataagatttatttaaggaattctttcatatttgaggtatatatatatatatatatatatatatatatatatatatatatatatatatatatatatatatatatatatacggacagataggaagtaagaatgcaatatgataaatgaaaatgaaaatataaacttgtaaaacagatatcaagggcacaccggagaccaacttacaaatcccaggttttcataaacaaaaaaaccgaagcggcgacagagccgcacaggatcggtaaagagagagaagagggatgaaaaatagaaatttattgaaacttgaaagaagcacttacaaaagttttctttcagagcacctctcttctgaaacctgaaaaatggccaaatgaaagggtgcctcacaacatagttgaggactccttatatagctaaaaatctgagaccggtagttgccagtagttttgaccggaactatttgactgtttgttataagacaagtagttttgaccaggactttaatggctataggacaggtagtattgcccaaaattaattacacattaattacaaacagacggttttgtgaccgaaattaaatttaatctaaacagataccaaaacaatcatcctcgttttggtaaaaggggtcttcttcttcttcttcagcagaacttgtttcttccttctttgaggatgaaccttcatcttcctgctgtaacatttgcaagacttcctttagatttttagttaggatctcctttgatttcgatcctgctaaaaatgctgccagatgagacttttggtacaaaaacacggaagtttctggatcagctgctttgaggaattctggatgggattggaaccagagttttacttgttctggatctgctttggatgagtcaaattatgtccaccattttacaaatgcgtgtct

SEQ ID NO: 10014 - DNA, 1170 bp, Glycine max
  Gm_smallRNAprecursor_2847
gtgttgtctcgaatggaagcacataagatttatttaaggaattctttcatatttgaggtatatatatatatatatatatatatatatatatatatatatatatatatatatatatatatatatatatatacggacagataggaagtaagaatgcaatatgataaatgaaaatgaaaatataaacttgtaaaacagatatcaagggcacaccggagaccaacttacaaatcccaggttttcataaacaaaaaaaccgaagcggcgacagagccgcacaggatcggtaaagagagagaagagggatgaaaaatagaaatttattgaaacttgaaagaagcacttacaaaagttttctttcagagcacctctcttctgaaacctgaaaaatggccaaatgaaagggtgcctcacaacatagttgaggactccttatatagctaaaaatctgagaccggtagttgccagtagttttgaccggaactatttgactgtttgttataagacaagtagttttgaccaggactttaatggctataggacaggtagtattgcccaaaattaattacacattaattacaaacagacggttttgtgaccgaaattaaatttaatctaaacagataccaaaacaatcatcctcgttttggtaaaaggggtcttcttcttcttcttcagcagaacttgtttcttccttctttgaggatgaaccttcatcttcctgctgtaacatttgcaagacttcctttagatttttagttaggatctcctttgatttcgatcctgctaaaaatgctgccagatgagacttttggtacaaaaacacggaagtttctggatcagctgctttgaggaattctggatgggattggaaccagagttttacttgttctggatctgctttggatgagtcaaattatgtccaccattttacaaatgcgtgtctttgtagtgatggatattggcttgtcttttcagtcttgctgtaacgatattgccatgagaagatccatgacagtgcaaagcttgagaagtacttaagatctactggaattcgtgattcctgcgaattgtattgtctctcaaattgagcaaatccttgttggactgtttctgggaatatctctggtattggtccaaagaagtcccaccattgtaaaatccaatttggaa

SEQ ID NO: 10015 - DNA, 1080 bp, Glycine max
  Gm_smallRNAprecursor_2848
aagacaagtagttttgaccaggactttaatggctataggacaggtagtattgcccaaaattaattacacattaattacaaacagacggttttgtgaccgaaattaaatttaatctaaacagataccaaaacaatcatcctcgttttggtaaaaggggtcttcttcttcttcttcagcagaacttgtttcttccttctttgaggatgaaccttcatcttcctgctgtaacatttgcaagacttcctttagatttttagttaggatctcctttgatttcgatcctgctaaaaatgctgccagatgagacttttggtacaaaaacacggaagtttctggatcagctgctttgaggaattctggatgggattggaaccagagttttacttgttctggatctgctttggatgagtcaaattatgtccaccattttacaaatgcgtgtctttgtagtgatggatattggcttgtcttttcagtcttgctgtaacgatattgccatgagaagatccatgacagtgcaaagcttgagaagtacttaagatctactggaattcgtgattcctgcgaattgtattgtctctcaaattgagcaaatccttgttggactgtttctgggaatatctctggtattggtccaaagaagtcccaccattgtaaaatccaatttggaaaattgtaaattgtattggtcttgaaatatatcagccatgaatgcttgaagcgggtattttggtgccaaaacaccttagtccaagcatcaacataatctcaataggtataacctaccggatcaaatggaactgaaaatctctttcctttgttcaagtccgaaccaaagtgtcttggttgaataacttttagtatttggattgtggagtgggtgtttaatgtttggtcttttgggtctttgaaatgtttgatagatactaaatttgaatctaccaaaatcaattcataaaaagttcttgtcttcaggatgatcgttggtttgtagtgaaatcctgatgggaaagccttggccgacgccttgaagggatttttgtcccaaaatccaggttccatctgcaaaacagttaaaaa

SEQ ID NO: 10016 - DNA, 1072 bp, Glycine max
  Gm_smallRNAprecursor_2849
ccttcatcttcctgctgtaacatttgcaagacttcctttagatttttagttaggatctcctttgatttcgatcctgctaaaaatgctgccagatgagacttttggtacaaaaacacggaagtttctggatcagctgctttgaggaattctggatgggattggaaccagagttttacttgttctggatctgctttggatgagtcaaattatgtccaccattttacaaatgcgtgtctttgtagtgatggatattggcttgtcttttcagtcttgctgtaacgatattgccatgagaagatccatgacagtgcaaagcttgagaagtacttaagatctactggaattcgtgattcctgcgaattgtattgtctctcaaattgagcaaatccttgttggactgtttctgggaatatctctggtattggtccaaagaagtcccaccattgtaaaatccaatttggaaaattgtaaattgtattggtcttgaaatatatcagccatgaatgcttgaagcgggtattttggtgccaaaacaccttagtccaagcatcaacataatctcaataggtataacctaccggatcaaatggaactgaaaatctctttcctttgttcaagtccgaaccaaagtgtcttggttgaataacttttagtatttggattgtggagtgggtgtttaatgtttggtcttttgggtctttgaaatgtttgatagatactaaatttgaatctaccaaaatcaattcataaaaagttcttgtcttcaggatgatcgttggtttgtagtgaaatcctgatgggaaagccttggccgacgccttgaagggatttttgtcccaaaatccaggttccatctgcaaaacagttaaaaatttatttttataaatatagtttttagtttgtttggcaggtggtgtttgtgctttggctaaaggtagtttccctttaggattggtagctgttttggtcattgatgcattttggatcattgtttgtaaatttgattcagaatcatcatcagattctgaggcaatgtctgcccaagattttttgattatttttggaaatttgg

SEQ ID NO: 10017 - DNA, 1135 bp, Glycine max
  Gm_smallRNAprecursor_2850
taattatctcacaaatgaagaaaaataaaaaatttacagtgcagtcaaaacagatctcaatggaaaagtcattactaatgacgatgatatagagatttctgacgctgttaacacattaatttttacaatagcccaacatttcattggagacccatccttgtggaaagataggtctgagaattattatcaaatcttaagtgtagaaccttagcagactttaggtggtacagagatactttcctaagtagggtttacaccagagaagatagtcaacaacctttttggaaagaaaaatttctagccggtcttcccagatcattaggggacaaggttagagataaaatccgtagtcaatatgccaatggagatattccatatgaaagtttaagctatggtcaattgatttcttatgtccaaaaggtagccttaaagatttgtcaggatgacaaaattcagaggcaattagccaaagaaaaggctcaatcaaaggaagatttaggttccttctgtgaacaatttggtctaccggcttgtccaaaacaaaataagaaacaatcctctagaaaagaaatcaatgagaataaaccggtcaataaaaagagatttccaagaaggagatactcacacaaaccctcaaccagtaaagaaatggaatattcgaaacaaaaaaataaaataaaaaataacatgttacaattgtggaaaacaaggccacattagtaaatattgtagattaaaaaagaagtgaagaaacctcaatagagtttgctagcaaatttcccaaccaaatcttagacaaaacccagttacaaagatttctaggttgtctaaattatgtaggagaatttgtcccctatttaaacaatattgtcaagccattacatgataggctgaagaaaaatctgcctctttggtctgacctccatacacaaacagttaaagaaattaaactcaaagtccaatccattaaatgtttgtatcttcctattccacaggcatttaaaattgtcgaaactgatacatcagacataggttatggtggcatcctcaaacaaagagtccatggccaagatcatgccattgcatatacatcaaaacattggaatcctgcacaattaaaatattcaacttttaa

SEQ ID NO: 10018 - DNA, 1196 bp, Glycine max
  Gm_smallRNAprecursor_2851
aacatttcattggagacccatccttgtggaaagataggtctgagaattattatcaaatcttaagtgtagaaccttagcagactttaggtggtacagagatactttcctaagtagggtttacaccagagaagatagtcaacaacctttttggaaagaaaaatttctagccggtcttcccagatcattaggggacaaggttagagataaaatccgtagtcaatatgccaatggagatattccatatgaaagtttaagctatggtcaattgatttcttatgtccaaaaggtagccttaaagatttgtcaggatgacaaaattcagaggcaattagccaaagaaaaggctcaatcaaaggaagatttaggttccttctgtgaacaatttggtctaccggcttgtccaaaacaaaataagaaacaatcctctagaaaagaaatcaatgagaataaaccggtcaataaaaagagatttccaagaaggagatactcacacaaaccctcaaccagtaaagaaatggaatattcgaaacaaaaaaataaaataaaaaataacatgttacaattgtggaaaacaaggccacattagtaaatattgtagattaaaaaagaagtgaagaaacctcaatagagtttgctagcaaatttcccaaccaaatcttagacaaaacccagttacaaagatttctaggttgtctaaattatgtaggagaatttgtcccctatttaaacaatattgtcaagccattacatgataggctgaagaaaaatctgcctctttggtctgacctccatacacaaacagttaaagaaattaaactcaaagtccaatccattaaatgtttgtatcttcctattccacaggcatttaaaattgtcgaaactgatacatcagacataggttatggtggcatcctcaaacaaagagtccatggccaagatcatgccattgcatatacatcaaaacattggaatcctgcacaattaaaatattcaacttttaaaagggaagttttagcaattgttttgtgcatttccaagtttcaatcggatttattaaaccaaaaatttctaatcagggttgattgtaaatcaaccaaagatattttactaaaagatgttaaaaaccttgcctgaaaacaaatttttgcaagatggcaagcaattctaactgtcattgattttgacatagaatatat

SEQ ID NO: 10019 - DNA, 1080 bp, Glycine max
  Gm_smallRNAprecursor_2852
aaaataaaaaataacatgttacaattgtggaaaacaaggccacattagtaaatattgtagattaaaaaagaagtgaagaaacctcaatagagtttgctagcaaatttcccaaccaaatcttagacaaaacccagttacaaagatttctaggttgtctaaattatgtaggagaatttgtcccctatttaaacaatattgtcaagccattacatgataggctgaagaaaaatctgcctctttggtctgacctccatacacaaacagttaaagaaattaaactcaaagtccaatccattaaatgtttgtatcttcctattccacaggcatttaaaattgtcgaaactgatacatcagacataggttatggtggcatcctcaaacaaagagtccatggccaagatcatgccattgcatatacatcaaaacattggaatcctgcacaattaaaatattcaacttttaaaagggaagttttagcaattgttttgtgcatttccaagtttcaatcggatttattaaaccaaaaatttctaatcagggttgattgtaaatcaaccaaagatattttactaaaagatgttaaaaaccttgcctgaaaacaaatttttgcaagatggcaagcaattctaactgtcattgattttgacatagaatatatcaagggcacctcaaactcgttacttgactaccttacccgtgaattcttacagaaaagtggtaatgcctcctaaggcatcaggaatctccctaaggggaggacgaagcacaggctaaggacccagattggctcttccatagccaaccactaagaaatcatcaacctcttctgggtcaccaacccaggctgggtcatccacccagaaaaccaatttagaagggtcatcaacccagattacctcaatcaaacctgagccatccactcaggaatctcccaaaccagcaaccgccaaacaaacattgggcgactatgcatggccaattgaaacccttcaggcccttcaagacatgggtctaacaaaatttccaaaaataatcaaaaaatcttgggcagacattgcctcataatctgatgatgattct

SEQ ID NO: 10020 - DNA, 1098 bp, Glycine max
  Gm_smallRNAprecursor_2853
ggaatctccctaaggggaggacgaagcacaggctaaggacccagattggctcttccatagccaaccactaagaaatcatcaacctcttctgggtcaccaacccaggctgggtcatccacccagaaaaccaatttagaagggtcatcaacccagattacctcaatcaaacctgagccatccactcaggaatctcccaaaccagcaaccgccaaacaaacattgggcgactatgcatggccaattgaaacccttcaggcccttcaagacatgggtctaacaaaatttccaaaaataatcaaaaaatcttgggcagacattgcctcataatctgatgatgattctgaatcaaatttacaaacaatgatccaaaatgcatcaatgaccaaaacaactaccaatcctaaagggaaactacctttagccaaagcacaaacaccacctaccaatcaaactaacaactatatttacaaaaataattttttaactgttttgcatatggaacctgaattttgggacaaaaatcccttcaaggcgacgaccaaggctttcccatcaggatttcactacaaaccaacgaccatcctgaagacaagaactttttatgaattgattttggtagattcaaattcagtatctatcaaatatttcaaagacccaaaaaaccaaacatttaacacccactccacaatccaaatactaaaagttcttcaaccaagacactttggtttggacttgaacaaaggaaagaggttttcagttccatttgatccggtaggttatacctattgggattatgttgatgcttggactaaggtgttttggcaccaaaatactcgcttcaagcattcatggctgatgtatttcaagaccaatacaatttacaattttccaaattggtttttacaatggtgggacttctttggaccaattccaaagatattcccagaaataatccaacaaggatttgctcaatttgagagacaatacaattcgcaggaatcacgaattcctgtagatcttaagtacttctcaagctttgcactgtcatggatcttctcatggcaatatcgttacagcaagactgaaaagacaagccaa

SEQ ID NO: 10021 - DNA, 1082 bp, Glycine max
  Gm_smallRNAprecursor_2854
atccacccagaaaaccaatttagaagggtcatcaacccagattacctcaatcaaacctgagccatccactcaggaatctcccaaaccagcaaccgccaaacaaacattgggcgactatgcatggccaattgaaacccttcaggcccttcaagacatgggtctaacaaaatttccaaaaataatcaaaaaatcttgggcagacattgcctcataatctgatgatgattctgaatcaaatttacaaacaatgatccaaaatgcatcaatgaccaaaacaactaccaatcctaaagggaaactacctttagccaaagcacaaacaccacctaccaatcaaactaacaactatatttacaaaaataattttttaactgttttgcatatggaacctgaattttgggacaaaaatcccttcaaggcgacgaccaaggctttcccatcaggatttcactacaaaccaacgaccatcctgaagacaagaactttttatgaattgattttggtagattcaaattcagtatctatcaaatatttcaaagacccaaaaaaccaaacatttaacacccactccacaatccaaatactaaaagttcttcaaccaagacactttggtttggacttgaacaaaggaaagaggttttcagttccatttgatccggtaggttatacctattgggattatgttgatgcttggactaaggtgttttggcaccaaaatactcgcttcaagcattcatggctgatgtatttcaagaccaatacaatttacaattttccaaattggtttttacaatggtgggacttctttggaccaattccaaagatattcccagaaataatccaacaaggatttgctcaatttgagagacaatacaattcgcaggaatcacgaattcctgtagatcttaagtacttctcaagctttgcactgtcatggatcttctcatggcaatatcgttacagcaagactgaaaagacaagccaatatccatcactacaaagacacacatttgtaaaatggtggacacaatttgactcatccaaagcagatccagaacaagtgaaactctggttccaatccc

SEQ ID NO: 10022 - DNA, 1082 bp, Glycine max; identical to SEQ ID NO: 10021
  Gm_smallRNAprecursor_2855

SEQ ID NO: 10023 - DNA, 1084 bp, Glycine max
  Gm_smallRNAprecursor_2856
atccacccagaaaaccaatttagaagggtcatcaacccagattacctcaatcaaacctgagccatccactcaggaatctcccaaaccagcaaccgccaaacaaacattgggcgactatgcatggccaattgaaacccttcaggcccttcaagacatgggtctaacaaaatttccaaaaataatcaaaaaatcttgggcagacattgcctcataatctgatgatgattctgaatcaaatttacaaacaatgatccaaaatgcatcaatgaccaaaacaactaccaatcctaaagggaaactacctttagccaaagcacaaacaccacctaccaatcaaactaacaactatatttacaaaaataattttttaactgttttgcatatggaacctgaattttgggacaaaaatcccttcaaggcgacgaccaaggctttcccatcaggatttcactacaaaccaacgaccatcctgaagacaagaactttttatgaattgattttggtagattcaaattcagtatctatcaaatatttcaaagacccaaaaaaccaaacatttaacacccactccacaatccaaatactaaaagttcttcaaccaagacactttggtttggacttgaacaaaggaaagaggttttcagttccatttgatccggtaggttatacctattgggattatgttgatgcttggactaaggtgttttggcaccaaaatactcgcttcaagcattcatggctgatgtatttcaagaccaatacaatttacaattttccaaattggtttttacaatggtgggacttctttggaccaattccaaagatattcccagaaataatccaacaaggatttgctcaatttgagagacaatacaattcgcaggaatcacgaattcctgtagatcttaagtacttctcaagctttgcactgtcatggatcttctcatggcaatatcgttacagcaagactgaaaagacaagccaatatccatcactacaaagacacacatttgtaaaatggtggacacaatttgactcatccaaagcagatccagaacaagtgaaactctggttccaatcccat

SEQ ID NO: 10024 - DNA, 1084 bp, Glycine max; identical to SEQ ID NO: 10023
  Gm_smallRNAprecursor_2857

SEQ ID NO: 10025 - DNA, 1171 bp, Glycine max
  Gm_smallRNAprecursor_2858
tcccaaaccagcaaccgccaaacaaacattgggcgactatgcatggccaattgaaacccttcaggcccttcaagacatgggtctaacaaaatttccaaaaataatcaaaaaatcttgggcagacattgcctcataatctgatgatgattctgaatcaaatttacaaacaatgatccaaaatgcatcaatgaccaaaacaactaccaatcctaaagggaaactacctttagccaaagcacaaacaccacctaccaatcaaactaacaactatatttacaaaaataattttttaactgttttgcatatggaacctgaattttgggacaaaaatcccttcaaggcgacgaccaaggctttcccatcaggatttcactacaaaccaacgaccatcctgaagacaagaactttttatgaattgattttggtagattcaaattcagtatctatcaaatatttcaaagacccaaaaaaccaaacatttaacacccactccacaatccaaatactaaaagttcttcaaccaagacactttggtttggacttgaacaaaggaaagaggttttcagttccatttgatccggtaggttatacctattgggattatgttgatgcttggactaaggtgttttggcaccaaaatactcgcttcaagcattcatggctgatgtatttcaagaccaatacaatttacaattttccaaattggtttttacaatggtgggacttctttggaccaattccaaagatattcccagaaataatccaacaaggatttgctcaatttgagagacaatacaattcgcaggaatcacgaattcctgtagatcttaagtacttctcaagctttgcactgtcatggatcttctcatggcaatatcgttacagcaagactgaaaagacaagccaatatccatcactacaaagacacacatttgtaaaatggtggacacaatttgactcatccaaagcagatccagaacaagtgaaactctggttccaatcccatccagaattcctcaaagcagctgatccaaaaacttctttgtttttgaaccaaaagtctcatttggcagcatttttagcaggaacaaaatcaaaggagatcctaactaaaaatctaaaggaagtattgcaaatgttacagcaggaagaagaaggttcatcctcaaag

SEQ ID NO: 10026 - DNA, 1166 bp, Glycine max
  Gm_smallRNAprecursor_2859
ccaaaccagcaaccgccaaacaaacattgggcgactatgcatggccaattgaaacccttcaggcccttcaagacatgggtctaacaaaatttccaaaaataatcaaaaaatcttgggcagacattgcctcataatctgatgatgattctgaatcaaatttacaaacaatgatccaaaatgcatcaatgaccaaaacaactaccaatcctaaagggaaactacctttagccaaagcacaaacaccacctaccaatcaaactaacaactatatttacaaaaataattttttaactgttttgcatatggaacctgaattttgggacaaaaatcccttcaaggcgacgaccaaggctttcccatcaggatttcactacaaaccaacgaccatcctgaagacaagaactttttatgaattgattttggtagattcaaattcagtatctatcaaatatttcaaagacccaaaaaaccaaacatttaacacccactccacaatccaaatactaaaagttcttcaaccaagacactttggtttggacttgaacaaaggaaagaggttttcagttccatttgatccggtaggttatacctattgggattatgttgatgcttggactaaggtgttttggcaccaaaatactcgcttcaagcattcatggctgatgtatttcaagaccaatacaatttacaattttccaaattggtttttacaatggtgggacttctttggaccaattccaaagatattcccagaaataatccaacaaggatttgctcaatttgagagacaatacaattcgcaggaatcacgaattcctgtagatcttaagtacttctcaagctttgcactgtcatggatcttctcatggcaatatcgttacagcaagactgaaaagacaagccaatatccatcactacaaagacacacatttgtaaaatggtggacacaatttgactcatccaaagcagatccagaacaagtgaaactctggttccaatcccatccagaattcctcaaagcagctgatccaaaaacttctttgtttttgaaccaaaagtctcatttggcagcatttttagcaggaacaaaatcaaaggagatcctaactaaaaatctaaaggaagtattgcaaatgttacagcaggaagaagaaggttcatcctca

SEQ ID NO: 10027 - DNA, 1169 bp, Glycine max
  Gm_smallRNAprecursor_2860
ccaaaccagcaaccgccaaacaaacattgggcgactatgcatggccaattgaaacccttcaggcccttcaagacatgggtctaacaaaatttccaaaaataatcaaaaaatcttgggcagacattgcctcataatctgatgatgattctgaatcaaatttacaaacaatgatccaaaatgcatcaatgaccaaaacaactaccaatcctaaagggaaactacctttagccaaagcacaaacaccacctaccaatcaaactaacaactatatttacaaaaataattttttaactgttttgcatatggaacctgaattttgggacaaaaatcccttcaaggcgacgaccaaggctttcccatcaggatttcactacaaaccaacgaccatcctgaagacaagaactttttatgaattgattttggtagattcaaattcagtatctatcaaatatttcaaagacccaaaaaaccaaacatttaacacccactccacaatccaaatactaaaagttcttcaaccaagacactttggtttggacttgaacaaaggaaagaggttttcagttccatttgatccggtaggttatacctattgggattatgttgatgcttggactaaggtgttttggcaccaaaatactcgcttcaagcattcatggctgatgtatttcaagaccaatacaatttacaattttccaaattggtttttacaatggtgggacttctttggaccaattccaaagatattcccagaaataatccaacaaggatttgctcaatttgagagacaatacaattcgcaggaatcacgaattcctgtagatcttaagtacttctcaagctttgcactgtcatggatcttctcatggcaatatcgttacagcaagactgaaaagacaagccaatatccatcactacaaagacacacatttgtaaaatggtggacacaatttgactcatccaaagcagatccagaacaagtgaaactctggttccaatcccatccagaattcctcaaagcagctgatccaaaaacttctttgtttttgaaccaaaagtctcatttggcagcatttttagcaggaacaaaatcaaaggagatcctaactaaaaatctaaaggaagtattgcaaatgttacagcaggaagaagaaggttcatcctcaaag

SEQ ID NO: 10028 - DNA, 1107 bp, Glycine max
  Gm_smallRNAprecursor_2861
aaccagcaaccgccaaacaaacattgggcgactatgcatggccaattgaaacccttcaggcccttcaagacatgggtctaacaaaatttccaaaaataatcaaaaaatcttgggcagacattgcctcataatctgatgatgattctgaatcaaatttacaaacaatgatccaaaatgcatcaatgaccaaaacaactaccaatcctaaagggaaactacctttagccaaagcacaaacaccacctaccaatcaaactaacaactatatttacaaaaataattttttaactgttttgcatatggaacctgaattttgggacaaaaatcccttcaaggcgacgaccaaggctttcccatcaggatttcactacaaaccaacgaccatcctgaagacaagaactttttatgaattgattttggtagattcaaattcagtatctatcaaatatttcaaagacccaaaaaaccaaacatttaacacccactccacaatccaaatactaaaagttcttcaaccaagacactttggtttggacttgaacaaaggaaagaggttttcagttccatttgatccggtaggttatacctattgggattatgttgatgcttggactaaggtgttttggcaccaaaatactcgcttcaagcattcatggctgatgtatttcaagaccaatacaatttacaattttccaaattggtttttacaatggtgggacttctttggaccaattccaaagatattcccagaaataatccaacaaggatttgctcaatttgagagacaatacaattcgcaggaatcacgaattcctgtagatcttaagtacttctcaagctttgcactgtcatggatcttctcatggcaatatcgttacagcaagactgaaaagacaagccaatatccatcactacaaagacacacatttgtaaaatggtggacacaatttgactcatccaaagcagatccagaacaagtgaaactctggttccaatcccatccagaattcctcaaagcagctgatccaaaaacttctttgtttttgaaccaaaagtctcatttggcagcatttttagcaggaacaaaatcaaaggagatcctaacta

SEQ ID NO: 10029 - DNA, 1107 bp, Glycine max; identical to SEQ ID NO: 10028
  Gm_smallRNAprecursor_2862

SEQ ID NO: 10030 - DNA, 1108 bp, Glycine max
  Gm_smallRNAprecursor_2863
aaccagcaaccgccaaacaaacattgggcgactatgcatggccaattgaaacccttcaggcccttcaagacatgggtctaacaaaatttccaaaaataatcaaaaaatcttgggcagacattgcctcataatctgatgatgattctgaatcaaatttacaaacaatgatccaaaatgcatcaatgaccaaaacaactaccaatcctaaagggaaactacctttagccaaagcacaaacaccacctaccaatcaaactaacaactatatttacaaaaataattttttaactgttttgcatatggaacctgaattttgggacaaaaatcccttcaaggcgacgaccaaggctttcccatcaggatttcactacaaaccaacgaccatcctgaagacaagaactttttatgaattgattttggtagattcaaattcagtatctatcaaatatttcaaagacccaaaaaaccaaacatttaacacccactccacaatccaaatactaaaagttcttcaaccaagacactttggtttggacttgaacaaaggaaagaggttttcagttccatttgatccggtaggttatacctattgggattatgttgatgcttggactaaggtgttttggcaccaaaatactcgcttcaagcattcatggctgatgtatttcaagaccaatacaatttacaattttccaaattggtttttacaatggtgggacttctttggaccaattccaaagatattcccagaaataatccaacaaggatttgctcaatttgagagacaatacaattcgcaggaatcacgaattcctgtagatcttaagtacttctcaagctttgcactgtcatggatcttctcatggcaatatcgttacagcaagactgaaaagacaagccaatatccatcactacaaagacacacatttgtaaaatggtggacacaatttgactcatccaaagcagatccagaacaagtgaaactctggttccaatcccatccagaattcctcaaagcagctgatccaaaaacttctttgtttttgaaccaaaagtctcatttggcagcatttttagcaggaacaaaatcaaaggagatcctaactaa

SEQ ID NO: 10031 - DNA, 1108 bp, Glycine max; identical to SEQ ID NO: 10030
  Gm_smallRNAprecursor_2864

SEQ ID NO: 10032 - DNA, 1102 bp, Glycine max
  Gm_smallRNAprecursor_2865
cagcaaccgccaaacaaacattgggcgactatgcatggccaattgaaacccttcaggcccttcaagacatgggtctaacaaaatttccaaaaataatcaaaaaatcttgggcagacattgcctcataatctgatgatgattctgaatcaaatttacaaacaatgatccaaaatgcatcaatgaccaaaacaactaccaatcctaaagggaaactacctttagccaaagcacaaacaccacctaccaatcaaactaacaactatatttacaaaaataattttttaactgttttgcatatggaacctgaattttgggacaaaaatcccttcaaggcgacgaccaaggctttcccatcaggatttcactacaaaccaacgaccatcctgaagacaagaactttttatgaattgattttggtagattcaaattcagtatctatcaaatatttcaaagacccaaaaaaccaaacatttaacacccactccacaatccaaatactaaaagttcttcaaccaagacactttggtttggacttgaacaaaggaaagaggttttcagttccatttgatccggtaggttatacctattgggattatgttgatgcttggactaaggtgttttggcaccaaaatactcgcttcaagcattcatggctgatgtatttcaagaccaatacaatttacaattttccaaattggtttttacaatggtgggacttctttggaccaattccaaagatattcccagaaataatccaacaaggatttgctcaatttgagagacaatacaattcgcaggaatcacgaattcctgtagatcttaagtacttctcaagctttgcactgtcatggatcttctcatggcaatatcgttacagcaagactgaaaagacaagccaatatccatcactacaaagacacacatttgtaaaatggtggacacaatttgactcatccaaagcagatccagaacaagtgaaactctggttccaatcccatccagaattcctcaaagcagctgatccaaaaacttctttgtttttgaaccaaaagtctcatttggcagcatttttagcaggaacaaaatcaaaggagatcctaac

SEQ ID NO: 10033 - DNA, 1098 bp, Glycine max
  Gm_smallRNAprecursor_2866
caagacatgggtctaacaaaatttccaaaaataatcaaaaaatcttgggcagacattgcctcataatctgatgatgattctgaatcaaatttacaaacaatgatccaaaatgcatcaatgaccaaaacaactaccaatcctaaagggaaactacctttagccaaagcacaaacaccacctaccaatcaaactaacaactatatttacaaaaataattttttaactgttttgcatatggaacctgaattttgggacaaaaatcccttcaaggcgacgaccaaggctttcccatcaggatttcactacaaaccaacgaccatcctgaagacaagaactttttatgaattgattttggtagattcaaattcagtatctatcaaatatttcaaagacccaaaaaaccaaacatttaacacccactccacaatccaaatactaaaagttcttcaaccaagacactttggtttggacttgaacaaaggaaagaggttttcagttccatttgatccggtaggttatacctattgggattatgttgatgcttggactaaggtgttttggcaccaaaatactcgcttcaagcattcatggctgatgtatttcaagaccaatacaatttacaattttccaaattggtttttacaatggtgggacttctttggaccaattccaaagatattcccagaaataatccaacaaggatttgctcaatttgagagacaatacaattcgcaggaatcacgaattcctgtagatcttaagtacttctcaagctttgcactgtcatggatcttctcatggcaatatcgttacagcaagactgaaaagacaagccaatatccatcactacaaagacacacatttgtaaaatggtggacacaatttgactcatccaaagcagatccagaacaagtgaaactctggttccaatcccatccagaattcctcaaagcagctgatccaaaaacttctttgtttttgaaccaaaagtctcatttggcagcatttttagcaggaacaaaatcaaaggagatcctaactaaaaatctaaaggaagtattgcaaatgttacagcaggaagaagaaggttcatcctca

SEQ ID NO: 10034 - DNA, 1099 bp, Glycine max
  Gm_smallRNAprecursor_2867
caagacatgggtctaacaaaatttccaaaaataatcaaaaaatcttgggcagacattgcctcataatctgatgatgattctgaatcaaatttacaaacaatgatccaaaatgcatcaatgaccaaaacaactaccaatcctaaagggaaactacctttagccaaagcacaaacaccacctaccaatcaaactaacaactatatttacaaaaataattttttaactgttttgcatatggaacctgaattttgggacaaaaatcccttcaaggcgacgaccaaggctttcccatcaggatttcactacaaaccaacgaccatcctgaagacaagaactttttatgaattgattttggtagattcaaattcagtatctatcaaatatttcaaagacccaaaaaaccaaacatttaacacccactccacaatccaaatactaaaagttcttcaaccaagacactttggtttggacttgaacaaaggaaagaggttttcagttccatttgatccggtaggttatacctattgggattatgttgatgcttggactaaggtgttttggcaccaaaatactcgcttcaagcattcatggctgatgtatttcaagaccaatacaatttacaattttccaaattggtttttacaatggtgggacttctttggaccaattccaaagatattcccagaaataatccaacaaggatttgctcaatttgagagacaatacaattcgcaggaatcacgaattcctgtagatcttaagtacttctcaagctttgcactgtcatggatcttctcatggcaatatcgttacagcaagactgaaaagacaagccaatatccatcactacaaagacacacatttgtaaaatggtggacacaatttgactcatccaaagcagatccagaacaagtgaaactctggttccaatcccatccagaattcctcaaagcagctgatccaaaaacttctttgtttttgaaccaaaagtctcatttggcagcatttttagcaggaacaaaatcaaaggagatcctaactaaaaatctaaaggaagtattgcaaatgttacagcaggaagaagaaggttcatcctcaa

SEQ ID NO: 10035 - DNA, 1169 bp, Glycine max
  Gm_smallRNAprecursor_2868
cgacgaccaaggctttcccatcaggatttcactacaaaccaacgaccatcctgaagacaagaactttttatgaattgattttggtagattcaaattcagtatctatcaaatatttcaaagacccaaaaaaccaaacatttaacacccactccacaatccaaatactaaaagttcttcaaccaagacactttggtttggacttgaacaaaggaaagaggttttcagttccatttgatccggtaggttatacctattgggattatgttgatgcttggactaaggtgttttggcaccaaaatactcgcttcaagcattcatggctgatgtatttcaagaccaatacaatttacaattttccaaattggtttttacaatggtgggacttctttggaccaattccaaagatattcccagaaataatccaacaaggatttgctcaatttgagagacaatacaattcgcaggaatcacgaattcctgtagatcttaagtacttctcaagctttgcactgtcatggatcttctcatggcaatatcgttacagcaagactgaaaagacaagccaatatccatcactacaaagacacacatttgtaaaatggtggacacaatttgactcatccaaagcagatccagaacaagtgaaactctggttccaatcccatccagaattcctcaaagcagctgatccaaaaacttctttgtttttgaaccaaaagtctcatttggcagcatttttagcaggaacaaaatcaaaggagatcctaactaaaaatctaaaggaagtattgcaaatgttacagcaggaagaagaaggttcatcctcaaagaaggaagaaacaagttctgctgaagaagaagaagaagaccccttttaccaaaacgaggatgattgttttggtatctgtttagattaaatttaatttcggtcacaaaaccgtctttttgtaattaatgtgtaattaattttggacaatactacttgtcctgtagccattaaagtcccggtcaaaactacttgtcttgtaacaaacagttaaatagttccggtcaaaactaccgagaactactggtctcagatttttggctatataaggagtcctcaactatgttgtgaggcaccctttcatttggccattttttaggtttctgaagggaggtgctctgaa

SEQ ID NO: 10036 - DNA, 1064 bp, Glycine max
  Gm_smallRNAprecursor_2869
atttcaagaccaatacaatttacaattttccaaattggtttttacaatggtgggacttctttggaccaattccaaagatattcccagaaataatccaacaaggatttgctcaatttgagagacaatacaattcgcaggaatcacgaattcctgtagatcttaagtacttctcaagctttgcactgtcatggatcttctcatggcaatatcgttacagcaagactgaaaagacaagccaatatccatcactacaaagacacacatttgtaaaatggtggacacaatttgactcatccaaagcagatccagaacaagtgaaactctggttccaatcccatccagaattcctcaaagcagctgatccaaaaacttctttgtttttgaaccaaaagtctcatttggcagcatttttagcaggaacaaaatcaaaggagatcctaactaaaaatctaaaggaagtattgcaaatgttacagcaggaagaagaaggttcatcctcaaagaaggaagaaacaagttctgctgaagaagaagaagaagaccccttttaccaaaacgaggatgattgttttggtatctgtttagattaaatttaatttcggtcacaaaaccgtctttttgtaattaatgtgtaattaattttggacaatactacttgtcctgtagccattaaagtcccggtcaaaactacttgtcttgtaacaaacagttaaatagttccggtcaaaactaccgagaactactggtctcagatttttggctatataaggagtcctcaactatgttgtgaggcaccctttcatttggccattttttaggtttctgaagggaggtgctctgaaagaaaacttttgtaagcgcttctttcaagtttcaataaatttctatttttcatccctcttctctctctttaccgatcctgtgcggctctgtcgccgcttcggtttctttgtttatgaaaacctgagatttgtaagccggtctccggtgtgcccttgatatctgtttttcaagtttatattttcattttcatttatcatattgcattcttacttcctatctgt

SEQ ID NO: 10037 - DNA, 1060 bp, Glycine max
  Gm_smallRNAprecursor_2870
tttcaagaccaatacaatttacaattttccaaattggtttttacaatggtgggacttctttggaccaattccaaagatattcccagaaataatccaacaaggatttgctcaatttgagagacaatacaattcgcaggaatcacgaattcctgtagatcttaagtacttctcaagctttgcactgtcatggatcttctcatggcaatatcgttacagcaagactgaaaagacaagccaatatccatcactacaaagacacacatttgtaaaatggtggacacaatttgactcatccaaagcagatccagaacaagtgaaactctggttccaatcccatccagaattcctcaaagcagctgatccaaaaacttctttgtttttgaaccaaaagtctcatttggcagcatttttagcaggaacaaaatcaaaggagatcctaactaaaaatctaaaggaagtattgcaaatgttacagcaggaagaagaaggttcatcctcaaagaaggaagaaacaagttctgctgaagaagaagaagaagaccccttttaccaaaacgaggatgattgttttggtatctgtttagattaaatttaatttcggtcacaaaaccgtctttttgtaattaatgtgtaattaattttggacaatactacttgtcctgtagccattaaagtcccggtcaaaactacttgtcttgtaacaaacagttaaatagttccggtcaaaactaccgagaactactggtctcagatttttggctatataaggagtcctcaactatgttgtgaggcaccctttcatttggccattttttaggtttctgaagggaggtgctctgaaagaaaacttttgtaagcgcttctttcaagtttcaataaatttctatttttcatccctcttctctctctttaccgatcctgtgcggctctgtcgccgcttcggtttctttgtttatgaaaacctgagatttgtaagccggtctccggtgtgcccttgatatctgtttttcaagtttatattttcattttcatttatcatattgcattcttacttcctatc

SEQ ID NO: 10038 - DNA, 1060 bp, Glycine max; identical to SEQ ID NO: 10037
  Gm_smallRNAprecursor_2871

SEQ ID NO: 10039 - DNA, 1063 bp, Glycine max
  Gm_smallRNAprecursor_2872
tttcaagaccaatacaatttacaattttccaaattggtttttacaatggtgggacttctttggaccaattccaaagatattcccagaaataatccaacaaggatttgctcaatttgagagacaatacaattcgcaggaatcacgaattcctgtagatcttaagtacttctcaagctttgcactgtcatggatcttctcatggcaatatcgttacagcaagactgaaaagacaagccaatatccatcactacaaagacacacatttgtaaaatggtggacacaatttgactcatccaaagcagatccagaacaagtgaaactctggttccaatcccatccagaattcctcaaagcagctgatccaaaaacttctttgtttttgaaccaaaagtctcatttggcagcatttttagcaggaacaaaatcaaaggagatcctaactaaaaatctaaaggaagtattgcaaatgttacagcaggaagaagaaggttcatcctcaaagaaggaagaaacaagttctgctgaagaagaagaagaagaccccttttaccaaaacgaggatgattgttttggtatctgtttagattaaatttaatttcggtcacaaaaccgtctttttgtaattaatgtgtaattaattttggacaatactacttgtcctgtagccattaaagtcccggtcaaaactacttgtcttgtaacaaacagttaaatagttccggtcaaaactaccgagaactactggtctcagatttttggctatataaggagtcctcaactatgttgtgaggcaccctttcatttggccattttttaggtttctgaagggaggtgctctgaaagaaaacttttgtaagcgcttctttcaagtttcaataaatttctatttttcatccctcttctctctctttaccgatcctgtgcggctctgtcgccgcttcggtttctttgtttatgaaaacctgagatttgtaagccggtctccggtgtgcccttgatatctgtttttcaagtttatattttcattttcatttatcatattgcattcttacttcctatctgt

SEQ ID NO: 10040 - DNA, 1057 bp, Glycine max
  Gm_smallRNAprecursor_2873
caagaccaatacaatttacaattttccaaattggtttttacaatggtgggacttctttggaccaattccaaagatattcccagaaataatccaacaaggatttgctcaatttgagagacaatacaattcgcaggaatcacgaattcctgtagatcttaagtacttctcaagctttgcactgtcatggatcttctcatggcaatatcgttacagcaagactgaaaagacaagccaatatccatcactacaaagacacacatttgtaaaatggtggacacaatttgactcatccaaagcagatccagaacaagtgaaactctggttccaatcccatccagaattcctcaaagcagctgatccaaaaacttctttgtttttgaaccaaaagtctcatttggcagcatttttagcaggaacaaaatcaaaggagatcctaactaaaaatctaaaggaagtattgcaaatgttacagcaggaagaagaaggttcatcctcaaagaaggaagaaacaagttctgctgaagaagaagaagaagaccccttttaccaaaacgaggatgattgttttggtatctgtttagattaaatttaatttcggtcacaaaaccgtctttttgtaattaatgtgtaattaattttggacaatactacttgtcctgtagccattaaagtcccggtcaaaactacttgtcttgtaacaaacagttaaatagttccggtcaaaactaccgagaactactggtctcagatttttggctatataaggagtcctcaactatgttgtgaggcaccctttcatttggccattttttaggtttctgaagggaggtgctctgaaagaaaacttttgtaagcgcttctttcaagtttcaataaatttctatttttcatccctcttctctctctttaccgatcctgtgcggctctgtcgccgcttcggtttctttgtttatgaaaacctgagatttgtaagccggtctccggtgtgcccttgatatctgtttttcaagtttatattttcattttcatttatcatattgcattcttacttcctatc

SEQ ID NO: 10041 - DNA, 1057 bp, Glycine max; identical to SEQ ID NO: 10040
  Gm_smallRNAprecursor_2874

SEQ ID NO: 10042 - DNA, 1057 bp, Glycine max; identical to SEQ ID NO: 10040
  Gm_smallRNAprecursor_2875

SEQ ID NO: 10043 - DNA, 1057 bp, Glycine max; identical to SEQ ID NO: 10040
  Gm_smallRNAprecursor_2876

SEQ ID NO: 10044 - DNA, 1159 bp, Glycine max
  Gm_smallRNAprecursor_2877
ccatttttcggggagagttacatcatcctgttttattattctttttaaagaaacattggcttttgttatatcagtgataaataaggtcgtttctcccttttgtggttgcaataggactctagatgcacaagtattcatgaccttgtactggatcctatagatcaaagctgctgggattgatccttctttcatgtcaaggccatgaaagttgatatttaagaacagagagtcaagaatattcttgtccattaaactcactgtcttattcggataacaattgaaatatactggagcttgtcctaaactggtttcgactgttccaattaaggagtcctcaaatttattatgcctaatatctcttagacacattaaaactgttgcatctatgcccatgtcaattaagggcttgatggctacttgtacataaccgatgtgtagatatttatacttacgactatgttcataaattgaattttttgaaagtaaatgaaattcttcccctatatcttgtcctagaggaatattgttttctactattttgattatgtaatcaaagttgtgtttgtccttaattgtttcaggaacatatagttgatcctgagggatttctggaatgttccagtcatccatgttttgattgatatcttcgaatcggacttcctcatcgaagagattgtgtttgggggcaacctcgtggttctggttatcttgatcacttaataaattggaatttcttgaagaagatgatgaggaagaatttgatcgaaaagagatttgggaaaaagagcgcaatagtctagacatgattataacattctctaatatctttgccttcatttggttccatagaaatatttccataaggtcatatgttactgaactccttggatctgagatttttttttttacagataacttagtttgaactctactcctatagccaccagtatattatgtctcaatattttatttgaataatacaccttagccttactgccctttctcatccacgggacttactgctacagtatcattcaactaaaatatcagactgctgtgctttcagaaaatattgttcaaacatatactgtttaaattaaaattactgtacatagtttagatccgtgaggccggtaaacatatgcccttacggacacta

SEQ ID NO: 10045 - DNA, 1051 bp, Glycine max
  Gm_smallRNAprecursor_2878
cccgccttgtcataaactacaaaccattgaatcaagcattacaatggattaggtatcttattccaaacaaaaaagatttacttaatagattaaattctgcaaaaatattttcaaaatttgatatgaaatctggaaaatccaaatccaagaatcagattgatacaaaacagtgtttactgtaccttttgagcaatacgaattgaatgtaatgccattcggactgaagaatgccccttccaaatttcaaaaaattatgaacaacattttcaatccttattcaaagtttatcattgtctacatagatgatgtcctgattttctcacaaaatattgatcaacattttaaacacatacaaacttttatcaatatcatgacaaaatggattagcagtctctaattcaaaaatcaatcttttccaaacccgaattctattccttggtcatagcatatgtcaaggtacaatcattccaatagaaagatcaatagaatttgctaacaaattccccaaccaaatcttagacaaaacccaattacaaagatttctaggttgtctaaattatgtaggagaatttgttccctacttaaacaatattgtcaaaccattacatgataggctgaagaaaaatctgcctccttggtctgatctccatacccaaacagtcaaagagatcaagctcaaagttcgatctataaaatgtctgtatcttcccattcctcaggcatttataattgtcgaaaccgatgcatcaaacataggttatggtggcatcctcaaacaaagagtccatgccctagaacatgtcattacatatacatcaaagcattggaattctgcacaagaaaaatattcaactgttaaaaaagaggttttagcaattgttatgtgcatttccaaatttcaatctgatttactactaaataattttttttaataagggttgattgcaaatcagccaaagacattcttcaaaaggatgttaaaaatcttgcatcaaaacaaatttttgccagatggcaagcaatcttgagtgtctttgattttgaaataaga

SEQ ID NO: 10046 - DNA, 1131 bp, Glycine max
  Gm_smallRNAprecursor_2879
aactacatgttccaagaatcaggaaagaaagtgaggccagagagatagaaccaaaaagtgaaaagggaagttaattagttttattttttaattccttcaacccatttattttattaatttttaaaaaacttattttaaacaaatatacctaattagcttgtccgtttaagaaaaaagaaagatatataagcgtaacaaaaactaagtcaactattggctaaatagaactagatctggtttatgcaataataaagagcgtattacactgtatatatttcctaaaatgtgtaatcaagtggcctcatcgttttaacaaagggtatgcagtgattctttctgcaactgtgttccacggccagtgttttcttttttgttgttattttttgccctttgagctttaataatcaatgaatctcctaatttctaacatgtcatttttgttgaataatcaaatgcatcggtttcgacaattttgaatgtttgaagaatagggagatacagacattttatggattggactttgagtttgatgtctttgacagtttgtatatggatgtcagaccaaggagccgggtttttcttcaacctatcatgcaatagtttaacaatattgttcaagtatgaaacaaattctcctacataatttagacaaccaaggaatcattgtaattgggttttgtctaaaatttggttgggaaatttggtaacgaactctattgactggtctattggaataattgtaccttgatgtatattgtgaccaaagaacctgattcttgtttggaaaagattaatttttgatttggagaccgctagaccattttgtttgataatatggatgaacgtatgcaaatatttgaaatgttgatcaatgctttgggaaaaaaattaagacatcatctatgtagacaatgaagaattttgaataaggattaaaaatatcattcataattttttgaaattctgaaggggcgttcttcagatcaaagggtataacatttcattcatattgtttgaaaggtactgtaaaggtagttttatacctatcagattcttgaatctgaatttgccaaaatccagatttcatgtcaaatttggaaaatatttttgcagaatttaatctgttgagta

SEQ ID NO: 10047 - DNA, 1132 bp, Glycine max
  Gm_smallRNAprecursor_2880
aactacatgttccaagaatcaggaaagaaagtgaggccagagagatagaaccaaaaagtgaaaagggaagttaattagttttattttttaattccttcaacccatttattttattaatttttaaaaaacttattttaaacaaatatacctaattagcttgtccgtttaagaaaaaagaaagatatataagcgtaacaaaaactaagtcaactattggctaaatagaactagatctggtttatgcaataataaagagcgtattacactgtatatatttcctaaaatgtgtaatcaagtggcctcatcgttttaacaaagggtatgcagtgattctttctgcaactgtgttccacggccagtgttttcttttttgttgttattttttgccctttgagctttaataatcaatgaatctcctaatttctaacatgtcatttttgttgaataatcaaatgcatcggtttcgacaattttgaatgtttgaagaatagggagatacagacattttatggattggactttgagtttgatgtctttgacagtttgtatatggatgtcagaccaaggagccgggtttttcttcaacctatcatgcaatagtttaacaatattgttcaagtatgaaacaaattctcctacataatttagacaaccaaggaatcattgtaattgggttttgtctaaaatttggttgggaaatttggtaacgaactctattgactggtctattggaataattgtaccttgatgtatattgtgaccaaagaacctgattcttgtttggaaaagattaatttttgatttggagaccgctagaccattttgtttgataatatggatgaacgtatgcaaatatttgaaatgttgatcaatgctttgggaaaaaaattaagacatcatctatgtagacaatgaagaattttgaataaggattaaaaatatcattcataattttttgaaattctgaaggggcgttcttcagatcaaagggtataacatttcattcatattgtttgaaaggtactgtaaaggtagttttatacctatcagattcttgaatctgaatttgccaaaatccagatttcatgtcaaatttggaaaatatttttgcagaatttaatctgttgagtaa

SEQ ID NO: 10048 - DNA, 1075 bp, Glycine max
  Gm_smallRNAprecursor_2881
aatgcccattcactaacaattatgaccaaatcaccattctaatgtcctctcctcacgtaaacacgcccccaccttccttggttgccttcgtgtactaaaggctcacgtaattcttcaccaatggttgtatcagaatcagacttggtgagacaaaaaaagaagttattgaaaatttcaactcattaaacctgtttcatttcctggacaatgttcactttttaatgtaggttggcttggaaatggaacacatacgtaaagactttctacataaaataaacaattaaaatattgaaaattatatttataggtgtaaacaatactatataattcataatcatcttaaagagttaaagtcatgattcagaatttagtcattctttcaagaaggttagtcatttttgttcgtcatttcaaatttattaaagatcaatgttgttaatggcggatggcggttcacggcggaaagtcaaaaatccaccatataaatatggcggatggcgtagcggaaaatggcggatgtcatggcggacaaaaaaaaaaaacatatatataaactcattgaaattgaaaaaaacaaaggattgcattcaaataaactaaaaaagtttcatgagttcatacaataatcaaataccaacactaaataaactcattaaagagttcaaataaactcagccatttaaaagaggaatgaacagaaaaaaaaaattgtggtgtcaaatacgaaaaaaaaaatgggactgttaaaagtaaaaaggggtgtcaaatagcaaaaggaaaaaaaaagctgcagacagaaaacagggggtgtcaaacagcaaaaataaaactaagaaaacctacgtcttcttcttcgcgacagcttcgtcttctctgcgtgaacttttcgctgcaggccgccgttcgtgacaggtgcgtcgctgccggagctcgtcgccgccgttcgtgccggtgcgtcgctgccggaggtcgtcgcggctgcgtgcgcgtgtggggtgcgggagggacgcggctggtgcaggggaggctcgcggttgggttctctcttagatggaaggttgttctgaatcacaga

SEQ ID NO: 10049 - DNA, 1166 bp, Glycine max
  Gm_smallRNAprecursor_2882
attcaaatgatttcatgtggatatgagtttttctcctatggcaaagccccagagagatcatctcttcttattaaacaagtcatgttgaagtgagatatacatcatgtttttacgccatacccttataccatttatatttacatattagcaaaaagaaacagtaaaatctttaaggacaaatagttaagaaacttgttcattagctgcaaatatccttccctcctcaagtgcaaacttcttgcgtagccgcttttggtgctcagaaaatcccaaaaacaaatccctcttattactagctattttgaattctttagttcctgaatatacaaccttcaaattgttgctcgttcccctctttgagaatgaggaggatcttcataggacttcatccagctgatgtttgtcggcagtttcatcatccaccacccttttcttctgtgccttctcacgttcattgttgttaaacccatatttatgccttcttcccttcatgtcttgtttgatcacaactttagctgaatctcccatcttcagcatagttgaatctcctgtcttattgtccaatgccacattttgatggcctgtatctcttttgttcgtatgttctactgcttcagcttcacaatgcatagagcaatcacaattttcgagtcatcaccaaaggcttctgcatcagcgttgacactctccaccctctttggtttatgcttctgtgttttcttccatgcttcctccttataattctcagatttattggaggtcccactagaaggatcagcaccaatccgtgcttgttcctcctctaccagctcaatatctttcctttcacctttgcttttgaaaactacactgtaatttacaaaacaaaagttgaaaggaaagatattgacctgatagacgaggaagaagcacagattggtggtgatcgttctagtgcaacctcgaataaagcttagatttatagcgaggaggcacgaaagaaaacacagaagcataaaccaaagagggtggagagtgtcaatgctgatgcagaagcctttggtgatcactcggaaattcggattgctttatgcattctgaagctgaagcactagaacatacgaagaaaagagatacaggccatcaaagtgtggcattggagaatgagacaggagtttcaactatgc

SEQ ID NO: 10050 - DNA, 1046 bp, Glycine max
  Gm_smallRNAprecursor_2883
tctgattttttctcttcctattcaaaacacacaaaaaaaatcagaacccagaatgatacattgatgataattgaagtaaaaaaaagaggaaaagagaatggttatgcagacctcgcccattggtgttgacagctacagagataaggttgttgctgtggatttttggttctttttatttgtgcaagtgtgtgtgagttctttttcgtatatatgcctcaattggtttaaaaccatcaaatttgaagaagtcactcattctatcatcatcaaatgacgtgacactaaaattgaacttactaataacattactttaaaatttaacggaaggactattttgcaatacttatgtaaaagatagggactattttgaatttttcattaagttagggactaatatgcaacaggggtacaaagttagggactaaattgtctatttactcattttgttatcatcaaatgacgtggcatcaggcacgtccacgtgtcatgccacgtcatcctttagtgccacgtggatagtccatgtgacactaaaattgacctcactaacggcgttactttaaaatttaacggaaggactattttgcaacacttatgcaaagatagtgactattttgaatttaatattaagttaaagactaatatgcaaaataggtacaatctcagggactaaattgcctattcactcctaaaataacttatgctaaaagcactttttcttgtagtgagtgcaagattattgtgttagtttggttaacatagtgggaagattgtttttgaaattttgctcatcatgtttcttgttgaaattgaatttagtagagaagaatggagatgacatggattaaaatttgtgaacactttagttgagtgagagtctcacaatttcattcctgtgattccatttccttgttttctttctttgtttcttttattttttttctttggggactctagtgaagggagagaaaagaaaaagaagcaaaatagtagtaataaaatcgttgaatttaggaagcaggggagaggaaatgagtacaaaacaa

SEQ ID NO: 10051 - DNA, 1143 bp, Glycine max
  Gm_smallRNAprecursor_2884
ccatccaaatatctaatgaaggaataactacaagttatttaggaagaaaaattatatttaatttttctactaaacctatctctagaaacataaatcttatagaaaataagattaatcaaattaacttcttaaaagaagaagtatcgtttaataatatccaagtacaactaggaaaaccccaaataaaggagaaaatccaatctttattaagtcatatagaatcaactgtttgttctgaattgccacatgcattttgggacagaaagaaacatattgttgatcttccttatgagaaagattttaggataaaacaaattcccactaaagctagaccaattcaaatgaatgaagaactcctccaatattgccaaaaaggaattaaagatttacttgataaaggtttaattcgaaaaagtaaaagtccatggtcttgtgcggctttttacgtcaacaaacaatccgaaattgagcgagaaacaccccgcttagttataaattataaaccgttaaatcaagcattacaatggatcaggtatcccattccaaataaaaaatacctacttaacagattaaattctgcaaaggtattttcaaaatttgacatgaaatccggattctggaaaatccaaatccaagaatctgataggtacaaaacggcgtttactataccttttgggcaatatgagtggaatgtaatgccattcagactgaagaatgccccttcagaattccaaaaaatcatgaatgatattttcaatccttattcaaaattcgtcattgtttacattgatgatgttttaatcttctcccaagatattgatcaacatttcaaacacctctagacttttatccatatcattaaacagaatggtttagcagtctctaaatcaaagatcaatcttttccagacacggatacgattccttgggcataacatataccaaggtacaatcatcccaatagaaagatcaatagagtttgccagcaaattccctaaccaaatcttagacaagacccagttacaacgatttctggggtgcctaaattatgtaggagaatttgtcccctatctaaataatattgtcaaaccattacatgataggcctaaaaagaatccgcctccttggtctgacctccataacc

SEQ ID NO: 10052 - DNA, 1056 bp, Glycine max
  Gm_smallRNAprecursor_2885
ccaattaattatcgcgtgtgttaaagttgtggtttgataatgttttatatttctagcttgttgtagaagcttgtagaagctcttagaaggtgtcctgtaatctgtcaccataggcgaggttgtagccttcatcatgaactattttttgtactatctgttaattctcatgtatatatatatacagagatcagcggaataagagcaaacggacagataggaagtaagaatgcagtatgataaatgaaagcgaaatataaactgtaaagcagatatcaagggcacaccgaaacggcttacaaacccatgtttttgaaaataaagaaaccgaagcggcggcagagccacacaggatcagtgaggggagaagggagatatgaaaaacagaacttgaaatttattgaaaccgaaagaaaagcttacaaagagtttttccctaggcagagcttctctctctaaaaacctgattctgagactatctgaaagggtgcctcacaaagggaacgaggactcctttaaatagactcaatttttactgtttctacagtgtcagtaatgtttaccggaactgttacaaaatttttgcaaattacattaataagaggaaccgtcaaattagttacaataattcatgattactacaactaattaatcttcgtctaatgatatcccaaaacagtcatcttcattctggtagaatggatcatcttcttggtcatcattagtctcggatgattcggcttccttcttggggggttctttttccacttcctgttgaagtagttggaggacttctttaagattctgagcaagactctctttagattttgagcttgctaagaatgctgcaagttgtgacttctgattcagaaacaaagatgtctccggatcagcaggtttgaggaattcaggattactctggaaccagttcttgacttgttctggagcagcctttgaggtatcaaattgtgaccaccattttacaaaggcgtgtctctccaatggtgggtattgtttgctgttttcagtttttccgtatctgtattgccatgaaaaaat

SEQ ID NO: 10053 - DNA, 1070 bp, Glycine max
  Gm_smallRNAprecursor_2886
caactaattaatcttcgtctaatgatatcccaaaacagtcatcttcattctggtagaatggatcatcttcttggtcatcattagtctcggatgattcggcttccttcttggggggttctttttccacttcctgttgaagtagttggaggacttctttaagattctgagcaagactctctttagattttgagcttgctaagaatgctgcaagttgtgacttctgattcagaaacaaagatgtctccggatcagcaggtttgaggaattcaggattactctggaaccagttcttgacttgttctggagcagcctttgaggtatcaaattgtgaccaccattttacaaaggcgtgtctctccaatggtgggtattgtttgctgttttcagtttttccgtatctgtattgccatgaaaaaatccatgacaaggaaaaattggaaaagtactttagatctgccggaattcgtgattccttgctattgtagagcttgttgaattgttggaatccctgttggacttcttctgggaatatctgtggaattggtccaaagtagttccaccattggaggaaccaatttggaaaattatacacagtattatttttgaagtaaattagccatgaatgcttgaatttactgttttggtgccagaacacattggtccaggcgtcaatgtaatcccaataattatatcctgcggggtcaaatggtgcaaaaaaatttttgggttggtttaagtttgagccataatgtcgtggctgcataacctttaagatttggattgtggaatgggtatttagatttggatctttggggtctttgaagtgtttaatagatactgagttcgtatctattagaatgaattcgtagaatttgcgggttttgtttgtggctattggcctgtaatggaatcctggggggaatactttggcggttgctttgaagggattcttgtcccagtattctggttccatttgtaaaacattgaaaaatttgttttttgaaatataactattgctgggttgtggtgttgattcttgttgagtcaacgattggcttggtctttggttg

SEQ ID NO: 10054 - DNA, 1232 bp, Glycine max
  Gm_smallRNAprecursor_2887
acgcttaaaattgcttgccatcttgcaaaaatctgttttgaggcaaggttttttacatccttctgtaaaatgtctttggctgatttgcagtcaacccttactaaaaatttttgatttaataaatcagattgaaatttggaaatgcataaaacaattgctaaaacttcttttttaacagttgaatactttaattgtgcaggattccaatgttttgaagtatatgcgatgacatgttcttgaccatgtacttgttgtttaaggatgccaccgtaaccgatgtctagtttcgacaattttgaatgcctgtggaatgggaagatacagacattttatggattgaactttgtcttcgatttctttaactgtttgggtatggaggtcagaccaaggaggcggatttttctttagcctatcatgcaatggcttgacaatattatttaagtaggggacaaattcccctacgtaatttagacaacctagaaatctttgtaattgggttttgtctaagatttggttgggaaatttgctagcaaactctattgacctttcgattggaatgattgtaccttgataaatattgtgaccaaggaatcgaattcaagtttggaaaagattaatttttgatttggagactgccaaaccattttgtttgatgatatggatgaaggtttggagatgtttgcaatgttggtcaatgttttgggaaaagattaaaacatcatctatgtagacaatgacaaattttgaatagggattaaaaatatcattcataattttttgaaattctaaaggggcattcttcagtccgaatggcatcacattccattcatattgcccgaaaggtacagtaaacgctgttttgtacctatctgattcttggatttggatttgccaaaatccagatttcatatcaaattttgaaaatatctttgcagaatttaatctgttaagcaaatcttttttgtttggaataggatatctaatccattgtaatgcttgatttagtggtttgtaatttatgactaagcggggtgttccacgctcaatctcagattgcttgttgacataaaaagccgcacaagaccatggacttttgctttttcggattaggcctttatcaagcaaatccttgatttctttttgacaatattgaagaagttcttcattcatttggattggtctggctttggtgggaatttgtttttccctaaagtctttctcataagggagat

SEQ ID NO: 10055 - DNA, 1196 bp, Glycine max
  Gm_smallRNAprecursor_2888
tttgaggcaaggttttttacatccttctgtaaaatgtctttggctgatttgcagtcaacccttactaaaaatttttgatttaataaatcagattgaaatttggaaatgcataaaacaattgctaaaacttcttttttaacagttgaatactttaattgtgcaggattccaatgttttgaagtatatgcgatgacatgttcttgaccatgtacttgttgtttaaggatgccaccgtaaccgatgtctagtttcgacaattttgaatgcctgtggaatgggaagatacagacattttatggattgaactttgtcttcgatttctttaactgtttgggtatggaggtcagaccaaggaggcggatttttctttagcctatcatgcaatggcttgacaatattatttaagtaggggacaaattcccctacgtaatttagacaacctagaaatctttgtaattgggttttgtctaagatttggttgggaaatttgctagcaaactctattgacctttcgattggaatgattgtaccttgataaatattgtgaccaaggaatcgaattcaagtttggaaaagattaatttttgatttggagactgccaaaccattttgtttgatgatatggatgaaggtttggagatgtttgcaatgttggtcaatgttttgggaaaagattaaaacatcatctatgtagacaatgacaaattttgaatagggattaaaaatatcattcataattttttgaaattctaaaggggcattcttcagtccgaatggcatcacattccattcatattgcccgaaaggtacagtaaacgctgttttgtacctatctgattcttggatttggatttgccaaaatccagatttcatatcaaattttgaaaatatctttgcagaatttaatctgttaagcaaatcttttttgtttggaataggatatctaatccattgtaatgcttgatttagtggtttgtaatttatgactaagcggggtgttccacgctcaatctcagattgcttgttgacataaaaagccgcacaagaccatggacttttgctttttcggattaggcctttatcaagcaaatccttgatttctttttgacaatattgaagaagttcttcattcatttggattggtctggctttggtgggaatttgtttttccctaaagtctttctcataagggagat

SEQ ID NO: 10056 - DNA, 1076 bp, Glycine max
  Gm_smallRNAprecursor_2889
ccatctttcgggaagagttacctcatcccattttatttttcttgggagagaaacgttagcctttgtcatatcagtgataaacaaggttgtttctcctttttgaggttttaacaggactctagatgcacaagtattcatgaccttgtactggatcctataaattaaggctgatgggattgatccttctttcatgtcaaggccatgaaagtggatgtttaagaacagagagtcaagaatgtttctgtccatcagactcactgttttgtttggataacagttaaaatatattggaccttgtcctaggctggtttcaactgttccaattagggagtcttcaaattgattatgcctaatgtctcttagacacattaagactactgcatctatgcccatatcaattaagggcttgatggctacttgtacacaaccgatgtgtagatatttatacttacggctatgtttataaattgaattttttgaaagtaaatgaaattcttcccctatatcttgtcctagaggaatattgttttctactattttgattatgtaatcaaagttgtgtttgtcctttattgtttcaggaacgtatagttgatcctgagggatttctggaatgttccagtcatccatgttttgattgatatcttcgaatcggacttcctcatcgaagagattgtgttttgggacgacctcttgggtctggttatcttgatcatttaataaattggagtttcttgaagaagatgatgaggaggagtttgagcgaaaagagatacgggaatcctttgttgcatattttcatacccaacggcatcgtctgctaccgcacctatctccaacaatacccaaatcagggttgtctctttcagcgcatcccaaccaaggaggtcttgcagtcagaaacctcaacacactcccacgtgccacttcttcacacgtcattctcaggtacgtgcgtcccacatgtggcgtccctaaattaatgactggtttaatagtaataatttaaataacaaaaaccatggtaatttttttttcttctttttttttttcatttctttctcttttcaccataa

SEQ ID NO: 10057 - DNA, 1159 bp, Glycine max
  Gm_smallRNAprecursor_2890
ccatctttcgggaagagttacctcatcccattttatttttcttgggagagaaacgttagcctttgtcatatcagtgataaacaaggttgtttctcctttttgaggttttaacaggactctagatgcacaagtattcatgaccttgtactggatcctataaattaaggctgatgggattgatccttctttcatgtcaaggccatgaaagtggatgtttaagaacagagagtcaagaatgtttctgtccatcagactcactgttttgtttggataacagttaaaatatattggaccttgtcctaggctggtttcaactgttccaattagggagtcttcaaattgattatgcctaatgtctcttagacacattaagactactgcatctatgcccatatcaattaagggcttgatggctacttgtacacaaccgatgtgtagatatttatacttacggctatgtttataaattgaattttttgaaagtaaatgaaattcttcccctatatcttgtcctagaggaatattgttttctactattttgattatgtaatcaaagttgtgtttgtcctttattgtttcaggaacgtatagttgatcctgagggatttctggaatgttccagtcatccatgttttgattgatatcttcgaatcggacttcctcatcgaagagattgtgttttgggacgacctcttgggtctggttatcttgatcatttaataaattggagtttcttgaagaagatgatgaggaggagtttgagcgaaaagagatacgggaatcctttgttgcatattttcatacccaacggcatcgtctgctaccgcacctatctccaacaatacccaaatcagggttgtctctttcagcgcatcccaaccaaggaggtcttgcagtcagaaacctcaacacactcccacgtgccacttcttcacacgtcattctcaggtacgtgcgtcccacatgtggcgtccctaaattaatgactggtttaatagtaataatttaaataacaaaaaccatggtaatttttttttcttctttttttttttcatttctttctcttttcaccataactaggtttagaaggaaaatcctcactataaagtcctgaatgaccagttcacaactctattcggagtcatttctttcttaccgc

SEQ ID NO: 10058 - DNA, 1047 bp, Glycine max
  Gm_smallRNAprecursor_2891
acataatacactggtggctataggattgccgttcaaactatttttcaaaaaaagaaaagagtttttcttaaaaataattcagatccagaaaaattttgtgacatacttacttacagagatatttctatggaaccaaatgagggcaaagatattagagaatatcataatcatgtctagactcttacgatctttttctcgtatctcttttcactcaaactcctccttatcatcttcttcaagaaactccaatctattaaatgatcaagacaaccagacccaagaggtcgccccaaaacacaatctcttcgatgaggaagtccgattcgaagatatcaatcaaaatatggatgactggaacattccagaaatccctcaggatcaactatacgttcctgagacaataaaagacaaacacaactttgattacataatcaaaacagtagaaaacaatattcctctaggacaagaagtaggggaagaatttcatttactttcaaaaaattcaatttatgaacatagccgtaagtataaatatctacacatcggttgtgtacaagtagccatcaagcccttaattgatatgggcatagatgcagcagttttaatgtgtctaagagacattaggcataaccaatttgaagactccctaattggaacagtcgaaaccagcctaggacaaggtccaatatattttaattgttatccaaacaaaacagtgagtctgatggacagaaacattcttgactctctgttcttaaacatccactttcatggccttgacatgaaagaaggatcaatcccagcagccttaatatataggatccagtacaaggtcatgaatacttgtacatccagagtcctgttaaaacctcaaagaggagaaacaactttgtttatcactgatatgacgaaggctaatgtttctcttccaagaaaaataaaatgggatgaagtaactcttcccgaaagatgagttatggataaggcaacaccgtctattccccaacccgctccaaccatagagcatattaagcaagataactccgg

SEQ ID NO: 10059 - DNA, 1148 bp, Glycine max
  Gm_smallRNAprecursor_2892
aaaacgtggaacacgcatcccgcgagtctcgcgtcgccctcccgccgaagggtaggttgcgacaagaatatatcaagggctcttccaactctctacctgactacctcacccgtgaatttttacagaaaattcccgatgcctcctaaggtgtctagttcctccggtagaggaggaagatccagtacgaaaggtaaagaagttctactggctctaccagagccaataaccaaaaaggcaactacaacatcttctgggtcacctacccagactgggtcatcaacccagaaaggaaaacttgaagggtcattgacccaaacaactaccgtcaaatctgagtcatcaactcaggaatctccaaaaccaacaacaaccaaacagaccgtggctgactatgcctggtcaatacaaactctcctggccttagaggatataggcctcaccaaaataccaaaattatccaaaaagacctgggcagaaatggcctcagaatcagacgatgattctgaaacagatctgcaaaaacaaatccaaaaagccaaacagaccaaaaccgtctataaccaaaaaccaagccaatcgttgactcaacaagaatcaataccacaacccggtaacagttacatttcaaaaaacaaatttttcaatgttttacaaatggaaccagaatattgggacaagaatcctatcaaagcaaccgccaaagtattcccccagggattccattacaggccaatagccgcaaacaaaacccgcaaattctacgaattcatcctaatagatacaaactcagtatctattaaacacttcaaagaccccaatgatccaaatttaaatacccattccacaatccaaatcctgaaggttatgcagccacgacattatggctcaaacttaaaccaacccaaaaaattctctgcaccatttgatcctgcagggtataattattgggattacgttgacgcatggacaaatgtgttctggcatcaaaatagtaagttcaagcattcatggctgatttacttcaaaaataatactgcatataattttccaaattggttcctccaatggtggaactacttcggaccaattccacaaatatttccagaagaagtccaacagggattcgaacaattcaacaagctctataa

SEQ ID NO: 10060 - DNA, 1124 bp, Glycine max
  Gm_smallRNAprecursor_2893
attccacaatccaaatcctgaaggttatgcagccacgacattatggctcaaacttaaaccaacccaaaaaattctctgcaccatttgatcctgcagggtataattattgggattacgttgacgcatggacaaatgtgttctggcatcaaaatagtaagttcaagcattcatggctgatttacttcaaaaataatactgcatataattttccaaattggttcctccaatggtggaactacttcggaccaattccacaaatatttccagaagaagtccaacagggattcgaacaattcaacaagctctataatagcaaggaatcacgaattccggcagatttaaagtatttttccagttttgccttgtcatcgatcttttcatggcaatacagatacagaaaaactgaaaacaacaagcaatatccaccgttacagagacacgcctttgtaaaatggtggtcacaattcgatacttcaaaggctgctccagattaagtcaagaactggttccagagcaatcctgagttccttaaacctactgatccggagacatctttgtttctaaatcagaagtcgcaactggcagcattcttagcaagctcaaaatctaaagaaagtcttgctcagaatctcaaagaagttctccaactacttcaacaggaagtggaagaagaaccttccaagaaggttgctgaatcatcagagactaatgatgaccaagacgatgatccattctaccagaatgaagatgactgttttggtatatcattggacgacgattaattagttgtaataatcatgaattattgtaactaatttgtcagtttcttttaaataatgtaatttgtaaaaatttttgtaacagttctggtaaacattaccgatactgtagaaacagtaaaaattgggtctatttaaaggagtcctcgtcccctttgtgaggcaccctttgagatagtcttagaatcaggttttagagagagaagctctgcctagggaaaaactctttatatatatatatacagcaggttacctcgcctgggcgagcaactcctgcaccaaaaatattgaaacgagggaggggaacgtttttgcattcaaaaactgcttcccccctcatttcaa

SEQ ID NO: 10061 - DNA, 1123 bp, Glycine max
  Gm_smallRNAprecursor_2894
ttccacaatccaaatcctgaaggttatgcagccacgacattatggctcaaacttaaaccaacccaaaaaattctctgcaccatttgatcctgcagggtataattattgggattacgttgacgcatggacaaatgtgttctggcatcaaaatagtaagttcaagcattcatggctgatttacttcaaaaataatactgcatataattttccaaattggttcctccaatggtggaactacttcggaccaattccacaaatatttccagaagaagtccaacagggattcgaacaattcaacaagctctataatagcaaggaatcacgaattccggcagatttaaagtatttttccagttttgccttgtcatcgatcttttcatggcaatacagatacagaaaaactgaaaacaacaagcaatatccaccgttacagagacacgcctttgtaaaatggtggtcacaattcgatacttcaaaggctgctccagattaagtcaagaactggttccagagcaatcctgagttccttaaacctactgatccggagacatctttgtttctaaatcagaagtcgcaactggcagcattcttagcaagctcaaaatctaaagaaagtcttgctcagaatctcaaagaagttctccaactacttcaacaggaagtggaagaagaaccttccaagaaggttgctgaatcatcagagactaatgatgaccaagacgatgatccattctaccagaatgaagatgactgttttggtatatcattggacgacgattaattagttgtaataatcatgaattattgtaactaatttgtcagtttcttttaaataatgtaatttgtaaaaatttttgtaacagttctggtaaacattaccgatactgtagaaacagtaaaaattgggtctatttaaaggagtcctcgtcccctttgtgaggcaccctttgagatagtcttagaatcaggttttagagagagaagctctgcctagggaaaaactctttatatatatatatacagcaggttacctcgcctgggcgagcaactcctgcaccaaaaatattgaaacgagggaggggaacgtttttgcattcaaaaactgcttcccccctcatttcaa

SEQ ID NO: 10062 - DNA, 1195 bp, Glycine max
  Gm_smallRNAprecursor_2895
agaagggtagtgtttctctctgcgcacaagtgtctggggtgagtgtttgaaatttttacgacctgcaattaagattcccaaatttgcacttcatctcaattaaagctattcttacttatacttggtggatcactaaggacttttattggcttgtaacgaggcctggctaaacaagaaatcatggtttttctaggatttcaaaaacttaggattataagagagcatgcatccttagaaaaactttcacttatttcctgcctaggcttatttatttttcagcctttattcctctaacaacacttttcttcttggcactaatgacacctctctttttctacccttatttcaaagtttttttttttaactttagcacttatggcacttttttttgcccttatttgcaatcttttttattttcttcttttttttatataagaatactttgggcttacaagcttctgaaggtgccctattgtgtgcccttgaaaggattcttgtcccagtattctggttccatttgtaagacattgaagaatttgtttttggaaataacaccccagacacggatacgattccttgggcacaatatataccaaggcacaatcatcccaatagaaagatcaatagagtttgccagcaaattccctgaccaaatcttggataagacccaattacaacgatttctggggtgcctaaattatgtaggagaatttgtcccctatctaaacaatattgtcaaaccattacatgataggctgaaaaagaatctgcctccttggtctgacctccatactcaaacagttaaagaaatcaaagtcaaagtccaatccataaaatgtctatatctccccattccacaggcattcaaaattgtcgaaactgatgcatcagacatcggttatggtggcatcctcaaacagcaagtttacatcctcaaacatcctcaaacaccggaaaattctatgaattcattctaatagatacaaactctgtatctattaaacatttcaaagaccccaaagatccaaatctaaacacccactccacaatccagatcctaaaggtgatgcagccacgacattatggctcaaacttaaaccaacccaaaaaattttatgcaccttttgaccctgcaggatatagttattgggattacattgacgcctggaccaatgtgttctggcatcaaaatagt

SEQ ID NO: 10063 - DNA, 1214 bp, Glycine max
  Gm_smallRNAprecursor_2896
tctaggaaaccccttaaggttttacatatgatatcagagcatctgttatgaaatttatgattcttcaagaatgatttaatttctcccaattatgcatgaaccctaattatgaaatttagggattttatttttactttccgctgctagtatgaaatcttatattgaagagggtatgaatgcgtaaaattatattattatgattgcgttcaattaagaaaaacttattatgtttgtagtactttgaattgtatatattaaatttgggaaaatatttcatatttatcgttttgtactatgtaatttaatttgatgataatgtctagagaaagacttttcctttaacatatattgaatggagaaagaaagtcattaacgctatttctgtttcgagtgttgctaggtgcacccagcattattgctggtgcacccaacattctttaaaaatggcaaaattatccttgccttctttctccctctacggatcaagttgatccgcaagttgatttttaagacttacagatcaagttgattcgtaagtcttttacggatcaagttgattcctaagtattgaatggagaaagaaagatccgtaagaagcttgcagcgagtgttgctaggtgcacccagcattattgctggtgcacccataagtcttaaaaatcaactagcggatcaacttgatctgtaagaagcttacggatcaagttgatttgtaaaagacttacggatcaagttgatccgtaagtcttaaaaatcaacttgtagatcaacttgatccgtaaaagacttatggatcaacttgatccgtaagtcttaaaaatctacttgcggatcaacttgatcgtaagaagcttgcggatcatctatatcaattgcggatcaactaatacctatgcggatcaactcattgcatatgcggatcaacctgaatgagctgggtgcacaaaaatatttttaaaaatacataggggtatttttgtcatttcatgttaagtgttgggtgcaccagcaataatgctaggtgcacctagcaacacccttctgtttctaacggagaaaacatccgcagccctgcacgtacgttgttgataggggtgaaggaattttgaaattgctatttgcaacccaattttgctattttcagtcccagttgttttttttttcaaaaattattattgaatgtcattaaaggactgaaagcttatgtcttagaa

SEQ ID NO: 10064 - DNA, 1088 bp, Glycine max
  Gm_smallRNAprecursor_2897
tagccaaccgggaaggtctttggattagttgggtttgggctcgttggatgggctgttgatggagggggcccagccggtgttggaaaagatgatgctgatgacgaactgattggtggtgtttggtgtaccattcggtgtcggagaaggcattgttgacgtttttgagaggggggccaagactggcgttggtggtgaacttgtataacatgttggtcttgaggttgggttacaaaatgggagatcagtgaagtaaaaaaggagaaaggaagaagggtctcaagggtaaaaaggaaatcttggataacgtgaaaggagaaatgccttctcatttgtcaagtcttgcagagtgctagaggcagtagcattagcacatgccatctatgcctctagtggcaaatttattgtatggggtttcttttaaaaataatttacggaagagggtctcttttaaaacaaattgcaaggggggtctcttctgtacgaatgacgctggcgggaagcttgaaccgccagtgacaatgacgggatagggggtgccgctattcgtagcagcaggacagactgactaggagagagggggtaccgtcattggtgctggcgggacgtgccaacgtggacaattccgccattggcacctgcgggacactgatctcgctaaaagcatgccgccaataagaatggcgggacatgccaataatttgacatgtataagttcatttattcaaatttacataaaaaaaatattctgttgtttatgaaaaatacaaaaatattcaaatgtacataaaaatattctgttactggattggcaaatatttcgttacattaataataatatcaaataaaagttatttagaatttcattaaatttaaggaaaatagatgacgaaataaagattggcatgtcccgccattcttattggcggcatacttcaagtcaaagtaattttactttgagatatccaatatttgttgatatattgacgtttaccttacattgattaaatcacgcttgtttgaatgcattcggtgccttaatcaactttgcttcaacgtctagatcaatggacaatggatattgtgacatt

SEQ ID NO: 10065 - DNA, 1089 bp, Glycine max
  Gm_smallRNAprecursor_2898
tagccaaccgggaaggtctttggattagttgggtttgggctcgttggatgggctgttgatggagggggcccagccggtgttggaaaagatgatgctgatgacgaactgattggtggtgtttggtgtaccattcggtgtcggagaaggcattgttgacgtttttgagaggggggccaagactggcgttggtggtgaacttgtataacatgttggtcttgaggttgggttacaaaatgggagatcagtgaagtaaaaaaggagaaaggaagaagggtctcaagggtaaaaaggaaatcttggataacgtgaaaggagaaatgccttctcatttgtcaagtcttgcagagtgctagaggcagtagcattagcacatgccatctatgcctctagtggcaaatttattgtatggggtttcttttaaaaataatttacggaagagggtctcttttaaaacaaattgcaaggggggtctcttctgtacgaatgacgctggcgggaagcttgaaccgccagtgacaatgacgggatagggggtgccgctattcgtagcagcaggacagactgactaggagagagggggtaccgtcattggtgctggcgggacgtgccaacgtggacaattccgccattggcacctgcgggacactgatctcgctaaaagcatgccgccaataagaatggcgggacatgccaataatttgacatgtataagttcatttattcaaatttacataaaaaaaatattctgttgtttatgaaaaatacaaaaatattcaaatgtacataaaaatattctgttactggattggcaaatatttcgttacattaataataatatcaaataaaagttatttagaatttcattaaatttaaggaaaatagatgacgaaataaagattggcatgtcccgccattcttattggcggcatacttcaagtcaaagtaattttactttgagatatccaatatttgttgatatattgacgtttaccttacattgattaaatcacgcttgtttgaatgcattcggtgccttaatcaactttgcttcaacgtctagatcaatggacaatggatattgtgacatta

SEQ ID NO: 10066 - DNA, 1147 bp, Glycine max
  Gm_smallRNAprecursor_2899
aataaaatttaagggatcatttgaattttgaggacaaaagcttgcatggtgtgctaggcaaaagatttaagttggagcagcttgtggcttgagataccttcattctcaggttggaaaatgaatgcacatgcatttcgtgtaactaattaaaatttaccttcatttattaaaatttattttaaaattcaattttcttaatttgttgtaattatccctaaatagtattttcttaatatgttgtatttaatattaaaatttaataattaatatttaaatgatagattaaatataaataatacataaacctcttatttttatttaatctatcatttaaatatttatttattaaataaaatttcgcattaatattaattacaatcatgctaatatatgttatttttaattatttatttttttctgatgggatatgaaccaaaaaaaatatcaataattaaaaataatattgaatttaaggatggtgtttacatcaacaatgtctttgaaagtggacattcaaagacggtacttacgtcagcaccgtctttgaatgtcagcttactaagacggtgcttacgttagcaacgtcttagaatgcctacattcaaagacgatgctgaggtaagcatcgtctttgaaagttgttcactttttaagacggtgctttcagacacgtccttataatttgtaacttccgacgacgtcacattctaagacggacgaaaaacattgttgtatctcactttggaccatcgttgaagcccttttttataatagtgactacttccttttcatatatctttttatgttttaacttttaattttttttctcaaaacatttgatattttagaattttaaagcctaattaatacatttttttcaaatgtatttttatttaatacccattattagtactagtgcaagtattaaataagaatattttaattcaaatataataattttaagttttattaaatgtttcttaatgtaatatatgtatatttaaacatcaaaacatatgaaaaggaggtagtaactattagcaataaacaaatttaagatgagggaggatttcatactttcttttcagcaaatgcaggcaactgattggtgacgaactttctggtttgggtattaatcagctaaagc

SEQ ID NO: 10067 - DNA, 1072 bp, Glycine max
  Gm_smallRNAprecursor_2900
ttaatgaaacgagatcaaatataattgattaatttattaaaatataagttgaattatttgaacactattcgaatttaatctttagtaaaaataattttttattaaactaaaggttagagaaacaaattatttaggtgggaattaaggaatatttcaactgttgactacaacatatgatacataattcccatgtactacaaggtttcagttcagtacaactgaccagtacaataatttcgcttgtactaaattggcaatagctggaaatgatagatagataaaagagaaacgattaataactataatcatcaattagtgataaaatgggagtacgaacgaatggttggtgacttggtgtactacattgaacattctctatgcaagtttttcaaatgaaattcatattatataacagatacaaatgcaccagcaaggtaatttgtaagaaaaatcaaaatggatctcctataggtttgaaaactccccatattagagacacatcattgagtgtagcattgatgaagtttcactctcatctcagatagatgcttaatttatggtgttattatcatcgacgctgcactcaatcatgtttttctggcaatatgggattgtgcgaagtgaaagacattcatataattagcaagtgaggatcatatttctccattacttttatgagtttatccttttcttttgcttattaatttgtaggatttttcggtgcatatgaaagttggaagccatattttctatttctttttcccattttaagaaattttgagcaattttatttcaggaaccaaagcctccttctctcaatatatacaagacaaaatctaattatatcgatataactttaataaatatttttataatttgatatagaatctgatttttataaatccattatccaattaaaaattataaaataatataataattatcaaaattataccgtataattatatatatatatatatatatatatatatatatatatatatatatatatatatatatatattgtagcttttgaactctctatttgacataagtaacttagtgtcttgtc

SEQ ID NO: 10068 - DNA, 1059 bp, Glycine max
  Gm_smallRNAprecursor_2901
agcggagtgaaggtagtttcagatttagggttatctataatatataatatataaaggtgtatggtgtacacatttatataatatattcagattttgggttatctataatatataatatataaagggatatggtgtacacatttaaataatatataaaggagatatttttgtttagtgtatacatttggtttgatatttttatccctaaattaattagaaaattattattattatctttcccctcagctgtttatgtgtaattgcacactctcttttattcatgttacaaactggtcatgtgtaactgcacttctctgacttatggctccctcactcccaaaccaattgcaatttctattcaacctctcctatctctccctcttcttctgccaaaccgcaaccattattcttctcattgctacttctccttcaaaatcaatgacaacaatcatagaaaaggcgagtgagttctcaatgtctatgaaacatcaacatcgacacggacacgacacggatacggacacgtggacacctgtattgtccaaaatatagaacgtagtacgggtgttgtgtcggtgtcggacactgacacggacgcgtgtcggacaccggacacggcaagggactggagtgtccgtacttcgtagctcaatgtcgatcccaagatctgtattctacatggctttgcctgcaactatagtatgactcaagtatgttcttttcttcactgcattttcattcttatttttaatccctacttgtgtttgaattttataagcaatgttggtaaacatcatatatagttaaactcattttaggttcatgtgtctatgttggagcacaagtatgaggtgaagtcccacatcgagtagaagtgaaaaagttaaacattatataagtaaggagaagactcataaacctgagtttaaggttttgagttaaattgtaatatcaaatttctatatgttgatgaggaaagtagagggtgatagaaatctccatgaaatgtggtttggattttgcttatgcatatactttaatttgttcttgctcatgtat

SEQ ID NO: 10069 - DNA, 1093 bp, Glycine max
  Gm_smallRNAprecursor_2902
agcggagtgaaggtagtttcagatttagggttatctataatatataatatataaaggtgtatggtgtacacatttatataatatattcagattttgggttatctataatatataatatataaagggatatggtgtacacatttaaataatatataaaggagatatttttgtttagtgtatacatttggtttgatatttttatccctaaattaattagaaaattattattattatctttcccctcagctgtttatgtgtaattgcacactctcttttattcatgttacaaactggtcatgtgtaactgcacttctctgacttatggctccctcactcccaaaccaattgcaatttctattcaacctctcctatctctccctcttcttctgccaaaccgcaaccattattcttctcattgctacttctccttcaaaatcaatgacaacaatcatagaaaaggcgagtgagttctcaatgtctatgaaacatcaacatcgacacggacacgacacggatacggacacgtggacacctgtattgtccaaaatatagaacgtagtacgggtgttgtgtcggtgtcggacactgacacggacgcgtgtcggacaccggacacggcaagggactggagtgtccgtacttcgtagctcaatgtcgatcccaagatctgtattctacatggctttgcctgcaactatagtatgactcaagtatgttcttttcttcactgcattttcattcttatttttaatccctacttgtgtttgaattttataagcaatgttggtaaacatcatatatagttaaactcattttaggttcatgtgtctatgttggagcacaagtatgaggtgaagtcccacatcgagtagaagtgaaaaagttaaacattatataagtaaggagaagactcataaacctgagtttaaggttttgagttaaattgtaatatcaaatttctatatgttgatgaggaaagtagagggtgatagaaatctccatgaaatgtggtttggattttgcttatgcatatactttaatttgttcttgctcatgtatgttagaagtgtaagcctgcgtatgtataaatata

SEQ ID NO: 10070 - DNA, 1094 bp, Glycine max
  Gm_smallRNAprecursor_2903
agcggagtgaaggtagtttcagatttagggttatctataatatataatatataaaggtgtatggtgtacacatttatataatatattcagattttgggttatctataatatataatatataaagggatatggtgtacacatttaaataatatataaaggagatatttttgtttagtgtatacatttggtttgatatttttatccctaaattaattagaaaattattattattatctttcccctcagctgtttatgtgtaattgcacactctcttttattcatgttacaaactggtcatgtgtaactgcacttctctgacttatggctccctcactcccaaaccaattgcaatttctattcaacctctcctatctctccctcttcttctgccaaaccgcaaccattattcttctcattgctacttctccttcaaaatcaatgacaacaatcatagaaaaggcgagtgagttctcaatgtctatgaaacatcaacatcgacacggacacgacacggatacggacacgtggacacctgtattgtccaaaatatagaacgtagtacgggtgttgtgtcggtgtcggacactgacacggacgcgtgtcggacaccggacacggcaagggactggagtgtccgtacttcgtagctcaatgtcgatcccaagatctgtattctacatggctttgcctgcaactatagtatgactcaagtatgttcttttcttcactgcattttcattcttatttttaatccctacttgtgtttgaattttataagcaatgttggtaaacatcatatatagttaaactcattttaggttcatgtgtctatgttggagcacaagtatgaggtgaagtcccacatcgagtagaagtgaaaaagttaaacattatataagtaaggagaagactcataaacctgagtttaaggttttgagttaaattgtaatatcaaatttctatatgttgatgaggaaagtagagggtgatagaaatctccatgaaatgtggtttggattttgcttatgcatatactttaatttgttcttgctcatgtatgttagaagtgtaagcctgcgtatgtataaatataa

SEQ ID NO: 10071 - DNA, 1094 bp, Glycine max; identical to SEQ ID NO: 10070
  Gm_smallRNAprecursor_2904

SEQ ID NO: 10072 - DNA, 1082 bp, Glycine max
  Gm_smallRNAprecursor_2905
ggtagtttcagatttagggttatctataatatataatatataaaggtgtatggtgtacacatttatataatatattcagattttgggttatctataatatataatatataaagggatatggtgtacacatttaaataatatataaaggagatatttttgtttagtgtatacatttggtttgatatttttatccctaaattaattagaaaattattattattatctttcccctcagctgtttatgtgtaattgcacactctcttttattcatgttacaaactggtcatgtgtaactgcacttctctgacttatggctccctcactcccaaaccaattgcaatttctattcaacctctcctatctctccctcttcttctgccaaaccgcaaccattattcttctcattgctacttctccttcaaaatcaatgacaacaatcatagaaaaggcgagtgagttctcaatgtctatgaaacatcaacatcgacacggacacgacacggatacggacacgtggacacctgtattgtccaaaatatagaacgtagtacgggtgttgtgtcggtgtcggacactgacacggacgcgtgtcggacaccggacacggcaagggactggagtgtccgtacttcgtagctcaatgtcgatcccaagatctgtattctacatggctttgcctgcaactatagtatgactcaagtatgttcttttcttcactgcattttcattcttatttttaatccctacttgtgtttgaattttataagcaatgttggtaaacatcatatatagttaaactcattttaggttcatgtgtctatgttggagcacaagtatgaggtgaagtcccacatcgagtagaagtgaaaaagttaaacattatataagtaaggagaagactcataaacctgagtttaaggttttgagttaaattgtaatatcaaatttctatatgttgatgaggaaagtagagggtgatagaaatctccatgaaatgtggtttggattttgcttatgcatatactttaatttgttcttgctcatgtatgttagaagtgtaagcctgcgtatgtataaatata

SEQ ID NO: 10073 - DNA, 1088 bp, Glycine max
  Gm_smallRNAprecursor_2906
ggtagtttcagatttagggttatctataatatataatatataaaggtgtatggtgtacacatttatataatatattcagattttgggttatctataatatataatatataaagggatatggtgtacacatttaaataatatataaaggagatatttttgtttagtgtatacatttggtttgatatttttatccctaaattaattagaaaattattattattatctttcccctcagctgtttatgtgtaattgcacactctcttttattcatgttacaaactggtcatgtgtaactgcacttctctgacttatggctccctcactcccaaaccaattgcaatttctattcaacctctcctatctctccctcttcttctgccaaaccgcaaccattattcttctcattgctacttctccttcaaaatcaatgacaacaatcatagaaaaggcgagtgagttctcaatgtctatgaaacatcaacatcgacacggacacgacacggatacggacacgtggacacctgtattgtccaaaatatagaacgtagtacgggtgttgtgtcggtgtcggacactgacacggacgcgtgtcggacaccggacacggcaagggactggagtgtccgtacttcgtagctcaatgtcgatcccaagatctgtattctacatggctttgcctgcaactatagtatgactcaagtatgttcttttcttcactgcattttcattcttatttttaatccctacttgtgtttgaattttataagcaatgttggtaaacatcatatatagttaaactcattttaggttcatgtgtctatgttggagcacaagtatgaggtgaagtcccacatcgagtagaagtgaaaaagttaaacattatataagtaaggagaagactcataaacctgagtttaaggttttgagttaaattgtaatatcaaatttctatatgttgatgaggaaagtagagggtgatagaaatctccatgaaatgtggtttggattttgcttatgcatatactttaatttgttcttgctcatgtatgttagaagtgtaagcctgcgtatgtataaatataaaaaat

SEQ ID NO: 10074 - DNA, 1088 bp, Glycine max; identical to SEQ ID NO: 10073
  Gm_smallRNAprecursor_2907

SEQ ID NO: 10075 - DNA, 1089 bp, Glycine max
  Gm_smallRNAprecursor_2908
ggtagtttcagatttagggttatctataatatataatatataaaggtgtatggtgtacacatttatataatatattcagattttgggttatctataatatataatatataaagggatatggtgtacacatttaaataatatataaaggagatatttttgtttagtgtatacatttggtttgatatttttatccctaaattaattagaaaattattattattatctttcccctcagctgtttatgtgtaattgcacactctcttttattcatgttacaaactggtcatgtgtaactgcacttctctgacttatggctccctcactcccaaaccaattgcaatttctattcaacctctcctatctctccctcttcttctgccaaaccgcaaccattattcttctcattgctacttctccttcaaaatcaatgacaacaatcatagaaaaggcgagtgagttctcaatgtctatgaaacatcaacatcgacacggacacgacacggatacggacacgtggacacctgtattgtccaaaatatagaacgtagtacgggtgttgtgtcggtgtcggacactgacacggacgcgtgtcggacaccggacacggcaagggactggagtgtccgtacttcgtagctcaatgtcgatcccaagatctgtattctacatggctttgcctgcaactatagtatgactcaagtatgttcttttcttcactgcattttcattcttatttttaatccctacttgtgtttgaattttataagcaatgttggtaaacatcatatatagttaaactcattttaggttcatgtgtctatgttggagcacaagtatgaggtgaagtcccacatcgagtagaagtgaaaaagttaaacattatataagtaaggagaagactcataaacctgagtttaaggttttgagttaaattgtaatatcaaatttctatatgttgatgaggaaagtagagggtgatagaaatctccatgaaatgtggtttggattttgcttatgcatatactttaatttgttcttgctcatgtatgttagaagtgtaagcctgcgtatgtataaatataaaaaatt

SEQ ID NO: 10076 - DNA, 1089 bp, Glycine max; identical to SEQ ID NO: 10075
  Gm_smallRNAprecursor_2909

SEQ ID NO: 10077 - DNA, 1090 bp, Glycine max
  Gm_smallRNAprecursor_2910
ggtagtttcagatttagggttatctataatatataatatataaaggtgtatggtgtacacatttatataatatattcagattttgggttatctataatatataatatataaagggatatggtgtacacatttaaataatatataaaggagatatttttgtttagtgtatacatttggtttgatatttttatccctaaattaattagaaaattattattattatctttcccctcagctgtttatgtgtaattgcacactctcttttattcatgttacaaactggtcatgtgtaactgcacttctctgacttatggctccctcactcccaaaccaattgcaatttctattcaacctctcctatctctccctcttcttctgccaaaccgcaaccattattcttctcattgctacttctccttcaaaatcaatgacaacaatcatagaaaaggcgagtgagttctcaatgtctatgaaacatcaacatcgacacggacacgacacggatacggacacgtggacacctgtattgtccaaaatatagaacgtagtacgggtgttgtgtcggtgtcggacactgacacggacgcgtgtcggacaccggacacggcaagggactggagtgtccgtacttcgtagctcaatgtcgatcccaagatctgtattctacatggctttgcctgcaactatagtatgactcaagtatgttcttttcttcactgcattttcattcttatttttaatccctacttgtgtttgaattttataagcaatgttggtaaacatcatatatagttaaactcattttaggttcatgtgtctatgttggagcacaagtatgaggtgaagtcccacatcgagtagaagtgaaaaagttaaacattatataagtaaggagaagactcataaacctgagtttaaggttttgagttaaattgtaatatcaaatttctatatgttgatgaggaaagtagagggtgatagaaatctccatgaaatgtggtttggattttgcttatgcatatactttaatttgttcttgctcatgtatgttagaagtgtaagcctgcgtatgtataaatataaaaaattt

SEQ ID NO: 10078 - DNA, 1033 bp, Glycine max
  Gm_smallRNAprecursor_2911
ggtgtatggtgtacacatttatataatatattcagattttgggttatctataatatataatatataaagggatatggtgtacacatttaaataatatataaaggagatatttttgtttagtgtatacatttggtttgatatttttatccctaaattaattagaaaattattattattatctttcccctcagctgtttatgtgtaattgcacactctcttttattcatgttacaaactggtcatgtgtaactgcacttctctgacttatggctccctcactcccaaaccaattgcaatttctattcaacctctcctatctctccctcttcttctgccaaaccgcaaccattattcttctcattgctacttctccttcaaaatcaatgacaacaatcatagaaaaggcgagtgagttctcaatgtctatgaaacatcaacatcgacacggacacgacacggatacggacacgtggacacctgtattgtccaaaatatagaacgtagtacgggtgttgtgtcggtgtcggacactgacacggacgcgtgtcggacaccggacacggcaagggactggagtgtccgtacttcgtagctcaatgtcgatcccaagatctgtattctacatggctttgcctgcaactatagtatgactcaagtatgttcttttcttcactgcattttcattcttatttttaatccctacttgtgtttgaattttataagcaatgttggtaaacatcatatatagttaaactcattttaggttcatgtgtctatgttggagcacaagtatgaggtgaagtcccacatcgagtagaagtgaaaaagttaaacattatataagtaaggagaagactcataaacctgagtttaaggttttgagttaaattgtaatatcaaatttctatatgttgatgaggaaagtagagggtgatagaaatctccatgaaatgtggtttggattttgcttatgcatatactttaatttgttcttgctcatgtatgttagaagtgtaagcctgcgtatgtataa

SEQ ID NO: 10079 - DNA, 1035 bp, Glycine max
  Gm_smallRNAprecursor_2912
ggtgtatggtgtacacatttatataatatattcagattttgggttatctataatatataatatataaagggatatggtgtacacatttaaataatatataaaggagatatttttgtttagtgtatacatttggtttgatatttttatccctaaattaattagaaaattattattattatctttcccctcagctgtttatgtgtaattgcacactctcttttattcatgttacaaactggtcatgtgtaactgcacttctctgacttatggctccctcactcccaaaccaattgcaatttctattcaacctctcctatctctccctcttcttctgccaaaccgcaaccattattcttctcattgctacttctccttcaaaatcaatgacaacaatcatagaaaaggcgagtgagttctcaatgtctatgaaacatcaacatcgacacggacacgacacggatacggacacgtggacacctgtattgtccaaaatatagaacgtagtacgggtgttgtgtcggtgtcggacactgacacggacgcgtgtcggacaccggacacggcaagggactggagtgtccgtacttcgtagctcaatgtcgatcccaagatctgtattctacatggctttgcctgcaactatagtatgactcaagtatgttcttttcttcactgcattttcattcttatttttaatccctacttgtgtttgaattttataagcaatgttggtaaacatcatatatagttaaactcattttaggttcatgtgtctatgttggagcacaagtatgaggtgaagtcccacatcgagtagaagtgaaaaagttaaacattatataagtaaggagaagactcataaacctgagtttaaggttttgagttaaattgtaatatcaaatttctatatgttgatgaggaaagtagagggtgatagaaatctccatgaaatgtggtttggattttgcttatgcatatactttaatttgttcttgctcatgtatgttagaagtgtaagcctgcgtatgtataaat

SEQ ID NO: 10080 - DNA, 1050 bp, Glycine max
  Gm_smallRNAprecursor_2913
gtatggtgtacacatttatataatatattcagattttgggttatctataatatataatatataaagggatatggtgtacacatttaaataatatataaaggagatatttttgtttagtgtatacatttggtttgatatttttatccctaaattaattagaaaattattattattatctttcccctcagctgtttatgtgtaattgcacactctcttttattcatgttacaaactggtcatgtgtaactgcacttctctgacttatggctccctcactcccaaaccaattgcaatttctattcaacctctcctatctctccctcttcttctgccaaaccgcaaccattattcttctcattgctacttctccttcaaaatcaatgacaacaatcatagaaaaggcgagtgagttctcaatgtctatgaaacatcaacatcgacacggacacgacacggatacggacacgtggacacctgtattgtccaaaatatagaacgtagtacgggtgttgtgtcggtgtcggacactgacacggacgcgtgtcggacaccggacacggcaagggactggagtgtccgtacttcgtagctcaatgtcgatcccaagatctgtattctacatggctttgcctgcaactatagtatgactcaagtatgttcttttcttcactgcattttcattcttatttttaatccctacttgtgtttgaattttataagcaatgttggtaaacatcatatatagttaaactcattttaggttcatgtgtctatgttggagcacaagtatgaggtgaagtcccacatcgagtagaagtgaaaaagttaaacattatataagtaaggagaagactcataaacctgagtttaaggttttgagttaaattgtaatatcaaatttctatatgttgatgaggaaagtagagggtgatagaaatctccatgaaatgtggtttggattttgcttatgcatatactttaatttgttcttgctcatgtatgttagaagtgtaagcctgcgtatgtataaatataaaaaatttatacata

SEQ ID NO: 10081 - DNA, 1050 bp, Glycine max; identical to SEQ ID NO: 10080
  Gm_smallRNAprecursor_2914

SEQ ID NO: 10082 - DNA, 1034 bp, Glycine max
  Gm_smallRNAprecursor_2915
tacacatttatataatatattcagattttgggttatctataatatataatatataaagggatatggtgtacacatttaaataatatataaaggagatatttttgtttagtgtatacatttggtttgatatttttatccctaaattaattagaaaattattattattatctttcccctcagctgtttatgtgtaattgcacactctcttttattcatgttacaaactggtcatgtgtaactgcacttctctgacttatggctccctcactcccaaaccaattgcaatttctattcaacctctcctatctctccctcttcttctgccaaaccgcaaccattattcttctcattgctacttctccttcaaaatcaatgacaacaatcatagaaaaggcgagtgagttctcaatgtctatgaaacatcaacatcgacacggacacgacacggatacggacacgtggacacctgtattgtccaaaatatagaacgtagtacgggtgttgtgtcggtgtcggacactgacacggacgcgtgtcggacaccggacacggcaagggactggagtgtccgtacttcgtagctcaatgtcgatcccaagatctgtattctacatggctttgcctgcaactatagtatgactcaagtatgttcttttcttcactgcattttcattcttatttttaatccctacttgtgtttgaattttataagcaatgttggtaaacatcatatatagttaaactcattttaggttcatgtgtctatgttggagcacaagtatgaggtgaagtcccacatcgagtagaagtgaaaaagttaaacattatataagtaaggagaagactcataaacctgagtttaaggttttgagttaaattgtaatatcaaatttctatatgttgatgaggaaagtagagggtgatagaaatctccatgaaatgtggtttggattttgcttatgcatatactttaatttgttcttgctcatgtatgttagaagtgtaagcctgcgtatgtataaatataaaaaatt

SEQ ID NO: 10083 - DNA, 1036 bp, Glycine max
  Gm_smallRNAprecursor_2916
tacacatttatataatatattcagattttgggttatctataatatataatatataaagggatatggtgtacacatttaaataatatataaaggagatatttttgtttagtgtatacatttggtttgatatttttatccctaaattaattagaaaattattattattatctttcccctcagctgtttatgtgtaattgcacactctcttttattcatgttacaaactggtcatgtgtaactgcacttctctgacttatggctccctcactcccaaaccaattgcaatttctattcaacctctcctatctctccctcttcttctgccaaaccgcaaccattattcttctcattgctacttctccttcaaaatcaatgacaacaatcatagaaaaggcgagtgagttctcaatgtctatgaaacatcaacatcgacacggacacgacacggatacggacacgtggacacctgtattgtccaaaatatagaacgtagtacgggtgttgtgtcggtgtcggacactgacacggacgcgtgtcggacaccggacacggcaagggactggagtgtccgtacttcgtagctcaatgtcgatcccaagatctgtattctacatggctttgcctgcaactatagtatgactcaagtatgttcttttcttcactgcattttcattcttatttttaatccctacttgtgtttgaattttataagcaatgttggtaaacatcatatatagttaaactcattttaggttcatgtgtctatgttggagcacaagtatgaggtgaagtcccacatcgagtagaagtgaaaaagttaaacattatataagtaaggagaagactcataaacctgagtttaaggttttgagttaaattgtaatatcaaatttctatatgttgatgaggaaagtagagggtgatagaaatctccatgaaatgtggtttggattttgcttatgcatatactttaatttgttcttgctcatgtatgttagaagtgtaagcctgcgtatgtataaatataaaaaattta

SEQ ID NO: 10084 - DNA, 1037 bp, Glycine max
  Gm_smallRNAprecursor_2917
tacacatttatataatatattcagattttgggttatctataatatataatatataaagggatatggtgtacacatttaaataatatataaaggagatatttttgtttagtgtatacatttggtttgatatttttatccctaaattaattagaaaattattattattatctttcccctcagctgtttatgtgtaattgcacactctcttttattcatgttacaaactggtcatgtgtaactgcacttctctgacttatggctccctcactcccaaaccaattgcaatttctattcaacctctcctatctctccctcttcttctgccaaaccgcaaccattattcttctcattgctacttctccttcaaaatcaatgacaacaatcatagaaaaggcgagtgagttctcaatgtctatgaaacatcaacatcgacacggacacgacacggatacggacacgtggacacctgtattgtccaaaatatagaacgtagtacgggtgttgtgtcggtgtcggacactgacacggacgcgtgtcggacaccggacacggcaagggactggagtgtccgtacttcgtagctcaatgtcgatcccaagatctgtattctacatggctttgcctgcaactatagtatgactcaagtatgttcttttcttcactgcattttcattcttatttttaatccctacttgtgtttgaattttataagcaatgttggtaaacatcatatatagttaaactcattttaggttcatgtgtctatgttggagcacaagtatgaggtgaagtcccacatcgagtagaagtgaaaaagttaaacattatataagtaaggagaagactcataaacctgagtttaaggttttgagttaaattgtaatatcaaatttctatatgttgatgaggaaagtagagggtgatagaaatctccatgaaatgtggtttggattttgcttatgcatatactttaatttgttcttgctcatgtatgttagaagtgtaagcctgcgtatgtataaatataaaaaatttat

SEQ ID NO: 10085 - DNA, 1222 bp, Glycine max
  Gm_smallRNAprecursor_2918
ggtacaaactttattatgtaaatttacatgtgcattaaatatacattagaaattttagtattatatataacgacattaattattttataacataattgtctattaactcagttggttaaaactttgtgttaatatcgttcaaatccatgaaaatcttaaacctacaagagttaatgtgtcttcaactagaatataattcaaaggctcctactatttcgcgaaaagataatcactttgtcttaacctatcttatatcttatcaagagaggtttataaaagtcaataatattagggtgttgctaggtgacccaacattattgctggtgcactcagtattttttaaaaataccaaaactgttcctgttttttttttgcatttgtgataggtgtgcgtgagggtggtctgtaaatcgtacggatcaagttgatcagtaaggttgatacggatcaagttgatccgtaagacttctatggatcaagttgatccgtgttgttccgtaaaaggcttacggatcaagttgattcgtaaaaagcttacggatcaagttgattcataaaaagcttagggatcaacttgatttgtaagccttttacaaaataacacaaatcaacttcattcgtagaagccttacggataaatttgatctgtaaaaggcttacggatcaagttgatccgtaaggcttctacggatcaagttgatccataaaaggcttgcggatcaagttgatctgtaagccttttacagatcaacttaaaagacttagggatcaaggatatttttgtcatttcatcttaagtgttgggtgcaccagcaataaagctggtgcacttagcaacacccaaactattttcgtttatagaatgggccttttcgcttcagcagactgggtcaaccggccaggcctatacttgtatatatattattagtctgttgcatatttagtagtaatgtttttaaaattaaattggtcaagacacaaatttaaaatttaatggttctggtagaactggaattaataaaataataataataataaaataatacgtactatataaaatcatagtcaagaaacataatattatttttataacactaaaaagtaaaaataaaacagaattttataagtttttaacatttaaagtacatacaaaaagttcataatacttaagcataagtttcagcagcacataatatgtattaataattacaagtttattata

SEQ ID NO: 10086 - DNA, 1221 bp, Glycine max
  Gm_smallRNAprecursor_2919
gtacaaactttattatgtaaatttacatgtgcattaaatatacattagaaattttagtattatatataacgacattaattattttataacataattgtctattaactcagttggttaaaactttgtgttaatatcgttcaaatccatgaaaatcttaaacctacaagagttaatgtgtcttcaactagaatataattcaaaggctcctactatttcgcgaaaagataatcactttgtcttaacctatcttatatcttatcaagagaggtttataaaagtcaataatattagggtgttgctaggtgacccaacattattgctggtgcactcagtattttttaaaaataccaaaactgttcctgttttttttttgcatttgtgataggtgtgcgtgagggtggtctgtaaatcgtacggatcaagttgatcagtaaggttgatacggatcaagttgatccgtaagacttctatggatcaagttgatccgtgttgttccgtaaaaggcttacggatcaagttgattcgtaaaaagcttacggatcaagttgattcataaaaagcttagggatcaacttgatttgtaagccttttacaaaataacacaaatcaacttcattcgtagaagccttacggataaatttgatctgtaaaaggcttacggatcaagttgatccgtaaggcttctacggatcaagttgatccataaaaggcttgcggatcaagttgatctgtaagccttttacagatcaacttaaaagacttagggatcaaggatatttttgtcatttcatcttaagtgttgggtgcaccagcaataaagctggtgcacttagcaacacccaaactattttcgtttatagaatgggccttttcgcttcagcagactgggtcaaccggccaggcctatacttgtatatatattattagtctgttgcatatttagtagtaatgtttttaaaattaaattggtcaagacacaaatttaaaatttaatggttctggtagaactggaattaataaaataataataataataaaataatacgtactatataaaatcatagtcaagaaacataatattatttttataacactaaaaagtaaaaataaaacagaattttataagtttttaacatttaaagtacatacaaaaagttcataatacttaagcataagtttcagcagcacataatatgtattaataattacaagtttattata

SEQ ID NO: 10087 - DNA, 1072 bp, Glycine max
  Gm_smallRNAprecursor_2920
aaatcttaaacctacaagagttaatgtgtcttcaactagaatataattcaaaggctcctactatttcgcgaaaagataatcactttgtcttaacctatcttatatcttatcaagagaggtttataaaagtcaataatattagggtgttgctaggtgacccaacattattgctggtgcactcagtattttttaaaaataccaaaactgttcctgttttttttttgcatttgtgataggtgtgcgtgagggtggtctgtaaatcgtacggatcaagttgatcagtaaggttgatacggatcaagttgatccgtaagacttctatggatcaagttgatccgtgttgttccgtaaaaggcttacggatcaagttgattcgtaaaaagcttacggatcaagttgattcataaaaagcttagggatcaacttgatttgtaagccttttacaaaataacacaaatcaacttcattcgtagaagccttacggataaatttgatctgtaaaaggcttacggatcaagttgatccgtaaggcttctacggatcaagttgatccataaaaggcttgcggatcaagttgatctgtaagccttttacagatcaacttaaaagacttagggatcaaggatatttttgtcatttcatcttaagtgttgggtgcaccagcaataaagctggtgcacttagcaacacccaaactattttcgtttatagaatgggccttttcgcttcagcagactgggtcaaccggccaggcctatacttgtatatatattattagtctgttgcatatttagtagtaatgtttttaaaattaaattggtcaagacacaaatttaaaatttaatggttctggtagaactggaattaataaaataataataataataaaataatacgtactatataaaatcatagtcaagaaacataatattatttttataacactaaaaagtaaaaataaaacagaattttataagtttttaacatttaaagtacatacaaaaagttcataatacttaagcataagtttcagcagcacataatatgtattaataattacaagtttattata

SEQ ID NO: 10088 - DNA, 1071 bp, Glycine max
  Gm_smallRNAprecursor_2921
aatcttaaacctacaagagttaatgtgtcttcaactagaatataattcaaaggctcctactatttcgcgaaaagataatcactttgtcttaacctatcttatatcttatcaagagaggtttataaaagtcaataatattagggtgttgctaggtgacccaacattattgctggtgcactcagtattttttaaaaataccaaaactgttcctgttttttttttgcatttgtgataggtgtgcgtgagggtggtctgtaaatcgtacggatcaagttgatcagtaaggttgatacggatcaagttgatccgtaagacttctatggatcaagttgatccgtgttgttccgtaaaaggcttacggatcaagttgattcgtaaaaagcttacggatcaagttgattcataaaaagcttagggatcaacttgatttgtaagccttttacaaaataacacaaatcaacttcattcgtagaagccttacggataaatttgatctgtaaaaggcttacggatcaagttgatccgtaaggcttctacggatcaagttgatccataaaaggcttgcggatcaagttgatctgtaagccttttacagatcaacttaaaagacttagggatcaaggatatttttgtcatttcatcttaagtgttgggtgcaccagcaataaagctggtgcacttagcaacacccaaactattttcgtttatagaatgggccttttcgcttcagcagactgggtcaaccggccaggcctatacttgtatatatattattagtctgttgcatatttagtagtaatgtttttaaaattaaattggtcaagacacaaatttaaaatttaatggttctggtagaactggaattaataaaataataataataataaaataatacgtactatataaaatcatagtcaagaaacataatattatttttataacactaaaaagtaaaaataaaacagaattttataagtttttaacatttaaagtacatacaaaaagttcataatacttaagcataagtttcagcagcacataatatgtattaataattacaagtttattata

SEQ ID NO: 10089 - DNA, 1035 bp, Glycine max
  Gm_smallRNAprecursor_2922
aaactacgatcccgaattctttaaccgttggattttcacgaaattttgatatgttgttctaaattcaatttttcacatcttcaccatttgggatttgcgagataatattcgtggagggagaaaaaggaatcgcatgaagatagtatgaatggaggcttcaatcccttctcattctctctaacgtttggaaacccgatcagagcaaccagaggaaaaaaattgaggaatctcaggaacttgctagagatgccgctatcgctgttgaaagacacgtgagcccgcttagaggtaagagatgagttattcacaattgaaaattaatgagaacatgtgtagggatccttagagtatcaattggaataggtgttggggtgtttccgcaatttttgattctatccttataattatcataattagtttaccattaattggtccaacaaatcttaattgggctgatttatgtgaggaattgttaggagtcagaccacaagaaggtgaaattaaaggtagtgtggttaaattaagttgattggctcaccattttgcacaaataaataaccatgacgacgaagaacaagtacgaaggtttacccgtgcatggatacgaagattcattggaggtgtcttgttcgttgacaaaagcagtaacaaagtttccctaaggtaccttcaatttttacgtgactttagagaacacatatgcatggggacctgccgtacttgtttttttatacagagagatgtgcagtgtcaccgattataaaaactaaatcaatcgaaggtatgtgcatcttaatacaaatgtgggcatgggaacgatgtataactttggctccaaagaggactcctcccctagtagaaaacaaaccactcgggcataggttagccatttttaaaagcgtctttcatttcaaaagaataaatgattttagggtatattaaattttaatctttgtaggtggctgcgacgtggaaatcaacatatcgacaatgatgatgtgagagtttttcgtcgcaagttagatattatgaaac

SEQ ID NO: 10090 - DNA, 1109 bp, Glycine max
  Gm_smallRNAprecursor_2923
taacttcagaagctaattttagcttatgggagaagcttgtttcattttttctttttattttcttttaagtgcttctgaagaagaaacttatcaaaacagggccttagaaggaacatgttagcatgttagatgtctgaaagtatattaaaatctaaagttttaacctgctattgctaatatactccttttgcaacacaaggaggagaatattagcatcctttattcatgtgtgtgcgtgtgtgtatgcattcctcaaggtggatctatcaaaagctacgtgtgtgcagttgaaagagcattcatcctccacaccaaccttggaaagtgtagttatgtttggcatgctttatttaatagtttttcttagtatcagaattttggaccattccactttccttccttctctttattatattaatcaacaacaataagaagaataattaattggtattattgtgcagaaactctaatttcccaatttgtggttgaagatttgggtagggacttagggtaagagatggtacaacacaggtttttgagagacaagttctctcctcaaatcactttacgtattgtgataccattccactttccttttctctatttatcattcctgtaactaccaccccttaactgcttaacaactctctgagtacaactatcaacaaatcaatcattccgttagtcttcttagagtcatgattccctacatcacttcctatttttcctagcatacaccccttagtaaaagggggtctctggtaaggatgtgatatttttttttttggtgtcgtaactaataagaatgtgatcgtaaggataatatcgttgaaagccatctatagccatcattgttacccggcccctccctctcatctttcaacaccctcagctcagctaaatgcagcgtttaactggtaattgctcattctttgtattgcttttaattttttgctttgctttgttctgaggtttttgttttgtttaaggtttctattatctaagttgctgttcgtttggatttcgctttgtagaatagtagagtgaaattcaaacgacttttgagttcaattaatattatttttctcataatttttttggtcacatga

SEQ ID NO: 10091 - DNA, 1041 bp, Glycine max
  Gm_smallRNAprecursor_2924
ataacatcttgtattttagaagaaattcccccggttccatcaccttcaatttttctaattgttcttcttttgtttctttgtagctcagttttagtttctgctgcacataattgatgagcatacatattggtttgttttcattccgtatattttataactgatcatatatttctattacatggtattggttagggctgtgcaaaaaccggtttggaaaaaaatcgaaccgaagtggttttcaaactggtttaaaccagtttggtttttaacccaaatctgcgaactggttttcaaactggttttaaaaaaccagttttgaactggttctgaactagtttcaaactagtttaaaactgttctaagagctgaactggttttgaattggttttcaaaatttttagattgataaatccggttcagtccgacccggtttttttggacaaacttaaacccagaaaccttcaaagaaatatactcatgtcaactggaggctaaggttatggttgtggcaaagatgaagctgtctaagattcagcttaatacaaaatgtagaacaaccaagagaaccatataagaatatgaaaaaactgtacagtaaaacaatcatatgccataaataaatgaaaatggaataaataaataaaatattcaagtatgttaattgattaatatttaatgatagaaatttcagtaaggcagtttcccagatcggtaaatagcagatattcagaataaaaaagttgaatctccttgaagatatatccttaagaactctcacactcatacacacttttcacaaaaaatactggtcccaaaaaatgttagttgtattcttcacactaagaaacattaacatgggccatggccaaaaggcccacaaaatcaaaaggcaatatggccttgtggctaggtccaatctgccaaattttattgaaaaattaaagttagaggaagtgcacctatttaatgggctgtcctagcccaccccacccatcagccagccacttttttttaaacaacgtcaaaggttttagcttttac

SEQ ID NO: 10092 - DNA, 1105 bp, Glycine max
  Gm_smallRNAprecursor_2925
aaccatttgtttaaaaatatatgattgttttctaaaattaacatattttcaagcatggactaattcttcatacaaatgccttcaaattaatgatgaaaactaaatctatacatgggagacttgagcatatatagttacataatctgagcagatgcaaacagctcaaactttttttttctctattttagccacacatatatgtaaagaaattggttcatccatcactaaagtaagttgtagcttgggatttgggagaaggtagcatattcactcgtaataaaaaagaaggtaacgaaaatacaacctttacaaaacaagattgccaccactgagttgaaaattctgagcctgcaaaaacaaactgtgaaagagcattttttttttttttgtgcagattgagagaaagatgaaaggaagagaaagccttaccataagggcatgcgagatatgaaaatggagagaaagaaatttaaattaaggaaaaagcaaaagttgggtggggggaatgaagcctggtccgagaatcatttttttgtgtaagagggtaaatttccattggaaactttcactgatctcagtactctactcctcctcctcctccatgacctcgagccagacaacattcctctcaacctcacctttgcaagctaggaagaagaagcatgtcaagttctcaaccacacacaacacacatgatcttgtgtttgaagtttgaagtagaaacaaatgaaaggaagaacttttgaggggaatgaagcctggtccgaagccttatagttccatccactgtgaacctcatttgtgaaaagcctcgagccagccaacattcccctcaataccaacccatctcaacacaacactcttcaaaaccctaacccgcacataccttcatatatatagcgagcccatgtgagtgagagagaaaccaagcactgactcactcataccacactaagtgtgctttttagtcacccgttcagatgttccaaaattaggcttatgcaaaacggaacttaaactctaactactcagctagctgtaagataaacaaaagcatcgtacgtagttgttaactcatcatcaccacaaaggacggagaaattct

SEQ ID NO: 10093 - DNA, 1105 bp, Glycine max; identical to SEQ ID NO: 10092
  Gm_smallRNAprecursor_2926

SEQ ID NO: 10094 - DNA, 1106 bp, Glycine max
  Gm_smallRNAprecursor_2927
aaccatttgtttaaaaatatatgattgttttctaaaattaacatattttcaagcatggactaattcttcatacaaatgccttcaaattaatgatgaaaactaaatctatacatgggagacttgagcatatatagttacataatctgagcagatgcaaacagctcaaactttttttttctctattttagccacacatatatgtaaagaaattggttcatccatcactaaagtaagttgtagcttgggatttgggagaaggtagcatattcactcgtaataaaaaagaaggtaacgaaaatacaacctttacaaaacaagattgccaccactgagttgaaaattctgagcctgcaaaaacaaactgtgaaagagcattttttttttttttgtgcagattgagagaaagatgaaaggaagagaaagccttaccataagggcatgcgagatatgaaaatggagagaaagaaatttaaattaaggaaaaagcaaaagttgggtggggggaatgaagcctggtccgagaatcatttttttgtgtaagagggtaaatttccattggaaactttcactgatctcagtactctactcctcctcctcctccatgacctcgagccagacaacattcctctcaacctcacctttgcaagctaggaagaagaagcatgtcaagttctcaaccacacacaacacacatgatcttgtgtttgaagtttgaagtagaaacaaatgaaaggaagaacttttgaggggaatgaagcctggtccgaagccttatagttccatccactgtgaacctcatttgtgaaaagcctcgagccagccaacattcccctcaataccaacccatctcaacacaacactcttcaaaaccctaacccgcacataccttcatatatatagcgagcccatgtgagtgagagagaaaccaagcactgactcactcataccacactaagtgtgctttttagtcacccgttcagatgttccaaaattaggcttatgcaaaacggaacttaaactctaactactcagctagctgtaagataaacaaaagcatcgtacgtagttgttaactcatcatcaccacaaaggacggagaaattctt

SEQ ID NO: 10095 - DNA, 1106 bp, Glycine max; identical to SEQ ID NO: 10094
  Gm_smallRNAprecursor_2928

SEQ ID NO: 10096 - DNA, 1107 bp, Glycine max
  Gm_smallRNAprecursor_2929
aaccatttgtttaaaaatatatgattgttttctaaaattaacatattttcaagcatggactaattcttcatacaaatgccttcaaattaatgatgaaaactaaatctatacatgggagacttgagcatatatagttacataatctgagcagatgcaaacagctcaaactttttttttctctattttagccacacatatatgtaaagaaattggttcatccatcactaaagtaagttgtagcttgggatttgggagaaggtagcatattcactcgtaataaaaaagaaggtaacgaaaatacaacctttacaaaacaagattgccaccactgagttgaaaattctgagcctgcaaaaacaaactgtgaaagagcattttttttttttttgtgcagattgagagaaagatgaaaggaagagaaagccttaccataagggcatgcgagatatgaaaatggagagaaagaaatttaaattaaggaaaaagcaaaagttgggtggggggaatgaagcctggtccgagaatcatttttttgtgtaagagggtaaatttccattggaaactttcactgatctcagtactctactcctcctcctcctccatgacctcgagccagacaacattcctctcaacctcacctttgcaagctaggaagaagaagcatgtcaagttctcaaccacacacaacacacatgatcttgtgtttgaagtttgaagtagaaacaaatgaaaggaagaacttttgaggggaatgaagcctggtccgaagccttatagttccatccactgtgaacctcatttgtgaaaagcctcgagccagccaacattcccctcaataccaacccatctcaacacaacactcttcaaaaccctaacccgcacataccttcatatatatagcgagcccatgtgagtgagagagaaaccaagcactgactcactcataccacactaagtgtgctttttagtcacccgttcagatgttccaaaattaggcttatgcaaaacggaacttaaactctaactactcagctagctgtaagataaacaaaagcatcgtacgtagttgttaactcatcatcaccacaaaggacggagaaattcttt

SEQ ID NO: 10097 - DNA, 1143 bp, Glycine max
  Gm_smallRNAprecursor_2930
tctatacatgggagacttgagcatatatagttacataatctgagcagatgcaaacagctcaaactttttttttctctattttagccacacatatatgtaaagaaattggttcatccatcactaaagtaagttgtagcttgggatttgggagaaggtagcatattcactcgtaataaaaaagaaggtaacgaaaatacaacctttacaaaacaagattgccaccactgagttgaaaattctgagcctgcaaaaacaaactgtgaaagagcattttttttttttttgtgcagattgagagaaagatgaaaggaagagaaagccttaccataagggcatgcgagatatgaaaatggagagaaagaaatttaaattaaggaaaaagcaaaagttgggtggggggaatgaagcctggtccgagaatcatttttttgtgtaagagggtaaatttccattggaaactttcactgatctcagtactctactcctcctcctcctccatgacctcgagccagacaacattcctctcaacctcacctttgcaagctaggaagaagaagcatgtcaagttctcaaccacacacaacacacatgatcttgtgtttgaagtttgaagtagaaacaaatgaaaggaagaacttttgaggggaatgaagcctggtccgaagccttatagttccatccactgtgaacctcatttgtgaaaagcctcgagccagccaacattcccctcaataccaacccatctcaacacaacactcttcaaaaccctaacccgcacataccttcatatatatagcgagcccatgtgagtgagagagaaaccaagcactgactcactcataccacactaagtgtgctttttagtcacccgttcagatgttccaaaattaggcttatgcaaaacggaacttaaactctaactactcagctagctgtaagataaacaaaagcatcgtacgtagttgttaactcatcatcaccacaaaggacggagaaattctttcaacaaattaacaacatccaagtgacttcgatttgtttcatatatgtcacgagatttactcaaattttactaaattcagttacctaaagttaaattcatccacgcccacttatgtaacaatactataataatagtagtaa

SEQ ID NO: 10098 - DNA, 1143 bp, Glycine max; identical to SEQ ID NO: 10097
  Gm_smallRNAprecursor_2931

SEQ ID NO: 10099 - DNA, 1142 bp, Glycine max
  Gm_smallRNAprecursor_2932
ctatacatgggagacttgagcatatatagttacataatctgagcagatgcaaacagctcaaactttttttttctctattttagccacacatatatgtaaagaaattggttcatccatcactaaagtaagttgtagcttgggatttgggagaaggtagcatattcactcgtaataaaaaagaaggtaacgaaaatacaacctttacaaaacaagattgccaccactgagttgaaaattctgagcctgcaaaaacaaactgtgaaagagcattttttttttttttgtgcagattgagagaaagatgaaaggaagagaaagccttaccataagggcatgcgagatatgaaaatggagagaaagaaatttaaattaaggaaaaagcaaaagttgggtggggggaatgaagcctggtccgagaatcatttttttgtgtaagagggtaaatttccattggaaactttcactgatctcagtactctactcctcctcctcctccatgacctcgagccagacaacattcctctcaacctcacctttgcaagctaggaagaagaagcatgtcaagttctcaaccacacacaacacacatgatcttgtgtttgaagtttgaagtagaaacaaatgaaaggaagaacttttgaggggaatgaagcctggtccgaagccttatagttccatccactgtgaacctcatttgtgaaaagcctcgagccagccaacattcccctcaataccaacccatctcaacacaacactcttcaaaaccctaacccgcacataccttcatatatatagcgagcccatgtgagtgagagagaaaccaagcactgactcactcataccacactaagtgtgctttttagtcacccgttcagatgttccaaaattaggcttatgcaaaacggaacttaaactctaactactcagctagctgtaagataaacaaaagcatcgtacgtagttgttaactcatcatcaccacaaaggacggagaaattctttcaacaaattaacaacatccaagtgacttcgatttgtttcatatatgtcacgagatttactcaaattttactaaattcagttacctaaagttaaattcatccacgcccacttatgtaacaatactataataatagtagtaa

SEQ ID NO: 10100 - DNA, 1142 bp, Glycine max; identical to SEQ ID NO: 10099
  Gm_smallRNAprecursor_2933

SEQ ID NO: 10101 - DNA, 1141 bp, Glycine max
  Gm_smallRNAprecursor_2934
tatacatgggagacttgagcatatatagttacataatctgagcagatgcaaacagctcaaactttttttttctctattttagccacacatatatgtaaagaaattggttcatccatcactaaagtaagttgtagcttgggatttgggagaaggtagcatattcactcgtaataaaaaagaaggtaacgaaaatacaacctttacaaaacaagattgccaccactgagttgaaaattctgagcctgcaaaaacaaactgtgaaagagcattttttttttttttgtgcagattgagagaaagatgaaaggaagagaaagccttaccataagggcatgcgagatatgaaaatggagagaaagaaatttaaattaaggaaaaagcaaaagttgggtggggggaatgaagcctggtccgagaatcatttttttgtgtaagagggtaaatttccattggaaactttcactgatctcagtactctactcctcctcctcctccatgacctcgagccagacaacattcctctcaacctcacctttgcaagctaggaagaagaagcatgtcaagttctcaaccacacacaacacacatgatcttgtgtttgaagtttgaagtagaaacaaatgaaaggaagaacttttgaggggaatgaagcctggtccgaagccttatagttccatccactgtgaacctcatttgtgaaaagcctcgagccagccaacattcccctcaataccaacccatctcaacacaacactcttcaaaaccctaacccgcacataccttcatatatatagcgagcccatgtgagtgagagagaaaccaagcactgactcactcataccacactaagtgtgctttttagtcacccgttcagatgttccaaaattaggcttatgcaaaacggaacttaaactctaactactcagctagctgtaagataaacaaaagcatcgtacgtagttgttaactcatcatcaccacaaaggacggagaaattctttcaacaaattaacaacatccaagtgacttcgatttgtttcatatatgtcacgagatttactcaaattttactaaattcagttacctaaagttaaattcatccacgcccacttatgtaacaatactataataatagtagtaa

SEQ ID NO: 10102 - DNA, 1141 bp, Glycine max; identical to SEQ ID NO: 10101
  Gm_smallRNAprecursor_2935

SEQ ID NO: 10103 - DNA, 1064 bp, Glycine max
  Gm_smallRNAprecursor_2936
atttgggagaaggtagcatattcactcgtaataaaaaagaaggtaacgaaaatacaacctttacaaaacaagattgccaccactgagttgaaaattctgagcctgcaaaaacaaactgtgaaagagcattttttttttttttgtgcagattgagagaaagatgaaaggaagagaaagccttaccataagggcatgcgagatatgaaaatggagagaaagaaatttaaattaaggaaaaagcaaaagttgggtggggggaatgaagcctggtccgagaatcatttttttgtgtaagagggtaaatttccattggaaactttcactgatctcagtactctactcctcctcctcctccatgacctcgagccagacaacattcctctcaacctcacctttgcaagctaggaagaagaagcatgtcaagttctcaaccacacacaacacacatgatcttgtgtttgaagtttgaagtagaaacaaatgaaaggaagaacttttgaggggaatgaagcctggtccgaagccttatagttccatccactgtgaacctcatttgtgaaaagcctcgagccagccaacattcccctcaataccaacccatctcaacacaacactcttcaaaaccctaacccgcacataccttcatatatatagcgagcccatgtgagtgagagagaaaccaagcactgactcactcataccacactaagtgtgctttttagtcacccgttcagatgttccaaaattaggcttatgcaaaacggaacttaaactctaactactcagctagctgtaagataaacaaaagcatcgtacgtagttgttaactcatcatcaccacaaaggacggagaaattctttcaacaaattaacaacatccaagtgacttcgatttgtttcatatatgtcacgagatttactcaaattttactaaattcagttacctaaagttaaattcatccacgcccacttatgtaacaatactataataatagtagtaatgaataatttataggatttaattaatgttggtgagcgtaggtttttttttatatataatagta

SEQ ID NO: 10104 - DNA, 1064 bp, Glycine max; identical to SEQ ID NO: 10103
  Gm_smallRNAprecursor_2937

SEQ ID NO: 10105 - DNA, 1065 bp, Glycine max
  Gm_smallRNAprecursor_2938
atttgggagaaggtagcatattcactcgtaataaaaaagaaggtaacgaaaatacaacctttacaaaacaagattgccaccactgagttgaaaattctgagcctgcaaaaacaaactgtgaaagagcattttttttttttttgtgcagattgagagaaagatgaaaggaagagaaagccttaccataagggcatgcgagatatgaaaatggagagaaagaaatttaaattaaggaaaaagcaaaagttgggtggggggaatgaagcctggtccgagaatcatttttttgtgtaagagggtaaatttccattggaaactttcactgatctcagtactctactcctcctcctcctccatgacctcgagccagacaacattcctctcaacctcacctttgcaagctaggaagaagaagcatgtcaagttctcaaccacacacaacacacatgatcttgtgtttgaagtttgaagtagaaacaaatgaaaggaagaacttttgaggggaatgaagcctggtccgaagccttatagttccatccactgtgaacctcatttgtgaaaagcctcgagccagccaacattcccctcaataccaacccatctcaacacaacactcttcaaaaccctaacccgcacataccttcatatatatagcgagcccatgtgagtgagagagaaaccaagcactgactcactcataccacactaagtgtgctttttagtcacccgttcagatgttccaaaattaggcttatgcaaaacggaacttaaactctaactactcagctagctgtaagataaacaaaagcatcgtacgtagttgttaactcatcatcaccacaaaggacggagaaattctttcaacaaattaacaacatccaagtgacttcgatttgtttcatatatgtcacgagatttactcaaattttactaaattcagttacctaaagttaaattcatccacgcccacttatgtaacaatactataataatagtagtaatgaataatttataggatttaattaatgttggtgagcgtaggtttttttttatatataatagtat

SEQ ID NO: 10106 - DNA, 1118 bp, Glycine max
  Gm_smallRNAprecursor_2939
gtttgaatataatcataaaaatgagtttgaatataatcataaaaatgagtctaacgtaaaatatgaataatttaaataagataataacatacgcataataaatttgtctcattctcttaaattatgtgaaaatcactggctaattaggaaagaaaggttttcactctcaaaaatacactgaaacgctctggtttgaatttagttaagggaaaggggggaaaaacggatatgccctatatagaccctcttaatgttagacgcatcactatatcaaccattaataatatggactccggtgtattttgttgttatgaaacatttaaacgttcttcaaaattgaaatgaaaataatgcttaaaagcaacccatatgaagtgaatcctcacgccaatagactgctagggtgttgctaagtgcatgcactcaatacttaaggtgaaatgacgaaaatactcttaattaagtcatttaagttaatccgtaaaagacttacgaatcaacttgatccgtaagccttttacagatcaacttgatctgtagaagccttacttgatccgtaagtcttttacaaattaagttgatccgtatgcttaatatcaacatacgaatcaactagatccgtatcaaccttacggatcaacttgatctgtacgatttacggaccaccctcacacacacccatcacaaatgaaaaaaagcgcaaggaaaattttagtatttaaaaaaaatgctggatgcacctagcaacacccgattggtatcacaagttggcctatacatttaaatgagcagcccgcgagacttattcacaaaattaggctctatatttctaattgatacatgagatcatagtaaaagaatcacattatcacatccaatatggaaaattaaaaacttcttatttgagaataattatatgacaagaacaatttatacaacactatatatattgcaacaaacatcaaaatcgatcaaatgaatgttggcttataaacgattcttcaagttctctaaaacctcggtagacatgttctgtttggttctgtggaagggctaacctccgcacttcagtcatatacctgtatgtaaaaagtcaatcagatcaaaactttaactag

SEQ ID NO: 10107 - DNA, 1129 bp, Glycine max
  Gm_smallRNAprecursor_2940
tgtttttaaatttttttaaagagaaatatgtagataaagaaaaataaaaaaattggataaaattagagtacaactttttagttacgttgtatgtaattttgtagttaaatttatgtattgttgatattttttttatgtttattcattaaaaaaataaaaaaattagttagtagtattaaaacaaattaagaaacatagtgaaaaaataattgatacatctgtcttgtacaatggacataaaatttcaaagtgtaacaactaagatgataatcgagaataatgaaacatattaaaaaatacaattaaaacgcaaatatgacaaaaataacaataatctgaaatatgttgtgcaagatacatgtcttcttctattttaattactggtttgttaaaaatagtcaaaacttttagtgtgcagtatcgtttccaatggttggattgtgttaacacctttagcacattttcatcatttttcaattttgttatttcatatccaattaaattttctgaatacttagcatgacctggttgtcgaaaaaacaatcgtctaaccagttgtgattcgtaaattttataagggagaaaccctataggtgcaacttgcttgattaaaaaatgctttagtttgttcatgctacatcctgaaggaatgacaaatcttattggatttgtcagtgatcttattcctcaaccacaaccatcgtctccacaacctacaattactgccttcacaacaattaacgtacaacaacgtaaacctcaataatccagtatcttcatacaacaaccttgaaacacaagaaacctttgacatttatacttcatacacacaactatcattcgaaaatgattcttttttttatgcccaacaaatctcctttgaccaccaaaaccatccttcatccccctttacgccaccttcacaaaaaccataaacatcaaactgaaatgaacatctcattgctaacgaagatcccattatacgatttcataacgaaaacatgattttagtgaagatgatgatcaacagttctttgatcacatcaatcaccaaagcatgaccaaagtgatgactaaagcgatggtgagggtgttggcagaccaacgacacctccgtcctaatatcaca

SEQ ID NO: 10108 - DNA, 1190 bp, Glycine max
  Gm_smallRNAprecursor_2941
ttttttatgtttattcattaaaaaaataaaaaaattagttagtagtattaaaacaaattaagaaacatagtgaaaaaataattgatacatctgtcttgtacaatggacataaaatttcaaagtgtaacaactaagatgataatcgagaataatgaaacatattaaaaaatacaattaaaacgcaaatatgacaaaaataacaataatctgaaatatgttgtgcaagatacatgtcttcttctattttaattactggtttgttaaaaatagtcaaaacttttagtgtgcagtatcgtttccaatggttggattgtgttaacacctttagcacattttcatcatttttcaattttgttatttcatatccaattaaattttctgaatacttagcatgacctggttgtcgaaaaaacaatcgtctaaccagttgtgattcgtaaattttataagggagaaaccctataggtgcaacttgcttgattaaaaaatgctttagtttgttcatgctacatcctgaaggaatgacaaatcttattggatttgtcagtgatcttattcctcaaccacaaccatcgtctccacaacctacaattactgccttcacaacaattaacgtacaacaacgtaaacctcaataatccagtatcttcatacaacaaccttgaaacacaagaaacctttgacatttatacttcatacacacaactatcattcgaaaatgattcttttttttatgcccaacaaatctcctttgaccaccaaaaccatccttcatccccctttacgccaccttcacaaaaaccataaacatcaaactgaaatgaacatctcattgctaacgaagatcccattatacgatttcataacgaaaacatgattttagtgaagatgatgatcaacagttctttgatcacatcaatcaccaaagcatgaccaaagtgatgactaaagcgatggtgagggtgttggcagaccaacgacacctccgtcctaatatcacaaacctagatgtccaatagacttgaactttgaccacttaccacactacattgatcgacaccattttgttcagcagcaatataatgtacaactaccaaacgatgcactcgaggttgacatggccttcgatgaaaaaacacaatgtattcgagtagtcaaagaatacaacatgaaaaatcattttgattgta

SEQ ID NO: 10109 - DNA, 1184 bp, Glycine max
  Gm_smallRNAprecursor_2942
gacaaaaataacaataatctgaaatatgttgtgcaagatacatgtcttcttctattttaattactggtttgttaaaaatagtcaaaacttttagtgtgcagtatcgtttccaatggttggattgtgttaacacctttagcacattttcatcatttttcaattttgttatttcatatccaattaaattttctgaatacttagcatgacctggttgtcgaaaaaacaatcgtctaaccagttgtgattcgtaaattttataagggagaaaccctataggtgcaacttgcttgattaaaaaatgctttagtttgttcatgctacatcctgaaggaatgacaaatcttattggatttgtcagtgatcttattcctcaaccacaaccatcgtctccacaacctacaattactgccttcacaacaattaacgtacaacaacgtaaacctcaataatccagtatcttcatacaacaaccttgaaacacaagaaacctttgacatttatacttcatacacacaactatcattcgaaaatgattcttttttttatgcccaacaaatctcctttgaccaccaaaaccatccttcatccccctttacgccaccttcacaaaaaccataaacatcaaactgaaatgaacatctcattgctaacgaagatcccattatacgatttcataacgaaaacatgattttagtgaagatgatgatcaacagttctttgatcacatcaatcaccaaagcatgaccaaagtgatgactaaagcgatggtgagggtgttggcagaccaacgacacctccgtcctaatatcacaaacctagatgtccaatagacttgaactttgaccacttaccacactacattgatcgacaccattttgttcagcagcaatataatgtacaactaccaaacgatgcactcgaggttgacatggccttcgatgaaaaaacacaatgtattcgagtagtcaaagaatacaacatgaaaaatcattttgattgtagaataatttactctgaccagaaaaggctaaacttcgtgtgtaaattatatgaaaatggttgaacatggagtttaggcgcatgcaattcaaagaggcatgacaaatgaattatcaagagtattagaggtcatcacacctgtctcgcgtcaatgctcatacaagatcatcgacaactcgacaaac

SEQ ID NO: 10110 - DNA, 1154 bp, Glycine max
  Gm_smallRNAprecursor_2943
cttctattttaattactggtttgttaaaaatagtcaaaacttttagtgtgcagtatcgtttccaatggttggattgtgttaacacctttagcacattttcatcatttttcaattttgttatttcatatccaattaaattttctgaatacttagcatgacctggttgtcgaaaaaacaatcgtctaaccagttgtgattcgtaaattttataagggagaaaccctataggtgcaacttgcttgattaaaaaatgctttagtttgttcatgctacatcctgaaggaatgacaaatcttattggatttgtcagtgatcttattcctcaaccacaaccatcgtctccacaacctacaattactgccttcacaacaattaacgtacaacaacgtaaacctcaataatccagtatcttcatacaacaaccttgaaacacaagaaacctttgacatttatacttcatacacacaactatcattcgaaaatgattcttttttttatgcccaacaaatctcctttgaccaccaaaaccatccttcatccccctttacgccaccttcacaaaaaccataaacatcaaactgaaatgaacatctcattgctaacgaagatcccattatacgatttcataacgaaaacatgattttagtgaagatgatgatcaacagttctttgatcacatcaatcaccaaagcatgaccaaagtgatgactaaagcgatggtgagggtgttggcagaccaacgacacctccgtcctaatatcacaaacctagatgtccaatagacttgaactttgaccacttaccacactacattgatcgacaccattttgttcagcagcaatataatgtacaactaccaaacgatgcactcgaggttgacatggccttcgatgaaaaaacacaatgtattcgagtagtcaaagaatacaacatgaaaaatcattttgattgtagaataatttactctgaccagaaaaggctaaacttcgtgtgtaaattatatgaaaatggttgaacatggagtttaggcgcatgcaattcaaagaggcatgacaaatgaattatcaagagtattagaggtcatcacacctgtctcgcgtcaatgctcatacaagatcatcgacaactcgacaaacacgtcatagcatagatca

SEQ ID NO: 10111 - DNA, 1091 bp, Glycine max
  Gm_smallRNAprecursor_2944
gtgtgcagtatcgtttccaatggttggattgtgttaacacctttagcacattttcatcatttttcaattttgttatttcatatccaattaaattttctgaatacttagcatgacctggttgtcgaaaaaacaatcgtctaaccagttgtgattcgtaaattttataagggagaaaccctataggtgcaacttgcttgattaaaaaatgctttagtttgttcatgctacatcctgaaggaatgacaaatcttattggatttgtcagtgatcttattcctcaaccacaaccatcgtctccacaacctacaattactgccttcacaacaattaacgtacaacaacgtaaacctcaataatccagtatcttcatacaacaaccttgaaacacaagaaacctttgacatttatacttcatacacacaactatcattcgaaaatgattcttttttttatgcccaacaaatctcctttgaccaccaaaaccatccttcatccccctttacgccaccttcacaaaaaccataaacatcaaactgaaatgaacatctcattgctaacgaagatcccattatacgatttcataacgaaaacatgattttagtgaagatgatgatcaacagttctttgatcacatcaatcaccaaagcatgaccaaagtgatgactaaagcgatggtgagggtgttggcagaccaacgacacctccgtcctaatatcacaaacctagatgtccaatagacttgaactttgaccacttaccacactacattgatcgacaccattttgttcagcagcaatataatgtacaactaccaaacgatgcactcgaggttgacatggccttcgatgaaaaaacacaatgtattcgagtagtcaaagaatacaacatgaaaaatcattttgattgtagaataatttactctgaccagaaaaggctaaacttcgtgtgtaaattatatgaaaatggttgaacatggagtttaggcgcatgcaattcaaagaggcatgacaaatgaattatcaagagtattagaggtcatcacacctgtctcgcgtcaatgctcatacaagatcatcgacaactcgacaaac

SEQ ID NO: 10112 - DNA, 1137 bp, Glycine max
  Gm_smallRNAprecursor_2945
atgattttagtgaagatgatgatcaacagttctttgatcacatcaatcaccaaagcatgaccaaagtgatgactaaagcgatggtgagggtgttggcagaccaacgacacctccgtcctaatatcacaaacctagatgtccaatagacttgaactttgaccacttaccacactacattgatcgacaccattttgttcagcagcaatataatgtacaactaccaaacgatgcactcgaggttgacatggccttcgatgaaaaaacacaatgtattcgagtagtcaaagaatacaacatgaaaaatcattttgattgtagaataatttactctgaccagaaaaggctaaacttcgtgtgtaaattatatgaaaatggttgaacatggagtttaggcgcatgcaattcaaagaggcatgacaaatgaattatcaagagtattagaggtcatcacacctgtctcgcgtcaatgctcatacaagatcatcgacaactcgacaaacacgtcatagcatagatcatccaaccaattgtcaaaacaaacccaaccgtctccatcaagacgttgattgcagagatcaaaacattcatcaattataccacatcctacaagaagacatggttagcaaagcaaagagagttggagatgattcatggaaactgagaagaattatatgccaacctgccaaaacttttgggagttttgcaatcttgtattcccggaactgtggtcgatgctcaattagaattcgtgtatgagggaggagaaatcgtaccagacaaaagaatgtttaaacgtatcttttggtcatttggtccatgcattaatggctttgcatattgcaaacccatagtacaagtagatggtacatggcttaaagggaagtataatgacacactgttgatagttactacacaagaaggagctaatcatatattcccgattgcctacgccattgtagaaggggagacaacttcagcttgggattttttctaaagattttgagaagacatgttattccgcaaattaacatttctctcatttcacacccctcaattataagtgcctacaacaacccaagtacatgacacatcctatttcttttgtctgtgccacattgcacaaaactttcattgcaa

SEQ ID NO: 10113 - DNA, 1120 bp, Glycine max
  Gm_smallRNAprecursor_2946
tacattgatcgacaccattttgttcagcagcaatataatgtacaactaccaaacgatgcactcgaggttgacatggccttcgatgaaaaaacacaatgtattcgagtagtcaaagaatacaacatgaaaaatcattttgattgtagaataatttactctgaccagaaaaggctaaacttcgtgtgtaaattatatgaaaatggttgaacatggagtttaggcgcatgcaattcaaagaggcatgacaaatgaattatcaagagtattagaggtcatcacacctgtctcgcgtcaatgctcatacaagatcatcgacaactcgacaaacacgtcatagcatagatcatccaaccaattgtcaaaacaaacccaaccgtctccatcaagacgttgattgcagagatcaaaacattcatcaattataccacatcctacaagaagacatggttagcaaagcaaagagagttggagatgattcatggaaactgagaagaattatatgccaacctgccaaaacttttgggagttttgcaatcttgtattcccggaactgtggtcgatgctcaattagaattcgtgtatgagggaggagaaatcgtaccagacaaaagaatgtttaaacgtatcttttggtcatttggtccatgcattaatggctttgcatattgcaaacccatagtacaagtagatggtacatggcttaaagggaagtataatgacacactgttgatagttactacacaagaaggagctaatcatatattcccgattgcctacgccattgtagaaggggagacaacttcagcttgggattttttctaaagattttgagaagacatgttattccgcaaattaacatttctctcatttcacacccctcaattataagtgcctacaacaacccaagtacatgacacatcctatttcttttgtctgtgccacattgcacaaaactttcattgcaataactcaaactgcaaacattaaaagaaaccactcatgatgactggtgagaatctattttatttattcgttaaactttactttcaatcaaattttataacttaatagattgattgaatatttacaggttacacatacacggagaaaatgcaccggt

SEQ ID NO: 10114 - DNA, 1104 bp, Glycine max
  Gm_smallRNAprecursor_2947
aagaaggagctaatcatatattcccgattgcctacgccattgtagaaggggagacaacttcagcttgggattttttctaaagattttgagaagacatgttattccgcaaattaacatttctctcatttcacacccctcaattataagtgcctacaacaacccaagtacatgacacatcctatttcttttgtctgtgccacattgcacaaaactttcattgcaataactcaaactgcaaacattaaaagaaaccactcatgatgactggtgagaatctattttatttattcgttaaactttactttcaatcaaattttataacttaatagattgattgaatatttacaggttacacatacacggagaaaatgcaccggtaacatcttagggatatccgttcgaataagccaagtgcaactgaatggcttgatcaactaaccaaacaaaattgggatacaatgcttcgatgaggggaaacgttggggacatacgactatcaatttgtctgagtctgttaatttcatgttcaaaaaacacaagacatttgttggtgtcattgttggttgaggagacgtatttcaagaccacaaaactttttgctattagaggtcgacaaactcaggcaatgatcaaccccgacttacagtattctaaagtcgtctctgatgcaatgaatagcgatcaacaacaagaatctaatacacattataaatgcattcgacagacacaatcacacttttattataacataggcctaattctcacttcaaacactgagacaacctgaaagttttagagtaatgttacaatcccaaaagtgtgattgtggtgaatatcaagctaaacacttaccatgttctcacgtcatgactgcctataaatttgtcaatattgatcccatgaactatgtgctgatgttattcactttacaacacattttgcacgtctaagataactcttttagtttactgtcacatgaatcaatgtgacaagaatatgaaggagatcagtggggtctgatccaaggagaaaaatgactgcgaatgatcatcccgtttcaactcgcattcttattgagatggacgaagacgaaaatgaacgaga

SEQ ID NO: 10115 - DNA, 1200 bp, Glycine max
  Gm_smallRNAprecursor_2948
ttatcaatataatacttaaataatcacatttggctaaggaaaaacttatgatgaagatatgctaggacacttatttctgatatgattatgttgtcggcaaatttcacatttttttctactttcccgttcattttcgtcttcatccatctcatcttagtaagaaggcgagttgaaatgggacgaccctttgcagtcatttttctccttggatcaggacctcactgatttccttcgtattcttgtcacattgattcgtgtgatagtaaactaaaggagttatcttagacgtgcaaaatgtggtgtaaagtgaataacatcagcacatagttcatgagattaacattgacagatttacaggcagccatgacgtgagaacatggtaagtgtttatcctgatattcatcacaattgaacttttgagattataacattactctaaacctttcaagttgtctgggtgtttgaagtggggattgggcttctgttaaaataaaagtgtgattgtgtctgtcgaattcatttacaatgtgtattagattcttgttgactgctattcattgcatcagaaaggacttcagaatactgtgagtcggagttaatcattgcttgagtttgttgacctctaataacgaacagttgtgcggtcttgaaatacgtctccttaatcaacaatgacacccgtaaatgtcttgtgttttttaacatgaaattaacagactcagacaaattgatagtcatatgtcctcaacgtttcccctcatcgaagcattgtacccaattttgtttgggtaattgatcaagccattcagttgcacttggcttatttgcacggatatccctaaaatgtcgccggtgcatcttctctgtgtatgcgtaacatgtaaatattcaattaatctattaagttataaaatttgattgaaagtaaagtttaacgaataaataaaatagattctcaacggccagcacgagtggtttcttccaatgtttgccgtttgagttatcgcaaagaaagttttatgcaatgcggtgcaggcaaaagaaataggatatgtcctgaacctataagttacttgggttgttgtaggcacttataattgaggggtgtgaaatgagataaatgttattttgcggaataatatgtcttctcaaattctttagaaaaaaccccaagctaaagttgtctccccttctacattg

SEQ ID NO: 10116 - DNA, 1115 bp, Glycine max
  Gm_smallRNAprecursor_2949
ggcaaatttcacatttttttctactttcccgttcattttcgtcttcatccatctcatcttagtaagaaggcgagttgaaatgggacgaccctttgcagtcatttttctccttggatcaggacctcactgatttccttcgtattcttgtcacattgattcgtgtgatagtaaactaaaggagttatcttagacgtgcaaaatgtggtgtaaagtgaataacatcagcacatagttcatgagattaacattgacagatttacaggcagccatgacgtgagaacatggtaagtgtttatcctgatattcatcacaattgaacttttgagattataacattactctaaacctttcaagttgtctgggtgtttgaagtggggattgggcttctgttaaaataaaagtgtgattgtgtctgtcgaattcatttacaatgtgtattagattcttgttgactgctattcattgcatcagaaaggacttcagaatactgtgagtcggagttaatcattgcttgagtttgttgacctctaataacgaacagttgtgcggtcttgaaatacgtctccttaatcaacaatgacacccgtaaatgtcttgtgttttttaacatgaaattaacagactcagacaaattgatagtcatatgtcctcaacgtttcccctcatcgaagcattgtacccaattttgtttgggtaattgatcaagccattcagttgcacttggcttatttgcacggatatccctaaaatgtcgccggtgcatcttctctgtgtatgcgtaacatgtaaatattcaattaatctattaagttataaaatttgattgaaagtaaagtttaacgaataaataaaatagattctcaacggccagcacgagtggtttcttccaatgtttgccgtttgagttatcgcaaagaaagttttatgcaatgcggtgcaggcaaaagaaataggatatgtcctgaacctataagttacttgggttgttgtaggcacttataattgaggggtgtgaaatgagataaatgttattttgcggaataatatgtcttctcaaattctttagaaaaaaccccaagctaaagttgtctccccttctacattggcgtaagcaa

SEQ ID NO: 10117 - DNA, 1196 bp, Glycine max
  Gm_smallRNAprecursor_2950
ttggcttatttgcacggatatccctaaaatgtcgccggtgcatcttctctgtgtatgcgtaacatgtaaatattcaattaatctattaagttataaaatttgattgaaagtaaagtttaacgaataaataaaatagattctcaacggccagcacgagtggtttcttccaatgtttgccgtttgagttatcgcaaagaaagttttatgcaatgcggtgcaggcaaaagaaataggatatgtcctgaacctataagttacttgggttgttgtaggcacttataattgaggggtgtgaaatgagataaatgttattttgcggaataatatgtcttctcaaattctttagaaaaaaccccaagctaaagttgtctccccttctacattggcgtaagcaatcggaaagatatggttagctccttcttgtgcagtaactatcaacagtgtttcagtatacttcccgtaaagccatgtaccatttacttgtactatgagtttgcaatatgcaaaaccattaatgcatggaccaaatgaccaaaagacacgtttaagcgcattcttttgctcggtacgatttctactccctcatacacggattctaattgagcagcgatgacagttctgggaacacaagattgcaaaactcccaaaagttttggcaggttggcatacgattcttctcagtttccatgaatcatctccaactctgtttgatttgctaaccatgtcttcttgtaggatgtggtataattgatgaacgttttgatctttgcaatcaacgtcttgatggagacggttgggtttgttttgacaattggttggatgatctgtgctatgaagtgtttgtcgagtctccgatgatcttgtctgagcattggcgcgagataggtgtgatgacttctgatactcttgataatccatttgttatgcctctttgaattgcatgcgcctacactccatgtacaaccattttcatgtaatttacacacgaagtttaactttttctgatcagagtaaattgttctgcaatcaaaatgatttctgatgttatattttttgactgctcgaatacattgtgctttttcatcgaaggccatgtcaacctcgagtgcaccagttgatggttgtacattatatatattgttgctgaacaaaacggtgtcgatcaatgtagtgtggtaggtggtcaaagttcaagt

SEQ ID NO: 10118 - DNA, 1096 bp, Glycine max
  Gm_smallRNAprecursor_2951
tgattgaaagtaaagtttaacgaataaataaaatagattctcaacggccagcacgagtggtttcttccaatgtttgccgtttgagttatcgcaaagaaagttttatgcaatgcggtgcaggcaaaagaaataggatatgtcctgaacctataagttacttgggttgttgtaggcacttataattgaggggtgtgaaatgagataaatgttattttgcggaataatatgtcttctcaaattctttagaaaaaaccccaagctaaagttgtctccccttctacattggcgtaagcaatcggaaagatatggttagctccttcttgtgcagtaactatcaacagtgtttcagtatacttcccgtaaagccatgtaccatttacttgtactatgagtttgcaatatgcaaaaccattaatgcatggaccaaatgaccaaaagacacgtttaagcgcattcttttgctcggtacgatttctactccctcatacacggattctaattgagcagcgatgacagttctgggaacacaagattgcaaaactcccaaaagttttggcaggttggcatacgattcttctcagtttccatgaatcatctccaactctgtttgatttgctaaccatgtcttcttgtaggatgtggtataattgatgaacgttttgatctttgcaatcaacgtcttgatggagacggttgggtttgttttgacaattggttggatgatctgtgctatgaagtgtttgtcgagtctccgatgatcttgtctgagcattggcgcgagataggtgtgatgacttctgatactcttgataatccatttgttatgcctctttgaattgcatgcgcctacactccatgtacaaccattttcatgtaatttacacacgaagtttaactttttctgatcagagtaaattgttctgcaatcaaaatgatttctgatgttatattttttgactgctcgaatacattgtgctttttcatcgaaggccatgtcaacctcgagtgcaccagttgatggttgtacattatatatattgttgctgaacaaaacggtgtcgatcaatgtagtgtggtaggtggtcaaagttcaagt

SEQ ID NO: 10119 - DNA, 1083 bp, Glycine max
  Gm_smallRNAprecursor_2952
tgcacgcaattcaatgttttgacaaaggtagtttgtctgtaaacttaagatacaaatgaattattactctttcgtcaaatcagatatgttgtctagttgcctttaattgtatccagtatatttgcaagtgttaagaaaagtcagtgtaatgcattgcaagttactatctttggaattctcataaatcatatggatgagttagcaactattctagacaaatattatttgaaaaatgatcttgagattctggaaaataaaaacaaacattaattacaaatttactatgacttttcttaacacttgcaaatatgccggacacaactacatgacaactaggcaacatacttgatctagcaaaagagtaatgattcatttgtatctcaagtatactaacaagctacctcgatcaaaacccacattgaattgtggacatctaatttctggattgagtttaattcttgttgtaagaaaaatatcttggacagtgatatcaaaactaaattttttattaaactccatcaaataacaaggataaattgtgttaagtcattcaaagagttataaggaaaatttgtcattgttatttgatggaattcaataaaaaatttagtattgatacctctgtcccaagatatttttctttggacagtgatatcaaaactaaattttttattaaactccatcaaataacaaggataaattgtgttaagtcattcaaagagttataaggaaaatttgtcattgttatttgatggaattcaataaaaaatttagtattgatacctctgtcccaagatatttttcttgcggtgagaattgaactcgatccagatattggatgcatgcaattttatatttgttttggcagaagtagcttcttagttaacttaagatacaaatgaaccattactagtcaaatcaggtatgttctctagttattctttaatccaacatatttgcaagtgttaaaaaaagccagtgtagttattgtttatttttatttcacaggttcttttatgtgagaaatttcaggttactatctttggatttttcatagatcataataaggataagttggcaact

SEQ ID NO: 10120 - DNA, 1247 bp, Glycine max
  Gm_smallRNAprecursor_2953
tgcacgcaattcaatgttttgacaaaggtagtttgtctgtaaacttaagatacaaatgaattattactctttcgtcaaatcagatatgttgtctagttgcctttaattgtatccagtatatttgcaagtgttaagaaaagtcagtgtaatgcattgcaagttactatctttggaattctcataaatcatatggatgagttagcaactattctagacaaatattatttgaaaaatgatcttgagattctggaaaataaaaacaaacattaattacaaatttactatgacttttcttaacacttgcaaatatgccggacacaactacatgacaactaggcaacatacttgatctagcaaaagagtaatgattcatttgtatctcaagtatactaacaagctacctcgatcaaaacccacattgaattgtggacatctaatttctggattgagtttaattcttgttgtaagaaaaatatcttggacagtgatatcaaaactaaattttttattaaactccatcaaataacaaggataaattgtgttaagtcattcaaagagttataaggaaaatttgtcattgttatttgatggaattcaataaaaaatttagtattgatacctctgtcccaagatatttttctttggacagtgatatcaaaactaaattttttattaaactccatcaaataacaaggataaattgtgttaagtcattcaaagagttataaggaaaatttgtcattgttatttgatggaattcaataaaaaatttagtattgatacctctgtcccaagatatttttcttgcggtgagaattgaactcgatccagatattggatgcatgcaattttatatttgttttggcagaagtagcttcttagttaacttaagatacaaatgaaccattactagtcaaatcaggtatgttctctagttattctttaatccaacatatttgcaagtgttaaaaaaagccagtgtagttattgtttatttttatttcacaggttcttttatgtgagaaatttcaggttactatctttggatttttcatagatcataataaggataagttggcaactgttttacacaaatgttatttaaaagggaaaactaaaccattttttgtccatatgatgttgttgggtgggtgatacttaaatgtaagtaacattcgatggtagctgaaaatagaagacacctccccccacacacacacacccacccaccagaatgccggctatca

SEQ ID NO: 10121 - DNA, 1083 bp, Glycine max
  Gm_smallRNAprecursor_2954
gatatgttgtctagttgcctttaattgtatccagtatatttgcaagtgttaagaaaagtcagtgtaatgcattgcaagttactatctttggaattctcataaatcatatggatgagttagcaactattctagacaaatattatttgaaaaatgatcttgagattctggaaaataaaaacaaacattaattacaaatttactatgacttttcttaacacttgcaaatatgccggacacaactacatgacaactaggcaacatacttgatctagcaaaagagtaatgattcatttgtatctcaagtatactaacaagctacctcgatcaaaacccacattgaattgtggacatctaatttctggattgagtttaattcttgttgtaagaaaaatatcttggacagtgatatcaaaactaaattttttattaaactccatcaaataacaaggataaattgtgttaagtcattcaaagagttataaggaaaatttgtcattgttatttgatggaattcaataaaaaatttagtattgatacctctgtcccaagatatttttctttggacagtgatatcaaaactaaattttttattaaactccatcaaataacaaggataaattgtgttaagtcattcaaagagttataaggaaaatttgtcattgttatttgatggaattcaataaaaaatttagtattgatacctctgtcccaagatatttttcttgcggtgagaattgaactcgatccagatattggatgcatgcaattttatatttgttttggcagaagtagcttcttagttaacttaagatacaaatgaaccattactagtcaaatcaggtatgttctctagttattctttaatccaacatatttgcaagtgttaaaaaaagccagtgtagttattgtttatttttatttcacaggttcttttatgtgagaaatttcaggttactatctttggatttttcatagatcataataaggataagttggcaactgttttacacaaatgttatttaaaagggaaaactaaaccattttttgtccatatgatgttgttgggtgggtgatacttaaatg

SEQ ID NO: 10122 - DNA, 1083 bp, Glycine max
  Gm_smallRNAprecursor_2955
tatctttggaattctcataaatcatatggatgagttagcaactattctagacaaatattatttgaaaaatgatcttgagattctggaaaataaaaacaaacattaattacaaatttactatgacttttcttaacacttgcaaatatgccggacacaactacatgacaactaggcaacatacttgatctagcaaaagagtaatgattcatttgtatctcaagtatactaacaagctacctcgatcaaaacccacattgaattgtggacatctaatttctggattgagtttaattcttgttgtaagaaaaatatcttggacagtgatatcaaaactaaattttttattaaactccatcaaataacaaggataaattgtgttaagtcattcaaagagttataaggaaaatttgtcattgttatttgatggaattcaataaaaaatttagtattgatacctctgtcccaagatatttttctttggacagtgatatcaaaactaaattttttattaaactccatcaaataacaaggataaattgtgttaagtcattcaaagagttataaggaaaatttgtcattgttatttgatggaattcaataaaaaatttagtattgatacctctgtcccaagatatttttcttgcggtgagaattgaactcgatccagatattggatgcatgcaattttatatttgttttggcagaagtagcttcttagttaacttaagatacaaatgaaccattactagtcaaatcaggtatgttctctagttattctttaatccaacatatttgcaagtgttaaaaaaagccagtgtagttattgtttatttttatttcacaggttcttttatgtgagaaatttcaggttactatctttggatttttcatagatcataataaggataagttggcaactgttttacacaaatgttatttaaaagggaaaactaaaccattttttgtccatatgatgttgttgggtgggtgatacttaaatgtaagtaacattcgatggtagctgaaaatagaagacacctccccccacacacacacacccacccaccagaatgccggctatca

SEQ ID NO: 10123 - DNA, 1072 bp, Glycine max
  Gm_smallRNAprecursor_2956
aaaaaaaaaaaaaaaaatctacaatccaattcaactcaagtgacaaggtcaataaagaaaaatgtttcgagacacccattatactataatatatctggagagggaaaaatatatgtattataagatttatgatctgatttgaaaaaaaaataaaaaatattaatgaaatacttaaaataagtgaatatttatatatcattatgtgtcaataaaaatgtcttagacatgatcatccattcccgaacttctgcacaatagccaccaaacttaaaaattgacacctcacaaggctttggttcctgaaataaaactgctcaaattttcttaaaataggaaaaagaaatagaaaatatagctgccaaatttcacgggcaccgtaaaatcctacaaattaataagcaaaagaaaaggataatgtcataaaagtaatagagaaacatgacctcttcttgcttatatggatgcctttcacttcgcacaatcccatattgcgagaaaaacatgattgagtgcagtgtcgatgacaataacactataaattaagcatctacctgagatgagagtgaaacttcatcaacgctgcactcaatgatgtttctctaatatggggagtttccaaaactataggagatccatttgatgtttttttacaaattcccttgctattgcatttgtatctgttattatataatatcaatttcattgctaaaacttacataagaatattcaatgtagtacaccaaccatttcttcgtactcccatttcatcactaattgactagtcgttactattatctatcgttatctgctattgccaatttagcataagagaaaatattgtactggtgaattgtactagaatgaaatcttgtactacatggaatataattatgcatatgttttgggtcaacagatatattattcctcaatccccacataacttcctttgtcgcaagtctgcgtattgatgagttcaaggtaagatagatagactctagcacatttaaaaaataaaaggcaagagacccttgaattatcatattccagatatgtatgaatcggaaaattaaaa

SEQ ID NO: 10124 - DNA, 1191 bp, Glycine max
  Gm_smallRNAprecursor_2957
ttcattcacaaaattaattattacaatggtgagtgttgaagagatccgtcaggcacaacgtgcagaaggccctgccactgtcatggctattggcaccgccactcctcccaactgcgtggatcagagtacctatcctgactattatttccgcatcaccaacagcgagcacatgaccgagctcaaagaaaaattcaaacgcatgtgtaagatatctctctcttttatcctatcttcatttcattatataatatgcatgttgcttatttccaacatatacctttgatttcattaatgatatcaatgaaatttaatttattatttcaggtgataagtcgatgattaagaagcgatacatgtacttaaacgaagagatcctgaaggagaatcccagtgtttgtgcatatatggcaccttcgttggatgcaaggcaagacatggtggttatggaggtaccaaagttgggaaaagaggctgcaactaaggcaatcaaggaatggggtcaacccaagtccaagattacccatctcatcttttgcaccactagtggtgtcgacatgcctggtgctgattatcagctcactaaactattaggccttcgtccctccgtcaagcgttacatgatgtaccaacaaggctgctttgccggtggcacggtgcttcgtttggccaaagacctcgctgaaaacaacaagggtgctcgcgtgcttgtcgtttgttctgagatcaccgcagtcacattccgcggcccaactgacacccatcttgatagccttgtgggtcaagccttgtttggagatggtgcagccgctgtcattgttggatcagaccccttaccagttgaaaagcctttgtttcagcttgtctggactgcccagacaatccttccagacagtgaaggggctattgatggacaccttcgcgaagttggtctcactttccatctcctcaaggatgttcctggactcatctccaagaatattgagaaggccttggttgaagccttccaacccttgggaatctccgattacaattctatcttctggattgcacaccctggtggacccgcaattttggaccaagtggaggctaagttaggcttgaagcctgaaaaaatggaagctactaggcatgtgctcagcgagtatggtaacatgtcaagtgcatgtgtgctattcatcttggatcaaatgc

SEQ ID NO: 10125 - DNA, 1191 bp, Glycine max; identical to SEQ ID NO: 10124
  Gm_smallRNAprecursor_2958

SEQ ID NO: 10126 - DNA, 1192 bp, Glycine max
  Gm_smallRNAprecursor_2959
ttcattcacaaaattaattattacaatggtgagtgttgaagagatccgtcaggcacaacgtgcagaaggccctgccactgtcatggctattggcaccgccactcctcccaactgcgtggatcagagtacctatcctgactattatttccgcatcaccaacagcgagcacatgaccgagctcaaagaaaaattcaaacgcatgtgtaagatatctctctcttttatcctatcttcatttcattatataatatgcatgttgcttatttccaacatatacctttgatttcattaatgatatcaatgaaatttaatttattatttcaggtgataagtcgatgattaagaagcgatacatgtacttaaacgaagagatcctgaaggagaatcccagtgtttgtgcatatatggcaccttcgttggatgcaaggcaagacatggtggttatggaggtaccaaagttgggaaaagaggctgcaactaaggcaatcaaggaatggggtcaacccaagtccaagattacccatctcatcttttgcaccactagtggtgtcgacatgcctggtgctgattatcagctcactaaactattaggccttcgtccctccgtcaagcgttacatgatgtaccaacaaggctgctttgccggtggcacggtgcttcgtttggccaaagacctcgctgaaaacaacaagggtgctcgcgtgcttgtcgtttgttctgagatcaccgcagtcacattccgcggcccaactgacacccatcttgatagccttgtgggtcaagccttgtttggagatggtgcagccgctgtcattgttggatcagaccccttaccagttgaaaagcctttgtttcagcttgtctggactgcccagacaatccttccagacagtgaaggggctattgatggacaccttcgcgaagttggtctcactttccatctcctcaaggatgttcctggactcatctccaagaatattgagaaggccttggttgaagccttccaacccttgggaatctccgattacaattctatcttctggattgcacaccctggtggacccgcaattttggaccaagtggaggctaagttaggcttgaagcctgaaaaaatggaagctactaggcatgtgctcagcgagtatggtaacatgtcaagtgcatgtgtgctattcatcttggatcaaatgcg

SEQ ID NO: 10127 - DNA, 1140 bp, Glycine max
  Gm_smallRNAprecursor_2960
actcttgtaaggcaaataatgcgaagagcagtccaaccactttgtcgacttagattttgttcattaagtaatcaaggtaggaagtgcaatttcttacctactaggtttacttgatacttattaatcccttttttataatgtttttctcacagactcacagttagataactcaatcaacacaaaaaaaaaaaaaaaaaaattaagcctaagtggactacgttaattggcactattctctttacacaattaagccataaacctgcaaagttctacagtcacttttatagcaagtcacaaagaatctttcaataaagatgaaattggacaagagatattcactttgcaactgaatatatagatgaattttgtgaaaacttaattgcattaatagtaatataacatgttcttatttactgatataaaaaaagaagcatgtgagggaagcagggaaaaaaaggaagagaaagaatacatttttcaaactcaacatgaaagaatgaataagaaagaaaaggacttggtcttgcacaagatatatggattagacagtgacactgcggagcacaacagtctcaacggtgagtccagggccgaaaccaaatagcacaccccagtcaaggccttcaccggttgtgccaagtccattttctattgatttcttcctcatttgatccaagatgaatagcacacatgcacttgacatgttaccatactcgctgagcacatgtctagtagcttccattttttcaggcttcaagcctaacttagcctcaacttggtccaaaattgcgggtccaccagggtgtgcaatccagaagatagaattgtaatcggagattcccaagggttggaaggcttcaaccaaggccttctcaatattcttggagatgagtccaggaacatccttgaggagatggaaagtgagaccaacttcgcgaaggtgtccatcaatagccccttcactgtctggaaggattgtctgggcagtccagacaagctgaaacaaaggcttttcaactggtaaggggtctgatccaacaatgacagcggctgcaccatctccaaacaaggcttgacccacaaggctatcaagatgggtgtcagttgggccgcggaatgtgactgcggtgatctcagaac

SEQ ID NO: 10128 - DNA, 1191 bp, Glycine max
  Gm_smallRNAprecursor_2961
gcttcagaaaattaactagctaggatggtcagtgttgaagagatccgtaatgcacaacgtgcagagggccctgccactgtcatggctattggcaccgcaactcctccaaactgtgtcgatcagagtacctatcctgactattatttccgcatcaccaacagcgagcacatgaccgagctcaaagaaaaattcaagcgcatgtgtaagatatatatctctctcctttcttcatttctttatacaatatgtatattgcttattttcaacatattcctttgatttgattagtgatattaatgaaatttaatttattatttcgatcaggtgataagtcaatgattaagaagcgatacatgtacttaaatgaagaaatcctgaaagagaatccgagtgtttgtgcttacatggcaccttcgttggatgcaaggcaagacatggtggttgtggaggtaccaaagttgggaaaagaggctgcaactaaggcaatcaaggaatggggtcaacccaagtccaagattacccatctcatcttttgcaccactagtggtgtcgacatgcctggtgctgattatcagctcactaaactattaggccttcgcccctccgtcaagcgttacatgatgtaccaacaaggctgctttgccggtggcacggtgcttcgtttggccaaagacctcgctgaaaacaacaagggtgctcgcgtgcttgtcgtttgttctgagatcaccgcagtcacattccgcggcccaactgacacccatcttgatagccttgtgggtcaagccttgtttggagatggtgcagccgctgtcattgttggatcagaccccttaccagttgaaaagcctttgtttcagcttgtctggactgcccagacaatccttccagacagtgaaggggctattgatggacaccttcgcgaagttggtctcactttccatctcctcaaggatgttcctggactcatctccaagaatattgagaaggccttggttgaagccttccaacccttgggaatctccgattacaattctatcttctggattgcacaccctggtggacccgcaattttggaccaagttgaggctaagttaggcttgaagcctgaaaaaatggaagctactagacatgtgctcagcgagtatggtaacatgtcaagtgcatgtgtgctattcatcttggatcaaatga

SEQ ID NO: 10129 - DNA, 1191 bp, Glycine max; identical to SEQ ID NO: 10128
  Gm_smallRNAprecursor_2962

SEQ ID NO: 10130 - DNA, 1192 bp, Glycine max
  Gm_smallRNAprecursor_2963
gcttcagaaaattaactagctaggatggtcagtgttgaagagatccgtaatgcacaacgtgcagagggccctgccactgtcatggctattggcaccgcaactcctccaaactgtgtcgatcagagtacctatcctgactattatttccgcatcaccaacagcgagcacatgaccgagctcaaagaaaaattcaagcgcatgtgtaagatatatatctctctcctttcttcatttctttatacaatatgtatattgcttattttcaacatattcctttgatttgattagtgatattaatgaaatttaatttattatttcgatcaggtgataagtcaatgattaagaagcgatacatgtacttaaatgaagaaatcctgaaagagaatccgagtgtttgtgcttacatggcaccttcgttggatgcaaggcaagacatggtggttgtggaggtaccaaagttgggaaaagaggctgcaactaaggcaatcaaggaatggggtcaacccaagtccaagattacccatctcatcttttgcaccactagtggtgtcgacatgcctggtgctgattatcagctcactaaactattaggccttcgcccctccgtcaagcgttacatgatgtaccaacaaggctgctttgccggtggcacggtgcttcgtttggccaaagacctcgctgaaaacaacaagggtgctcgcgtgcttgtcgtttgttctgagatcaccgcagtcacattccgcggcccaactgacacccatcttgatagccttgtgggtcaagccttgtttggagatggtgcagccgctgtcattgttggatcagaccccttaccagttgaaaagcctttgtttcagcttgtctggactgcccagacaatccttccagacagtgaaggggctattgatggacaccttcgcgaagttggtctcactttccatctcctcaaggatgttcctggactcatctccaagaatattgagaaggccttggttgaagccttccaacccttgggaatctccgattacaattctatcttctggattgcacaccctggtggacccgcaattttggaccaagttgaggctaagttaggcttgaagcctgaaaaaatggaagctactagacatgtgctcagcgagtatggtaacatgtcaagtgcatgtgtgctattcatcttggatcaaatgag

SEQ ID NO: 10131 - DNA, 1078 bp, Glycine max
  Gm_smallRNAprecursor_2964
cggtcgtggcggttatggcggggtggcggaaaatggcgtccctcccgcaccccacacgcgcacccagccgcgacactcgcagccgcacgagcacacagccgcgacgacctctggcagcgacgcaccggcacaaacggcggcgacgagctccggcagcgacgcatctgtcacgaacgacggcctgcagcgaggagttctcgcagagaagacgaagctgctgtcgcgaagaagaagaaggcgtcgcgaggaagaagaaggcgtaggttttagttttatttttgctgtttgacaccccctgttttctgtctgcagctttttttccttttgctatttgacacccctttttacttttaacagtcccatttttttttcgtatttgacaccacaattttttttttctgttcagtcctcttttaaatggctgagtttatttgaactctttaatgagtttatttggtgttggtacttgattattgtatgaactcatgaaacttttttagtttatttgaatgcaatcctttgtttttttcaatttcaatgagattatatatatgtttttttttttttggtccgccatgacatccgccattttccgctacgccatccgccatatttttatggcggattttttactttccgccatgaaccgccatccgccattaacaacattgatttcaaccctagatggattatgtggattgaaggatgtctagcctctgcatctatctccattctcgtaaatgggagcccgaccaaagagttttccccctatagaggccttaggcaaggggacccccttgcgcctttcctattcaatattgtagcagaaggcctaaatgggctgatgaaggaagccattgagagaaaaatctacacaagtttttctgtggggagagataaggtggatgttaatatcctacagtacgcggacgataccatcttctttggagaggcgacaatggagaacattaaagcaatcaagatcatattgagggctttcgaaatggtgtcagggctaaaaattaattttgccaaaagtagctttggatctattggcatgcctgatgtgtggaagcaa

SEQ ID NO: 10132 - DNA, 1120 bp, Glycine max
  Gm_smallRNAprecursor_2965
atagtacacttaattaatcacattatcactagttcatctgtgtaagttaagagtgtaattactacaaaagcaatagtaccttttgttaaatgttaaggggagttgatcaataaaaaagtttagaaactaaaaaaatcctaaaatacttaagactaaaaaactaataaactctaaaaataacattattaagaaacattttgcggggtggctcttggatggacttgctggtttcttgacagatttttttattaagaaacatttgggaaataatgaggcacgatataggagatacaatgtttgttttcctttcttagtttatctgatctttgtgaaggttaacttatcatgcattagcctgtaaaaaaaaattatgaacttgttctatttattactgtctaaaaatgttgttgctgcaattctacagaggaaatggagaacgggaagcggtgggggtaacagctaccggcaatcacaaaaaaaaaactatctaagacagttctaaaagaaccgtcgtagtatgtctacgaaactaaggcggtcatggtaataactgtcgtagcaattcaacagcaaaaacgctattctaagacggttattttgataaccgtcttagttactaagacatactacgacggttcttttaaaaccgtcttagaactcgcatgctgactacaacatattacatcgggtttagtacgtggaccgcctttgtatctactacattctaagacggttattaaataaccgtcttagaaaacattagcttttacgacggttcaaaaaccgtcgttgtaagtgtattgtgatattacgacactggcttataagacggttcaaaaccgtcgtaaaaggtcttaaataaccgacctaaaagatcattattgtagtagtgagcgcaaattcaacaatccagtcatatacataacagagaatggtatttcaaaatttacataacataataatttatccattatgatgtggtagatggtcaattacagaagagatataatcttttttaaaattatattaatgaaattattgtacataatttgcaggttacgataattttaatgatgaaaaagtatcacagctcaaagaccaagagagaatagattgccac

SEQ ID NO: 10133 - DNA, 1205 bp, Glycine max
  Gm_smallRNAprecursor_2966
atgtgaattgatagactgttgacaaaataatagcgtcaaattaaacatgagcaaatgtttgccatgacgatgcatgaagtatagatcaagagcaaatgtttgccgcgaagtattgaatatttgattgaagggatgtaacttgacttgcaccacacgggtgccacctgattgcttttcaattcaaacaacatacataaaacttatacgtgtcttacgatgaagttggcatccctttaaagataccccttaatgaaccgttttgggtgattcaaatgcttcttgggatttatgatacatgtgggacatcatggcccaaaggtagttcagaaaatgcaatgagtgttattaggtgcacccagcattattgctgtagcattcagtattctttgaaaatgaccaaattacgtactcctgtcatctttcttcctttacggatcaagttgatccgcaagttaatttttaagacttatggatcaagttgatccgtaagtctcttacggatcaagttgatccgtaagttttaaaaatcaacttgcagatcaacttgaccagtaagaagcttgcggatcaatttgatccgtaagtcttttacggatcaacttgattcgtaagtcttaaaaaacaacttgcggatcaacttgatccataagaagcttgcggatcagcttgatccgtaaaaaatttatggatcagcttgattcgtaaaagacttacggatcaacttgatccgtaagtcttaaaaattaacttacgtatcaatttgatccgtaagaagcttgcagattatctatatcaactgcggatcaactaaaacctatgcgaatcaacttattgcatatgcggatcaacttgaatgaactgggtgcacaaaaacatttttaaaaatacacaagagtattttcaccttttcactttaagtgttgggtgcacctagcaacatccgcgtgctaataatgctatgtggtagtaatatttaatccctatccctcctcctttactttttcattaagtcaaagtccagaccacatccctccaaactacaaacagtgtcgatgcgtctctttttattttctcttaaaatttagtaagaagaattttctcagagtttctgtttttaatttcaaacatcttgatatattatgagactcaatcggatatccaagtcaaatcttattgtggtttgacaagacctctcataaaccaag

SEQ ID NO: 10134 - DNA, 1205 bp, Glycine max; identical to SEQ ID NO: 10133
  Gm_smallRNAprecursor_2967

SEQ ID NO: 10135 - DNA, 1110 bp, Glycine max
  Gm_smallRNAprecursor_2968
atgtttgccgcgaagtattgaatatttgattgaagggatgtaacttgacttgcaccacacgggtgccacctgattgcttttcaattcaaacaacatacataaaacttatacgtgtcttacgatgaagttggcatccctttaaagataccccttaatgaaccgttttgggtgattcaaatgcttcttgggatttatgatacatgtgggacatcatggcccaaaggtagttcagaaaatgcaatgagtgttattaggtgcacccagcattattgctgtagcattcagtattctttgaaaatgaccaaattacgtactcctgtcatctttcttcctttacggatcaagttgatccgcaagttaatttttaagacttatggatcaagttgatccgtaagtctcttacggatcaagttgatccgtaagttttaaaaatcaacttgcagatcaacttgaccagtaagaagcttgcggatcaatttgatccgtaagtcttttacggatcaacttgattcgtaagtcttaaaaaacaacttgcggatcaacttgatccataagaagcttgcggatcagcttgatccgtaaaaaatttatggatcagcttgattcgtaaaagacttacggatcaacttgatccgtaagtcttaaaaattaacttacgtatcaatttgatccgtaagaagcttgcagattatctatatcaactgcggatcaactaaaacctatgcgaatcaacttattgcatatgcggatcaacttgaatgaactgggtgcacaaaaacatttttaaaaatacacaagagtattttcaccttttcactttaagtgttgggtgcacctagcaacatccgcgtgctaataatgctatgtggtagtaatatttaatccctatccctcctcctttactttttcattaagtcaaagtccagaccacatccctccaaactacaaacagtgtcgatgcgtctctttttattttctcttaaaatttagtaagaagaattttctcagagtttctgtttttaatttcaaacatcttgatatattatgagactcaatcggatatccaagtcaaatcttattgtggtttgacaagacctctcataaaccaag

SEQ ID NO: 10136 - DNA, 1110 bp, Glycine max; identical to SEQ ID NO: 10135
  Gm_smallRNAprecursor_2969

SEQ ID NO: 10137 - DNA, 1123 bp, Glycine max
  Gm_smallRNAprecursor_2970
gaatgtattaaaaagcaagaaaaaagcagtcaaaacaaagagttattcagtcccaaatacttttcctcctgttctatatttttcttttttggtgaaggttattctatatattcgatctgcataatttacattagctactgttcatcataaaactagctccttgagggttgagtgttagtaggtgcacccagcattctaaaaaaataattaaattacctttatttgattttcctcttccggatcaacttgatccataacttccggatcaacttaattcggaagtctctttcggatcaacttgattcagaagaggaaaaataaaatttttgttaattatacaagatatttaaatatatttatttcattaattataatataattaaatatatttatttattttattaattataatatatttataaatattgatttattataaataattaatgttaatcaatcataatcataatttatgctaatcaatgaatcatgttaatcaatcaatcataatcataattcatgctaatcaatcaatcatgctaatcaatcataattccctaaaagaggatataaataatttgagagttagtaattatgattgattagcatgattgattgattagcatgaattatgattatgattgattaggcttgattatttataatacatcaatatttctcaatctattataattgttaaattaaataaatatatttaattatattataattaatgaaataaatatctttaaatgtataaattatattataaaataaatatctttaaatatcttgtataattaacaaaatttttatttttcctcttccggatcaagttgatccagaagtctctttcggatcaacttgatccgtaagagacttccggatcaagttgatccgaaagttacagatcaacttgatccagaagggaaaaaccaagcaaggacaattttgttatttttttagaatgttgggtgcaccaacaataatgctgggtgcacctagcaaggtttaataccaacatctcctctggaataccaccaacaagccccacctatccactttgctgaccaattccaattaaatgcaaccttctgccaacaacttcatgttcttctgactt

SEQ ID NO: 10138 - DNA, 1086 bp, Glycine max
  Gm_smallRNAprecursor_2971
tcttcaaaagaacaaggtgagaatcaacctgttgacgtccaaccaccttcgactgatgttggcggcgctgaaacagaaactactccctctattgctgagatgggcaaccttgtcgaacaaccggacttaccacaagaacaccctaccgtcgaggtaccattcttaatatgattttaatcatagctaatacgaaactatttgttaacctttttcatgacaactcgaatcaggtacaacaaaatgtttctgtagaagaaataccctcatgtgctcgaacctctcctgctcctgagacggatgcagtgaatgttgaggaacagggtgaaggtcaaggtattggacccagcagtcctcagggatcgagtcagagaagttcatctgaagaacactttcccgatgaagaggccatacaagaggctgaagctggaggttcagacattttcccagtgtcttcgacatctaagctttccgctagcatagggatcgcagaggatacattcattcaaatgcaagacgaagaccctgctgcagcccttcgactcctgctgaacaccagtcaagccaacacctcaagtgaaaagaatcctggtgcttcgtcctcatctgatgctgatataacctctacagtacgccaagattgcctgcttttgaagttatcaatggaatacgcacgggcagacgtacttaaatccattgaagagaacccttctgctgcttttgggcacctgaactttttgaagaaattgcataacccccttacttctgatgaaattctgggcaaagttatacaaatcgagtccattatcgatcaatttgcaaatactgtgcagaaaaaacgcgaaaatggcgccagactcgatgcccagaaacaggcacatatccttctgctcgagaaagcccgagcggctcaacgtgaagtcgagcgtctcaccaaagaggcgaaagaaggatcttctgatatcaaagcctgtgatgataacatctcctcctgggaggcaactattacaaatttactgtctcaggtcgatgatctaaggcagaaaattgtaacagagcagaccaaacgcaaagaactccaggagaagg

SEQ ID NO: 10139 - DNA, 1110 bp, Glycine max
  Gm_smallRNAprecursor_2972
tgatcaacatttggcaaagggactgcttcgatccattttgtaaagtaatcgataccaactataatataacgctggttcttagaagaggcaggcttgatttcaccaattaagtccaaagcccatcctctgaaaggccaaggtttgattatggaatgtaactcactagcaggtacatgctgtatccctgcatgcttttggcattcctgacagcctttagcgaattctatgcagtcttttaacatcgaaggccaatacaaaccttgtcgaaataaaagccatttcattttatggcctgcttgatgtgatccacaagccccactgtgaacatgggaaactgccaagtatgcttctgattcacttagacattttaacaacactccttctgcagtctttttaaacaaatcattttccacaatcacgtaatttaaagccctatatttgatctttcgagccacattgcctattggattttccaaatattcaataatggactttctccaatcattatctaacatattgtcaatggccaaaatttgaattttttcctgaagatcattcatactttcatcttcattattttgtggtatacttgcccccacaagttttggcattggcaatttagtgcttaatggctctggtaacaccagtttatcttttatttcgatcaactgagttaacttttccttcgacattttgtaccctgaagctatttgggctaaatcatttgcttctcggttttcttgtcgaggtacatgctcaatgttgatataatcgaaatgattcagaagagaacttgctataacaaaatattttgctaagtgttcattaacacatttgtattcttgtgttaattgcctcaacactaattctgaatcacctcttatattaacatttcttgcccccaggctaattaaaatttcaaggcctgtaattagagcttcatactcagcctcattattagaacaaagccctttgattttatatttgaacttagttggaactttattgggggatattattaaaactccaattccagttccatgtttgtgtttcgaaccatcgaaatacaaaatccatggctctgtatcgacatagtcttgcgacatttcg

SEQ ID NO: 10140 - DNA, 1083 bp, Glycine max
  Gm_smallRNAprecursor_2973
caaagggactgcttcgatccattttgtaaagtaatcgataccaactataatataacgctggttcttagaagaggcaggcttgatttcaccaattaagtccaaagcccatcctctgaaaggccaaggtttgattatggaatgtaactcactagcaggtacatgctgtatccctgcatgcttttggcattcctgacagcctttagcgaattctatgcagtcttttaacatcgaaggccaatacaaaccttgtcgaaataaaagccatttcattttatggcctgcttgatgtgatccacaagccccactgtgaacatgggaaactgccaagtatgcttctgattcacttagacattttaacaacactccttctgcagtctttttaaacaaatcattttccacaatcacgtaatttaaagccctatatttgatctttcgagccacattgcctattggattttccaaatattcaataatggactttctccaatcattatctaacatattgtcaatggccaaaatttgaattttttcctgaagatcattcatactttcatcttcattattttgtggtatacttgcccccacaagttttggcattggcaatttagtgcttaatggctctggtaacaccagtttatcttttatttcgatcaactgagttaacttttccttcgacattttgtaccctgaagctatttgggctaaatcatttgcttctcggttttcttgtcgaggtacatgctcaatgttgatataatcgaaatgattcagaagagaacttgctataacaaaatattttgctaagtgttcattaacacatttgtattcttgtgttaattgcctcaacactaattctgaatcacctcttatattaacatttcttgcccccaggctaattaaaatttcaaggcctgtaattagagcttcatactcagcctcattattagaacaaagccctttgattttatatttgaacttagttggaactttattgggggatattattaaaactccaattccagttccatgtttgtgtttcgaaccatcgaaatacaaaatccatggctctgtatcgacatagtc

SEQ ID NO: 10141 - DNA, 1114 bp, Glycine max
  Gm_smallRNAprecursor_2974
tatctaacatattgtcaatggccaaaatttgaattttttcctgaagatcattcatactttcatcttcattattttgtggtatacttgcccccacaagttttggcattggcaatttagtgcttaatggctctggtaacaccagtttatcttttatttcgatcaactgagttaacttttccttcgacattttgtaccctgaagctatttgggctaaatcatttgcttctcggttttcttgtcgaggtacatgctcaatgttgatataatcgaaatgattcagaagagaacttgctataacaaaatattttgctaagtgttcattaacacatttgtattcttgtgttaattgcctcaacactaattctgaatcacctcttatattaacatttcttgcccccaggctaattaaaatttcaaggcctgtaattagagcttcatactcagcctcattattagaacaaagccctttgattttatatttgaacttagttggaactttattgggggatattattaaaactccaattccagttccatgtttgtgtttcgaaccatcgaaatacaaaatccatggctctgtatcgacatagtcttgcgacatttcgaccactgagtgatctacaataaaatctgccacaatttgacccttaacagatttcaaaggcttgtacgttaaagaatattctgttaatgctaaagcccattttccaattctactgtgtaaaatcggttttgacaacatgtgcttaataacatcataatgagaatacacataaacatcaacaggctttatatattgcttaagttttgcacaagagaaatacagacaaagacagagtttttctatggcagtatatctagtttctgcatcatttagtacacgactaagataataaattgcatgttctatgccatcatcatcttcctgagccaacatgctaccaatggtcttgtcagacgcagcaatatacaatttcatagacttgtttcgactaggaggcattaacacaggaggcttgatcagatattctttaatttcatcgaaagccttttgatgctcttcattccatttgaatggttcatctttcttgagtcgaagtaatggcgaaaaaat

SEQ ID NO: 10142 - DNA, 1157 bp, Glycine max
  Gm_smallRNAprecursor_2975
caattctactgtgtaaaatcggttttgacaacatgtgcttaataacatcataatgagaatacacataaacatcaacaggctttatatattgcttaagttttgcacaagagaaatacagacaaagacagagtttttctatggcagtatatctagtttctgcatcatttagtacacgactaagataataaattgcatgttctatgccatcatcatcttcctgagccaacatgctaccaatggtcttgtcagacgcagcaatatacaatttcatagacttgtttcgactaggaggcattaacacaggaggcttgatcagatattctttaatttcatcgaaagccttttgatgctcttcattccatttgaatggttcatctttcttgagtcgaagtaatggcgaaaaaatctgagctttgccacttagattcgaaatgaatcgcctcaagaagttgatttttcctagcaaagactgaagctgttttttagtcgaaggaggcttcgtctcaagaatagcctttgtcttattttgatttatctcaatgccttttttatgcaccacgaaaccaaggaaatctcctgcacgcacacaaaaagcacattttaatggattcatttttaatccatgtttcctcattcgttcgaaagattgcctaagataatccaaatggctatcttctgaggaggatttgatgattatatcatcaatataaatttgcataaatgtgtcaataaaatcatgaaacatggaattcatggccctttgataagtggccccagcatttttcaacccaaagggcataaccacccattcataagtgcctaaagcaccagggcatcgaaatgctgttttcgacacatcattttcagcaataaatatttggttataaccagaataaccatctaacatgcttaaaaattcgaaaccagctgccgaatctaccaacatttccgctactggcatagcatattcatctttaggtgtagcattatttaaatccctaaaatctatgcatactctaagagttccattctttttaatgacagggactatatttgctaaccattcgacatacctggcagccctgatgaatttacacctcagcagcctttcgatctcttccttgatcttggacatgatttctggtgcgaatcttctt

SEQ ID NO: 10143 - DNA, 1039 bp, Glycine max
  Gm_smallRNAprecursor_2976
atttctggtgcgaatcttcttggtagttgttttactggtctttttccctccttgataggtaacttcatttcgaccaattctctgcttaacccaggcatttcgtggtaatcccaagcaaaacagtctttaaactctctaagaagaggcaccagcttttcttttaaacttgaggtgatattggcactgatataagttggccttttaatcgagccatctcccatatcgacctcttccaaaggatcttgagcctgcatctttggcacctcacttacgggatttttctcgaaacccagcggctcatcgtcatatatgcaatccagtcttcgatcctttgtttctttattctcatgatcttcgatcttggcttcaactgccatattttgttgagactcagcctcgaaggccgtatttagtctattttcggccatataagccgtaattctggcccatgcagcggcctcagtcatattaatcttcatatatattccacccagttggtggaatgactccatcttcagagggaacagcatcaatttcctccctctcccatataaacccataggtaggatggagtttgacagagtggacaacattgtcactcgattcgacaacagcctccttgtcaccacaaggcgctatgttagccaactttttgtcaaaggtttgtgcagtaacattatcgacctctgacttatagaagctttgatccgcctctatattttccacaatcccatcctccctccagataatgagcttctggtgaagggtagatggcacagctccaactccatgaatccactcccttcctaatagcaagttaaaattagccttagactgtatcaccaggaaaagagttggtcgaactatactgcctacagcaacatctacttgaatggctcccaaagaatagccagttttaccctcataattcgaaagcacaatgttgtgggcagatagatcagtgtcatgtttcccgatcttgtagagcatagatcgaggcattaagttgacagccgctcctccatcaatgagcactttg

SEQ ID NO: 10144 - DNA, 1072 bp, Glycine max
  Gm_smallRNAprecursor_2977
gtaattgttttaaggtatggtacctattagatacaggtgcctggcctgaaaatatgcaattccataaacataaggcaatcatgtagcttaattacctggagatacagggtgtgtttgatagagtgaatggaaatggaataaaatagaaatcagaaaaaatatctaaattaaagtagtgtggtgaaggtgtgtaacccacactaaattttgaaactttcccttcatttccactccatttcaatattaacaaacacagggaataaggttagcttggtgggtgggaatgggggctaaaggatgaagggagaaggagggaggaagagggagttcaaatctttctatggacatttttaataaaactaacaaactaatatttgttaattttaaaaaaaaatgtagcttaattaccgaatcacattcatgcaattggaatcacactccttgctccattttcatttgtggcgagtgcatccccaatcagttggtagagaatagtccagcaggggcgacctgagaacacatgagctgagaacacgagacaagaagcaaatatggctgcttatattctacttcatgtgatctcaggacgaccctgtagaatccctctacctacacatgtctttgcctgaagtggaacattgaacctttgaattgtgtttcatcaatgtaatgattttatccagcttgattcagtgcataatatatagcctcaagcgaacttggtacttgctaggtttagatgtacatgtagtacaccgcagtactcatcatagaaatgatggggtctgtttgttccgttaagagtacaactttgtactactgataacccaaatctaagacgctatgctatctactagtactacaacttcccgttgccagcacgtcaatgcaaactacaaacattgttggacttcgtcaatattcaatatataaaaagtataactttaaaagaaaaaataataattttgttgcctttatttttcaaaattcataattttgatccattattttaaaatataaatatttaatcccctatttttttaaaaaaatctatgattttaatcttttattt

SEQ ID NO: 10145 - DNA, 1072 bp, Glycine max; identical to SEQ ID NO: 10144
  Gm_smallRNAprecursor_2978

SEQ ID NO: 10146 - DNA, 1073 bp, Glycine max
  Gm_smallRNAprecursor_2979
gtaattgttttaaggtatggtacctattagatacaggtgcctggcctgaaaatatgcaattccataaacataaggcaatcatgtagcttaattacctggagatacagggtgtgtttgatagagtgaatggaaatggaataaaatagaaatcagaaaaaatatctaaattaaagtagtgtggtgaaggtgtgtaacccacactaaattttgaaactttcccttcatttccactccatttcaatattaacaaacacagggaataaggttagcttggtgggtgggaatgggggctaaaggatgaagggagaaggagggaggaagagggagttcaaatctttctatggacatttttaataaaactaacaaactaatatttgttaattttaaaaaaaaatgtagcttaattaccgaatcacattcatgcaattggaatcacactccttgctccattttcatttgtggcgagtgcatccccaatcagttggtagagaatagtccagcaggggcgacctgagaacacatgagctgagaacacgagacaagaagcaaatatggctgcttatattctacttcatgtgatctcaggacgaccctgtagaatccctctacctacacatgtctttgcctgaagtggaacattgaacctttgaattgtgtttcatcaatgtaatgattttatccagcttgattcagtgcataatatatagcctcaagcgaacttggtacttgctaggtttagatgtacatgtagtacaccgcagtactcatcatagaaatgatggggtctgtttgttccgttaagagtacaactttgtactactgataacccaaatctaagacgctatgctatctactagtactacaacttcccgttgccagcacgtcaatgcaaactacaaacattgttggacttcgtcaatattcaatatataaaaagtataactttaaaagaaaaaataataattttgttgcctttatttttcaaaattcataattttgatccattattttaaaatataaatatttaatcccctatttttttaaaaaaatctatgattttaatcttttatttt

SEQ ID NO: 10147 - DNA, 1169 bp, Glycine max
  Gm_smallRNAprecursor_2980
gattctaataatttgcataaaaagagaatctggctttggcaacatgtaaaaatggatatttgacaagtactgaagactgctaattgttattgtggactgaaacgatataacagttctacataattgataatgatcagaaaaaaaagagtcttatcattattattattattatgttccaagaaatgactaaattgtccatattatccaataccggatacaaactctaatgtcatcatgaatttctaatctcatgcaagcaaatcccttcttaatccctcaacattggcataattctagtgaattcaccagataaaataaaataagacttacttgggacttcaaagctaggatgtgacgattgtggttgtgaccaagctgaactctgtgctcctattgttgctgcagaggaagaaaaccaaggttgatatgatttgtggtgttgatgagatgatccactcccttgagacaacatcaaagtgttgaactgcatggaattctgaggtaacgttgaagcattgctgctttcttggaacacatttccctaataacataaactaggatgtgatggatgtggctgtggctgtgaggatgaattggatggtcaagaaagcagttcttcgagaagtcttcataactccaatgccattaagagaaaatttggccaagaaagcagcaatgcttcaacgttacctcagcaattctttgcattgattcttcaactaacgcacaaaaatttccatctggattgattctatgtatcttaaattaatagaatatcaaagataaactgattagttgggctaagaataccaatctaatatcttatcatatattctcagataagattagttagactaacaatactgataaaatatcttatcatatattatatcataaacaatctaataaaaaaaatcaagattgttatcttattaaaatataagaacaaattattttactacctatatatatatgggttataagcggaaaaatctctcgttttgaaaagtttatagaccagtcttcttaaacggttcatgattatgtcatatttttgggtcaatcccatctaacccgttgactatgcggatttggtccacgggttgtccgcagcccgcattaggtttgattttcgtgattctgacccaattatattcggtttgtaacat

SEQ ID NO: 10148 - DNA, 1076 bp, Glycine max
  Gm_smallRNAprecursor_2981
catcagcaacacaatgtacaaccatcagtcggtgtactcgaggttggcatgaccttcgatgaaaaatcacaatgtattcgagcaatcaaagaatacaacatcagaaatcattttgattgcagaacaatttactctgaccaaagaaggctacacttcgtctgcaagttacatgaaaatggttgtacatggagcttgggcgcatgcaattcaaagaggcataacaaatggattatcaagagtataagaggtcatcacacttgtctcgtgccgatgcttagacaagatcatcgccaactcgacaaacacgtcatagcacagatcatccaaccaattgtcaaaacaaacccaactgtctccatcaagacattgattgcagagatcaaaacgttcatgaattataccccatcctataagaagacatggttagcaaagcaaaaagcattggagatgattcatggaaactgggaagaatcatatgccaaactgccaaaattttttggagctttgcaatcttgtgttcccgggactgtggtcgctgctcaaacagaatccttgtatgaggggggagaaatagtaccgggcaaaagattgtttaaacgtgtcttttggtcatttggtccatgcattaatggttttgcatattgcaaacccaatgtacaagtagatggtacatggctttacggaaagtatactggcacactgttgatagctaccgcacaagatggagctaaccatatcttcccgattgcctatgccattgtagaaggggagacaacttcagtttgagggttttttctaaagaatttgagaagacatgttactccgcaaattaacatttctcttatttcagaccgacacccctcaattataagtgcctacaacaacccaagtaacttatgggtccaggacacatcccatttcttttgcctgcgccacattgcacaaaactttcttcgtggtaactcaaattgcaaacatttaaagaaaccacttatgttggctggtgagaatctattttatttattcgttataattttctttcaatcaaattttataacataatacattgattaaat

SEQ ID NO: 10149 - DNA, 1075 bp, Glycine max
  Gm_smallRNAprecursor_2982
atcagcaacacaatgtacaaccatcagtcggtgtactcgaggttggcatgaccttcgatgaaaaatcacaatgtattcgagcaatcaaagaatacaacatcagaaatcattttgattgcagaacaatttactctgaccaaagaaggctacacttcgtctgcaagttacatgaaaatggttgtacatggagcttgggcgcatgcaattcaaagaggcataacaaatggattatcaagagtataagaggtcatcacacttgtctcgtgccgatgcttagacaagatcatcgccaactcgacaaacacgtcatagcacagatcatccaaccaattgtcaaaacaaacccaactgtctccatcaagacattgattgcagagatcaaaacgttcatgaattataccccatcctataagaagacatggttagcaaagcaaaaagcattggagatgattcatggaaactgggaagaatcatatgccaaactgccaaaattttttggagctttgcaatcttgtgttcccgggactgtggtcgctgctcaaacagaatccttgtatgaggggggagaaatagtaccgggcaaaagattgtttaaacgtgtcttttggtcatttggtccatgcattaatggttttgcatattgcaaacccaatgtacaagtagatggtacatggctttacggaaagtatactggcacactgttgatagctaccgcacaagatggagctaaccatatcttcccgattgcctatgccattgtagaaggggagacaacttcagtttgagggttttttctaaagaatttgagaagacatgttactccgcaaattaacatttctcttatttcagaccgacacccctcaattataagtgcctacaacaacccaagtaacttatgggtccaggacacatcccatttcttttgcctgcgccacattgcacaaaactttcttcgtggtaactcaaattgcaaacatttaaagaaaccacttatgttggctggtgagaatctattttatttattcgttataattttctttcaatcaaattttataacataatacattgattaaat

SEQ ID NO: 10150 - DNA, 1066 bp, Glycine max
  Gm_smallRNAprecursor_2983
gcaacacaatgtacaaccatcagtcggtgtactcgaggttggcatgaccttcgatgaaaaatcacaatgtattcgagcaatcaaagaatacaacatcagaaatcattttgattgcagaacaatttactctgaccaaagaaggctacacttcgtctgcaagttacatgaaaatggttgtacatggagcttgggcgcatgcaattcaaagaggcataacaaatggattatcaagagtataagaggtcatcacacttgtctcgtgccgatgcttagacaagatcatcgccaactcgacaaacacgtcatagcacagatcatccaaccaattgtcaaaacaaacccaactgtctccatcaagacattgattgcagagatcaaaacgttcatgaattataccccatcctataagaagacatggttagcaaagcaaaaagcattggagatgattcatggaaactgggaagaatcatatgccaaactgccaaaattttttggagctttgcaatcttgtgttcccgggactgtggtcgctgctcaaacagaatccttgtatgaggggggagaaatagtaccgggcaaaagattgtttaaacgtgtcttttggtcatttggtccatgcattaatggttttgcatattgcaaacccaatgtacaagtagatggtacatggctttacggaaagtatactggcacactgttgatagctaccgcacaagatggagctaaccatatcttcccgattgcctatgccattgtagaaggggagacaacttcagtttgagggttttttctaaagaatttgagaagacatgttactccgcaaattaacatttctcttatttcagaccgacacccctcaattataagtgcctacaacaacccaagtaacttatgggtccaggacacatcccatttcttttgcctgcgccacattgcacaaaactttcttcgtggtaactcaaattgcaaacatttaaagaaaccacttatgttggctggtgagaatctattttatttattcgttataattttctttcaatcaaattttataacataatacattgat

SEQ ID NO: 10151 - DNA, 1067 bp, Glycine max
  Gm_smallRNAprecursor_2984
gcaacacaatgtacaaccatcagtcggtgtactcgaggttggcatgaccttcgatgaaaaatcacaatgtattcgagcaatcaaagaatacaacatcagaaatcattttgattgcagaacaatttactctgaccaaagaaggctacacttcgtctgcaagttacatgaaaatggttgtacatggagcttgggcgcatgcaattcaaagaggcataacaaatggattatcaagagtataagaggtcatcacacttgtctcgtgccgatgcttagacaagatcatcgccaactcgacaaacacgtcatagcacagatcatccaaccaattgtcaaaacaaacccaactgtctccatcaagacattgattgcagagatcaaaacgttcatgaattataccccatcctataagaagacatggttagcaaagcaaaaagcattggagatgattcatggaaactgggaagaatcatatgccaaactgccaaaattttttggagctttgcaatcttgtgttcccgggactgtggtcgctgctcaaacagaatccttgtatgaggggggagaaatagtaccgggcaaaagattgtttaaacgtgtcttttggtcatttggtccatgcattaatggttttgcatattgcaaacccaatgtacaagtagatggtacatggctttacggaaagtatactggcacactgttgatagctaccgcacaagatggagctaaccatatcttcccgattgcctatgccattgtagaaggggagacaacttcagtttgagggttttttctaaagaatttgagaagacatgttactccgcaaattaacatttctcttatttcagaccgacacccctcaattataagtgcctacaacaacccaagtaacttatgggtccaggacacatcccatttcttttgcctgcgccacattgcacaaaactttcttcgtggtaactcaaattgcaaacatttaaagaaaccacttatgttggctggtgagaatctattttatttattcgttataattttctttcaatcaaattttataacataatacattgatt

SEQ ID NO: 10152 - DNA, 1065 bp, Glycine max
  Gm_smallRNAprecursor_2985
caacacaatgtacaaccatcagtcggtgtactcgaggttggcatgaccttcgatgaaaaatcacaatgtattcgagcaatcaaagaatacaacatcagaaatcattttgattgcagaacaatttactctgaccaaagaaggctacacttcgtctgcaagttacatgaaaatggttgtacatggagcttgggcgcatgcaattcaaagaggcataacaaatggattatcaagagtataagaggtcatcacacttgtctcgtgccgatgcttagacaagatcatcgccaactcgacaaacacgtcatagcacagatcatccaaccaattgtcaaaacaaacccaactgtctccatcaagacattgattgcagagatcaaaacgttcatgaattataccccatcctataagaagacatggttagcaaagcaaaaagcattggagatgattcatggaaactgggaagaatcatatgccaaactgccaaaattttttggagctttgcaatcttgtgttcccgggactgtggtcgctgctcaaacagaatccttgtatgaggggggagaaatagtaccgggcaaaagattgtttaaacgtgtcttttggtcatttggtccatgcattaatggttttgcatattgcaaacccaatgtacaagtagatggtacatggctttacggaaagtatactggcacactgttgatagctaccgcacaagatggagctaaccatatcttcccgattgcctatgccattgtagaaggggagacaacttcagtttgagggttttttctaaagaatttgagaagacatgttactccgcaaattaacatttctcttatttcagaccgacacccctcaattataagtgcctacaacaacccaagtaacttatgggtccaggacacatcccatttcttttgcctgcgccacattgcacaaaactttcttcgtggtaactcaaattgcaaacatttaaagaaaccacttatgttggctggtgagaatctattttatttattcgttataattttctttcaatcaaattttataacataatacattgat

SEQ ID NO: 10153 - DNA, 1096 bp, Glycine max
  Gm_smallRNAprecursor_2986
actctgtgtggtctactgttcacatatgtatattaagagttctagtcccacatgataacttcaatcaacacttataatttgggttaaattactgttttgaaatttgaaatttaattcatataatgattaattttgatgtaaatactaatttaattcaaagtataaatgttgattggagttattatttaggactaaaacttttaatatacatttgtttagaaataaacaagatgtgtgcaatttgtatagaaattaattaaaagaaaatttctctccataacatatttgtttagttaacaagtagctttttgagaattttatttaggcaaaattatatttttggtccccagtttatctctagttttgaatttgatccctcagtaatttaatttacgaattgagtcctcctattttataaaatcgtgcaactttagttctctaggccacaattggttgttgaccgttagcaagtgacgttgactgccacgtgtcatgttcttattggatgatgactgtcacgtgtcatgttctgattggatgtcaactccatgaaagataaaatgcattgttgttttcattgatcaattagaatatgacacgtgacagtcatcatccaataacaacgtgacacgtgacaatcaatgtcacttgctaattgtcaacgtccaattgtgacctgaaggaccaacattgcgcgattttagaaaataggaagacccaattcataaattaaattattgagggaccaaatccaaaatcgaagataagctgagagatcaaatttacaattttgccttttccattcatcttatgtatatattagcagtattattttcttcctaatagaatgataaatcatcaacagaacaaactctgattaacaatttaatctagaagggaagatgcttattttatttggggcatcaagaatacttagaattttaacattgttaacggataatgcccatgaaaatattattatttatatatatggaagaaattcactatgatgaacttctcatgtttatgtgttacttgacaaggattattttgacatttggttatctgcctaaaacgtaaaatgaaaaaacaggaa

SEQ ID NO: 10154 - DNA, 1077 bp, Glycine max
  Gm_smallRNAprecursor_2987
tcacatatgtatattaagagttctagtcccacatgataacttcaatcaacacttataatttgggttaaattactgttttgaaatttgaaatttaattcatataatgattaattttgatgtaaatactaatttaattcaaagtataaatgttgattggagttattatttaggactaaaacttttaatatacatttgtttagaaataaacaagatgtgtgcaatttgtatagaaattaattaaaagaaaatttctctccataacatatttgtttagttaacaagtagctttttgagaattttatttaggcaaaattatatttttggtccccagtttatctctagttttgaatttgatccctcagtaatttaatttacgaattgagtcctcctattttataaaatcgtgcaactttagttctctaggccacaattggttgttgaccgttagcaagtgacgttgactgccacgtgtcatgttcttattggatgatgactgtcacgtgtcatgttctgattggatgtcaactccatgaaagataaaatgcattgttgttttcattgatcaattagaatatgacacgtgacagtcatcatccaataacaacgtgacacgtgacaatcaatgtcacttgctaattgtcaacgtccaattgtgacctgaaggaccaacattgcgcgattttagaaaataggaagacccaattcataaattaaattattgagggaccaaatccaaaatcgaagataagctgagagatcaaatttacaattttgccttttccattcatcttatgtatatattagcagtattattttcttcctaatagaatgataaatcatcaacagaacaaactctgattaacaatttaatctagaagggaagatgcttattttatttggggcatcaagaatacttagaattttaacattgttaacggataatgcccatgaaaatattattatttatatatatggaagaaattcactatgatgaacttctcatgtttatgtgttacttgacaaggattattttgacatttggttatctgcctaaaacgtaaaatgaaaaaacaggaa

SEQ ID NO: 10155 - DNA, 1046 bp, Glycine max
  Gm_smallRNAprecursor_2988
aggtatgtcgaatggttagcaaatatagtccctgtcattaaaaagaatggaactcttagagtatgcatagattttagggatttaaataatgctacacctaaagatgaatatgctatgccagtagcagaaatgttggtagattcagcagctggcttcgaatttttaagcatgttagatggttattctggttataaccaaatatttattgctgaaagtgatgtgtcaaaaacagcatttcgatgccctggtgctttaggcacttatgaatgggtagttatgccctttgggttgaaaaatgctggggccacttatcaaagggccatgaattccatgtttcatgattttattgacacatttatgcaagtttatattgatgatataatcatcaaatcctcctcagaagatagccatttggattaccttaggcaatctttcgaacgaatgaggaaacatggattaaaaatgaatccattaaagtgtgctttttgtgtgcgtgcaggagatttccttggttttgtggtgcataaaaaaggcatcgagataaatcaaaacaagacaaaggctattcttgagacgaagcctccttcgaccaaaaaacagcttcagtctttgctaggaaaaatcaacttcttgaggcgattcatctcgaatctaagtggcaaagctcaaactttttcgccattacttcgactcaagaaagatgaatcattcaaatgggatgaagtgcatcaaaaggcttttgataaaattaaagaatatctgatcaagcctcctgtgttaatgcctcctagtcgaaacaagactatgaagttgtatattgctgcgtctgacaagaccattggtagcatgttggctcaggaagatgatgatggcatagagcatgcaatttattatcttagtcgtgtactaaatgatgcagaaactagatatactgccatagaaaaactttgtctttgtttgtatttctcttgtgcaaaacttaagcaatatataaagcctgttgatgtttatgtatattctcattatgatattattaagcacatgtt

SEQ ID NO: 10156 - DNA, 1095 bp, Glycine max
  Gm_smallRNAprecursor_2989
tgtgactttccaacacaacaagcagcacaaaattcaaacatagttttattaactatgggtatattacaatgattaagcacaagccttattacattagcattaggatggcccaatctaaggtgccatatagtttgagagctagtactaggtgttgctttaacatcaaaaactgcatttacaaaggaatcagaaatttgtgttagaaccactagaaacagaagtaacagcagaatcaacactggaatttgaaagtaagaaggtggctgaggcagattctttgagtgcaagatgtggaaatgtgtagaggccaacaggatccagtgaaccttgaagtaggacttcattggttccctgtgatttcacagcacaatgattaggataaaatttaaagaaaacattgttatccctagaaaattttcggacattgatgaagtttttagtgatggcaggtacatgtaatctatgaagcacggacaccccagccccttgtcgtgtccggtgtccggtgtccgacacgcgtccgtgtcagtgtccgacacgacactcgtactacgttctatattttggacattacaggtgtccacgtgtccatgtccgtgtccgtgtcgtgtccggtatccatgtcggtgtcggtgcttcatagcatgtaataattgttttaaggacataccaataggtattcctaagtaggtaaatggaatggacatcaagctacaattcaaccaactggctgcatcagacttccatctctctggcataccaaatgcaccaaaacagctttttgcaaaattaatcttaaggcctgaggctatttcaaatatcctcagaattgctttaattgccctaacattctcctgcgaggcctctccaaagaatattgtgcatctgcatattgaagaatgcttacatcaactctatttgatcccactgcgaatccccggtataaatttctcttgatagcctctctcaccagtccattcaatgcttctgccacgatattgaaaaggaaaggtgctaatggatctccttgtcgaaggactctctgaggtgagaactcagccgaggggcttccatttaccaggaccgatacaaaga

SEQ ID NO: 10157 - DNA, 1094 bp, Glycine max
  Gm_smallRNAprecursor_2990
gtgactttccaacacaacaagcagcacaaaattcaaacatagttttattaactatgggtatattacaatgattaagcacaagccttattacattagcattaggatggcccaatctaaggtgccatatagtttgagagctagtactaggtgttgctttaacatcaaaaactgcatttacaaaggaatcagaaatttgtgttagaaccactagaaacagaagtaacagcagaatcaacactggaatttgaaagtaagaaggtggctgaggcagattctttgagtgcaagatgtggaaatgtgtagaggccaacaggatccagtgaaccttgaagtaggacttcattggttccctgtgatttcacagcacaatgattaggataaaatttaaagaaaacattgttatccctagaaaattttcggacattgatgaagtttttagtgatggcaggtacatgtaatctatgaagcacggacaccccagccccttgtcgtgtccggtgtccggtgtccgacacgcgtccgtgtcagtgtccgacacgacactcgtactacgttctatattttggacattacaggtgtccacgtgtccatgtccgtgtccgtgtcgtgtccggtatccatgtcggtgtcggtgcttcatagcatgtaataattgttttaaggacataccaataggtattcctaagtaggtaaatggaatggacatcaagctacaattcaaccaactggctgcatcagacttccatctctctggcataccaaatgcaccaaaacagctttttgcaaaattaatcttaaggcctgaggctatttcaaatatcctcagaattgctttaattgccctaacattctcctgcgaggcctctccaaagaatattgtgcatctgcatattgaagaatgcttacatcaactctatttgatcccactgcgaatccccggtataaatttctcttgatagcctctctcaccagtccattcaatgcttctgccacgatattgaaaaggaaaggtgctaatggatctccttgtcgaaggactctctgaggtgagaactcagccgaggggcttccatttaccaggaccgatacaaaga

SEQ ID NO: 10158 - DNA, 1055 bp, Glycine max
  Gm_smallRNAprecursor_2991
taaatgaaattacacgtttaattaatgtcacaatatccattgtccattgatctagacactgaagcaaagttgattaaggcactgaatgcattcaaacaagcgtgatttaatcaatgtaaggtaaacgtcaatataccaacaaatattggatatctcaaagtaaaattgctttgacttctataaacgctgaagcatgccgccaataagaatggcgggacatgccaatctttatttcgtcatttatttcccttaaatttaatgaaattctaaataacttttgtttgatattattattaatgtaatgggatatttgccaatccagtaacagaatatttttatgtacatttgaatatttttgcatttttcataaacaacagaatattttttttaatgtaaatttgaataaatgaacatatgtcaaattattggcatgtcctgccattcttattggcggcatgcttcagtgtcccgcaggtgccaatggcgggactgttcacgttggcacgtcccgccagcaccaatggcggtaccccctcacggcaccctctatcccgccattgtcactggcggttcaagcttcccgccagtgtcaatgacggcacccacatacagaagagaccccccttgcaatttgttttaaaagagatcctcttccgtaaattatttttaaaagcaatcccctacagtaaatttgcctactggtaagtacagtgaaattgttatgttttattttgaatttaacttcaatatattaatgatagtagtgtaatatttttttacacttttatccaatcattaatatttatatatgataaaattattattttttaggttaaaatatagttttgatagaagattttaactcaaatctaagagttagaaaactataagaaaatccttttaaagttaaaagatcaaaacaaattttgataaaaaaaataaaaaatattttagcctaatttttataataattattgtgaacattgtatttcaaatgatttctaaacgaactaatgacgattctatataatcattacatgaaattaaactcattt

SEQ ID NO: 10159 - DNA, 1055 bp, Glycine max; identical to SEQ ID NO: 10158
  Gm_smallRNAprecursor_2992

SEQ ID NO: 10160 - DNA, 1056 bp, Glycine max
  Gm_smallRNAprecursor_2993
taaatgaaattacacgtttaattaatgtcacaatatccattgtccattgatctagacactgaagcaaagttgattaaggcactgaatgcattcaaacaagcgtgatttaatcaatgtaaggtaaacgtcaatataccaacaaatattggatatctcaaagtaaaattgctttgacttctataaacgctgaagcatgccgccaataagaatggcgggacatgccaatctttatttcgtcatttatttcccttaaatttaatgaaattctaaataacttttgtttgatattattattaatgtaatgggatatttgccaatccagtaacagaatatttttatgtacatttgaatatttttgcatttttcataaacaacagaatattttttttaatgtaaatttgaataaatgaacatatgtcaaattattggcatgtcctgccattcttattggcggcatgcttcagtgtcccgcaggtgccaatggcgggactgttcacgttggcacgtcccgccagcaccaatggcggtaccccctcacggcaccctctatcccgccattgtcactggcggttcaagcttcccgccagtgtcaatgacggcacccacatacagaagagaccccccttgcaatttgttttaaaagagatcctcttccgtaaattatttttaaaagcaatcccctacagtaaatttgcctactggtaagtacagtgaaattgttatgttttattttgaatttaacttcaatatattaatgatagtagtgtaatatttttttacacttttatccaatcattaatatttatatatgataaaattattattttttaggttaaaatatagttttgatagaagattttaactcaaatctaagagttagaaaactataagaaaatccttttaaagttaaaagatcaaaacaaattttgataaaaaaaataaaaaatattttagcctaatttttataataattattgtgaacattgtatttcaaatgatttctaaacgaactaatgacgattctatataatcattacatgaaattaaactcattta

SEQ ID NO: 10161 - DNA, 1167 bp, Glycine max
  Gm_smallRNAprecursor_2994
aataatatatttattttagtaaatatttattttgtatagtaatctgaattttaaaaattttaatataactattttactaaatataattagtttgtttatgttattagatttaattaaaaatgataaaattaaagcttttaacaatttatttatataagaacattatactacgtcatcaataaaatatttaaacaatgacatttgtctaaggaaaaactaagatgaggatacattagaacaattatttctgctatgaccatgttgtcggcaaagtctacattttcttctacttgctcgttcattttcgtcttcgtccatctcagtaggaatgcgagttgaaacgggacgaccctttgcagtcctctttctccttggatcaggaccccactgatctccttcatattcttgccacattgatttgtgtgacaataaaccaaaggagttgtcgtagatgtgtaaaatgtgttgtaaagtgaatatcatcggcacataggtcatgagatcaacattgacagatttacaggcagccatgacgtgagaacacggtaaatgttttgcctgaaattcaccacaatcacacttttgggattgtaacattactctaaacctttcaggtggtctgggtgtttcaagtggggattgagtctctgttataataaaaatgtgattgtgtctgtcgaattcatttacaatgtgtgtattagattcttgttgaccactattgattgcatcgaagacgacttcagaatactgtgagccggagttgatcattgcctgagtttgtcgacctatattagcaaagagttgtgcggtcttgaaataggtctcctcaaccaacgatgacaccggcaaatgtcttgtgtttttgaacatggaattaatagactccgataaattggtagccatatgtccccaacgtttcccctcataaaagcattgtacccatttttgtttgggtaattgatcaagccattcagctgcacttggcttattcgcacgagtatccccaagatgtcgccagtgcatcttctccgtgtatgcatatcgtgtaaatatttaatcaatgtattatgttataaaatttgattgaaagaaaattataacgaataaataaaatagattctcaccagccaacataagtggtttctttaaatgtttgcagtttga

SEQ ID NO: 10162 - DNA, 1080 bp, Glycine max
  Gm_smallRNAprecursor_2995
ggcgccatggcggccatggcggatgtggcggcgaggcggaaaatggcggatgcagctgcaaccctcgacctcgaagctccaacacagcgcgacaacccacgacctcggaaccacccacacctgcaaccagcgacgacccacggcggcgacgagcacggcagcgaccacccacggcaacgcgaacggcggcgacgagcacggcgtgaacgacggcaacgcgaacggagaagacgacccagccaaaaccgcgacttatactggtggggtgggccaaagcctttttttttgtttttgctgcttaacacccttttttgctgtctgcagcttttcttttccgtttttctatttgacaccccccttttactttcaacagtcccatttttaattatttttttctatttgacaccacaattttattttttttctgttcagtcctctttttaatgagtttatttggtgttggtatttgattattgtatgaactcatcaaacttttttagtttatttgaatgcaatcctttgtttttttcaatttcaatgagtttatatatatatatatttattttttttgtccgccatgacatccgccattttccgctacgccatccgccatatttttatggcggattttttactttccgccatgaaccgccatccgccattagcaacattgcctgagaggtaaaatcgcagcctgaacagaagccacacacactgacacacactggcgaagggtgctgtttggagcatcaaaaaaccgcatgcaagagctctaatggcgatctggtggacctatctgtgtagattggcaaaaggtgcaccagaaaatgtatgtttctccccaaaacgtcaccgggaagtcgccgaaatactggtggtggcagcaggtggccggaaaagcgccgaaaaatgaagcagagtttgccggaaaagggcgacaagcaaaaaggctcacctggggacagtgggttgccggaaaagtgatggtcaccaacaatgaccaaaaaattagccaaaaaaggagaaagggtcgtcaaaaagcagaagcggggtgtcgaaataagtgcaatgaccagaaag

SEQ ID NO: 10163 - DNA, 1052 bp, Glycine max
  Gm_smallRNAprecursor_2996
aatggcgcaacacagcacaaaagccatattatcgatgtctctagagaagcagttggcaaggttatcaaactcgagtgtttatgcagactcgtgagagttttatagactcgactcgtagactcgtaagagtctacttcatataaaaataataacaagatatctataaataacatactaattaaaatttcaacaatataataaagcaaaacagtaaatcataaagttcagaatatttaaataaccaagtctagtaataatacatcaccactaaacaataacttgtagaggttatagtagtggtagattattctcatcgagggtgattttattagagaacaagagtttgatattattaaatgtgagaattttgtatttgagaataacatgttaaaaggtatgttgaatgctaaacagatagaaaacaataaaaaatgacttacatttttgtctaatttttttaacttgctaactcgttgactcggtggtaaactcgagagtctaccgagtttacttagagtttatagagtttacctagagtctactaaaaaaagagtttactcaagagtcaactcgcagaggacaagtggactcggaaactcgtaagagttagcgagttaactcgagagtttgataaccatgacagttggtgacaaaactcacttcaatgcaatcacgaccagtatcgacaccagagttctcattgaaggtgaccgctatagtgaagaaacaagttacggcgcaagtgattttgtcgaaggcattttgacactaccgtatccgccttggtaagctatcgccacctctacgatgggctctacaattccatctacggtgtcttcgttggccttcaaattgtcgcaattgttagagttgtgcagaaaaccactgtcagttctcaaatgtactcaacggtaacaacaacgacagctctgatgaggttctcgacatttttggtgacttaatttcctcgagttcctccagtgacacacttaagaacttgattcttttcacaagtgtcagtgaagagaccaagtgaatcgtaggatttgtta

SEQ ID NO: 10164 - DNA, 1187 bp, Glycine max
  Gm_smallRNAprecursor_2997
cggaataagatcaaacggacagataggaagtaggaatgcagtatgataaaatcaaacgtaagaattataaacttgtaaagcagatatcaagggcacaccgaaacggcttacaaacccaggtttttgaaaacaaagaaaccgaagcggcggcagagccgcacaggatcggtgaggggagaagggagatatgaaaaatagaacttgaaatttattgaaactgaaagaaaagcttacaaagagtttttccctaggcagagcttctctctctaaaacctgattctgagactatctgaaagggtgcctcacaaaggggacgaggactcctttaaatagacccaatttttactgtttctacagtatcggtaatgtttaccggaactgttacaaaaccttttacaaattacattatttaaaagaaactgacaaattagttacaataattcatgattattacaactaattaatcgtcgtccaatgatataccaaaacagtcatcttcattctggtagaatggatcatcttcttggtcatcattagtctctaatgattcagcttccttcttggaaggttcttcttccacttcttgttgaagtagttggagaacttctttgagattctgagcaagactttctttagattttgagcttgctaagaatgctgccagttgcgacttctgatttagaaacaaagatgtctctggatcagcaggtttaaggaactcaggattgctctggaaccagttcttgacttgatctggagcagcctttgaagtatcgaattgtgaccaccattttacaaaggcgtgtctctgtaagggtggatattgcttgttgttttcagtttttccgtatctgtattgccatgaaaagatccatgacaaggcaaaactggaaaaatactttaaatttgccggaattcatgattccttgctattatagagcttgttgaattgttcgaatccctgttggacttcttctggaaatatttgtggaattggtccgaagtagttccaccattggaggaaccaatttggaaaattatatgcagtattatttttgaagtaaatcagccatgaatgcttgaatttactattttgatgccagaacacattggtccaggcgtcaacgtaatcccaataattataccctgcaggatcaaatggtgcagagaattttttgggttggttt

SEQ ID NO: 10165 - DNA, 1213 bp, Glycine max
  Gm_smallRNAprecursor_2998
accggaactgttacaaaaccttttacaaattacattatttaaaagaaactgacaaattagttacaataattcatgattattacaactaattaatcgtcgtccaatgatataccaaaacagtcatcttcattctggtagaatggatcatcttcttggtcatcattagtctctaatgattcagcttccttcttggaaggttcttcttccacttcttgttgaagtagttggagaacttctttgagattctgagcaagactttctttagattttgagcttgctaagaatgctgccagttgcgacttctgatttagaaacaaagatgtctctggatcagcaggtttaaggaactcaggattgctctggaaccagttcttgacttgatctggagcagcctttgaagtatcgaattgtgaccaccattttacaaaggcgtgtctctgtaagggtggatattgcttgttgttttcagtttttccgtatctgtattgccatgaaaagatccatgacaaggcaaaactggaaaaatactttaaatttgccggaattcatgattccttgctattatagagcttgttgaattgttcgaatccctgttggacttcttctggaaatatttgtggaattggtccgaagtagttccaccattggaggaaccaatttggaaaattatatgcagtattatttttgaagtaaatcagccatgaatgcttgaatttactattttgatgccagaacacattggtccaggcgtcaacgtaatcccaataattataccctgcaggatcaaatggtgcagagaattttttgggttggtttaagtttgagccataatgtcgtggctgcataaccttcaggatttggattgtggaatgggtatttaaatttggatctttggggtcattgaagtgtttaatagatactgagtttgtatctattaggatgaattcgtagaatttgcggtttttgtttgcggctattggcctgtaatggaatccctgggggaatactttggtggttgctttgaaaggattcttgtcccagtattctggttccatttgtaaaacattgaaaaatttgttttttgaaatgtaactgttaccgggttgtggtgttgattcttgttgagtcaacgattggcttggtttttggttacaaacggttttggtctgtttggccttttggatttgtttttgcagatctgtttcagaatcat

SEQ ID NO: 10166 - DNA, 1148 bp, Glycine max
  Gm_smallRNAprecursor_2999
ggaattcatgattccttgctattatagagcttgttgaattgttcgaatccctgttggacttcttctggaaatatttgtggaattggtccgaagtagttccaccattggaggaaccaatttggaaaattatatgcagtattatttttgaagtaaatcagccatgaatgcttgaatttactattttgatgccagaacacattggtccaggcgtcaacgtaatcccaataattataccctgcaggatcaaatggtgcagagaattttttgggttggtttaagtttgagccataatgtcgtggctgcataaccttcaggatttggattgtggaatgggtatttaaatttggatctttggggtcattgaagtgtttaatagatactgagtttgtatctattaggatgaattcgtagaatttgcggtttttgtttgcggctattggcctgtaatggaatccctgggggaatactttggtggttgctttgaaaggattcttgtcccagtattctggttccatttgtaaaacattgaaaaatttgttttttgaaatgtaactgttaccgggttgtggtgttgattcttgttgagtcaacgattggcttggtttttggttacaaacggttttggtctgtttggccttttggatttgtttttgcagatctgtttcagaatcatcgtctgattctgaggccatttctgcccaggtctttttggctaattttggtattttggtgaggcctatatcctctaaggccatgagagtttgtattgaccaggcatagtcagccacggtctgtttggttgttgttggttttggagattcctgagttgatgactcagatttgacggtagttgtttgggtcaatgacccttcaagttttcctttctgggttgatgacccagtctgggtaggtgacccagaagatgttgtagttgcctttttggttattggctctggtagagccagtagaacttctttacctttcgtactggatcttcctcctctgccagaggaactagacaccttaggaggcatcgggaattttctgtaaaaattcacgggtgaggtagtcaggtagagagttggaagagcccttgatatattctatattaaaatcaaagacacttaaaattgcttgccatcttgcaa

SEQ ID NO: 10167 - DNA, 1149 bp, Glycine max
  Gm_smallRNAprecursor_3000
ggaattcatgattccttgctattatagagcttgttgaattgttcgaatccctgttggacttcttctggaaatatttgtggaattggtccgaagtagttccaccattggaggaaccaatttggaaaattatatgcagtattatttttgaagtaaatcagccatgaatgcttgaatttactattttgatgccagaacacattggtccaggcgtcaacgtaatcccaataattataccctgcaggatcaaatggtgcagagaattttttgggttggtttaagtttgagccataatgtcgtggctgcataaccttcaggatttggattgtggaatgggtatttaaatttggatctttggggtcattgaagtgtttaatagatactgagtttgtatctattaggatgaattcgtagaatttgcggtttttgtttgcggctattggcctgtaatggaatccctgggggaatactttggtggttgctttgaaaggattcttgtcccagtattctggttccatttgtaaaacattgaaaaatttgttttttgaaatgtaactgttaccgggttgtggtgttgattcttgttgagtcaacgattggcttggtttttggttacaaacggttttggtctgtttggccttttggatttgtttttgcagatctgtttcagaatcatcgtctgattctgaggccatttctgcccaggtctttttggctaattttggtattttggtgaggcctatatcctctaaggccatgagagtttgtattgaccaggcatagtcagccacggtctgtttggttgttgttggttttggagattcctgagttgatgactcagatttgacggtagttgtttgggtcaatgacccttcaagttttcctttctgggttgatgacccagtctgggtaggtgacccagaagatgttgtagttgcctttttggttattggctctggtagagccagtagaacttctttacctttcgtactggatcttcctcctctgccagaggaactagacaccttaggaggcatcgggaattttctgtaaaaattcacgggtgaggtagtcaggtagagagttggaagagcccttgatatattctatattaaaatcaaagacacttaaaattgcttgccatcttgcaaa

SEQ ID NO: 10168 - DNA, 1147 bp, Glycine max
  Gm_smallRNAprecursor_3001
gaattcatgattccttgctattatagagcttgttgaattgttcgaatccctgttggacttcttctggaaatatttgtggaattggtccgaagtagttccaccattggaggaaccaatttggaaaattatatgcagtattatttttgaagtaaatcagccatgaatgcttgaatttactattttgatgccagaacacattggtccaggcgtcaacgtaatcccaataattataccctgcaggatcaaatggtgcagagaattttttgggttggtttaagtttgagccataatgtcgtggctgcataaccttcaggatttggattgtggaatgggtatttaaatttggatctttggggtcattgaagtgtttaatagatactgagtttgtatctattaggatgaattcgtagaatttgcggtttttgtttgcggctattggcctgtaatggaatccctgggggaatactttggtggttgctttgaaaggattcttgtcccagtattctggttccatttgtaaaacattgaaaaatttgttttttgaaatgtaactgttaccgggttgtggtgttgattcttgttgagtcaacgattggcttggtttttggttacaaacggttttggtctgtttggccttttggatttgtttttgcagatctgtttcagaatcatcgtctgattctgaggccatttctgcccaggtctttttggctaattttggtattttggtgaggcctatatcctctaaggccatgagagtttgtattgaccaggcatagtcagccacggtctgtttggttgttgttggttttggagattcctgagttgatgactcagatttgacggtagttgtttgggtcaatgacccttcaagttttcctttctgggttgatgacccagtctgggtaggtgacccagaagatgttgtagttgcctttttggttattggctctggtagagccagtagaacttctttacctttcgtactggatcttcctcctctgccagaggaactagacaccttaggaggcatcgggaattttctgtaaaaattcacgggtgaggtagtcaggtagagagttggaagagcccttgatatattctatattaaaatcaaagacacttaaaattgcttgccatcttgcaa

SEQ ID NO: 10169 - DNA, 1164 bp, Glycine max
  Gm_smallRNAprecursor_3002
ccaattttgctcaaattgtatcctacaagtcctaaatcatgtataaatcatatttaaaccaaaaacaagcttcagacaaaggcaattcaaaatctaggtatctaaaacccatcaatttagtggattttcaaggtttgagaagtgaaaataagaatggggtaattttggagtaaactttcatctcaaacaagtctataacattaatttagacttgctcaaactgattttaagacgaaaactccaccgattcaagatttgacccctcaacacccaatttaccctagaaatgactcttgctttcacatttatcactcatttttctcatttgctctgcccaagatttcctacaagtcctaattgatattttaaattacgatcaactcactttagactccaatttacactaaccccaaatttagcttttcaaaccctcaaaatctcacacttttccactcacatcgctaccattctcacatttaaccctaggttaactctccccatcatctctaccagttttctaccaacaatttcagcacacaaacatcacaaagcatcatcataagatcctaaaacagaatgggtagcgttactcacattaaacatgtcaagtttagcatgctttcaacaaattccttcacaaataactaccataaggcataaacctagtagaactacccatcatatctcccaaaaacccaatacccacgaatttcatgtgagaagaagtccacccatacctgaaattcgaagtcccacaacgtagaggtgcgcttcacgactccgaaaatggcttccctttgcaatttggagtagaaatgatgagaaaagtttggagctttaatgggcaacaatggtggaggagaaagggagaagaaaagcaacgtgggagatgaggaaaaagcttctgaaaatctgctgagtgaagagagagaatatggctttttaagaaaaaaatgattttctttttcctattattttattttttaaagcacttgccacttgtcccattttgagtggaacaaaaaggggcccactttttctcttgatgtgacttcatactcagccacaaggagagaaaaatttgaacttttgaatgctaaaatcctgccttggttttcgtgtcgcttctatggttccagtccctcgcatttcttgcacccgtcg

SEQ ID NO: 10170 - DNA, 1038 bp, Glycine max
  Gm_smallRNAprecursor_3003
tacctttcgggcaatatgagtggaatgtaatgccattcggactgaagaatgccccttcaaaatttcaaaaaatcatgaatgatattttcaatccttattcaaacttcgtcattttttacattgatgatgttttaatcttctcccaagatattgatcaacattttaaacacctccagactttcatccatatcattaaacagaatggtttgacagtctccaaatcaaagataaatcttttccagacacggatacgattccttgggcacaatatataccaaggcacaatcattccaatagaaagatcaatagagtttgctaccaaattccctaaccaaatcttagacaagacccagttacgacgatttctagggtgcctaaattatgtaggagaatttgtcccctatctaaacaatattgtcaaaccattacatgataggctgaaaaagaatctgcctccttggtctgacctccatactcaaacagtcaaagaaatcaaagtcaaagtccaatccataaaatgtctgtatcttcccattccacaggcattcaaaattgtcgaaactgatgcatcaaacatcggttatggtggtatccttaaacagcaaatacacggtcaagaacatgtcattgcatatacttcaaaacattggaatcctgcacaattaaaatattcaactgttaaaaaggaagttttagcaattgttttgtgcatttccaaatttcaatctgatttattgaatcaaaaatttttagtaagggttgactgcaaatcagccaaagacattttacaaaaggatgtaaaaaaccttgactcaaaacaaatttttgcaagacggcaggcaatcttaagcgtctttgattttaacatagaatatatcaagggctcttcaaactctctacctgactacctcacccgtgaatttttacagaaaattcccgatgcctcctaaggtgtctagctcctccggcagaggaggaagatccagtactaaaggaaaagatgttatattggctctaccagagccaataaccaagaag

SEQ ID NO: 10171 - DNA, 1121 bp, Glycine max
  Gm_smallRNAprecursor_3004
gtaatgccattcggactgaagaatgccccttcaaaatttcaaaaaatcatgaatgatattttcaatccttattcaaacttcgtcattttttacattgatgatgttttaatcttctcccaagatattgatcaacattttaaacacctccagactttcatccatatcattaaacagaatggtttgacagtctccaaatcaaagataaatcttttccagacacggatacgattccttgggcacaatatataccaaggcacaatcattccaatagaaagatcaatagagtttgctaccaaattccctaaccaaatcttagacaagacccagttacgacgatttctagggtgcctaaattatgtaggagaatttgtcccctatctaaacaatattgtcaaaccattacatgataggctgaaaaagaatctgcctccttggtctgacctccatactcaaacagtcaaagaaatcaaagtcaaagtccaatccataaaatgtctgtatcttcccattccacaggcattcaaaattgtcgaaactgatgcatcaaacatcggttatggtggtatccttaaacagcaaatacacggtcaagaacatgtcattgcatatacttcaaaacattggaatcctgcacaattaaaatattcaactgttaaaaaggaagttttagcaattgttttgtgcatttccaaatttcaatctgatttattgaatcaaaaatttttagtaagggttgactgcaaatcagccaaagacattttacaaaaggatgtaaaaaaccttgactcaaaacaaatttttgcaagacggcaggcaatcttaagcgtctttgattttaacatagaatatatcaagggctcttcaaactctctacctgactacctcacccgtgaatttttacagaaaattcccgatgcctcctaaggtgtctagctcctccggcagaggaggaagatccagtactaaaggaaaagatgttatattggctctaccagagccaataaccaagaaggcaactacatcatcttccgggtcatcaacccagaaaggaaagcttgaagggtcattgacccagataaaacctgagtcatcaactcaggaatccccaaaatcaacaacaa

SEQ ID NO: 10172 - DNA, 1122 bp, Glycine max
  Gm_smallRNAprecursor_3005
gtaatgccattcggactgaagaatgccccttcaaaatttcaaaaaatcatgaatgatattttcaatccttattcaaacttcgtcattttttacattgatgatgttttaatcttctcccaagatattgatcaacattttaaacacctccagactttcatccatatcattaaacagaatggtttgacagtctccaaatcaaagataaatcttttccagacacggatacgattccttgggcacaatatataccaaggcacaatcattccaatagaaagatcaatagagtttgctaccaaattccctaaccaaatcttagacaagacccagttacgacgatttctagggtgcctaaattatgtaggagaatttgtcccctatctaaacaatattgtcaaaccattacatgataggctgaaaaagaatctgcctccttggtctgacctccatactcaaacagtcaaagaaatcaaagtcaaagtccaatccataaaatgtctgtatcttcccattccacaggcattcaaaattgtcgaaactgatgcatcaaacatcggttatggtggtatccttaaacagcaaatacacggtcaagaacatgtcattgcatatacttcaaaacattggaatcctgcacaattaaaatattcaactgttaaaaaggaagttttagcaattgttttgtgcatttccaaatttcaatctgatttattgaatcaaaaatttttagtaagggttgactgcaaatcagccaaagacattttacaaaaggatgtaaaaaaccttgactcaaaacaaatttttgcaagacggcaggcaatcttaagcgtctttgattttaacatagaatatatcaagggctcttcaaactctctacctgactacctcacccgtgaatttttacagaaaattcccgatgcctcctaaggtgtctagctcctccggcagaggaggaagatccagtactaaaggaaaagatgttatattggctctaccagagccaataaccaagaaggcaactacatcatcttccgggtcatcaacccagaaaggaaagcttgaagggtcattgacccagataaaacctgagtcatcaactcaggaatccccaaaatcaacaacaaa

SEQ ID NO: 10173 - DNA, 1108 bp, Glycine max
  Gm_smallRNAprecursor_3006
acaaatttttgcaagacggcaggcaatcttaagcgtctttgattttaacatagaatatatcaagggctcttcaaactctctacctgactacctcacccgtgaatttttacagaaaattcccgatgcctcctaaggtgtctagctcctccggcagaggaggaagatccagtactaaaggaaaagatgttatattggctctaccagagccaataaccaagaaggcaactacatcatcttccgggtcatcaacccagaaaggaaagcttgaagggtcattgacccagataaaacctgagtcatcaactcaggaatccccaaaatcaacaacaaaacagactgtggctgactatgcctggtcaatacaaactctcctggccttagaagacataggcctcaccagagtaccaaaattggccaaaaagacctgggcaaaaatggcttcagaatcagacaatgattctgaaacagacctacaaaaacaaatccaaaaagccaaacagaccaaaactgtctgtaaccaaaaaccaagccaatcgttgactcaacaagaatcaacaccacaacccagcaatagctatatttcaaaaaacaaattcttcaatgttttacaaatggaaccagaatactgagacaagaatcctttcaaggcaaccgccaaagtattccccccaggattccattataggccaacagccacaaataaaaccagaaaattctacgaattcatcctaatagatacaaactcagtatctattaaacacttcaaagaccccaaagatccaaatctaaatacccattccacaatccaaatcctaaaggttatgcagccacgacattatggctcaaacttaaaccaacccaaaaatttttttgcaccttttgatcctgcaggatataattattgggaccacattgacgcctggaccaatgtgttctggcatcaaaatagtaaatttaagcattcatggctaatttacttcaagaataacactgtgtataattttccaaattggttcctccaatggtggaactacttcggaccaattccgaagatatttccagaagaagtccaacagggattccaacaattcaccaagctcttcaatag

SEQ ID NO: 10174 - DNA, 1071 bp, Glycine max
  Gm_smallRNAprecursor_3007
caaacagaccaaaactgtctgtaaccaaaaaccaagccaatcgttgactcaacaagaatcaacaccacaacccagcaatagctatatttcaaaaaacaaattcttcaatgttttacaaatggaaccagaatactgagacaagaatcctttcaaggcaaccgccaaagtattccccccaggattccattataggccaacagccacaaataaaaccagaaaattctacgaattcatcctaatagatacaaactcagtatctattaaacacttcaaagaccccaaagatccaaatctaaatacccattccacaatccaaatcctaaaggttatgcagccacgacattatggctcaaacttaaaccaacccaaaaatttttttgcaccttttgatcctgcaggatataattattgggaccacattgacgcctggaccaatgtgttctggcatcaaaatagtaaatttaagcattcatggctaatttacttcaagaataacactgtgtataattttccaaattggttcctccaatggtggaactacttcggaccaattccgaagatatttccagaagaagtccaacagggattccaacaattcaccaagctcttcaatagcaaggaatcaagaatttcggcagatttaaagtacttttccagttttgccttgtcatggattttttcatggcaatacagatatggaaaaaccgaaaacaacaaacaatatccaccattgcagatacatgcctttgtaaagtggtggtcacaatttgatacctcaaaggctgctccagaacaagtcaagaattggtttcagagcaaccctgagtttctcaagcctgctgatccagagacatcattgtttctaaatcaaaagtctcaacttgcagcattcttagcaagctcaaaatctaaagagagtcttgctcagaatcttaaggaagttctccagctacttcaataggaagaagaagaagaaccccccaagaaggaagccgaatcatccgagaataatgatgaccaagaagatgatccattctaccagaatgaggatgactgttttggtatatcatt

SEQ ID NO: 10175 - DNA, 1033 bp, Glycine max
  Gm_smallRNAprecursor_3008
ttcaaggcaaccgccaaagtattccccccaggattccattataggccaacagccacaaataaaaccagaaaattctacgaattcatcctaatagatacaaactcagtatctattaaacacttcaaagaccccaaagatccaaatctaaatacccattccacaatccaaatcctaaaggttatgcagccacgacattatggctcaaacttaaaccaacccaaaaatttttttgcaccttttgatcctgcaggatataattattgggaccacattgacgcctggaccaatgtgttctggcatcaaaatagtaaatttaagcattcatggctaatttacttcaagaataacactgtgtataattttccaaattggttcctccaatggtggaactacttcggaccaattccgaagatatttccagaagaagtccaacagggattccaacaattcaccaagctcttcaatagcaaggaatcaagaatttcggcagatttaaagtacttttccagttttgccttgtcatggattttttcatggcaatacagatatggaaaaaccgaaaacaacaaacaatatccaccattgcagatacatgcctttgtaaagtggtggtcacaatttgatacctcaaaggctgctccagaacaagtcaagaattggtttcagagcaaccctgagtttctcaagcctgctgatccagagacatcattgtttctaaatcaaaagtctcaacttgcagcattcttagcaagctcaaaatctaaagagagtcttgctcagaatcttaaggaagttctccagctacttcaataggaagaagaagaagaaccccccaagaaggaagccgaatcatccgagaataatgatgaccaagaagatgatccattctaccagaatgaggatgactgttttggtatatcattagaagatgattagttagttgtagtaatcatgaattattgtaactaattattcggttcccgataataatgtaatttgaaaaggtttttgtaacagttctggtaatcattac

SEQ ID NO: 10176 - DNA, 1213 bp, Glycine max
  Gm_smallRNAprecursor_3009
ttgttggagctaaatgggtctttagtaaattacattgtttaaaagaaactggcaaattagttataataattcatgattactacaactaattaatcatcgtctaatgatataccaaaacagtcatgttcattatggtagaatggatcatcttcttggtcatcattagtctcagatgattcaacttccttcttggaaggttcttcttccacttcttgttgaagtagttggagaacttctttgagattctgagcaaggctctctttagattttgagcttgctaagaatgctgccagttgcgacttctgatttagaaacaaagatgtctccggatcagcaggtttaaggaactcagggttgctctggaaccagttcttgacttgatatggagcagcctttgaagtatcgaattgtgaccaccattttacaaaggcgtgtctctgtaacggtggatattgcttgctgttttcagtttttccgtatctgtattgccatgaaaagatccatgacaaggcaaaactggaaaaatactttaaatctgccggaatacgtgattccttgctattatagagcttgttgaattattggaatccctgttggacttcttctgggaatatttgtggaattggtccgaagtagttccaccattggaggaaccaatttggaaaattatacgcagtattatttttgaagtaaatcagccatgaatgcttgaatttactattttgatgccagaacacattggtccaagcgtcaatgtaatcccaataattatatcctgcagggtcaaatggtgcagaaaattttttgggttggtttaagtttgagccataatgtcgtggctgcataaccttcaagatttggattgtggaatgggtatttagatttggatctttggggtctttgaagtgtttaatagatactgagtttgtatctattagaatgaattcgtagaatttgcgggttttgtttgtggctattggcctgaaatggaatcccgggggaaattctttggcggttgctttgaaaggattcttgtcccagtattctggttccatttgtaaaacattgaaaaatttgttttttgaaatgtaactgttaccgggttgtgatgttgattcttgttgagtcaacgattggcttggtttttggttacagacagttttggtctgtttggccttttggatttgtttttgcagatctatttcagagtcat

SEQ ID NO: 10177 - DNA, 1184 bp, Glycine max
  Gm_smallRNAprecursor_3010
caactaattaatcatcgtctaatgatataccaaaacagtcatgttcattatggtagaatggatcatcttcttggtcatcattagtctcagatgattcaacttccttcttggaaggttcttcttccacttcttgttgaagtagttggagaacttctttgagattctgagcaaggctctctttagattttgagcttgctaagaatgctgccagttgcgacttctgatttagaaacaaagatgtctccggatcagcaggtttaaggaactcagggttgctctggaaccagttcttgacttgatatggagcagcctttgaagtatcgaattgtgaccaccattttacaaaggcgtgtctctgtaacggtggatattgcttgctgttttcagtttttccgtatctgtattgccatgaaaagatccatgacaaggcaaaactggaaaaatactttaaatctgccggaatacgtgattccttgctattatagagcttgttgaattattggaatccctgttggacttcttctgggaatatttgtggaattggtccgaagtagttccaccattggaggaaccaatttggaaaattatacgcagtattatttttgaagtaaatcagccatgaatgcttgaatttactattttgatgccagaacacattggtccaagcgtcaatgtaatcccaataattatatcctgcagggtcaaatggtgcagaaaattttttgggttggtttaagtttgagccataatgtcgtggctgcataaccttcaagatttggattgtggaatgggtatttagatttggatctttggggtctttgaagtgtttaatagatactgagtttgtatctattagaatgaattcgtagaatttgcgggttttgtttgtggctattggcctgaaatggaatcccgggggaaattctttggcggttgctttgaaaggattcttgtcccagtattctggttccatttgtaaaacattgaaaaatttgttttttgaaatgtaactgttaccgggttgtgatgttgattcttgttgagtcaacgattggcttggtttttggttacagacagttttggtctgtttggccttttggatttgtttttgcagatctatttcagagtcatcgtctgattctgaggccatttctgcccaggtctttttggctaattttggtatt

SEQ ID NO: 10178 - DNA, 1057 bp, Glycine max
  Gm_smallRNAprecursor_3011
ttgagcttgctaagaatgctgccagttgcgacttctgatttagaaacaaagatgtctccggatcagcaggtttaaggaactcagggttgctctggaaccagttcttgacttgatatggagcagcctttgaagtatcgaattgtgaccaccattttacaaaggcgtgtctctgtaacggtggatattgcttgctgttttcagtttttccgtatctgtattgccatgaaaagatccatgacaaggcaaaactggaaaaatactttaaatctgccggaatacgtgattccttgctattatagagcttgttgaattattggaatccctgttggacttcttctgggaatatttgtggaattggtccgaagtagttccaccattggaggaaccaatttggaaaattatacgcagtattatttttgaagtaaatcagccatgaatgcttgaatttactattttgatgccagaacacattggtccaagcgtcaatgtaatcccaataattatatcctgcagggtcaaatggtgcagaaaattttttgggttggtttaagtttgagccataatgtcgtggctgcataaccttcaagatttggattgtggaatgggtatttagatttggatctttggggtctttgaagtgtttaatagatactgagtttgtatctattagaatgaattcgtagaatttgcgggttttgtttgtggctattggcctgaaatggaatcccgggggaaattctttggcggttgctttgaaaggattcttgtcccagtattctggttccatttgtaaaacattgaaaaatttgttttttgaaatgtaactgttaccgggttgtgatgttgattcttgttgagtcaacgattggcttggtttttggttacagacagttttggtctgtttggccttttggatttgtttttgcagatctatttcagagtcatcgtctgattctgaggccatttctgcccaggtctttttggctaattttggtattttggtgaggcctatatcctctaaggccaagagagtttgtatcgaccaggcatagtcagc

SEQ ID NO: 10179 - DNA, 1031 bp, Glycine max
  Gm_smallRNAprecursor_3012
ccttctgtaaaatgtctttggctgattagcagtcaacccttactaaaaatttttgatttaataaatcagattgaaatttggaaatgcacaaaacaattgctaaaacttcttttttgacagttgaatactttaattgtgcaggattccagtgttttgaagtatatgcgatgacatgttcttgaccatgtacttgttgtttgaggatgccaccgtaaccgatgtctgatgcatcagtttcgacaattttgaatgcctgtggaatgggaagatacagacattttatggattggactttgactttgatttctttaactgtttgggtatggaggtcagaccaaggaggcggatttttctttagcctatcacgcaatggtttgacaatattgtttaagtaggggacaaattctcctacgtaatttagaaaacctagaaatctttgtaactgggttttgtctaagatttggttggggaatttgctagcaaactctattgacctttcgattggaatgattgtaccttgataaattttgtgaccaaggaatcgaattcgagtttggaaaagattgatttttgatttggagactgccaaaccattttgtttgatgatatggatgaaggtttggagatgtttgaaatgttggtcaatgttttgggaaaagattaaaacatcatctatgtagacaatgacaaattttgaatagggattaaaaatgtcattcataattttttggaattctgaaggggcattcttcagtccgaatggcattacattccattcatattgcccgaaaggtacagtaaacgttgttttgtacctatctgattcttggatttggatttgccaaaatccagatttcatgtcaaattttgaaaatatctttgcagaatttaatctgttaagcaaatcttttttgttttgaataggatatctaatccattgtaatgcttgatttagtggtttgtaatgtatgactaagcggagtgttccacgctcaatctcagattgtttgttgacataaaaagccgcacaa

SEQ ID NO: 10180 - DNA, 1054 bp, Glycine max
  Gm_smallRNAprecursor_3013
aatgaaattcttcccctacatcttgtcctagaggaatattgttttctactgttttgattatgtaatcaaagttgtgtttgtcctttattgtttcaggaacgtatagttgatcctgagggatttctggaatgttccagtcatccatgttttgattgatatcttcgaatcggacttcctcatcgaagagattgtgttttggggcgacctcttgggtctggttgtcttgatcatttaataaattggagtttcttgaagaagatgatgaggaggagtttgagcgaaaagagatacgggaaaaagatcgtaatagtctagacatgattataatattctccaatatctttgccctcatttggttccatagaaatatctccgtaagtaaatatgtcacaaatttttctggatctgaattatttttaagaaaaactctttttttttgtttttttttttttgaaaaatagtctgaacggcaatcctatagccaccagtgtattatgtcttgatattttggttaaacagtacaccttagccttaccgccctttatccaacatgggtcttactgctacagtaccattcaactaaaatattagactgttgtacttccaggaagtactgttcaaacacttactgtacaaatcaaagtaaaatattacgtgtactatacaagaccttagttccagatccatgaaatttgttaacatatgtccttacggacagtattcctacttccccatcaggctctgataccagagatcagcggagtgatatatatatatatatatatatatatatatatatatatatatatatatatatatatatatatatatatatatatatatatatatatatatatatatatatatcaccattcacataaacaatgagccatccatccaggtagaacacttttttgacattctaaactcaaaaaagtgggtctaaagctcattgaaaccctgcagttttgtggtgccagaaacttcttcaatgaaccacaaaccatctaccctaaattgaaaagaaccttctagagacatgctgagtatgtaa

SEQ ID NO: 10181 - DNA, 1033 bp, Glycine max
  Gm_smallRNAprecursor_3014
atgcaaagcttcagctctcagtgcaaactcccttcacaaaatctggtttcaggcttaaataggtggcattgtttgtgctcgtgcgcttagcgcaattctgaaccgcttagagcacattagtgaatttcggcttaacgcgttcttttctcgctcaacggatggactgaagcggtgcgcttagtgagataaagcggtgcgcttagcaaacctgtacagctcatcttcttccagattcttcctcgtgcttagccaatgagtgttgcgtttagcggacgctcgctaagccagtagattggcttagtgagaaggtgaaaaacaacacttttcagagtcacctaattaacctgaaattgagagaaaatgattattaaacacacaaaatgtaagtactaagtatttattacctacacttaacaaaaattacttataacactacaaaataaccataaactggggaagtttgatacaatttacacatggattttttcagatttaaagtacttttccagttttgccttgtcatggattttttcatggcaatacagatatggaaaaaccggaaatagcaaacagtagccaccattgcagagacatgcctttgtaaaatggtggtcacaattcgatacctcaaaggctgctccagaacaagtcaagaactggtttcagagcaaccctgagtttctcaagcctgctgatccagagacatctttgtttctgaatcaaaagtctcaacttgcagcgttcttagcaagctcaaaatctaaagagagtcttgctcagaatcttaaggaagttctccaactacttcaacaggaagaagaagaagaactccccaagaaagaagccgaatcatccgagaataatgatgaccaggaagatgatccattctaccagaatgaagatgactgctttggtatattgttagacgatgattagttggttgtagtaatcatgaattattgtaactaattattcggttcccgataataatgtaatttgtaaaagtttttgtaacagttccggtaaacattac

SEQ ID NO: 10182 - DNA, 1137 bp, Glycine max
  Gm_smallRNAprecursor_3015
gcaaagcttcagctctcagtgcaaactcccttcacaaaatctggtttcaggcttaaataggtggcattgtttgtgctcgtgcgcttagcgcaattctgaaccgcttagagcacattagtgaatttcggcttaacgcgttcttttctcgctcaacggatggactgaagcggtgcgcttagtgagataaagcggtgcgcttagcaaacctgtacagctcatcttcttccagattcttcctcgtgcttagccaatgagtgttgcgtttagcggacgctcgctaagccagtagattggcttagtgagaaggtgaaaaacaacacttttcagagtcacctaattaacctgaaattgagagaaaatgattattaaacacacaaaatgtaagtactaagtatttattacctacacttaacaaaaattacttataacactacaaaataaccataaactggggaagtttgatacaatttacacatggattttttcagatttaaagtacttttccagttttgccttgtcatggattttttcatggcaatacagatatggaaaaaccggaaatagcaaacagtagccaccattgcagagacatgcctttgtaaaatggtggtcacaattcgatacctcaaaggctgctccagaacaagtcaagaactggtttcagagcaaccctgagtttctcaagcctgctgatccagagacatctttgtttctgaatcaaaagtctcaacttgcagcgttcttagcaagctcaaaatctaaagagagtcttgctcagaatcttaaggaagttctccaactacttcaacaggaagaagaagaagaactccccaagaaagaagccgaatcatccgagaataatgatgaccaggaagatgatccattctaccagaatgaagatgactgctttggtatattgttagacgatgattagttggttgtagtaatcatgaattattgtaactaattattcggttcccgataataatgtaatttgtaaaagtttttgtaacagttccggtaaacattaccgatactgttgaaacagtaaaatattgggtctatttaaaggagtcctcgttccctttgtgaggcaccctttcagatagtctcaaaaccaagttttagagagagaag

SEQ ID NO: 10183 - DNA, 1136 bp, Glycine max
  Gm_smallRNAprecursor_3016
caaagcttcagctctcagtgcaaactcccttcacaaaatctggtttcaggcttaaataggtggcattgtttgtgctcgtgcgcttagcgcaattctgaaccgcttagagcacattagtgaatttcggcttaacgcgttcttttctcgctcaacggatggactgaagcggtgcgcttagtgagataaagcggtgcgcttagcaaacctgtacagctcatcttcttccagattcttcctcgtgcttagccaatgagtgttgcgtttagcggacgctcgctaagccagtagattggcttagtgagaaggtgaaaaacaacacttttcagagtcacctaattaacctgaaattgagagaaaatgattattaaacacacaaaatgtaagtactaagtatttattacctacacttaacaaaaattacttataacactacaaaataaccataaactggggaagtttgatacaatttacacatggattttttcagatttaaagtacttttccagttttgccttgtcatggattttttcatggcaatacagatatggaaaaaccggaaatagcaaacagtagccaccattgcagagacatgcctttgtaaaatggtggtcacaattcgatacctcaaaggctgctccagaacaagtcaagaactggtttcagagcaaccctgagtttctcaagcctgctgatccagagacatctttgtttctgaatcaaaagtctcaacttgcagcgttcttagcaagctcaaaatctaaagagagtcttgctcagaatcttaaggaagttctccaactacttcaacaggaagaagaagaagaactccccaagaaagaagccgaatcatccgagaataatgatgaccaggaagatgatccattctaccagaatgaagatgactgctttggtatattgttagacgatgattagttggttgtagtaatcatgaattattgtaactaattattcggttcccgataataatgtaatttgtaaaagtttttgtaacagttccggtaaacattaccgatactgttgaaacagtaaaatattgggtctatttaaaggagtcctcgttccctttgtgaggcaccctttcagatagtctcaaaaccaagttttagagagagaag

SEQ ID NO: 10184 - DNA, 1157 bp, Glycine max
  Gm_smallRNAprecursor_3017
cgcgttcttttctcgctcaacggatggactgaagcggtgcgcttagtgagataaagcggtgcgcttagcaaacctgtacagctcatcttcttccagattcttcctcgtgcttagccaatgagtgttgcgtttagcggacgctcgctaagccagtagattggcttagtgagaaggtgaaaaacaacacttttcagagtcacctaattaacctgaaattgagagaaaatgattattaaacacacaaaatgtaagtactaagtatttattacctacacttaacaaaaattacttataacactacaaaataaccataaactggggaagtttgatacaatttacacatggattttttcagatttaaagtacttttccagttttgccttgtcatggattttttcatggcaatacagatatggaaaaaccggaaatagcaaacagtagccaccattgcagagacatgcctttgtaaaatggtggtcacaattcgatacctcaaaggctgctccagaacaagtcaagaactggtttcagagcaaccctgagtttctcaagcctgctgatccagagacatctttgtttctgaatcaaaagtctcaacttgcagcgttcttagcaagctcaaaatctaaagagagtcttgctcagaatcttaaggaagttctccaactacttcaacaggaagaagaagaagaactccccaagaaagaagccgaatcatccgagaataatgatgaccaggaagatgatccattctaccagaatgaagatgactgctttggtatattgttagacgatgattagttggttgtagtaatcatgaattattgtaactaattattcggttcccgataataatgtaatttgtaaaagtttttgtaacagttccggtaaacattaccgatactgttgaaacagtaaaatattgggtctatttaaaggagtcctcgttccctttgtgaggcaccctttcagatagtctcaaaaccaagttttagagagagaagctctgccggaaaacctctttgtaagtttttctttcgatttcaataaattcaaagttctatttttcacatctcccttctcccttcaccgatcctgtgcggctctgccgccgctgcggtttctttgttttcaaaaacttgggtttgtaagccgga

SEQ ID NO: 10185 - DNA, 1143 bp, Glycine max
  Gm_smallRNAprecursor_3018
aaaaaagaagggtacaatataacttaaagtctaaaaatataattacctttgcattaggaatggatgaatactttagagtctcaaattgtaagaatgcaaaagaaatgtgggatacattacaagtaacccatgaaggaacaacatatgttaagagatcaagaataaacaccctaacacatgaatatgaatttttcagaatgaatcaaaatgagaccatacaagatatgcaaaagagattcacacatatagttaatcatcttgcatcattaggaaagatatttcctaatgaggatctcattaacaaagtactaagatgtttaagcagagaatgacaaccaaagctaactgcaattgcagaatcaagagatcttactaacatgtttgtgacatcctggaaatttctacccggaattttgtaagcgatatattttaaataattatatatataagtattatttagtgtgtgtgtgtgtgtgtatatatatatatatatatatattcctggtagaagtatgtacattggggggggaaagatacgcgagttaggctaattaacgaagagtaatccataactggacagttatagattaattctcaattaattagtctaaaaattatcgttttgcatgcaacttaaaatttaacaaaaccaacctttgaaccacgctcagggtttcattttgagcgttttgatatatatatattgcctactttcgaaaatgggccccgacgggtgcagagaaacgcgaggaactgaaaccagagaagcggcacgcaaactgaggcaggattttagcattcaaaaagtcaaatttttctctgcttgtgactgagtatgaagtcacatcaagagaaaagtgggcccctttttgcttcactcaaaatgggacaagtggcattactttatgaaaaaaaatgggggaaaagaaaatcatttttatataaaagctaagtttctctctccttcttcagaaaattcagaagctcttcttctcactcccacgcagctttttcttcttccttcttctccacctttgttctccattaaagctccaaactttgctcatcatttttactccaaattgcaaaaggaagccattttcgaattcgtgaagcacacctctacgttgtgggacttcgaat

SEQ ID NO: 10186 - DNA, 1051 bp, Glycine max
  Gm_smallRNAprecursor_3019
gtgcacatcattcgttatctaagatcttatataacgtactaatatttttaaattttcttataattacaattttcccacttatactaatgatcatgtaaaaaaatgtattataaagtagttagtattttaattttttatataatactatttatttttttatattctttataatattaataatgatatgattaattctttataatattatcttttatgtatttattgatttttattaatatgtataaaataaccttaaacaataattataatgtgactgagtaagtattttaatatcatcttctaaacaaatttattctaaaaaaatatattaaaaaattaattatttataataaatcaatatttataaatatattatacttaataaaataaaaaatagatttaattatattataaataaatatgttgtatttaaaagtatattataattattttttccacttacggatcaacttgatccctaagagacttccggatcagcttgatccgtaagttgatccgtaagtctgtttcggatcaacttgatccgtaagagacttccggatcaacttgatccggaagttacagatcaacttacggatcaagctgatccagaagtggaaaactaagcaaggacaattttggtatttttcaagaatgctgggtgcaccagcaataatgctggatgcaccttgcaacactctagtactagccaccacccacaaggcccattcgggtgtaacctatgcttctaaaagaatatcaaatcaactcaaggttaaaaacaccctcttgtgcctttaaaattagaggaacagctattctgaacggcagtacactgaggaacgaataatttctatataacaactattttttttttttttgtaacaatgtaattcatatttttacagcatcaggtgattgtcagagttctattttctttacttgtatggattcacatgattggcattctccgagataggatgaaagaagtgtcggtgccaatattgatttattatacatttctacagcatgtgttctttaactgacaagg

SEQ ID NO: 10187 - DNA, 1052 bp, Glycine max
  Gm_smallRNAprecursor_3020
gtgcacatcattcgttatctaagatcttatataacgtactaatatttttaaattttcttataattacaattttcccacttatactaatgatcatgtaaaaaaatgtattataaagtagttagtattttaattttttatataatactatttatttttttatattctttataatattaataatgatatgattaattctttataatattatcttttatgtatttattgatttttattaatatgtataaaataaccttaaacaataattataatgtgactgagtaagtattttaatatcatcttctaaacaaatttattctaaaaaaatatattaaaaaattaattatttataataaatcaatatttataaatatattatacttaataaaataaaaaatagatttaattatattataaataaatatgttgtatttaaaagtatattataattattttttccacttacggatcaacttgatccctaagagacttccggatcagcttgatccgtaagttgatccgtaagtctgtttcggatcaacttgatccgtaagagacttccggatcaacttgatccggaagttacagatcaacttacggatcaagctgatccagaagtggaaaactaagcaaggacaattttggtatttttcaagaatgctgggtgcaccagcaataatgctggatgcaccttgcaacactctagtactagccaccacccacaaggcccattcgggtgtaacctatgcttctaaaagaatatcaaatcaactcaaggttaaaaacaccctcttgtgcctttaaaattagaggaacagctattctgaacggcagtacactgaggaacgaataatttctatataacaactattttttttttttttgtaacaatgtaattcatatttttacagcatcaggtgattgtcagagttctattttctttacttgtatggattcacatgattggcattctccgagataggatgaaagaagtgtcggtgccaatattgatttattatacatttctacagcatgtgttctttaactgacaagga

SEQ ID NO: 10188 - DNA, 1165 bp, Glycine max
  Gm_smallRNAprecursor_3021
agctgaatctcccatcttcagcatagttgaaactcttgtctcattgtccaatgccacactttgatggcctgtatctcttttcttcgtatgttctagtgcttcagcttcagaatgcataaagcaatcagaatttccgagtgatcaccaaaggcttctgcatcagcattgacactctccaccctctttggtttatgcttctgtgttttcttccgtgcctccttgttataaatctcagctttattcgaggttgcactagaacgatcaccaccaatctgtgcttcttcctcgtctatcaggtcaatatctttcctttcaacttttgttttgtaaattacagtgtagttttcaaaagcaaaggtgaaaggaaagatattgagctggtagaggaggaacatgcacggattggtgctgatccttctagtgggacctccaataaatctgagaattataaggaggaagcatggaagaaaacacagaagcataaaccaaagagggtggagagtgtcaacgctgatgcagaagcctttggtgatgactcgaaaattctgattgctctatgcattgtgaagctgaagcagtagaacatacgaacaaaagagatacaggccatcaaaatatggcattggacaataagacaggagattcaactatactgaagatgggagattcagctaaagttgtgatcaaacaagacatgaagggaagaaggcataaatatgggtttaacaacaatgaacgtgagaaggcacaaaagaaaagggtggtggatgatgaaactgccgacaaacatcagctggatgaagtcctatgaagatcctcctcattctcaaagaggggaacgagcaacaatttgaaggttgtatattcaggaacaaaagaattcaaaatagctagtaataagagggatttgtttttgggattttctgagcaccaagagcggctacgcaagaagtttgcacttgaggagggaaggatatttgcagctaatgaacaagtttcttaactatttgtccttaagattttactgtttctttttgctaatatgtaaatataaatggtataagattgttaggggtaaaaatgaccatgtccctatgacataaccttatattatttatatttacatataagaaaacaaaaacagtaaaatatgaaggacaaatag

SEQ ID NO: 10189 - DNA, 1084 bp, Glycine max
  Gm_smallRNAprecursor_3022
caagttacaggtttcatatatgtccaccaaagatcttactcgtcttggagtagactctggtgatgatagttcttgatcttgttgttgtggtggaggtgaaggtggttcacctcggtcttcttcctcagcttcttcttgaggtagttaagcgggtataagaacgttcttctccaatttttcttcatcccaattccaagaagcgtactcatcaacttcaacatcttgactgatgacgagtttcttagtttgcaagttgtaaacatggtagcccttagagatattgttatacccaaggaagatacctcgtatagtcttgtcttcaagcttgtgcctcctcacgtctggaatatgaatgtagcatatagatccaaagacccttaggtgctttgttgatggcttcttctcgttccaagcttcaattggagtcttgtcttttacagacttagttggacatctgttgagtatgtaaacaacattgtagactgcttcagcccaaaatgtgttaggtagtcccttctccttgagcattcatctagccatttccataactgtgcgattctttctctcggacacttcattttgttgaggagaatatgcgactgtaagttgtcgctcaatgccttcatcctcacaaaatctttcaaactcacgagagatgtactctttgtcgtgatcacttcttagtacttttattcgttttccactttgattttcaacaagggccttgaactttttgaatactccaaagacttctgatttttcttttaaaaaatatacccatgtcattctagagaagtcatcaatgaagagtatgaagtacctgttgttctcatgtgatggcgtcctcattggtccacagacgtctgtatgtatcaactccaatagatctttcgctctccatgctccgcttgttgagaaaggaaatcggtgttgcttaccaaggagacatccttcacacccttcattgttctcctttatgcttggaagatatctcatcatgttcttctcatgtaacaacttcaaggcatgtgtgttgaagtggccaaatcttcaatgccatagccatgaatcatcaacttgtacc

SEQ ID NO: 10190 - DNA, 1079 bp, Glycine max
  Gm_smallRNAprecursor_3023
taaggaaattcctagaaccttctcttcttctggaagtttctccataatttttctttcctccattttctttgttttgtggctgaaatttaaactttgactggaaggcattttcaagtgtatcttctttatgcctatacagtctttgctcatatgcttcaagagagcccacaagttttgtctctgatagagtggacagatcattggtttcctcaatcgttgtcacgattgggtcaaacttttggggcataataattagaattttctctacaattttcttgtcaagaatatatttcccaaaagctctcatttgattaactatttctttaactttagaatagtaatctttaactatctcagactccttcatcttcaatagttcaaaatctcttcttagagattgaagtttaacagcacgtaccttaacacttccttgaaactcctcctgcaatgtgttccacgcttctttggcagtcttagctcccataattcttgggaaaattggatcagtcaccgcttgttgcaaggtaaacaacgcctttaaatttttctgtttatttttcttcaactctttttcttgagatgcattaagagctgaagtatccacgggaacggtgaagtcttcttctactatgtcccttaaatcttgagatgaaaaatatgttttcattttaatatgccagaaatcataattttcactattgaagatagggacagaaatagttaatgattgagtaatgttatgcatagcttagaaaaaatattattgtagtgggttaatagtacaaaggaaatttttgaagtagttgggaggattttggaatggtaggtaggtaatataactacgcccaatgtatgaccgaacataactctgataccactgttgatagttgattagatgatggttgatagttgatagttttagaaaaatgctttagaaagaaggctatgtcattgatttcttggatgatcaattacaacataccaattgcctatttataggctcaagtcaccaacctctcaatggtggtgaatgtttctacattactttaggtctttctagagttttcatgatagattag

SEQ ID NO: 10191 - DNA, 1061 bp, Glycine max
  Gm_smallRNAprecursor_3024
aaaccataaaaattaattaattcctaaacgtgattattgttttataacaaaatgaagaaaaaagaatttttattttataataataagtaaaaataaaataatatttaatgcgtatgtaatgacgattttgcccttgtgtaaatttctttaaattaacgtcttcaggctgtgttttactgcgctttctttgtttcttcttccgtttgctttgtttcttcttccgtttgctttgtttgtttcttccgtttgctgttgtttcggtggtggtcccttcagcagtttgttggtggtcccgtgaagtgaagtatttgaagatttggtggtcccgtgtttcgtatttgaagttttattagtggctgttgttcctattttgtcggaggtacgcgtttatttcattttccggttagtttttagagaagaaaaacagtaaaaagtgtatccggaagaaattttaggcacagaaggaggaaggtccggaatgaccacttccggaagaaggtcttccggaagttacgaaggccaattccggaagaagtgcttccggaagaccttcttccggaattggccttcaccacttccggaagaccttcttccgtaatgttaaattattagtaattttttttaatttctgttttataatttatatatatatatatatatatatatttctgttagttaataatgaattattggtttaattaggtataatgatatatattgtggattataatttttttgttttataatggtatatatatatatatttctgttttataatttttttttatttctgttttatatatgttgtggattattgatttaattaggtataatggtataatattaaatgatttaggtaacttaaatgtataatggtacaaaaatgttttattagttgtttattatagtgataagtttagtttaagtaaataatgtagttataaatttagaatatagtgataattttaatatagtcgtgtatgatgcatatgtcctattaatatgtttgttatttaaggtgtagtaaatttttggatgtggttatatgataatttgaatgt

SEQ ID NO: 10192 - DNA, 1189 bp, Glycine max
  Gm_smallRNAprecursor_3025
atggaggccagaaacacatacgtttcacatgagatgcgaagagtgtactatcactctacaagacgtctctgtgttgttaggtataagtgtggatggtttaccattaatcggtccaacaaatcttgattgggctgatttatgtgaggaattattgggagtcagaccacaagaaggtgaaattaaaggtagtgtggttaaattaagttggctggctcaccattttgatcaaataaataatgatgacgacgaagaacaagtacgaaggtttgcccgtgcatggatactgagatttattggaggtgtcttgttcgttgacaaaaccaataacagagtttcggtaaggtaccttcaatttttacgtgactttgaagaatgtggcagatatgcatggggagctgccgtacttggttttctatatagagagatgtgcagtgccaccgattataaaactaaatcaatcggaggtatgtgcatcttactacaattgtgggcatgggaacgatgtccaaccttggctccaaagaggactccttcccaaatagaaaatacaccactagggcacaggtgagtcatttttaacagcgtctttcatttcaatagaataaatggttttagggtatattaaattttattctttgtaggtggctgcgacgtggaaaccaacatatcggcaatgatgatgtgaaagtttttcgtcgcaagttggatattatgaaacgtcatgaggtaagaagcatgctattgtatttgtaaaataaaaaattatgtcttattttactacagtgttcacaactatgttgttatatgcagtttgtgtgggagccttacccatcaaccgttatatcattgttgcctcccgtttgtttagtcggaagtatcgcgtggtacgtggtggtgccactaatttgtttccaagttattgagtggcaccaaccagacagagtcttgagacaattcgggatgcagcaaccagttccagagtctccttcacaacccctaaacattcatggcataacattaaaggggaaacatgacgaaaattgggggcaattattcgccccaatgattcaacagtggaataatcgacatgcatttagggtcgacgcttatccccgacaagaaggcctattgagttttaactcggactacatggtctggtataggcgaaagacaaagatgtttgttgacc

SEQ ID NO: 10193 - DNA, 1059 bp, Glycine max
  Gm_smallRNAprecursor_3026
aaccttccaatctaacactcccacctaaccctcccatctaaccctcgtaactaactctcccaacctaaccttccaatctaactctcccacctaacattacaatctaactctggtactaaactttctcagcctatatataatatcaccatttgacaacaacatatcacacacaacaattttctcacaaaacaaaactcgatttgtaactctcacaccatttccactcatatcccataagcaccaccatggctccacctaaagaaattctgaccctcatttaccacagtggtcacattgtagacgatccagttcaaggatcgacgtaccaatgtacgaccccaatatttttttacgccagtcgttctattacgtttacacaattcattcgaaaaattaacaatcgtcctcctactcgagcaactgaacaagttgctcaattgttatttcgtgtccctatttcaattcatctcggtcagacacgttttattttggctcaactattcgacaatgatgatcttagaggcgcgatggaaacaattatccagaatccacaattgaattctaccgaattctatgctgttactgagcttatttctcaaccacaaccatcgtctccacaaccctcatgtccacaactacaactaccgcctccacaacagttaccgtacaacaacatagacctcaataatccagtatctttatacaacaaccttgaatcacaagacccctttgacatttatacttgatacacacaaatattatccgataatgattctttttttcatggccaacaaacctcctttgaccaacaaaaccatccttcatccccctttacgccaccttcaaaactaccacaaacgcaaacatcaaaccgagatgaacatcccattgctaacgaagatcccattatacgatttcatcatgaaaacatggatgattttactgaggatgaggatcaacagttctttgatcacatcaatcagcaaagcgatgaccaaagtgatgactaaaccgatgatgagggtgttggcagaccaacaacacctccgtcacctccgt

SEQ ID NO: 10194 - DNA, 1200 bp, Glycine max
  Gm_smallRNAprecursor_3027
ttgttcatcaacaacacaatgtacaaccaccagttggtgtactcgaggttggcatgaccttcgatgacaaatcacaatgtattcgagcaatcaaagaatacaacatcagaaatcattttgattgcagaacaatttactctgaccaaagaaggctacacttcgtctgcaagttacgtgaaaatggttgtacatgaagcttgggcgcatgcaattcaaagaggcataacaaatggattatcaagagtatcagaggtcatcacacttgtctcgtgccgatgcttagacaagatcatcgccaactcgacaaacacgtcatagcacagatcatccaaccaattgtcaaaacaaacccaactgtctccatcaagacattgattgcagagatcaaaacgttcatgaattataccctatcctacaagaagacatggttagcaaagcaaaaaacattggagatgattcatggaaactgggaagaatcatatgccaaactgccaaaacttttcggagctttgcaatcttgtgttcccgggactgtggtcgctgctcaaacagaatccttgtatgaggggggagaaatagtaccgggcaaaagattgtttaaacgtgtcttttggtcatttggtccatgcattaatggttttgcatattgcaaacccattgtacaagtagatgatacatggctttaaggaaagtatactggcacactgttgatagctaccgcacaagatggagctaaccatatcttcccgattgcctatgccattgtagaaggggagacaacttcagcttgggggttttttctaaagaatttgagaagacatgttactccacaaattaacatttctcttatttcagaccgacacccctcaattataagtgcctacaacaacccaagtaacttatgggtccaggacacattccatttcttttgcttgcgccacattgcacaaaactttcttcgtggtaactcaaactgcaaacatttaaagaaaccacttatgttggctggtgagaatctattttatttattcgttataattttctttcaatcaaattttataacataatacattgattaaatatttacagggtacgcatacacggagaagatgcactggcgacatcttggggatattcgtgcgaataagccaagtgcagctgaatggcttgatcaattacccaaacaaaaatgggtacaat

SEQ ID NO: 10195 - DNA, 1076 bp, Glycine max
  Gm_smallRNAprecursor_3028
catcaacaacacaatgtacaaccaccagttggtgtactcgaggttggcatgaccttcgatgacaaatcacaatgtattcgagcaatcaaagaatacaacatcagaaatcattttgattgcagaacaatttactctgaccaaagaaggctacacttcgtctgcaagttacgtgaaaatggttgtacatgaagcttgggcgcatgcaattcaaagaggcataacaaatggattatcaagagtatcagaggtcatcacacttgtctcgtgccgatgcttagacaagatcatcgccaactcgacaaacacgtcatagcacagatcatccaaccaattgtcaaaacaaacccaactgtctccatcaagacattgattgcagagatcaaaacgttcatgaattataccctatcctacaagaagacatggttagcaaagcaaaaaacattggagatgattcatggaaactgggaagaatcatatgccaaactgccaaaacttttcggagctttgcaatcttgtgttcccgggactgtggtcgctgctcaaacagaatccttgtatgaggggggagaaatagtaccgggcaaaagattgtttaaacgtgtcttttggtcatttggtccatgcattaatggttttgcatattgcaaacccattgtacaagtagatgatacatggctttaaggaaagtatactggcacactgttgatagctaccgcacaagatggagctaaccatatcttcccgattgcctatgccattgtagaaggggagacaacttcagcttgggggttttttctaaagaatttgagaagacatgttactccacaaattaacatttctcttatttcagaccgacacccctcaattataagtgcctacaacaacccaagtaacttatgggtccaggacacattccatttcttttgcttgcgccacattgcacaaaactttcttcgtggtaactcaaactgcaaacatttaaagaaaccacttatgttggctggtgagaatctattttatttattcgttataattttctttcaatcaaattttataacataatacattgattaaat

SEQ ID NO: 10196 - DNA, 1075 bp, Glycine max
  Gm_smallRNAprecursor_3029
atcaacaacacaatgtacaaccaccagttggtgtactcgaggttggcatgaccttcgatgacaaatcacaatgtattcgagcaatcaaagaatacaacatcagaaatcattttgattgcagaacaatttactctgaccaaagaaggctacacttcgtctgcaagttacgtgaaaatggttgtacatgaagcttgggcgcatgcaattcaaagaggcataacaaatggattatcaagagtatcagaggtcatcacacttgtctcgtgccgatgcttagacaagatcatcgccaactcgacaaacacgtcatagcacagatcatccaaccaattgtcaaaacaaacccaactgtctccatcaagacattgattgcagagatcaaaacgttcatgaattataccctatcctacaagaagacatggttagcaaagcaaaaaacattggagatgattcatggaaactgggaagaatcatatgccaaactgccaaaacttttcggagctttgcaatcttgtgttcccgggactgtggtcgctgctcaaacagaatccttgtatgaggggggagaaatagtaccgggcaaaagattgtttaaacgtgtcttttggtcatttggtccatgcattaatggttttgcatattgcaaacccattgtacaagtagatgatacatggctttaaggaaagtatactggcacactgttgatagctaccgcacaagatggagctaaccatatcttcccgattgcctatgccattgtagaaggggagacaacttcagcttgggggttttttctaaagaatttgagaagacatgttactccacaaattaacatttctcttatttcagaccgacacccctcaattataagtgcctacaacaacccaagtaacttatgggtccaggacacattccatttcttttgcttgcgccacattgcacaaaactttcttcgtggtaactcaaactgcaaacatttaaagaaaccacttatgttggctggtgagaatctattttatttattcgttataattttctttcaatcaaattttataacataatacattgattaaat

SEQ ID NO: 10197 - DNA, 1066 bp, Glycine max
  Gm_smallRNAprecursor_3030
acaacacaatgtacaaccaccagttggtgtactcgaggttggcatgaccttcgatgacaaatcacaatgtattcgagcaatcaaagaatacaacatcagaaatcattttgattgcagaacaatttactctgaccaaagaaggctacacttcgtctgcaagttacgtgaaaatggttgtacatgaagcttgggcgcatgcaattcaaagaggcataacaaatggattatcaagagtatcagaggtcatcacacttgtctcgtgccgatgcttagacaagatcatcgccaactcgacaaacacgtcatagcacagatcatccaaccaattgtcaaaacaaacccaactgtctccatcaagacattgattgcagagatcaaaacgttcatgaattataccctatcctacaagaagacatggttagcaaagcaaaaaacattggagatgattcatggaaactgggaagaatcatatgccaaactgccaaaacttttcggagctttgcaatcttgtgttcccgggactgtggtcgctgctcaaacagaatccttgtatgaggggggagaaatagtaccgggcaaaagattgtttaaacgtgtcttttggtcatttggtccatgcattaatggttttgcatattgcaaacccattgtacaagtagatgatacatggctttaaggaaagtatactggcacactgttgatagctaccgcacaagatggagctaaccatatcttcccgattgcctatgccattgtagaaggggagacaacttcagcttgggggttttttctaaagaatttgagaagacatgttactccacaaattaacatttctcttatttcagaccgacacccctcaattataagtgcctacaacaacccaagtaacttatgggtccaggacacattccatttcttttgcttgcgccacattgcacaaaactttcttcgtggtaactcaaactgcaaacatttaaagaaaccacttatgttggctggtgagaatctattttatttattcgttataattttctttcaatcaaattttataacataatacattgat

SEQ ID NO: 10198 - DNA, 1067 bp, Glycine max
  Gm_smallRNAprecursor_3031
acaacacaatgtacaaccaccagttggtgtactcgaggttggcatgaccttcgatgacaaatcacaatgtattcgagcaatcaaagaatacaacatcagaaatcattttgattgcagaacaatttactctgaccaaagaaggctacacttcgtctgcaagttacgtgaaaatggttgtacatgaagcttgggcgcatgcaattcaaagaggcataacaaatggattatcaagagtatcagaggtcatcacacttgtctcgtgccgatgcttagacaagatcatcgccaactcgacaaacacgtcatagcacagatcatccaaccaattgtcaaaacaaacccaactgtctccatcaagacattgattgcagagatcaaaacgttcatgaattataccctatcctacaagaagacatggttagcaaagcaaaaaacattggagatgattcatggaaactgggaagaatcatatgccaaactgccaaaacttttcggagctttgcaatcttgtgttcccgggactgtggtcgctgctcaaacagaatccttgtatgaggggggagaaatagtaccgggcaaaagattgtttaaacgtgtcttttggtcatttggtccatgcattaatggttttgcatattgcaaacccattgtacaagtagatgatacatggctttaaggaaagtatactggcacactgttgatagctaccgcacaagatggagctaaccatatcttcccgattgcctatgccattgtagaaggggagacaacttcagcttgggggttttttctaaagaatttgagaagacatgttactccacaaattaacatttctcttatttcagaccgacacccctcaattataagtgcctacaacaacccaagtaacttatgggtccaggacacattccatttcttttgcttgcgccacattgcacaaaactttcttcgtggtaactcaaactgcaaacatttaaagaaaccacttatgttggctggtgagaatctattttatttattcgttataattttctttcaatcaaattttataacataatacattgatt

SEQ ID NO: 10199 - DNA, 1065 bp, Glycine max
  Gm_smallRNAprecursor_3032
caacacaatgtacaaccaccagttggtgtactcgaggttggcatgaccttcgatgacaaatcacaatgtattcgagcaatcaaagaatacaacatcagaaatcattttgattgcagaacaatttactctgaccaaagaaggctacacttcgtctgcaagttacgtgaaaatggttgtacatgaagcttgggcgcatgcaattcaaagaggcataacaaatggattatcaagagtatcagaggtcatcacacttgtctcgtgccgatgcttagacaagatcatcgccaactcgacaaacacgtcatagcacagatcatccaaccaattgtcaaaacaaacccaactgtctccatcaagacattgattgcagagatcaaaacgttcatgaattataccctatcctacaagaagacatggttagcaaagcaaaaaacattggagatgattcatggaaactgggaagaatcatatgccaaactgccaaaacttttcggagctttgcaatcttgtgttcccgggactgtggtcgctgctcaaacagaatccttgtatgaggggggagaaatagtaccgggcaaaagattgtttaaacgtgtcttttggtcatttggtccatgcattaatggttttgcatattgcaaacccattgtacaagtagatgatacatggctttaaggaaagtatactggcacactgttgatagctaccgcacaagatggagctaaccatatcttcccgattgcctatgccattgtagaaggggagacaacttcagcttgggggttttttctaaagaatttgagaagacatgttactccacaaattaacatttctcttatttcagaccgacacccctcaattataagtgcctacaacaacccaagtaacttatgggtccaggacacattccatttcttttgcttgcgccacattgcacaaaactttcttcgtggtaactcaaactgcaaacatttaaagaaaccacttatgttggctggtgagaatctattttatttattcgttataattttctttcaatcaaattttataacataatacattgat

SEQ ID NO: 10200 - DNA, 1157 bp, Glycine max
  Gm_smallRNAprecursor_3033
aggcaacaatgacataacagttgttgtgtaaggctcccacacaaactgcatataacaacatagttgtcagcattttagtaaaataacacatattattttttattttacaaatacaataccatgttcttacctcatgacgtttcataatatccaacttgcaacgaaaaactctcacatcatcattgtcgatatgttgatttccacatcgcagccacctacaaagattaaaatttaatataccctaaaaccattaattcttttgaaatgaaagacgcttttaaaaatgactagcctgtgcccaagtggtttattttctacttggggaggagtcctctttggagccaaagttatacatcgctccgatgcccacatttgtattaagatgcacatacctccgattgatttagttgtataattggtggcactgcacatctctttgtataaaaaagcaagtacgacaggtccccatgcatatgtgctacaatatctaaagtcacgtaaaaattgaaggtaccttagcgaaactttattactgcttttgtcaacgaacaagacacctccaatgaatcttagtatccatgcacgggtaaacctttgtacttgttctttgtcgtcatggttatttatttgtgcaaaatggtgagccagccaacttaatttaaccacactacctttaatttcaccttcttgtggtctgactcccaataattcctcacataaatcagcccaattaagatttgttggaccaattaatggtaaaccctccacacatagacctaacaatacagagacatcttgaagagtaatagtacactcttcgcatctcatgtgaaacggatgtgttttcgacctccatctttctatcaaaacactaattaataagacatttatttttaagtatcacatcttcataatccagtaaaaaccagattgtcgaaggaaagaaataatttgctctagtatttcttcttctccttgatacgtggggacagttcgtctgatgtgtaattttcggtcttcttccccattccaaacatgttctgaaacatgcttagcttgcatccataatacatcaccatcgatcgggccaaacttaattttaatatttgaaggacatgacaacgaagatgtcattgatattgcaaaataaaatataa

SEQ ID NO: 10201 - DNA, 1158 bp, Glycine max
  Gm_smallRNAprecursor_3034
aggcaacaatgacataacagttgttgtgtaaggctcccacacaaactgcatataacaacatagttgtcagcattttagtaaaataacacatattattttttattttacaaatacaataccatgttcttacctcatgacgtttcataatatccaacttgcaacgaaaaactctcacatcatcattgtcgatatgttgatttccacatcgcagccacctacaaagattaaaatttaatataccctaaaaccattaattcttttgaaatgaaagacgcttttaaaaatgactagcctgtgcccaagtggtttattttctacttggggaggagtcctctttggagccaaagttatacatcgctccgatgcccacatttgtattaagatgcacatacctccgattgatttagttgtataattggtggcactgcacatctctttgtataaaaaagcaagtacgacaggtccccatgcatatgtgctacaatatctaaagtcacgtaaaaattgaaggtaccttagcgaaactttattactgcttttgtcaacgaacaagacacctccaatgaatcttagtatccatgcacgggtaaacctttgtacttgttctttgtcgtcatggttatttatttgtgcaaaatggtgagccagccaacttaatttaaccacactacctttaatttcaccttcttgtggtctgactcccaataattcctcacataaatcagcccaattaagatttgttggaccaattaatggtaaaccctccacacatagacctaacaatacagagacatcttgaagagtaatagtacactcttcgcatctcatgtgaaacggatgtgttttcgacctccatctttctatcaaaacactaattaataagacatttatttttaagtatcacatcttcataatccagtaaaaaccagattgtcgaaggaaagaaataatttgctctagtatttcttcttctccttgatacgtggggacagttcgtctgatgtgtaattttcggtcttcttccccattccaaacatgttctgaaacatgcttagcttgcatccataatacatcaccatcgatcgggccaaacttaattttaatatttgaaggacatgacaacgaagatgtcattgatattgcaaaataaaatataat

SEQ ID NO: 10202 - DNA, 1155 bp, Glycine max
  Gm_smallRNAprecursor_3035
gcaacaatgacataacagttgttgtgtaaggctcccacacaaactgcatataacaacatagttgtcagcattttagtaaaataacacatattattttttattttacaaatacaataccatgttcttacctcatgacgtttcataatatccaacttgcaacgaaaaactctcacatcatcattgtcgatatgttgatttccacatcgcagccacctacaaagattaaaatttaatataccctaaaaccattaattcttttgaaatgaaagacgcttttaaaaatgactagcctgtgcccaagtggtttattttctacttggggaggagtcctctttggagccaaagttatacatcgctccgatgcccacatttgtattaagatgcacatacctccgattgatttagttgtataattggtggcactgcacatctctttgtataaaaaagcaagtacgacaggtccccatgcatatgtgctacaatatctaaagtcacgtaaaaattgaaggtaccttagcgaaactttattactgcttttgtcaacgaacaagacacctccaatgaatcttagtatccatgcacgggtaaacctttgtacttgttctttgtcgtcatggttatttatttgtgcaaaatggtgagccagccaacttaatttaaccacactacctttaatttcaccttcttgtggtctgactcccaataattcctcacataaatcagcccaattaagatttgttggaccaattaatggtaaaccctccacacatagacctaacaatacagagacatcttgaagagtaatagtacactcttcgcatctcatgtgaaacggatgtgttttcgacctccatctttctatcaaaacactaattaataagacatttatttttaagtatcacatcttcataatccagtaaaaaccagattgtcgaaggaaagaaataatttgctctagtatttcttcttctccttgatacgtggggacagttcgtctgatgtgtaattttcggtcttcttccccattccaaacatgttctgaaacatgcttagcttgcatccataatacatcaccatcgatcgggccaaacttaattttaatatttgaaggacatgacaacgaagatgtcattgatattgcaaaataaaatataa

SEQ ID NO: 10203 - DNA, 1036 bp, Glycine max
  Gm_smallRNAprecursor_3036
tgttcttacctcatgacgtttcataatatccaacttgcaacgaaaaactctcacatcatcattgtcgatatgttgatttccacatcgcagccacctacaaagattaaaatttaatataccctaaaaccattaattcttttgaaatgaaagacgcttttaaaaatgactagcctgtgcccaagtggtttattttctacttggggaggagtcctctttggagccaaagttatacatcgctccgatgcccacatttgtattaagatgcacatacctccgattgatttagttgtataattggtggcactgcacatctctttgtataaaaaagcaagtacgacaggtccccatgcatatgtgctacaatatctaaagtcacgtaaaaattgaaggtaccttagcgaaactttattactgcttttgtcaacgaacaagacacctccaatgaatcttagtatccatgcacgggtaaacctttgtacttgttctttgtcgtcatggttatttatttgtgcaaaatggtgagccagccaacttaatttaaccacactacctttaatttcaccttcttgtggtctgactcccaataattcctcacataaatcagcccaattaagatttgttggaccaattaatggtaaaccctccacacatagacctaacaatacagagacatcttgaagagtaatagtacactcttcgcatctcatgtgaaacggatgtgttttcgacctccatctttctatcaaaacactaattaataagacatttatttttaagtatcacatcttcataatccagtaaaaaccagattgtcgaaggaaagaaataatttgctctagtatttcttcttctccttgatacgtggggacagttcgtctgatgtgtaattttcggtcttcttccccattccaaacatgttctgaaacatgcttagcttgcatccataatacatcaccatcgatcgggccaaacttaattttaatatttgaaggacatgacaacgaagatgtcattgatattgcaaaataaaatataa

SEQ ID NO: 10204 - DNA, 1037 bp, Glycine max
  Gm_smallRNAprecursor_3037
tgttcttacctcatgacgtttcataatatccaacttgcaacgaaaaactctcacatcatcattgtcgatatgttgatttccacatcgcagccacctacaaagattaaaatttaatataccctaaaaccattaattcttttgaaatgaaagacgcttttaaaaatgactagcctgtgcccaagtggtttattttctacttggggaggagtcctctttggagccaaagttatacatcgctccgatgcccacatttgtattaagatgcacatacctccgattgatttagttgtataattggtggcactgcacatctctttgtataaaaaagcaagtacgacaggtccccatgcatatgtgctacaatatctaaagtcacgtaaaaattgaaggtaccttagcgaaactttattactgcttttgtcaacgaacaagacacctccaatgaatcttagtatccatgcacgggtaaacctttgtacttgttctttgtcgtcatggttatttatttgtgcaaaatggtgagccagccaacttaatttaaccacactacctttaatttcaccttcttgtggtctgactcccaataattcctcacataaatcagcccaattaagatttgttggaccaattaatggtaaaccctccacacatagacctaacaatacagagacatcttgaagagtaatagtacactcttcgcatctcatgtgaaacggatgtgttttcgacctccatctttctatcaaaacactaattaataagacatttatttttaagtatcacatcttcataatccagtaaaaaccagattgtcgaaggaaagaaataatttgctctagtatttcttcttctccttgatacgtggggacagttcgtctgatgtgtaattttcggtcttcttccccattccaaacatgttctgaaacatgcttagcttgcatccataatacatcaccatcgatcgggccaaacttaattttaatatttgaaggacatgacaacgaagatgtcattgatattgcaaaataaaatataat

SEQ ID NO: 10205 - DNA, 1076 bp, Glycine max
  Gm_smallRNAprecursor_3038
catcagcaacacaatgtacaaccacgagtcggtgtactcgaggttgacatgaccttcgatgacaaagcacaatgtattcgagcaataaaagaatacaacatcagaaatcattttgattgcagaacaatttactctgaccaaagaaggctacacttcgtctgcaagttacatgaaaatggttgtacatggagcttgggcgcatgcaattcaaagagacataacaaatggattatcaagagtatcagaggtcatcacacttgtctcgtgccgatgctcagacaagatcatcgccaactcgacaaacacgtcatatcacagatcatccaaccaattatcaaaacaaacccaactgtctccattaagacattgattgcagagatcaaaacattcatgaattataccccatcctacaagaagacatggttagcaaagcaaaaagcattggagatgatttatggaaactgggaagaatcatatgccaaactgccaaaacttttcggagctttgcaatcttgtgttcccaggactgtggtcgctgctcaaacagaatccttgtatgaggggggagaaatagtaccgggcaaaagattgtttaaacgtgtcttttggtcatttggtccattcattaatggttttgcatattgcaaacccattgtataagtagatggtacatggctttacggaaagtatactggcacactgttgatagttaccacacaagatagagctaaccatatcttcctgattgcctataccattgtagaaggggagacaacttcagcttggggggttttttctaaagaatttgagaagacatgttactccgcaaattaacatttctcttatttcagaccgacacccctcatttataagtgcctacaacaacccaagtaacttatgggtccaggacacatcccatttcttttgcctgcgccacattgcacaaaactttcttcgtggtaactcaaactgcaaacatttaaagaaaccacttattttggctggtgagaatctattttatttatttgttataattttctttcaatcaaattttataacataatacattgattaaa

SEQ ID NO: 10206 - DNA, 1065 bp, Glycine max
  Gm_smallRNAprecursor_3039
caacacaatgtacaaccacgagtcggtgtactcgaggttgacatgaccttcgatgacaaagcacaatgtattcgagcaataaaagaatacaacatcagaaatcattttgattgcagaacaatttactctgaccaaagaaggctacacttcgtctgcaagttacatgaaaatggttgtacatggagcttgggcgcatgcaattcaaagagacataacaaatggattatcaagagtatcagaggtcatcacacttgtctcgtgccgatgctcagacaagatcatcgccaactcgacaaacacgtcatatcacagatcatccaaccaattatcaaaacaaacccaactgtctccattaagacattgattgcagagatcaaaacattcatgaattataccccatcctacaagaagacatggttagcaaagcaaaaagcattggagatgatttatggaaactgggaagaatcatatgccaaactgccaaaacttttcggagctttgcaatcttgtgttcccaggactgtggtcgctgctcaaacagaatccttgtatgaggggggagaaatagtaccgggcaaaagattgtttaaacgtgtcttttggtcatttggtccattcattaatggttttgcatattgcaaacccattgtataagtagatggtacatggctttacggaaagtatactggcacactgttgatagttaccacacaagatagagctaaccatatcttcctgattgcctataccattgtagaaggggagacaacttcagcttggggggttttttctaaagaatttgagaagacatgttactccgcaaattaacatttctcttatttcagaccgacacccctcatttataagtgcctacaacaacccaagtaacttatgggtccaggacacatcccatttcttttgcctgcgccacattgcacaaaactttcttcgtggtaactcaaactgcaaacatttaaagaaaccacttattttggctggtgagaatctattttatttatttgttataattttctttcaatcaaattttataacataatacattga

SEQ ID NO: 10207 - DNA, 1051 bp, Glycine max
  Gm_smallRNAprecursor_3040
tagttaagatatttttgggtgaatatatgttttaaaatctgaattttgtataataatatatttattttagtaaatatttattttgtataatattttgaattttaaaatttttaatttaactattttactaaatataattagtttgtttatgttattagatttaattaaaaatgataaaactaaagcttttaacaatttatttatatatgaacattatactacgtcatcaataaaatatttcaacaatgacatttgtctaaggaaaaactaagatgaggatacattaggacaattatttatgctatgaccatgttgccggcaaagtccacatttttttctacttgctcgttcattttcgtcttcgtccatctcagtaggaatgcgagttgaaacggtcgaccctttgcagtcctctttctccttggatcaggaccccactgatctccttcatattcttgccacattgattcgtgtggcaataaaccaaaggagttgtcgtagatgtgcaaaatgtgttgtaaagtgaatatcatcggcacataggtcatgggatcaacattgacagatttacaggcagccatgacttgagaacacggtaaatgtttagcctgaaattcaccacaatcacacttttgggattgtaacattactctaaaccttccaggtggtctgggtgtttcaagtggggattgagtctctgttataataaaagtgtgattgtgtctgtcgaattcatttacaatgtgtgtattatattcttgttgaccactattgattgcatcgaagacgacttcagaatactgtgagccggagttgatcattgcctgagtttgttgccctctattagcaaagagttgtgcggtcttgaaataggtctcctcaaccaatgatgacaccggcaaatgtcttgtgtttttgaacatggaattaacagactccgacaaattggtagtcatatgtccccaacgtttcccctcatcaaaacattgtacctatttttatttgggtaattgatcaagccattcagctgcacttggcttattcacacgaa

SEQ ID NO: 10208 - DNA, 1167 bp, Glycine max
  Gm_smallRNAprecursor_3041
taataatatatttattttagtaaatatttattttgtataatattttgaattttaaaatttttaatttaactattttactaaatataattagtttgtttatgttattagatttaattaaaaatgataaaactaaagcttttaacaatttatttatatatgaacattatactacgtcatcaataaaatatttcaacaatgacatttgtctaaggaaaaactaagatgaggatacattaggacaattatttatgctatgaccatgttgccggcaaagtccacatttttttctacttgctcgttcattttcgtcttcgtccatctcagtaggaatgcgagttgaaacggtcgaccctttgcagtcctctttctccttggatcaggaccccactgatctccttcatattcttgccacattgattcgtgtggcaataaaccaaaggagttgtcgtagatgtgcaaaatgtgttgtaaagtgaatatcatcggcacataggtcatgggatcaacattgacagatttacaggcagccatgacttgagaacacggtaaatgtttagcctgaaattcaccacaatcacacttttgggattgtaacattactctaaaccttccaggtggtctgggtgtttcaagtggggattgagtctctgttataataaaagtgtgattgtgtctgtcgaattcatttacaatgtgtgtattatattcttgttgaccactattgattgcatcgaagacgacttcagaatactgtgagccggagttgatcattgcctgagtttgttgccctctattagcaaagagttgtgcggtcttgaaataggtctcctcaaccaatgatgacaccggcaaatgtcttgtgtttttgaacatggaattaacagactccgacaaattggtagtcatatgtccccaacgtttcccctcatcaaaacattgtacctatttttatttgggtaattgatcaagccattcagctgcacttggcttattcacacgaatatccccaagatgtcgccagtgcatcttctccgtgtatgcgtaccctataaatatttaatcaatgtattatgttataaaatttgattgaaagaaaattataacgaataaataaaatagattctcactagccaacataagtggtttctttaaatgtttgcagtttga

SEQ ID NO: 10209 - DNA, 1092 bp, Glycine max
  Gm_smallRNAprecursor_3042
aggacaattatttatgctatgaccatgttgccggcaaagtccacatttttttctacttgctcgttcattttcgtcttcgtccatctcagtaggaatgcgagttgaaacggtcgaccctttgcagtcctctttctccttggatcaggaccccactgatctccttcatattcttgccacattgattcgtgtggcaataaaccaaaggagttgtcgtagatgtgcaaaatgtgttgtaaagtgaatatcatcggcacataggtcatgggatcaacattgacagatttacaggcagccatgacttgagaacacggtaaatgtttagcctgaaattcaccacaatcacacttttgggattgtaacattactctaaaccttccaggtggtctgggtgtttcaagtggggattgagtctctgttataataaaagtgtgattgtgtctgtcgaattcatttacaatgtgtgtattatattcttgttgaccactattgattgcatcgaagacgacttcagaatactgtgagccggagttgatcattgcctgagtttgttgccctctattagcaaagagttgtgcggtcttgaaataggtctcctcaaccaatgatgacaccggcaaatgtcttgtgtttttgaacatggaattaacagactccgacaaattggtagtcatatgtccccaacgtttcccctcatcaaaacattgtacctatttttatttgggtaattgatcaagccattcagctgcacttggcttattcacacgaatatccccaagatgtcgccagtgcatcttctccgtgtatgcgtaccctataaatatttaatcaatgtattatgttataaaatttgattgaaagaaaattataacgaataaataaaatagattctcactagccaacataagtggtttctttaaatgtttgcagtttgagttaccacgaagaaagttttgtgcaatgtggcgcaggcaaaagaaatgggatgtgtcctggacccataagttacttgggttgttgtaggcacttataattgaggggtgtcggtctgaaataagagaaatgttaatttgcggagtaacatgtcttctcaaa

SEQ ID NO: 10210 - DNA, 1040 bp, Glycine max
  Gm_smallRNAprecursor_3043
attcacacgaatatccccaagatgtcgccagtgcatcttctccgtgtatgcgtaccctataaatatttaatcaatgtattatgttataaaatttgattgaaagaaaattataacgaataaataaaatagattctcactagccaacataagtggtttctttaaatgtttgcagtttgagttaccacgaagaaagttttgtgcaatgtggcgcaggcaaaagaaatgggatgtgtcctggacccataagttacttgggttgttgtaggcacttataattgaggggtgtcggtctgaaataagagaaatgttaatttgcggagtaacatgtcttctcaaattctttagaaaaaaccctcaagctgaagttgtctccccttctacaatggcatagggaatcgggaagatatggttagctccatcttgtgcggtagctatcaacagtgtgctagtatactttccgtaaagccatgtaccatctacttgtacaatgggtttgcaatatgcaaaaccattaatgcatggaccaaatgaccaaaagacacgtttaaacaatcttttgcccggtactatttctcccccctcaaacaaggattctgtttgagcagcgaccacagtcccgggaacacaagattgcaaagctccgaaaagttttggcaatttggcatatgattctttccagtttccatgaatcatctccaatgctttttgctttgctaaccatgtcttcttgtaggatggggtataattcatgaatgttttgatctctgcaatcaacgtcttgatggagatagttgggtttgttttgacaattggttggatgatctgtgctatgacatgtttgtcgagttggcgatgatcttgtctgagcatcggcacgagacaagtgtgatgacctctgatactcttgataatccatttgttatgcctctttgaattgcatgcgcccaagctccatgtacaaccattttcatgtaacttgcatacgaagtttagccttctttggtcagagtaaattgttttgcaatcaaaatgatttctga

SEQ ID NO: 10211 - DNA, 1190 bp, Glycine max
  Gm_smallRNAprecursor_3044
caacctctaatcttgaggacttatcaggtgaatacgagacttgttggctcaaaaaccatgatagtgatacgaactcctcttccaggcccgaaggaagtaacttgtttccatcccacgaacctatattcaaacgggattggtaatctacggatcattcatgtctaagttatttcttctttgagattttcatgtaatgtcttatgtctgtcttcagttatcactttacgtattaaaataatttttcctataaatttaaattagcaattttcagtttacccacttttactgcagtagttgacatggtaacataactgtcaaaattcataatactttgtcatttatactacactgtttttaaaaattaaatgtctcatcgacaaaactgacatgaaatggacagctcataatctctttattcactcttaaaataattatggacgtttgctgctttaattacaaggaaaaaatcacaatccaaattgacaatactctgcaatttgcacacgtctctaaaaattaaatgtctcacctgcaaaactgccatgaaatggacagctcatcatctctttattcactctgaaaatcatcatgaacgtttgttgctttaattacatgggaaaaatcacagtccaaattaacaacactctgcattatgagctgtccatttcatgtcagttttacaggtgatacatttaatttttagagacgtgtgcaaaactgacatgagatggacaactcataatctctttgttcactctgaaattataatggacgtctgctacatcacttagtagggaaaaagaaacattggattccaatacacatcaacgtggcagaatactcatacaactataaataacacaacacagacacaatacaaacacacaatctcacacaacataatttcacaaaccaaattcaatcttattactatgtcatttttgggagaaacaagcagtcagaccattactaactccagattagctttcatttttccagatggatcaatcagttacaaccaaactgatgtttattttcaaagtctcattccaacaccaatgcgagttcctaacgactgttcttttgatacactcaagcgtagaatgcacaacacccttcaactaaccaacgatcaattactggatgaaatctactaccgacagtcattcatagatgtaggtcaataatat

SEQ ID NO: 10212 - DNA, 1089 bp, Glycine max
  Gm_smallRNAprecursor_3045
atgacgaaatgacgtgagttatgtttaagtaagttttattttatttatatgatatttatacctacatgttattttgtttctctctattagttaggaatctgataactcactccctgttggttgcacattatacataaattaggttagtcttttttaatgaatttaattacttatatcgatacctatattatatttattaagttagaaatatgtagacacaaaataacataacaccatgacataaacttttgcagtttccaattgaaattcacagaattgaaaggaattatagtatattaatactgttcatgtaaactgtactagtatccccattgatttttgtttaggaactaccttagtttttatggtttctcctaaagcttgtaagtatttgttggtataatttgcctgttccattaggctcttaatgtctttagaggttacttcctcaaaaccccaggttttcataaacaaagaaaccgaagcggcggcagagccgcacaggatcggtgaagggagaagagagaaagatgaaaaatagaaatttattgaatttagaaaggagcgcttacaaaaatcttgtttcagagcacctctcttcagaaacctgaaaaatggctaaatgaaagggtgcctcacaacatgcttgaggactccttatatagccaaaaatctaagaccggtagttgccggtagttttgaccgggactatttgactgtttgttacaagacaagtagttttgaccgggactttaatggctacaggacaggtagtattgtccagcattaattacatattaattacaaacagacggttttgtgaccgaaattaaatttaatataaacagataccaaaacaatcatcttcgttttggtaaaagggatcttcttcttcttcttcagcagaacttgtttcttccttctttgaggatgaagcttcttcttcctgctgtaacatttgtagaacttccttcagatttttagctaagacctcctttgatgttgatcctgctaaaaatactgccagatgagacttttggttcaaaaacacagaagtctctggatcagctgctttgaggaattctggat

SEQ ID NO: 10213 - DNA, 1199 bp, Glycine max
  Gm_smallRNAprecursor_3046
ggttgcacattatacataaattaggttagtcttttttaatgaatttaattacttatatcgatacctatattatatttattaagttagaaatatgtagacacaaaataacataacaccatgacataaacttttgcagtttccaattgaaattcacagaattgaaaggaattatagtatattaatactgttcatgtaaactgtactagtatccccattgatttttgtttaggaactaccttagtttttatggtttctcctaaagcttgtaagtatttgttggtataatttgcctgttccattaggctcttaatgtctttagaggttacttcctcaaaaccccaggttttcataaacaaagaaaccgaagcggcggcagagccgcacaggatcggtgaagggagaagagagaaagatgaaaaatagaaatttattgaatttagaaaggagcgcttacaaaaatcttgtttcagagcacctctcttcagaaacctgaaaaatggctaaatgaaagggtgcctcacaacatgcttgaggactccttatatagccaaaaatctaagaccggtagttgccggtagttttgaccgggactatttgactgtttgttacaagacaagtagttttgaccgggactttaatggctacaggacaggtagtattgtccagcattaattacatattaattacaaacagacggttttgtgaccgaaattaaatttaatataaacagataccaaaacaatcatcttcgttttggtaaaagggatcttcttcttcttcttcagcagaacttgtttcttccttctttgaggatgaagcttcttcttcctgctgtaacatttgtagaacttccttcagatttttagctaagacctcctttgatgttgatcctgctaaaaatactgccagatgagacttttggttcaaaaacacagaagtctctggatcagctgctttgaggaattctggatgggattggaaccaaagttttactttttctggatccgctttggatgagtcaaattgtgtccaccattttacaaatgcgtgtctttgtagtgatggatattggtttgtcttttcagtcttgctgtaacgatattgccatgagaatatccatgacagtgcaaagcttgaaaagtatttaagatctgttggaattcgtgattcctgtgaattgtattgtttcttaaattggg

SEQ ID NO: 10214 - DNA, 1154 bp, Glycine max
  Gm_smallRNAprecursor_3047
gttagaaatatgtagacacaaaataacataacaccatgacataaacttttgcagtttccaattgaaattcacagaattgaaaggaattatagtatattaatactgttcatgtaaactgtactagtatccccattgatttttgtttaggaactaccttagtttttatggtttctcctaaagcttgtaagtatttgttggtataatttgcctgttccattaggctcttaatgtctttagaggttacttcctcaaaaccccaggttttcataaacaaagaaaccgaagcggcggcagagccgcacaggatcggtgaagggagaagagagaaagatgaaaaatagaaatttattgaatttagaaaggagcgcttacaaaaatcttgtttcagagcacctctcttcagaaacctgaaaaatggctaaatgaaagggtgcctcacaacatgcttgaggactccttatatagccaaaaatctaagaccggtagttgccggtagttttgaccgggactatttgactgtttgttacaagacaagtagttttgaccgggactttaatggctacaggacaggtagtattgtccagcattaattacatattaattacaaacagacggttttgtgaccgaaattaaatttaatataaacagataccaaaacaatcatcttcgttttggtaaaagggatcttcttcttcttcttcagcagaacttgtttcttccttctttgaggatgaagcttcttcttcctgctgtaacatttgtagaacttccttcagatttttagctaagacctcctttgatgttgatcctgctaaaaatactgccagatgagacttttggttcaaaaacacagaagtctctggatcagctgctttgaggaattctggatgggattggaaccaaagttttactttttctggatccgctttggatgagtcaaattgtgtccaccattttacaaatgcgtgtctttgtagtgatggatattggtttgtcttttcagtcttgctgtaacgatattgccatgagaatatccatgacagtgcaaagcttgaaaagtatttaagatctgttggaattcgtgattcctgtgaattgtattgtttcttaaattgggcaaatccttgttggaccgtttctgggaatatctctgg

SEQ ID NO: 10215 - DNA, 1057 bp, Glycine max
  Gm_smallRNAprecursor_3048
ttaggaactaccttagtttttatggtttctcctaaagcttgtaagtatttgttggtataatttgcctgttccattaggctcttaatgtctttagaggttacttcctcaaaaccccaggttttcataaacaaagaaaccgaagcggcggcagagccgcacaggatcggtgaagggagaagagagaaagatgaaaaatagaaatttattgaatttagaaaggagcgcttacaaaaatcttgtttcagagcacctctcttcagaaacctgaaaaatggctaaatgaaagggtgcctcacaacatgcttgaggactccttatatagccaaaaatctaagaccggtagttgccggtagttttgaccgggactatttgactgtttgttacaagacaagtagttttgaccgggactttaatggctacaggacaggtagtattgtccagcattaattacatattaattacaaacagacggttttgtgaccgaaattaaatttaatataaacagataccaaaacaatcatcttcgttttggtaaaagggatcttcttcttcttcttcagcagaacttgtttcttccttctttgaggatgaagcttcttcttcctgctgtaacatttgtagaacttccttcagatttttagctaagacctcctttgatgttgatcctgctaaaaatactgccagatgagacttttggttcaaaaacacagaagtctctggatcagctgctttgaggaattctggatgggattggaaccaaagttttactttttctggatccgctttggatgagtcaaattgtgtccaccattttacaaatgcgtgtctttgtagtgatggatattggtttgtcttttcagtcttgctgtaacgatattgccatgagaatatccatgacagtgcaaagcttgaaaagtatttaagatctgttggaattcgtgattcctgtgaattgtattgtttcttaaattgggcaaatccttgttggaccgtttctgggaatatctctgggattggtccaaagaagtcccaccattgcaaaaaccaattgggaaaa

SEQ ID NO: 10216 - DNA, 1058 bp, Glycine max
  Gm_smallRNAprecursor_3049
ttaggaactaccttagtttttatggtttctcctaaagcttgtaagtatttgttggtataatttgcctgttccattaggctcttaatgtctttagaggttacttcctcaaaaccccaggttttcataaacaaagaaaccgaagcggcggcagagccgcacaggatcggtgaagggagaagagagaaagatgaaaaatagaaatttattgaatttagaaaggagcgcttacaaaaatcttgtttcagagcacctctcttcagaaacctgaaaaatggctaaatgaaagggtgcctcacaacatgcttgaggactccttatatagccaaaaatctaagaccggtagttgccggtagttttgaccgggactatttgactgtttgttacaagacaagtagttttgaccgggactttaatggctacaggacaggtagtattgtccagcattaattacatattaattacaaacagacggttttgtgaccgaaattaaatttaatataaacagataccaaaacaatcatcttcgttttggtaaaagggatcttcttcttcttcttcagcagaacttgtttcttccttctttgaggatgaagcttcttcttcctgctgtaacatttgtagaacttccttcagatttttagctaagacctcctttgatgttgatcctgctaaaaatactgccagatgagacttttggttcaaaaacacagaagtctctggatcagctgctttgaggaattctggatgggattggaaccaaagttttactttttctggatccgctttggatgagtcaaattgtgtccaccattttacaaatgcgtgtctttgtagtgatggatattggtttgtcttttcagtcttgctgtaacgatattgccatgagaatatccatgacagtgcaaagcttgaaaagtatttaagatctgttggaattcgtgattcctgtgaattgtattgtttcttaaattgggcaaatccttgttggaccgtttctgggaatatctctgggattggtccaaagaagtcccaccattgcaaaaaccaattgggaaaat

SEQ ID NO: 10217 - DNA, 1083 bp, Glycine max
  Gm_smallRNAprecursor_3050
ttaggaactaccttagtttttatggtttctcctaaagcttgtaagtatttgttggtataatttgcctgttccattaggctcttaatgtctttagaggttacttcctcaaaaccccaggttttcataaacaaagaaaccgaagcggcggcagagccgcacaggatcggtgaagggagaagagagaaagatgaaaaatagaaatttattgaatttagaaaggagcgcttacaaaaatcttgtttcagagcacctctcttcagaaacctgaaaaatggctaaatgaaagggtgcctcacaacatgcttgaggactccttatatagccaaaaatctaagaccggtagttgccggtagttttgaccgggactatttgactgtttgttacaagacaagtagttttgaccgggactttaatggctacaggacaggtagtattgtccagcattaattacatattaattacaaacagacggttttgtgaccgaaattaaatttaatataaacagataccaaaacaatcatcttcgttttggtaaaagggatcttcttcttcttcttcagcagaacttgtttcttccttctttgaggatgaagcttcttcttcctgctgtaacatttgtagaacttccttcagatttttagctaagacctcctttgatgttgatcctgctaaaaatactgccagatgagacttttggttcaaaaacacagaagtctctggatcagctgctttgaggaattctggatgggattggaaccaaagttttactttttctggatccgctttggatgagtcaaattgtgtccaccattttacaaatgcgtgtctttgtagtgatggatattggtttgtcttttcagtcttgctgtaacgatattgccatgagaatatccatgacagtgcaaagcttgaaaagtatttaagatctgttggaattcgtgattcctgtgaattgtattgtttcttaaattgggcaaatccttgttggaccgtttctgggaatatctctgggattggtccaaagaagtcccaccattgcaaaaaccaattgggaaaattgtaaattgtgttggtcttgaaata

SEQ ID NO: 10218 - DNA, 1056 bp, Glycine max
  Gm_smallRNAprecursor_3051
taggaactaccttagtttttatggtttctcctaaagcttgtaagtatttgttggtataatttgcctgttccattaggctcttaatgtctttagaggttacttcctcaaaaccccaggttttcataaacaaagaaaccgaagcggcggcagagccgcacaggatcggtgaagggagaagagagaaagatgaaaaatagaaatttattgaatttagaaaggagcgcttacaaaaatcttgtttcagagcacctctcttcagaaacctgaaaaatggctaaatgaaagggtgcctcacaacatgcttgaggactccttatatagccaaaaatctaagaccggtagttgccggtagttttgaccgggactatttgactgtttgttacaagacaagtagttttgaccgggactttaatggctacaggacaggtagtattgtccagcattaattacatattaattacaaacagacggttttgtgaccgaaattaaatttaatataaacagataccaaaacaatcatcttcgttttggtaaaagggatcttcttcttcttcttcagcagaacttgtttcttccttctttgaggatgaagcttcttcttcctgctgtaacatttgtagaacttccttcagatttttagctaagacctcctttgatgttgatcctgctaaaaatactgccagatgagacttttggttcaaaaacacagaagtctctggatcagctgctttgaggaattctggatgggattggaaccaaagttttactttttctggatccgctttggatgagtcaaattgtgtccaccattttacaaatgcgtgtctttgtagtgatggatattggtttgtcttttcagtcttgctgtaacgatattgccatgagaatatccatgacagtgcaaagcttgaaaagtatttaagatctgttggaattcgtgattcctgtgaattgtattgtttcttaaattgggcaaatccttgttggaccgtttctgggaatatctctgggattggtccaaagaagtcccaccattgcaaaaaccaattgggaaaa

SEQ ID NO: 10219 - DNA, 1056 bp, Glycine max; identical to SEQ ID NO: 10218
  Gm_smallRNAprecursor_3052

SEQ ID NO: 10220 - DNA, 1057 bp, Glycine max
  Gm_smallRNAprecursor_3053
taggaactaccttagtttttatggtttctcctaaagcttgtaagtatttgttggtataatttgcctgttccattaggctcttaatgtctttagaggttacttcctcaaaaccccaggttttcataaacaaagaaaccgaagcggcggcagagccgcacaggatcggtgaagggagaagagagaaagatgaaaaatagaaatttattgaatttagaaaggagcgcttacaaaaatcttgtttcagagcacctctcttcagaaacctgaaaaatggctaaatgaaagggtgcctcacaacatgcttgaggactccttatatagccaaaaatctaagaccggtagttgccggtagttttgaccgggactatttgactgtttgttacaagacaagtagttttgaccgggactttaatggctacaggacaggtagtattgtccagcattaattacatattaattacaaacagacggttttgtgaccgaaattaaatttaatataaacagataccaaaacaatcatcttcgttttggtaaaagggatcttcttcttcttcttcagcagaacttgtttcttccttctttgaggatgaagcttcttcttcctgctgtaacatttgtagaacttccttcagatttttagctaagacctcctttgatgttgatcctgctaaaaatactgccagatgagacttttggttcaaaaacacagaagtctctggatcagctgctttgaggaattctggatgggattggaaccaaagttttactttttctggatccgctttggatgagtcaaattgtgtccaccattttacaaatgcgtgtctttgtagtgatggatattggtttgtcttttcagtcttgctgtaacgatattgccatgagaatatccatgacagtgcaaagcttgaaaagtatttaagatctgttggaattcgtgattcctgtgaattgtattgtttcttaaattgggcaaatccttgttggaccgtttctgggaatatctctgggattggtccaaagaagtcccaccattgcaaaaaccaattgggaaaat

SEQ ID NO: 10221 - DNA, 1059 bp, Glycine max
  Gm_smallRNAprecursor_3054
taggaactaccttagtttttatggtttctcctaaagcttgtaagtatttgttggtataatttgcctgttccattaggctcttaatgtctttagaggttacttcctcaaaaccccaggttttcataaacaaagaaaccgaagcggcggcagagccgcacaggatcggtgaagggagaagagagaaagatgaaaaatagaaatttattgaatttagaaaggagcgcttacaaaaatcttgtttcagagcacctctcttcagaaacctgaaaaatggctaaatgaaagggtgcctcacaacatgcttgaggactccttatatagccaaaaatctaagaccggtagttgccggtagttttgaccgggactatttgactgtttgttacaagacaagtagttttgaccgggactttaatggctacaggacaggtagtattgtccagcattaattacatattaattacaaacagacggttttgtgaccgaaattaaatttaatataaacagataccaaaacaatcatcttcgttttggtaaaagggatcttcttcttcttcttcagcagaacttgtttcttccttctttgaggatgaagcttcttcttcctgctgtaacatttgtagaacttccttcagatttttagctaagacctcctttgatgttgatcctgctaaaaatactgccagatgagacttttggttcaaaaacacagaagtctctggatcagctgctttgaggaattctggatgggattggaaccaaagttttactttttctggatccgctttggatgagtcaaattgtgtccaccattttacaaatgcgtgtctttgtagtgatggatattggtttgtcttttcagtcttgctgtaacgatattgccatgagaatatccatgacagtgcaaagcttgaaaagtatttaagatctgttggaattcgtgattcctgtgaattgtattgtttcttaaattgggcaaatccttgttggaccgtttctgggaatatctctgggattggtccaaagaagtcccaccattgcaaaaaccaattgggaaaattg

SEQ ID NO: 10222 - DNA, 1059 bp, Glycine max; identical to SEQ ID NO: 10221
  Gm_smallRNAprecursor_3055

SEQ ID NO: 10223 - DNA, 1082 bp, Glycine max
  Gm_smallRNAprecursor_3056
taggaactaccttagtttttatggtttctcctaaagcttgtaagtatttgttggtataatttgcctgttccattaggctcttaatgtctttagaggttacttcctcaaaaccccaggttttcataaacaaagaaaccgaagcggcggcagagccgcacaggatcggtgaagggagaagagagaaagatgaaaaatagaaatttattgaatttagaaaggagcgcttacaaaaatcttgtttcagagcacctctcttcagaaacctgaaaaatggctaaatgaaagggtgcctcacaacatgcttgaggactccttatatagccaaaaatctaagaccggtagttgccggtagttttgaccgggactatttgactgtttgttacaagacaagtagttttgaccgggactttaatggctacaggacaggtagtattgtccagcattaattacatattaattacaaacagacggttttgtgaccgaaattaaatttaatataaacagataccaaaacaatcatcttcgttttggtaaaagggatcttcttcttcttcttcagcagaacttgtttcttccttctttgaggatgaagcttcttcttcctgctgtaacatttgtagaacttccttcagatttttagctaagacctcctttgatgttgatcctgctaaaaatactgccagatgagacttttggttcaaaaacacagaagtctctggatcagctgctttgaggaattctggatgggattggaaccaaagttttactttttctggatccgctttggatgagtcaaattgtgtccaccattttacaaatgcgtgtctttgtagtgatggatattggtttgtcttttcagtcttgctgtaacgatattgccatgagaatatccatgacagtgcaaagcttgaaaagtatttaagatctgttggaattcgtgattcctgtgaattgtattgtttcttaaattgggcaaatccttgttggaccgtttctgggaatatctctgggattggtccaaagaagtcccaccattgcaaaaaccaattgggaaaattgtaaattgtgttggtcttgaaata

SEQ ID NO: 10224 - DNA, 1055 bp, Glycine max
  Gm_smallRNAprecursor_3057
aggaactaccttagtttttatggtttctcctaaagcttgtaagtatttgttggtataatttgcctgttccattaggctcttaatgtctttagaggttacttcctcaaaaccccaggttttcataaacaaagaaaccgaagcggcggcagagccgcacaggatcggtgaagggagaagagagaaagatgaaaaatagaaatttattgaatttagaaaggagcgcttacaaaaatcttgtttcagagcacctctcttcagaaacctgaaaaatggctaaatgaaagggtgcctcacaacatgcttgaggactccttatatagccaaaaatctaagaccggtagttgccggtagttttgaccgggactatttgactgtttgttacaagacaagtagttttgaccgggactttaatggctacaggacaggtagtattgtccagcattaattacatattaattacaaacagacggttttgtgaccgaaattaaatttaatataaacagataccaaaacaatcatcttcgttttggtaaaagggatcttcttcttcttcttcagcagaacttgtttcttccttctttgaggatgaagcttcttcttcctgctgtaacatttgtagaacttccttcagatttttagctaagacctcctttgatgttgatcctgctaaaaatactgccagatgagacttttggttcaaaaacacagaagtctctggatcagctgctttgaggaattctggatgggattggaaccaaagttttactttttctggatccgctttggatgagtcaaattgtgtccaccattttacaaatgcgtgtctttgtagtgatggatattggtttgtcttttcagtcttgctgtaacgatattgccatgagaatatccatgacagtgcaaagcttgaaaagtatttaagatctgttggaattcgtgattcctgtgaattgtattgtttcttaaattgggcaaatccttgttggaccgtttctgggaatatctctgggattggtccaaagaagtcccaccattgcaaaaaccaattgggaaaa

SEQ ID NO: 10225 - DNA, 1058 bp, Glycine max
  Gm_smallRNAprecursor_3058
aggaactaccttagtttttatggtttctcctaaagcttgtaagtatttgttggtataatttgcctgttccattaggctcttaatgtctttagaggttacttcctcaaaaccccaggttttcataaacaaagaaaccgaagcggcggcagagccgcacaggatcggtgaagggagaagagagaaagatgaaaaatagaaatttattgaatttagaaaggagcgcttacaaaaatcttgtttcagagcacctctcttcagaaacctgaaaaatggctaaatgaaagggtgcctcacaacatgcttgaggactccttatatagccaaaaatctaagaccggtagttgccggtagttttgaccgggactatttgactgtttgttacaagacaagtagttttgaccgggactttaatggctacaggacaggtagtattgtccagcattaattacatattaattacaaacagacggttttgtgaccgaaattaaatttaatataaacagataccaaaacaatcatcttcgttttggtaaaagggatcttcttcttcttcttcagcagaacttgtttcttccttctttgaggatgaagcttcttcttcctgctgtaacatttgtagaacttccttcagatttttagctaagacctcctttgatgttgatcctgctaaaaatactgccagatgagacttttggttcaaaaacacagaagtctctggatcagctgctttgaggaattctggatgggattggaaccaaagttttactttttctggatccgctttggatgagtcaaattgtgtccaccattttacaaatgcgtgtctttgtagtgatggatattggtttgtcttttcagtcttgctgtaacgatattgccatgagaatatccatgacagtgcaaagcttgaaaagtatttaagatctgttggaattcgtgattcctgtgaattgtattgtttcttaaattgggcaaatccttgttggaccgtttctgggaatatctctgggattggtccaaagaagtcccaccattgcaaaaaccaattgggaaaattg

SEQ ID NO: 10226 - DNA, 1058 bp, Glycine max; identical to SEQ ID NO: 10225
  Gm_smallRNAprecursor_3059

SEQ ID NO: 10227 - DNA, 1081 bp, Glycine max
  Gm_smallRNAprecursor_3060
aggaactaccttagtttttatggtttctcctaaagcttgtaagtatttgttggtataatttgcctgttccattaggctcttaatgtctttagaggttacttcctcaaaaccccaggttttcataaacaaagaaaccgaagcggcggcagagccgcacaggatcggtgaagggagaagagagaaagatgaaaaatagaaatttattgaatttagaaaggagcgcttacaaaaatcttgtttcagagcacctctcttcagaaacctgaaaaatggctaaatgaaagggtgcctcacaacatgcttgaggactccttatatagccaaaaatctaagaccggtagttgccggtagttttgaccgggactatttgactgtttgttacaagacaagtagttttgaccgggactttaatggctacaggacaggtagtattgtccagcattaattacatattaattacaaacagacggttttgtgaccgaaattaaatttaatataaacagataccaaaacaatcatcttcgttttggtaaaagggatcttcttcttcttcttcagcagaacttgtttcttccttctttgaggatgaagcttcttcttcctgctgtaacatttgtagaacttccttcagatttttagctaagacctcctttgatgttgatcctgctaaaaatactgccagatgagacttttggttcaaaaacacagaagtctctggatcagctgctttgaggaattctggatgggattggaaccaaagttttactttttctggatccgctttggatgagtcaaattgtgtccaccattttacaaatgcgtgtctttgtagtgatggatattggtttgtcttttcagtcttgctgtaacgatattgccatgagaatatccatgacagtgcaaagcttgaaaagtatttaagatctgttggaattcgtgattcctgtgaattgtattgtttcttaaattgggcaaatccttgttggaccgtttctgggaatatctctgggattggtccaaagaagtcccaccattgcaaaaaccaattgggaaaattgtaaattgtgttggtcttgaaata

SEQ ID NO: 10228 - DNA, 1188 bp, Glycine max
  Gm_smallRNAprecursor_3061
ccttagtttttatggtttctcctaaagcttgtaagtatttgttggtataatttgcctgttccattaggctcttaatgtctttagaggttacttcctcaaaaccccaggttttcataaacaaagaaaccgaagcggcggcagagccgcacaggatcggtgaagggagaagagagaaagatgaaaaatagaaatttattgaatttagaaaggagcgcttacaaaaatcttgtttcagagcacctctcttcagaaacctgaaaaatggctaaatgaaagggtgcctcacaacatgcttgaggactccttatatagccaaaaatctaagaccggtagttgccggtagttttgaccgggactatttgactgtttgttacaagacaagtagttttgaccgggactttaatggctacaggacaggtagtattgtccagcattaattacatattaattacaaacagacggttttgtgaccgaaattaaatttaatataaacagataccaaaacaatcatcttcgttttggtaaaagggatcttcttcttcttcttcagcagaacttgtttcttccttctttgaggatgaagcttcttcttcctgctgtaacatttgtagaacttccttcagatttttagctaagacctcctttgatgttgatcctgctaaaaatactgccagatgagacttttggttcaaaaacacagaagtctctggatcagctgctttgaggaattctggatgggattggaaccaaagttttactttttctggatccgctttggatgagtcaaattgtgtccaccattttacaaatgcgtgtctttgtagtgatggatattggtttgtcttttcagtcttgctgtaacgatattgccatgagaatatccatgacagtgcaaagcttgaaaagtatttaagatctgttggaattcgtgattcctgtgaattgtattgtttcttaaattgggcaaatccttgttggaccgtttctgggaatatctctgggattggtccaaagaagtcccaccattgcaaaaaccaattgggaaaattgtaaattgtgttggtcttgaaatatatcagccatgaatgcttgaagcgggtattttggtgccaaaataccttagtccaagcatcaacgtaatcccaataggtataacctaccggatcaaatggaactgaaaatctcttt

SEQ ID NO: 10229 - DNA, 1142 bp, Glycine max
  Gm_smallRNAprecursor_3062
ataatttgcctgttccattaggctcttaatgtctttagaggttacttcctcaaaaccccaggttttcataaacaaagaaaccgaagcggcggcagagccgcacaggatcggtgaagggagaagagagaaagatgaaaaatagaaatttattgaatttagaaaggagcgcttacaaaaatcttgtttcagagcacctctcttcagaaacctgaaaaatggctaaatgaaagggtgcctcacaacatgcttgaggactccttatatagccaaaaatctaagaccggtagttgccggtagttttgaccgggactatttgactgtttgttacaagacaagtagttttgaccgggactttaatggctacaggacaggtagtattgtccagcattaattacatattaattacaaacagacggttttgtgaccgaaattaaatttaatataaacagataccaaaacaatcatcttcgttttggtaaaagggatcttcttcttcttcttcagcagaacttgtttcttccttctttgaggatgaagcttcttcttcctgctgtaacatttgtagaacttccttcagatttttagctaagacctcctttgatgttgatcctgctaaaaatactgccagatgagacttttggttcaaaaacacagaagtctctggatcagctgctttgaggaattctggatgggattggaaccaaagttttactttttctggatccgctttggatgagtcaaattgtgtccaccattttacaaatgcgtgtctttgtagtgatggatattggtttgtcttttcagtcttgctgtaacgatattgccatgagaatatccatgacagtgcaaagcttgaaaagtatttaagatctgttggaattcgtgattcctgtgaattgtattgtttcttaaattgggcaaatccttgttggaccgtttctgggaatatctctgggattggtccaaagaagtcccaccattgcaaaaaccaattgggaaaattgtaaattgtgttggtcttgaaatatatcagccatgaatgcttgaagcgggtattttggtgccaaaataccttagtccaagcatcaacgtaatcccaataggtataacctaccggatcaaatggaactgaaaatctcttt

SEQ ID NO: 10230 - DNA, 1141 bp, Glycine max
  Gm_smallRNAprecursor_3063
taatttgcctgttccattaggctcttaatgtctttagaggttacttcctcaaaaccccaggttttcataaacaaagaaaccgaagcggcggcagagccgcacaggatcggtgaagggagaagagagaaagatgaaaaatagaaatttattgaatttagaaaggagcgcttacaaaaatcttgtttcagagcacctctcttcagaaacctgaaaaatggctaaatgaaagggtgcctcacaacatgcttgaggactccttatatagccaaaaatctaagaccggtagttgccggtagttttgaccgggactatttgactgtttgttacaagacaagtagttttgaccgggactttaatggctacaggacaggtagtattgtccagcattaattacatattaattacaaacagacggttttgtgaccgaaattaaatttaatataaacagataccaaaacaatcatcttcgttttggtaaaagggatcttcttcttcttcttcagcagaacttgtttcttccttctttgaggatgaagcttcttcttcctgctgtaacatttgtagaacttccttcagatttttagctaagacctcctttgatgttgatcctgctaaaaatactgccagatgagacttttggttcaaaaacacagaagtctctggatcagctgctttgaggaattctggatgggattggaaccaaagttttactttttctggatccgctttggatgagtcaaattgtgtccaccattttacaaatgcgtgtctttgtagtgatggatattggtttgtcttttcagtcttgctgtaacgatattgccatgagaatatccatgacagtgcaaagcttgaaaagtatttaagatctgttggaattcgtgattcctgtgaattgtattgtttcttaaattgggcaaatccttgttggaccgtttctgggaatatctctgggattggtccaaagaagtcccaccattgcaaaaaccaattgggaaaattgtaaattgtgttggtcttgaaatatatcagccatgaatgcttgaagcgggtattttggtgccaaaataccttagtccaagcatcaacgtaatcccaataggtataacctaccggatcaaatggaactgaaaatctcttt

SEQ ID NO: 10231 - DNA, 1173 bp, Glycine max
  Gm_smallRNAprecursor_3064
aaaggagcgcttacaaaaatcttgtttcagagcacctctcttcagaaacctgaaaaatggctaaatgaaagggtgcctcacaacatgcttgaggactccttatatagccaaaaatctaagaccggtagttgccggtagttttgaccgggactatttgactgtttgttacaagacaagtagttttgaccgggactttaatggctacaggacaggtagtattgtccagcattaattacatattaattacaaacagacggttttgtgaccgaaattaaatttaatataaacagataccaaaacaatcatcttcgttttggtaaaagggatcttcttcttcttcttcagcagaacttgtttcttccttctttgaggatgaagcttcttcttcctgctgtaacatttgtagaacttccttcagatttttagctaagacctcctttgatgttgatcctgctaaaaatactgccagatgagacttttggttcaaaaacacagaagtctctggatcagctgctttgaggaattctggatgggattggaaccaaagttttactttttctggatccgctttggatgagtcaaattgtgtccaccattttacaaatgcgtgtctttgtagtgatggatattggtttgtcttttcagtcttgctgtaacgatattgccatgagaatatccatgacagtgcaaagcttgaaaagtatttaagatctgttggaattcgtgattcctgtgaattgtattgtttcttaaattgggcaaatccttgttggaccgtttctgggaatatctctgggattggtccaaagaagtcccaccattgcaaaaaccaattgggaaaattgtaaattgtgttggtcttgaaatatatcagccatgaatgcttgaagcgggtattttggtgccaaaataccttagtccaagcatcaacgtaatcccaataggtataacctaccggatcaaatggaactgaaaatctctttcctttgttcaagtccgaaccaaagtgtcttggttgaagaacttttagtatttggatggttgagtgggtgtttaaggtttggtcttttggatctttgaaatgtttgatagatactgagtttgaatctactaaaatcaattcataaaaagttcttgtcttcaggatggtggttggtttgtagtgaaatcctg

SEQ ID NO: 10232 - DNA, 1078 bp, Glycine max
  Gm_smallRNAprecursor_3065
cttacaaaaatcttgtttcagagcacctctcttcagaaacctgaaaaatggctaaatgaaagggtgcctcacaacatgcttgaggactccttatatagccaaaaatctaagaccggtagttgccggtagttttgaccgggactatttgactgtttgttacaagacaagtagttttgaccgggactttaatggctacaggacaggtagtattgtccagcattaattacatattaattacaaacagacggttttgtgaccgaaattaaatttaatataaacagataccaaaacaatcatcttcgttttggtaaaagggatcttcttcttcttcttcagcagaacttgtttcttccttctttgaggatgaagcttcttcttcctgctgtaacatttgtagaacttccttcagatttttagctaagacctcctttgatgttgatcctgctaaaaatactgccagatgagacttttggttcaaaaacacagaagtctctggatcagctgctttgaggaattctggatgggattggaaccaaagttttactttttctggatccgctttggatgagtcaaattgtgtccaccattttacaaatgcgtgtctttgtagtgatggatattggtttgtcttttcagtcttgctgtaacgatattgccatgagaatatccatgacagtgcaaagcttgaaaagtatttaagatctgttggaattcgtgattcctgtgaattgtattgtttcttaaattgggcaaatccttgttggaccgtttctgggaatatctctgggattggtccaaagaagtcccaccattgcaaaaaccaattgggaaaattgtaaattgtgttggtcttgaaatatatcagccatgaatgcttgaagcgggtattttggtgccaaaataccttagtccaagcatcaacgtaatcccaataggtataacctaccggatcaaatggaactgaaaatctctttcctttgttcaagtccgaaccaaagtgtcttggttgaagaacttttagtatttggatggttgagtgggtgtttaaggtttggtcttttggatctttgaaatgttt

SEQ ID NO: 10233 - DNA, 1164 bp, Glycine max
  Gm_smallRNAprecursor_3066
cttacaaaaatcttgtttcagagcacctctcttcagaaacctgaaaaatggctaaatgaaagggtgcctcacaacatgcttgaggactccttatatagccaaaaatctaagaccggtagttgccggtagttttgaccgggactatttgactgtttgttacaagacaagtagttttgaccgggactttaatggctacaggacaggtagtattgtccagcattaattacatattaattacaaacagacggttttgtgaccgaaattaaatttaatataaacagataccaaaacaatcatcttcgttttggtaaaagggatcttcttcttcttcttcagcagaacttgtttcttccttctttgaggatgaagcttcttcttcctgctgtaacatttgtagaacttccttcagatttttagctaagacctcctttgatgttgatcctgctaaaaatactgccagatgagacttttggttcaaaaacacagaagtctctggatcagctgctttgaggaattctggatgggattggaaccaaagttttactttttctggatccgctttggatgagtcaaattgtgtccaccattttacaaatgcgtgtctttgtagtgatggatattggtttgtcttttcagtcttgctgtaacgatattgccatgagaatatccatgacagtgcaaagcttgaaaagtatttaagatctgttggaattcgtgattcctgtgaattgtattgtttcttaaattgggcaaatccttgttggaccgtttctgggaatatctctgggattggtccaaagaagtcccaccattgcaaaaaccaattgggaaaattgtaaattgtgttggtcttgaaatatatcagccatgaatgcttgaagcgggtattttggtgccaaaataccttagtccaagcatcaacgtaatcccaataggtataacctaccggatcaaatggaactgaaaatctctttcctttgttcaagtccgaaccaaagtgtcttggttgaagaacttttagtatttggatggttgagtgggtgtttaaggtttggtcttttggatctttgaaatgtttgatagatactgagtttgaatctactaaaatcaattcataaaaagttcttgtcttcaggatggtggttggtttgtagtgaaatcctg

SEQ ID NO: 10234 - DNA, 1077 bp, Glycine max
  Gm_smallRNAprecursor_3067
ttacaaaaatcttgtttcagagcacctctcttcagaaacctgaaaaatggctaaatgaaagggtgcctcacaacatgcttgaggactccttatatagccaaaaatctaagaccggtagttgccggtagttttgaccgggactatttgactgtttgttacaagacaagtagttttgaccgggactttaatggctacaggacaggtagtattgtccagcattaattacatattaattacaaacagacggttttgtgaccgaaattaaatttaatataaacagataccaaaacaatcatcttcgttttggtaaaagggatcttcttcttcttcttcagcagaacttgtttcttccttctttgaggatgaagcttcttcttcctgctgtaacatttgtagaacttccttcagatttttagctaagacctcctttgatgttgatcctgctaaaaatactgccagatgagacttttggttcaaaaacacagaagtctctggatcagctgctttgaggaattctggatgggattggaaccaaagttttactttttctggatccgctttggatgagtcaaattgtgtccaccattttacaaatgcgtgtctttgtagtgatggatattggtttgtcttttcagtcttgctgtaacgatattgccatgagaatatccatgacagtgcaaagcttgaaaagtatttaagatctgttggaattcgtgattcctgtgaattgtattgtttcttaaattgggcaaatccttgttggaccgtttctgggaatatctctgggattggtccaaagaagtcccaccattgcaaaaaccaattgggaaaattgtaaattgtgttggtcttgaaatatatcagccatgaatgcttgaagcgggtattttggtgccaaaataccttagtccaagcatcaacgtaatcccaataggtataacctaccggatcaaatggaactgaaaatctctttcctttgttcaagtccgaaccaaagtgtcttggttgaagaacttttagtatttggatggttgagtgggtgtttaaggtttggtcttttggatctttgaaatgttt

SEQ ID NO: 10235 - DNA, 1163 bp, Glycine max
  Gm_smallRNAprecursor_3068
ttacaaaaatcttgtttcagagcacctctcttcagaaacctgaaaaatggctaaatgaaagggtgcctcacaacatgcttgaggactccttatatagccaaaaatctaagaccggtagttgccggtagttttgaccgggactatttgactgtttgttacaagacaagtagttttgaccgggactttaatggctacaggacaggtagtattgtccagcattaattacatattaattacaaacagacggttttgtgaccgaaattaaatttaatataaacagataccaaaacaatcatcttcgttttggtaaaagggatcttcttcttcttcttcagcagaacttgtttcttccttctttgaggatgaagcttcttcttcctgctgtaacatttgtagaacttccttcagatttttagctaagacctcctttgatgttgatcctgctaaaaatactgccagatgagacttttggttcaaaaacacagaagtctctggatcagctgctttgaggaattctggatgggattggaaccaaagttttactttttctggatccgctttggatgagtcaaattgtgtccaccattttacaaatgcgtgtctttgtagtgatggatattggtttgtcttttcagtcttgctgtaacgatattgccatgagaatatccatgacagtgcaaagcttgaaaagtatttaagatctgttggaattcgtgattcctgtgaattgtattgtttcttaaattgggcaaatccttgttggaccgtttctgggaatatctctgggattggtccaaagaagtcccaccattgcaaaaaccaattgggaaaattgtaaattgtgttggtcttgaaatatatcagccatgaatgcttgaagcgggtattttggtgccaaaataccttagtccaagcatcaacgtaatcccaataggtataacctaccggatcaaatggaactgaaaatctctttcctttgttcaagtccgaaccaaagtgtcttggttgaagaacttttagtatttggatggttgagtgggtgtttaaggtttggtcttttggatctttgaaatgtttgatagatactgagtttgaatctactaaaatcaattcataaaaagttcttgtcttcaggatggtggttggtttgtagtgaaatcctg

SEQ ID NO: 10236 - DNA, 1131 bp, Glycine max
  Gm_smallRNAprecursor_3069
acaagtagttttgaccgggactttaatggctacaggacaggtagtattgtccagcattaattacatattaattacaaacagacggttttgtgaccgaaattaaatttaatataaacagataccaaaacaatcatcttcgttttggtaaaagggatcttcttcttcttcttcagcagaacttgtttcttccttctttgaggatgaagcttcttcttcctgctgtaacatttgtagaacttccttcagatttttagctaagacctcctttgatgttgatcctgctaaaaatactgccagatgagacttttggttcaaaaacacagaagtctctggatcagctgctttgaggaattctggatgggattggaaccaaagttttactttttctggatccgctttggatgagtcaaattgtgtccaccattttacaaatgcgtgtctttgtagtgatggatattggtttgtcttttcagtcttgctgtaacgatattgccatgagaatatccatgacagtgcaaagcttgaaaagtatttaagatctgttggaattcgtgattcctgtgaattgtattgtttcttaaattgggcaaatccttgttggaccgtttctgggaatatctctgggattggtccaaagaagtcccaccattgcaaaaaccaattgggaaaattgtaaattgtgttggtcttgaaatatatcagccatgaatgcttgaagcgggtattttggtgccaaaataccttagtccaagcatcaacgtaatcccaataggtataacctaccggatcaaatggaactgaaaatctctttcctttgttcaagtccgaaccaaagtgtcttggttgaagaacttttagtatttggatggttgagtgggtgtttaaggtttggtcttttggatctttgaaatgtttgatagatactgagtttgaatctactaaaatcaattcataaaaagttcttgtcttcaggatggtggttggtttgtagtgaaatcctggtgggaaagccttggccgtcgccttgaagggatttttgtcccaaaattcaggttccatctgcaaaacagttaacaatttatttttataaatataattgttagtttgtttggtaggtggtgtttgagcttt

SEQ ID NO: 10237 - DNA, 1080 bp, Glycine max
  Gm_smallRNAprecursor_3070
ttcagcagaacttgtttcttccttctttgaggatgaagcttcttcttcctgctgtaacatttgtagaacttccttcagatttttagctaagacctcctttgatgttgatcctgctaaaaatactgccagatgagacttttggttcaaaaacacagaagtctctggatcagctgctttgaggaattctggatgggattggaaccaaagttttactttttctggatccgctttggatgagtcaaattgtgtccaccattttacaaatgcgtgtctttgtagtgatggatattggtttgtcttttcagtcttgctgtaacgatattgccatgagaatatccatgacagtgcaaagcttgaaaagtatttaagatctgttggaattcgtgattcctgtgaattgtattgtttcttaaattgggcaaatccttgttggaccgtttctgggaatatctctgggattggtccaaagaagtcccaccattgcaaaaaccaattgggaaaattgtaaattgtgttggtcttgaaatatatcagccatgaatgcttgaagcgggtattttggtgccaaaataccttagtccaagcatcaacgtaatcccaataggtataacctaccggatcaaatggaactgaaaatctctttcctttgttcaagtccgaaccaaagtgtcttggttgaagaacttttagtatttggatggttgagtgggtgtttaaggtttggtcttttggatctttgaaatgtttgatagatactgagtttgaatctactaaaatcaattcataaaaagttcttgtcttcaggatggtggttggtttgtagtgaaatcctggtgggaaagccttggccgtcgccttgaagggatttttgtcccaaaattcaggttccatctgcaaaacagttaacaatttatttttataaatataattgttagtttgtttggtaggtggtgtttgagctttggctaaaggtagttttcctttagtattggtggctgttttggtcattgacgcatttttgatcattgtttataaatttgattcagattcatcatcagattctgaggcaatgtctgccca

SEQ ID NO: 10238 - DNA, 1104 bp, Glycine max
  Gm_smallRNAprecursor_3071
ttcagcagaacttgtttcttccttctttgaggatgaagcttcttcttcctgctgtaacatttgtagaacttccttcagatttttagctaagacctcctttgatgttgatcctgctaaaaatactgccagatgagacttttggttcaaaaacacagaagtctctggatcagctgctttgaggaattctggatgggattggaaccaaagttttactttttctggatccgctttggatgagtcaaattgtgtccaccattttacaaatgcgtgtctttgtagtgatggatattggtttgtcttttcagtcttgctgtaacgatattgccatgagaatatccatgacagtgcaaagcttgaaaagtatttaagatctgttggaattcgtgattcctgtgaattgtattgtttcttaaattgggcaaatccttgttggaccgtttctgggaatatctctgggattggtccaaagaagtcccaccattgcaaaaaccaattgggaaaattgtaaattgtgttggtcttgaaatatatcagccatgaatgcttgaagcgggtattttggtgccaaaataccttagtccaagcatcaacgtaatcccaataggtataacctaccggatcaaatggaactgaaaatctctttcctttgttcaagtccgaaccaaagtgtcttggttgaagaacttttagtatttggatggttgagtgggtgtttaaggtttggtcttttggatctttgaaatgtttgatagatactgagtttgaatctactaaaatcaattcataaaaagttcttgtcttcaggatggtggttggtttgtagtgaaatcctggtgggaaagccttggccgtcgccttgaagggatttttgtcccaaaattcaggttccatctgcaaaacagttaacaatttatttttataaatataattgttagtttgtttggtaggtggtgtttgagctttggctaaaggtagttttcctttagtattggtggctgttttggtcattgacgcatttttgatcattgtttataaatttgattcagattcatcatcagattctgaggcaatgtctgcccaagattttttgattatttttggaaa

SEQ ID NO: 10239 - DNA, 1140 bp, Glycine max
  Gm_smallRNAprecursor_3072
tttttagctaagacctcctttgatgttgatcctgctaaaaatactgccagatgagacttttggttcaaaaacacagaagtctctggatcagctgctttgaggaattctggatgggattggaaccaaagttttactttttctggatccgctttggatgagtcaaattgtgtccaccattttacaaatgcgtgtctttgtagtgatggatattggtttgtcttttcagtcttgctgtaacgatattgccatgagaatatccatgacagtgcaaagcttgaaaagtatttaagatctgttggaattcgtgattcctgtgaattgtattgtttcttaaattgggcaaatccttgttggaccgtttctgggaatatctctgggattggtccaaagaagtcccaccattgcaaaaaccaattgggaaaattgtaaattgtgttggtcttgaaatatatcagccatgaatgcttgaagcgggtattttggtgccaaaataccttagtccaagcatcaacgtaatcccaataggtataacctaccggatcaaatggaactgaaaatctctttcctttgttcaagtccgaaccaaagtgtcttggttgaagaacttttagtatttggatggttgagtgggtgtttaaggtttggtcttttggatctttgaaatgtttgatagatactgagtttgaatctactaaaatcaattcataaaaagttcttgtcttcaggatggtggttggtttgtagtgaaatcctggtgggaaagccttggccgtcgccttgaagggatttttgtcccaaaattcaggttccatctgcaaaacagttaacaatttatttttataaatataattgttagtttgtttggtaggtggtgtttgagctttggctaaaggtagttttcctttagtattggtggctgttttggtcattgacgcatttttgatcattgtttataaatttgattcagattcatcatcagattctgaggcaatgtctgcccaagattttttgattatttttggaaatttggtcagacccatgtcttgaagggcctgaagggtttcaattggccatgcatagtcggccaatgtttgtttggcggttgccgatttgggagattcctgagtggatggctcaggt

SEQ ID NO: 10240 - DNA, 1090 bp, Glycine max
  Gm_smallRNAprecursor_3073
gttgatcctgctaaaaatactgccagatgagacttttggttcaaaaacacagaagtctctggatcagctgctttgaggaattctggatgggattggaaccaaagttttactttttctggatccgctttggatgagtcaaattgtgtccaccattttacaaatgcgtgtctttgtagtgatggatattggtttgtcttttcagtcttgctgtaacgatattgccatgagaatatccatgacagtgcaaagcttgaaaagtatttaagatctgttggaattcgtgattcctgtgaattgtattgtttcttaaattgggcaaatccttgttggaccgtttctgggaatatctctgggattggtccaaagaagtcccaccattgcaaaaaccaattgggaaaattgtaaattgtgttggtcttgaaatatatcagccatgaatgcttgaagcgggtattttggtgccaaaataccttagtccaagcatcaacgtaatcccaataggtataacctaccggatcaaatggaactgaaaatctctttcctttgttcaagtccgaaccaaagtgtcttggttgaagaacttttagtatttggatggttgagtgggtgtttaaggtttggtcttttggatctttgaaatgtttgatagatactgagtttgaatctactaaaatcaattcataaaaagttcttgtcttcaggatggtggttggtttgtagtgaaatcctggtgggaaagccttggccgtcgccttgaagggatttttgtcccaaaattcaggttccatctgcaaaacagttaacaatttatttttataaatataattgttagtttgtttggtaggtggtgtttgagctttggctaaaggtagttttcctttagtattggtggctgttttggtcattgacgcatttttgatcattgtttataaatttgattcagattcatcatcagattctgaggcaatgtctgcccaagattttttgattatttttggaaatttggtcagacccatgtcttgaagggcctgaagggtttcaattggccatgcatagtcggccaatgtttgtttggcggttgccgatttgg

SEQ ID NO: 10241 - DNA, 1087 bp, Glycine max
  Gm_smallRNAprecursor_3074
gatcctgctaaaaatactgccagatgagacttttggttcaaaaacacagaagtctctggatcagctgctttgaggaattctggatgggattggaaccaaagttttactttttctggatccgctttggatgagtcaaattgtgtccaccattttacaaatgcgtgtctttgtagtgatggatattggtttgtcttttcagtcttgctgtaacgatattgccatgagaatatccatgacagtgcaaagcttgaaaagtatttaagatctgttggaattcgtgattcctgtgaattgtattgtttcttaaattgggcaaatccttgttggaccgtttctgggaatatctctgggattggtccaaagaagtcccaccattgcaaaaaccaattgggaaaattgtaaattgtgttggtcttgaaatatatcagccatgaatgcttgaagcgggtattttggtgccaaaataccttagtccaagcatcaacgtaatcccaataggtataacctaccggatcaaatggaactgaaaatctctttcctttgttcaagtccgaaccaaagtgtcttggttgaagaacttttagtatttggatggttgagtgggtgtttaaggtttggtcttttggatctttgaaatgtttgatagatactgagtttgaatctactaaaatcaattcataaaaagttcttgtcttcaggatggtggttggtttgtagtgaaatcctggtgggaaagccttggccgtcgccttgaagggatttttgtcccaaaattcaggttccatctgcaaaacagttaacaatttatttttataaatataattgttagtttgtttggtaggtggtgtttgagctttggctaaaggtagttttcctttagtattggtggctgttttggtcattgacgcatttttgatcattgtttataaatttgattcagattcatcatcagattctgaggcaatgtctgcccaagattttttgattatttttggaaatttggtcagacccatgtcttgaagggcctgaagggtttcaattggccatgcatagtcggccaatgtttgtttggcggttgccgatttgg

SEQ ID NO: 10242 - DNA, 1189 bp, Glycine max
  Gm_smallRNAprecursor_3075
acacagaagtctctggatcagctgctttgaggaattctggatgggattggaaccaaagttttactttttctggatccgctttggatgagtcaaattgtgtccaccattttacaaatgcgtgtctttgtagtgatggatattggtttgtcttttcagtcttgctgtaacgatattgccatgagaatatccatgacagtgcaaagcttgaaaagtatttaagatctgttggaattcgtgattcctgtgaattgtattgtttcttaaattgggcaaatccttgttggaccgtttctgggaatatctctgggattggtccaaagaagtcccaccattgcaaaaaccaattgggaaaattgtaaattgtgttggtcttgaaatatatcagccatgaatgcttgaagcgggtattttggtgccaaaataccttagtccaagcatcaacgtaatcccaataggtataacctaccggatcaaatggaactgaaaatctctttcctttgttcaagtccgaaccaaagtgtcttggttgaagaacttttagtatttggatggttgagtgggtgtttaaggtttggtcttttggatctttgaaatgtttgatagatactgagtttgaatctactaaaatcaattcataaaaagttcttgtcttcaggatggtggttggtttgtagtgaaatcctggtgggaaagccttggccgtcgccttgaagggatttttgtcccaaaattcaggttccatctgcaaaacagttaacaatttatttttataaatataattgttagtttgtttggtaggtggtgtttgagctttggctaaaggtagttttcctttagtattggtggctgttttggtcattgacgcatttttgatcattgtttataaatttgattcagattcatcatcagattctgaggcaatgtctgcccaagattttttgattatttttggaaatttggtcagacccatgtcttgaagggcctgaagggtttcaattggccatgcatagtcggccaatgtttgtttggcggttgccgatttgggagattcctgagtggatggctcaggtttgattgagacaatctgggttgatgacccttctaaattggttttctgggtagatgacccagcctgggttggtgacccagaagaggttgatgatttcttgatggttggctctggaagagc

SEQ ID NO: 10243 - DNA, 1224 bp, Glycine max
  Gm_smallRNAprecursor_3076
tgctttgaggaattctggatgggattggaaccaaagttttactttttctggatccgctttggatgagtcaaattgtgtccaccattttacaaatgcgtgtctttgtagtgatggatattggtttgtcttttcagtcttgctgtaacgatattgccatgagaatatccatgacagtgcaaagcttgaaaagtatttaagatctgttggaattcgtgattcctgtgaattgtattgtttcttaaattgggcaaatccttgttggaccgtttctgggaatatctctgggattggtccaaagaagtcccaccattgcaaaaaccaattgggaaaattgtaaattgtgttggtcttgaaatatatcagccatgaatgcttgaagcgggtattttggtgccaaaataccttagtccaagcatcaacgtaatcccaataggtataacctaccggatcaaatggaactgaaaatctctttcctttgttcaagtccgaaccaaagtgtcttggttgaagaacttttagtatttggatggttgagtgggtgtttaaggtttggtcttttggatctttgaaatgtttgatagatactgagtttgaatctactaaaatcaattcataaaaagttcttgtcttcaggatggtggttggtttgtagtgaaatcctggtgggaaagccttggccgtcgccttgaagggatttttgtcccaaaattcaggttccatctgcaaaacagttaacaatttatttttataaatataattgttagtttgtttggtaggtggtgtttgagctttggctaaaggtagttttcctttagtattggtggctgttttggtcattgacgcatttttgatcattgtttataaatttgattcagattcatcatcagattctgaggcaatgtctgcccaagattttttgattatttttggaaatttggtcagacccatgtcttgaagggcctgaagggtttcaattggccatgcatagtcggccaatgtttgtttggcggttgccgatttgggagattcctgagtggatggctcaggtttgattgagacaatctgggttgatgacccttctaaattggttttctgggtagatgacccagcctgggttggtgacccagaagaggttgatgatttcttgatggttggctctggaagagccagtctggctcctttgcctatactccttcctccccgtagggagattcccgatgcctt

SEQ ID NO: 10244 - DNA, 1222 bp, Glycine max
  Gm_smallRNAprecursor_3077
ctttgaggaattctggatgggattggaaccaaagttttactttttctggatccgctttggatgagtcaaattgtgtccaccattttacaaatgcgtgtctttgtagtgatggatattggtttgtcttttcagtcttgctgtaacgatattgccatgagaatatccatgacagtgcaaagcttgaaaagtatttaagatctgttggaattcgtgattcctgtgaattgtattgtttcttaaattgggcaaatccttgttggaccgtttctgggaatatctctgggattggtccaaagaagtcccaccattgcaaaaaccaattgggaaaattgtaaattgtgttggtcttgaaatatatcagccatgaatgcttgaagcgggtattttggtgccaaaataccttagtccaagcatcaacgtaatcccaataggtataacctaccggatcaaatggaactgaaaatctctttcctttgttcaagtccgaaccaaagtgtcttggttgaagaacttttagtatttggatggttgagtgggtgtttaaggtttggtcttttggatctttgaaatgtttgatagatactgagtttgaatctactaaaatcaattcataaaaagttcttgtcttcaggatggtggttggtttgtagtgaaatcctggtgggaaagccttggccgtcgccttgaagggatttttgtcccaaaattcaggttccatctgcaaaacagttaacaatttatttttataaatataattgttagtttgtttggtaggtggtgtttgagctttggctaaaggtagttttcctttagtattggtggctgttttggtcattgacgcatttttgatcattgtttataaatttgattcagattcatcatcagattctgaggcaatgtctgcccaagattttttgattatttttggaaatttggtcagacccatgtcttgaagggcctgaagggtttcaattggccatgcatagtcggccaatgtttgtttggcggttgccgatttgggagattcctgagtggatggctcaggtttgattgagacaatctgggttgatgacccttctaaattggttttctgggtagatgacccagcctgggttggtgacccagaagaggttgatgatttcttgatggttggctctggaagagccagtctggctcctttgcctatactccttcctccccgtagggagattcccgatgcctt

SEQ ID NO: 10245 - DNA, 1193 bp, Glycine max
  Gm_smallRNAprecursor_3078
accaaagttttactttttctggatccgctttggatgagtcaaattgtgtccaccattttacaaatgcgtgtctttgtagtgatggatattggtttgtcttttcagtcttgctgtaacgatattgccatgagaatatccatgacagtgcaaagcttgaaaagtatttaagatctgttggaattcgtgattcctgtgaattgtattgtttcttaaattgggcaaatccttgttggaccgtttctgggaatatctctgggattggtccaaagaagtcccaccattgcaaaaaccaattgggaaaattgtaaattgtgttggtcttgaaatatatcagccatgaatgcttgaagcgggtattttggtgccaaaataccttagtccaagcatcaacgtaatcccaataggtataacctaccggatcaaatggaactgaaaatctctttcctttgttcaagtccgaaccaaagtgtcttggttgaagaacttttagtatttggatggttgagtgggtgtttaaggtttggtcttttggatctttgaaatgtttgatagatactgagtttgaatctactaaaatcaattcataaaaagttcttgtcttcaggatggtggttggtttgtagtgaaatcctggtgggaaagccttggccgtcgccttgaagggatttttgtcccaaaattcaggttccatctgcaaaacagttaacaatttatttttataaatataattgttagtttgtttggtaggtggtgtttgagctttggctaaaggtagttttcctttagtattggtggctgttttggtcattgacgcatttttgatcattgtttataaatttgattcagattcatcatcagattctgaggcaatgtctgcccaagattttttgattatttttggaaatttggtcagacccatgtcttgaagggcctgaagggtttcaattggccatgcatagtcggccaatgtttgtttggcggttgccgatttgggagattcctgagtggatggctcaggtttgattgagacaatctgggttgatgacccttctaaattggttttctgggtagatgacccagcctgggttggtgacccagaagaggttgatgatttcttgatggttggctctggaagagccagtctggctcctttgcctatactccttcctccccgtagggagattcccgatgcc

SEQ ID NO: 10246 - DNA, 1195 bp, Glycine max
  Gm_smallRNAprecursor_3079
accaaagttttactttttctggatccgctttggatgagtcaaattgtgtccaccattttacaaatgcgtgtctttgtagtgatggatattggtttgtcttttcagtcttgctgtaacgatattgccatgagaatatccatgacagtgcaaagcttgaaaagtatttaagatctgttggaattcgtgattcctgtgaattgtattgtttcttaaattgggcaaatccttgttggaccgtttctgggaatatctctgggattggtccaaagaagtcccaccattgcaaaaaccaattgggaaaattgtaaattgtgttggtcttgaaatatatcagccatgaatgcttgaagcgggtattttggtgccaaaataccttagtccaagcatcaacgtaatcccaataggtataacctaccggatcaaatggaactgaaaatctctttcctttgttcaagtccgaaccaaagtgtcttggttgaagaacttttagtatttggatggttgagtgggtgtttaaggtttggtcttttggatctttgaaatgtttgatagatactgagtttgaatctactaaaatcaattcataaaaagttcttgtcttcaggatggtggttggtttgtagtgaaatcctggtgggaaagccttggccgtcgccttgaagggatttttgtcccaaaattcaggttccatctgcaaaacagttaacaatttatttttataaatataattgttagtttgtttggtaggtggtgtttgagctttggctaaaggtagttttcctttagtattggtggctgttttggtcattgacgcatttttgatcattgtttataaatttgattcagattcatcatcagattctgaggcaatgtctgcccaagattttttgattatttttggaaatttggtcagacccatgtcttgaagggcctgaagggtttcaattggccatgcatagtcggccaatgtttgtttggcggttgccgatttgggagattcctgagtggatggctcaggtttgattgagacaatctgggttgatgacccttctaaattggttttctgggtagatgacccagcctgggttggtgacccagaagaggttgatgatttcttgatggttggctctggaagagccagtctggctcctttgcctatactccttcctccccgtagggagattcccgatgcctt

SEQ ID NO: 10247 - DNA, 1176 bp, Glycine max
  Gm_smallRNAprecursor_3080
tactttttctggatccgctttggatgagtcaaattgtgtccaccattttacaaatgcgtgtctttgtagtgatggatattggtttgtcttttcagtcttgctgtaacgatattgccatgagaatatccatgacagtgcaaagcttgaaaagtatttaagatctgttggaattcgtgattcctgtgaattgtattgtttcttaaattgggcaaatccttgttggaccgtttctgggaatatctctgggattggtccaaagaagtcccaccattgcaaaaaccaattgggaaaattgtaaattgtgttggtcttgaaatatatcagccatgaatgcttgaagcgggtattttggtgccaaaataccttagtccaagcatcaacgtaatcccaataggtataacctaccggatcaaatggaactgaaaatctctttcctttgttcaagtccgaaccaaagtgtcttggttgaagaacttttagtatttggatggttgagtgggtgtttaaggtttggtcttttggatctttgaaatgtttgatagatactgagtttgaatctactaaaatcaattcataaaaagttcttgtcttcaggatggtggttggtttgtagtgaaatcctggtgggaaagccttggccgtcgccttgaagggatttttgtcccaaaattcaggttccatctgcaaaacagttaacaatttatttttataaatataattgttagtttgtttggtaggtggtgtttgagctttggctaaaggtagttttcctttagtattggtggctgttttggtcattgacgcatttttgatcattgtttataaatttgattcagattcatcatcagattctgaggcaatgtctgcccaagattttttgattatttttggaaatttggtcagacccatgtcttgaagggcctgaagggtttcaattggccatgcatagtcggccaatgtttgtttggcggttgccgatttgggagattcctgagtggatggctcaggtttgattgagacaatctgggttgatgacccttctaaattggttttctgggtagatgacccagcctgggttggtgacccagaagaggttgatgatttcttgatggttggctctggaagagccagtctggctcctttgcctatactccttcctccccgtagggagattcc

SEQ ID NO: 10248 - DNA, 1183 bp, Glycine max
  Gm_smallRNAprecursor_3081
tactttttctggatccgctttggatgagtcaaattgtgtccaccattttacaaatgcgtgtctttgtagtgatggatattggtttgtcttttcagtcttgctgtaacgatattgccatgagaatatccatgacagtgcaaagcttgaaaagtatttaagatctgttggaattcgtgattcctgtgaattgtattgtttcttaaattgggcaaatccttgttggaccgtttctgggaatatctctgggattggtccaaagaagtcccaccattgcaaaaaccaattgggaaaattgtaaattgtgttggtcttgaaatatatcagccatgaatgcttgaagcgggtattttggtgccaaaataccttagtccaagcatcaacgtaatcccaataggtataacctaccggatcaaatggaactgaaaatctctttcctttgttcaagtccgaaccaaagtgtcttggttgaagaacttttagtatttggatggttgagtgggtgtttaaggtttggtcttttggatctttgaaatgtttgatagatactgagtttgaatctactaaaatcaattcataaaaagttcttgtcttcaggatggtggttggtttgtagtgaaatcctggtgggaaagccttggccgtcgccttgaagggatttttgtcccaaaattcaggttccatctgcaaaacagttaacaatttatttttataaatataattgttagtttgtttggtaggtggtgtttgagctttggctaaaggtagttttcctttagtattggtggctgttttggtcattgacgcatttttgatcattgtttataaatttgattcagattcatcatcagattctgaggcaatgtctgcccaagattttttgattatttttggaaatttggtcagacccatgtcttgaagggcctgaagggtttcaattggccatgcatagtcggccaatgtttgtttggcggttgccgatttgggagattcctgagtggatggctcaggtttgattgagacaatctgggttgatgacccttctaaattggttttctgggtagatgacccagcctgggttggtgacccagaagaggttgatgatttcttgatggttggctctggaagagccagtctggctcctttgcctatactccttcctccccgtagggagattcccgatgcc

SEQ ID NO: 10249 - DNA, 1159 bp, Glycine max
  Gm_smallRNAprecursor_3082
ctggatccgctttggatgagtcaaattgtgtccaccattttacaaatgcgtgtctttgtagtgatggatattggtttgtcttttcagtcttgctgtaacgatattgccatgagaatatccatgacagtgcaaagcttgaaaagtatttaagatctgttggaattcgtgattcctgtgaattgtattgtttcttaaattgggcaaatccttgttggaccgtttctgggaatatctctgggattggtccaaagaagtcccaccattgcaaaaaccaattgggaaaattgtaaattgtgttggtcttgaaatatatcagccatgaatgcttgaagcgggtattttggtgccaaaataccttagtccaagcatcaacgtaatcccaataggtataacctaccggatcaaatggaactgaaaatctctttcctttgttcaagtccgaaccaaagtgtcttggttgaagaacttttagtatttggatggttgagtgggtgtttaaggtttggtcttttggatctttgaaatgtttgatagatactgagtttgaatctactaaaatcaattcataaaaagttcttgtcttcaggatggtggttggtttgtagtgaaatcctggtgggaaagccttggccgtcgccttgaagggatttttgtcccaaaattcaggttccatctgcaaaacagttaacaatttatttttataaatataattgttagtttgtttggtaggtggtgtttgagctttggctaaaggtagttttcctttagtattggtggctgttttggtcattgacgcatttttgatcattgtttataaatttgattcagattcatcatcagattctgaggcaatgtctgcccaagattttttgattatttttggaaatttggtcagacccatgtcttgaagggcctgaagggtttcaattggccatgcatagtcggccaatgtttgtttggcggttgccgatttgggagattcctgagtggatggctcaggtttgattgagacaatctgggttgatgacccttctaaattggttttctgggtagatgacccagcctgggttggtgacccagaagaggttgatgatttcttgatggttggctctggaagagccagtctggctcctttgcctatactccttcctccccgtag

SEQ ID NO: 10250 - DNA, 1098 bp, Glycine max
  Gm_smallRNAprecursor_3083
ttggtttgtcttttcagtcttgctgtaacgatattgccatgagaatatccatgacagtgcaaagcttgaaaagtatttaagatctgttggaattcgtgattcctgtgaattgtattgtttcttaaattgggcaaatccttgttggaccgtttctgggaatatctctgggattggtccaaagaagtcccaccattgcaaaaaccaattgggaaaattgtaaattgtgttggtcttgaaatatatcagccatgaatgcttgaagcgggtattttggtgccaaaataccttagtccaagcatcaacgtaatcccaataggtataacctaccggatcaaatggaactgaaaatctctttcctttgttcaagtccgaaccaaagtgtcttggttgaagaacttttagtatttggatggttgagtgggtgtttaaggtttggtcttttggatctttgaaatgtttgatagatactgagtttgaatctactaaaatcaattcataaaaagttcttgtcttcaggatggtggttggtttgtagtgaaatcctggtgggaaagccttggccgtcgccttgaagggatttttgtcccaaaattcaggttccatctgcaaaacagttaacaatttatttttataaatataattgttagtttgtttggtaggtggtgtttgagctttggctaaaggtagttttcctttagtattggtggctgttttggtcattgacgcatttttgatcattgtttataaatttgattcagattcatcatcagattctgaggcaatgtctgcccaagattttttgattatttttggaaatttggtcagacccatgtcttgaagggcctgaagggtttcaattggccatgcatagtcggccaatgtttgtttggcggttgccgatttgggagattcctgagtggatggctcaggtttgattgagacaatctgggttgatgacccttctaaattggttttctgggtagatgacccagcctgggttggtgacccagaagaggttgatgatttcttgatggttggctctggaagagccagtctggctcctttgcctatactccttcctccccgtagggagattcc

SEQ ID NO: 10251 - DNA, 1090 bp, Glycine max
  Gm_smallRNAprecursor_3084
gtgaattgtattgtttcttaaattgggcaaatccttgttggaccgtttctgggaatatctctgggattggtccaaagaagtcccaccattgcaaaaaccaattgggaaaattgtaaattgtgttggtcttgaaatatatcagccatgaatgcttgaagcgggtattttggtgccaaaataccttagtccaagcatcaacgtaatcccaataggtataacctaccggatcaaatggaactgaaaatctctttcctttgttcaagtccgaaccaaagtgtcttggttgaagaacttttagtatttggatggttgagtgggtgtttaaggtttggtcttttggatctttgaaatgtttgatagatactgagtttgaatctactaaaatcaattcataaaaagttcttgtcttcaggatggtggttggtttgtagtgaaatcctggtgggaaagccttggccgtcgccttgaagggatttttgtcccaaaattcaggttccatctgcaaaacagttaacaatttatttttataaatataattgttagtttgtttggtaggtggtgtttgagctttggctaaaggtagttttcctttagtattggtggctgttttggtcattgacgcatttttgatcattgtttataaatttgattcagattcatcatcagattctgaggcaatgtctgcccaagattttttgattatttttggaaatttggtcagacccatgtcttgaagggcctgaagggtttcaattggccatgcatagtcggccaatgtttgtttggcggttgccgatttgggagattcctgagtggatggctcaggtttgattgagacaatctgggttgatgacccttctaaattggttttctgggtagatgacccagcctgggttggtgacccagaagaggttgatgatttcttgatggttggctctggaagagccagtctggctcctttgcctatactccttcctccccgtagggagattcccgatgccttaggaggcattaccacttttctgtaagaattcacgggtaaggtagtcaggtagtgaatttgaggtgcccttgatgtattctatgtcaa

SEQ ID NO: 10252 - DNA, 1113 bp, Glycine max
  Gm_smallRNAprecursor_3085
ggaaatttggtcagacccatgtcttgaagggcctgaagggtttcaattggccatgcatagtcggccaatgtttgtttggcggttgccgatttgggagattcctgagtggatggctcaggtttgattgagacaatctgggttgatgacccttctaaattggttttctgggtagatgacccagcctgggttggtgacccagaagaggttgatgatttcttgatggttggctctggaagagccagtctggctcctttgcctatactccttcctccccgtagggagattcccgatgccttaggaggcattaccacttttctgtaagaattcacgggtaaggtagtcaggtagtgaatttgaggtgcccttgatgtattctatgtcaaaatcaaagacacttaaaattgcttgccatcgtgcaaaaatttgttttgaggcaaggtttttaacatctttttgtaaaatatctttggctgatttacaatcaaccctgattaaaaatttttggtttaataaatccgattgaaatttggaaatgcacaaaacaattgctaaaacttcttttttaacagttgaatattttaattgtgcaggattccaatgttttgatgtatatgcaatgacatgatcttggccatggactctttgtttgaggatgccaccataacctatgtctgaagcatcagtttcgacaattttgaatgcctgtggaataggaagatacagacattttatggattggactttgactttgatttctttaactgtttgtgtatggaggtcagaccaaggaggcggatttttcttcagcctatcatgcaatggcttgacaatattgtttaaataggggacaaattctcctacgtaatttagacaacctagaaatctttgtaactgggttttgtctaagatttggttggggaatttgctagcaaactctattgacctttcgattggaatgattgtaccttgatatatattgtgaccaaggaatcgaattcgagtttggaaaagattgatttttgatttggagactgccaaaccattttgtttgatgatatgtatgaaggtttggagatgtttgaaatgttggtcaatgttttgggaaaagattaa

SEQ ID NO: 10253 - DNA, 1113 bp, Glycine max; identical to SEQ ID NO: 10252
  Gm_smallRNAprecursor_3086

SEQ ID NO: 10254 - DNA, 1114 bp, Glycine max
  Gm_smallRNAprecursor_3087
ggaaatttggtcagacccatgtcttgaagggcctgaagggtttcaattggccatgcatagtcggccaatgtttgtttggcggttgccgatttgggagattcctgagtggatggctcaggtttgattgagacaatctgggttgatgacccttctaaattggttttctgggtagatgacccagcctgggttggtgacccagaagaggttgatgatttcttgatggttggctctggaagagccagtctggctcctttgcctatactccttcctccccgtagggagattcccgatgccttaggaggcattaccacttttctgtaagaattcacgggtaaggtagtcaggtagtgaatttgaggtgcccttgatgtattctatgtcaaaatcaaagacacttaaaattgcttgccatcgtgcaaaaatttgttttgaggcaaggtttttaacatctttttgtaaaatatctttggctgatttacaatcaaccctgattaaaaatttttggtttaataaatccgattgaaatttggaaatgcacaaaacaattgctaaaacttcttttttaacagttgaatattttaattgtgcaggattccaatgttttgatgtatatgcaatgacatgatcttggccatggactctttgtttgaggatgccaccataacctatgtctgaagcatcagtttcgacaattttgaatgcctgtggaataggaagatacagacattttatggattggactttgactttgatttctttaactgtttgtgtatggaggtcagaccaaggaggcggatttttcttcagcctatcatgcaatggcttgacaatattgtttaaataggggacaaattctcctacgtaatttagacaacctagaaatctttgtaactgggttttgtctaagatttggttggggaatttgctagcaaactctattgacctttcgattggaatgattgtaccttgatatatattgtgaccaaggaatcgaattcgagtttggaaaagattgatttttgatttggagactgccaaaccattttgtttgatgatatgtatgaaggtttggagatgtttgaaatgttggtcaatgttttgggaaaagattaaa

SEQ ID NO: 10255 - DNA, 1207 bp, Glycine max
  Gm_smallRNAprecursor_3088
ggaaatttggtcagacccatgtcttgaagggcctgaagggtttcaattggccatgcatagtcggccaatgtttgtttggcggttgccgatttgggagattcctgagtggatggctcaggtttgattgagacaatctgggttgatgacccttctaaattggttttctgggtagatgacccagcctgggttggtgacccagaagaggttgatgatttcttgatggttggctctggaagagccagtctggctcctttgcctatactccttcctccccgtagggagattcccgatgccttaggaggcattaccacttttctgtaagaattcacgggtaaggtagtcaggtagtgaatttgaggtgcccttgatgtattctatgtcaaaatcaaagacacttaaaattgcttgccatcgtgcaaaaatttgttttgaggcaaggtttttaacatctttttgtaaaatatctttggctgatttacaatcaaccctgattaaaaatttttggtttaataaatccgattgaaatttggaaatgcacaaaacaattgctaaaacttcttttttaacagttgaatattttaattgtgcaggattccaatgttttgatgtatatgcaatgacatgatcttggccatggactctttgtttgaggatgccaccataacctatgtctgaagcatcagtttcgacaattttgaatgcctgtggaataggaagatacagacattttatggattggactttgactttgatttctttaactgtttgtgtatggaggtcagaccaaggaggcggatttttcttcagcctatcatgcaatggcttgacaatattgtttaaataggggacaaattctcctacgtaatttagacaacctagaaatctttgtaactgggttttgtctaagatttggttggggaatttgctagcaaactctattgacctttcgattggaatgattgtaccttgatatatattgtgaccaaggaatcgaattcgagtttggaaaagattgatttttgatttggagactgccaaaccattttgtttgatgatatgtatgaaggtttggagatgtttgaaatgttggtcaatgttttgggaaaagattaaaacatcatctatgtagacaatgacaaattttgaatagggattaaaaatatcgttcataattttttgaaattctgaaggggtattcttcagtccg

SEQ ID NO: 10256 - DNA, 1035 bp, Glycine max
  Gm_smallRNAprecursor_3089
gcggttgccgatttgggagattcctgagtggatggctcaggtttgattgagacaatctgggttgatgacccttctaaattggttttctgggtagatgacccagcctgggttggtgacccagaagaggttgatgatttcttgatggttggctctggaagagccagtctggctcctttgcctatactccttcctccccgtagggagattcccgatgccttaggaggcattaccacttttctgtaagaattcacgggtaaggtagtcaggtagtgaatttgaggtgcccttgatgtattctatgtcaaaatcaaagacacttaaaattgcttgccatcgtgcaaaaatttgttttgaggcaaggtttttaacatctttttgtaaaatatctttggctgatttacaatcaaccctgattaaaaatttttggtttaataaatccgattgaaatttggaaatgcacaaaacaattgctaaaacttcttttttaacagttgaatattttaattgtgcaggattccaatgttttgatgtatatgcaatgacatgatcttggccatggactctttgtttgaggatgccaccataacctatgtctgaagcatcagtttcgacaattttgaatgcctgtggaataggaagatacagacattttatggattggactttgactttgatttctttaactgtttgtgtatggaggtcagaccaaggaggcggatttttcttcagcctatcatgcaatggcttgacaatattgtttaaataggggacaaattctcctacgtaatttagacaacctagaaatctttgtaactgggttttgtctaagatttggttggggaatttgctagcaaactctattgacctttcgattggaatgattgtaccttgatatatattgtgaccaaggaatcgaattcgagtttggaaaagattgatttttgatttggagactgccaaaccattttgtttgatgatatgtatgaaggtttggagatgtttgaaatgttggtcaatgttttgggaaaagattaa

SEQ ID NO: 10257 - DNA, 1247 bp, Glycine max
  Gm_smallRNAprecursor_3090
tgatgatttcttgatggttggctctggaagagccagtctggctcctttgcctatactccttcctccccgtagggagattcccgatgccttaggaggcattaccacttttctgtaagaattcacgggtaaggtagtcaggtagtgaatttgaggtgcccttgatgtattctatgtcaaaatcaaagacacttaaaattgcttgccatcgtgcaaaaatttgttttgaggcaaggtttttaacatctttttgtaaaatatctttggctgatttacaatcaaccctgattaaaaatttttggtttaataaatccgattgaaatttggaaatgcacaaaacaattgctaaaacttcttttttaacagttgaatattttaattgtgcaggattccaatgttttgatgtatatgcaatgacatgatcttggccatggactctttgtttgaggatgccaccataacctatgtctgaagcatcagtttcgacaattttgaatgcctgtggaataggaagatacagacattttatggattggactttgactttgatttctttaactgtttgtgtatggaggtcagaccaaggaggcggatttttcttcagcctatcatgcaatggcttgacaatattgtttaaataggggacaaattctcctacgtaatttagacaacctagaaatctttgtaactgggttttgtctaagatttggttggggaatttgctagcaaactctattgacctttcgattggaatgattgtaccttgatatatattgtgaccaaggaatcgaattcgagtttggaaaagattgatttttgatttggagactgccaaaccattttgtttgatgatatgtatgaaggtttggagatgtttgaaatgttggtcaatgttttgggaaaagattaaaacatcatctatgtagacaatgacaaattttgaatagggattaaaaatatcgttcataattttttgaaattctgaaggggtattcttcagtccgaatggtatcacgttccattcatattgcccgaaaggtacaataaacgctgttttgtacctatctgattcttggatttggatttgccaaaatccagatttcatatcaaattttgaaaatatctttgcagaatttaatctgttaagcaaatcttttttgtttggaataggatatctaatccattgtaatgcttgatttaatggtttgtaatttatgactaagcggggtgttccacgctcaatctcagat

SEQ ID NO: 10258 - DNA, 1246 bp, Glycine max
  Gm_smallRNAprecursor_3091
gatgatttcttgatggttggctctggaagagccagtctggctcctttgcctatactccttcctccccgtagggagattcccgatgccttaggaggcattaccacttttctgtaagaattcacgggtaaggtagtcaggtagtgaatttgaggtgcccttgatgtattctatgtcaaaatcaaagacacttaaaattgcttgccatcgtgcaaaaatttgttttgaggcaaggtttttaacatctttttgtaaaatatctttggctgatttacaatcaaccctgattaaaaatttttggtttaataaatccgattgaaatttggaaatgcacaaaacaattgctaaaacttcttttttaacagttgaatattttaattgtgcaggattccaatgttttgatgtatatgcaatgacatgatcttggccatggactctttgtttgaggatgccaccataacctatgtctgaagcatcagtttcgacaattttgaatgcctgtggaataggaagatacagacattttatggattggactttgactttgatttctttaactgtttgtgtatggaggtcagaccaaggaggcggatttttcttcagcctatcatgcaatggcttgacaatattgtttaaataggggacaaattctcctacgtaatttagacaacctagaaatctttgtaactgggttttgtctaagatttggttggggaatttgctagcaaactctattgacctttcgattggaatgattgtaccttgatatatattgtgaccaaggaatcgaattcgagtttggaaaagattgatttttgatttggagactgccaaaccattttgtttgatgatatgtatgaaggtttggagatgtttgaaatgttggtcaatgttttgggaaaagattaaaacatcatctatgtagacaatgacaaattttgaatagggattaaaaatatcgttcataattttttgaaattctgaaggggtattcttcagtccgaatggtatcacgttccattcatattgcccgaaaggtacaataaacgctgttttgtacctatctgattcttggatttggatttgccaaaatccagatttcatatcaaattttgaaaatatctttgcagaatttaatctgttaagcaaatcttttttgtttggaataggatatctaatccattgtaatgcttgatttaatggtttgtaatttatgactaagcggggtgttccacgctcaatctcagat

SEQ ID NO: 10259 - DNA, 1153 bp, Glycine max
  Gm_smallRNAprecursor_3092
ggaggcattaccacttttctgtaagaattcacgggtaaggtagtcaggtagtgaatttgaggtgcccttgatgtattctatgtcaaaatcaaagacacttaaaattgcttgccatcgtgcaaaaatttgttttgaggcaaggtttttaacatctttttgtaaaatatctttggctgatttacaatcaaccctgattaaaaatttttggtttaataaatccgattgaaatttggaaatgcacaaaacaattgctaaaacttcttttttaacagttgaatattttaattgtgcaggattccaatgttttgatgtatatgcaatgacatgatcttggccatggactctttgtttgaggatgccaccataacctatgtctgaagcatcagtttcgacaattttgaatgcctgtggaataggaagatacagacattttatggattggactttgactttgatttctttaactgtttgtgtatggaggtcagaccaaggaggcggatttttcttcagcctatcatgcaatggcttgacaatattgtttaaataggggacaaattctcctacgtaatttagacaacctagaaatctttgtaactgggttttgtctaagatttggttggggaatttgctagcaaactctattgacctttcgattggaatgattgtaccttgatatatattgtgaccaaggaatcgaattcgagtttggaaaagattgatttttgatttggagactgccaaaccattttgtttgatgatatgtatgaaggtttggagatgtttgaaatgttggtcaatgttttgggaaaagattaaaacatcatctatgtagacaatgacaaattttgaatagggattaaaaatatcgttcataattttttgaaattctgaaggggtattcttcagtccgaatggtatcacgttccattcatattgcccgaaaggtacaataaacgctgttttgtacctatctgattcttggatttggatttgccaaaatccagatttcatatcaaattttgaaaatatctttgcagaatttaatctgttaagcaaatcttttttgtttggaataggatatctaatccattgtaatgcttgatttaatggtttgtaatttatgactaagcggggtgttccacgctcaatctca

SEQ ID NO: 10260 - DNA, 1168 bp, Glycine max
  Gm_smallRNAprecursor_3093
ggaggcattaccacttttctgtaagaattcacgggtaaggtagtcaggtagtgaatttgaggtgcccttgatgtattctatgtcaaaatcaaagacacttaaaattgcttgccatcgtgcaaaaatttgttttgaggcaaggtttttaacatctttttgtaaaatatctttggctgatttacaatcaaccctgattaaaaatttttggtttaataaatccgattgaaatttggaaatgcacaaaacaattgctaaaacttcttttttaacagttgaatattttaattgtgcaggattccaatgttttgatgtatatgcaatgacatgatcttggccatggactctttgtttgaggatgccaccataacctatgtctgaagcatcagtttcgacaattttgaatgcctgtggaataggaagatacagacattttatggattggactttgactttgatttctttaactgtttgtgtatggaggtcagaccaaggaggcggatttttcttcagcctatcatgcaatggcttgacaatattgtttaaataggggacaaattctcctacgtaatttagacaacctagaaatctttgtaactgggttttgtctaagatttggttggggaatttgctagcaaactctattgacctttcgattggaatgattgtaccttgatatatattgtgaccaaggaatcgaattcgagtttggaaaagattgatttttgatttggagactgccaaaccattttgtttgatgatatgtatgaaggtttggagatgtttgaaatgttggtcaatgttttgggaaaagattaaaacatcatctatgtagacaatgacaaattttgaatagggattaaaaatatcgttcataattttttgaaattctgaaggggtattcttcagtccgaatggtatcacgttccattcatattgcccgaaaggtacaataaacgctgttttgtacctatctgattcttggatttggatttgccaaaatccagatttcatatcaaattttgaaaatatctttgcagaatttaatctgttaagcaaatcttttttgtttggaataggatatctaatccattgtaatgcttgatttaatggtttgtaatttatgactaagcggggtgttccacgctcaatctcagattgtttgttgaca

SEQ ID NO: 10261 - DNA, 1031 bp, Glycine max
  Gm_smallRNAprecursor_3094
ctttttgtaaaatatctttggctgatttacaatcaaccctgattaaaaatttttggtttaataaatccgattgaaatttggaaatgcacaaaacaattgctaaaacttcttttttaacagttgaatattttaattgtgcaggattccaatgttttgatgtatatgcaatgacatgatcttggccatggactctttgtttgaggatgccaccataacctatgtctgaagcatcagtttcgacaattttgaatgcctgtggaataggaagatacagacattttatggattggactttgactttgatttctttaactgtttgtgtatggaggtcagaccaaggaggcggatttttcttcagcctatcatgcaatggcttgacaatattgtttaaataggggacaaattctcctacgtaatttagacaacctagaaatctttgtaactgggttttgtctaagatttggttggggaatttgctagcaaactctattgacctttcgattggaatgattgtaccttgatatatattgtgaccaaggaatcgaattcgagtttggaaaagattgatttttgatttggagactgccaaaccattttgtttgatgatatgtatgaaggtttggagatgtttgaaatgttggtcaatgttttgggaaaagattaaaacatcatctatgtagacaatgacaaattttgaatagggattaaaaatatcgttcataattttttgaaattctgaaggggtattcttcagtccgaatggtatcacgttccattcatattgcccgaaaggtacaataaacgctgttttgtacctatctgattcttggatttggatttgccaaaatccagatttcatatcaaattttgaaaatatctttgcagaatttaatctgttaagcaaatcttttttgtttggaataggatatctaatccattgtaatgcttgatttaatggtttgtaatttatgactaagcggggtgttccacgctcaatctcagattgtttgttgacataaaaagccgcacaa

SEQ ID NO: 10262 - DNA, 1061 bp, Glycine max
  Gm_smallRNAprecursor_3095
tgtttaaataggggacaaattctcctacgtaatttagacaacctagaaatctttgtaactgggttttgtctaagatttggttggggaatttgctagcaaactctattgacctttcgattggaatgattgtaccttgatatatattgtgaccaaggaatcgaattcgagtttggaaaagattgatttttgatttggagactgccaaaccattttgtttgatgatatgtatgaaggtttggagatgtttgaaatgttggtcaatgttttgggaaaagattaaaacatcatctatgtagacaatgacaaattttgaatagggattaaaaatatcgttcataattttttgaaattctgaaggggtattcttcagtccgaatggtatcacgttccattcatattgcccgaaaggtacaataaacgctgttttgtacctatctgattcttggatttggatttgccaaaatccagatttcatatcaaattttgaaaatatctttgcagaatttaatctgttaagcaaatcttttttgtttggaataggatatctaatccattgtaatgcttgatttaatggtttgtaatttatgactaagcggggtgttccacgctcaatctcagattgtttgttgacataaaaagccgcacaagaccatgggcttttgcatttttggattaggcctttatcaagcaaatccttgatttccttttgacagtattgaagaagttcttcattcatttggattggtctggcttttgtgggaatttgtttttccctaaagtctttctcataagggagatcgacaatatgtttctttctgtcccaaaatgcatgtggcaattcagaacaaacggtcgattcaatatgatttaataaggattgaattttttcttttacttggggttttcccagttgtatctgaatattattaaaagatacttcttcttttaagaagttaatttgattaatcttattttctataagatttatgtttctggaaattggtttagtagaaaaattaaatataatttttcttcctaaataatttgtggttattccttca

SEQ ID NO: 10263 - DNA, 1127 bp, Glycine max
  Gm_smallRNAprecursor_3096
ggacaaattctcctacgtaatttagacaacctagaaatctttgtaactgggttttgtctaagatttggttggggaatttgctagcaaactctattgacctttcgattggaatgattgtaccttgatatatattgtgaccaaggaatcgaattcgagtttggaaaagattgatttttgatttggagactgccaaaccattttgtttgatgatatgtatgaaggtttggagatgtttgaaatgttggtcaatgttttgggaaaagattaaaacatcatctatgtagacaatgacaaattttgaatagggattaaaaatatcgttcataattttttgaaattctgaaggggtattcttcagtccgaatggtatcacgttccattcatattgcccgaaaggtacaataaacgctgttttgtacctatctgattcttggatttggatttgccaaaatccagatttcatatcaaattttgaaaatatctttgcagaatttaatctgttaagcaaatcttttttgtttggaataggatatctaatccattgtaatgcttgatttaatggtttgtaatttatgactaagcggggtgttccacgctcaatctcagattgtttgttgacataaaaagccgcacaagaccatgggcttttgcatttttggattaggcctttatcaagcaaatccttgatttccttttgacagtattgaagaagttcttcattcatttggattggtctggcttttgtgggaatttgtttttccctaaagtctttctcataagggagatcgacaatatgtttctttctgtcccaaaatgcatgtggcaattcagaacaaacggtcgattcaatatgatttaataaggattgaattttttcttttacttggggttttcccagttgtatctgaatattattaaaagatacttcttcttttaagaagttaatttgattaatcttattttctataagatttatgtttctggaaattggtttagtagaaaaattaaatataatttttcttcctaaataatttgtggttattccttcattagatatttggatgggaaacagggctttaatgaagggcgttcctaagattacttcattcttaaggttttttaccaga

SEQ ID NO: 10264 - DNA, 1080 bp, Glycine max
  Gm_smallRNAprecursor_3097
aattattaatgatttcgttttagaaacaatggccctatttgacacaggggctgattcaaactgcattttagaaggattaattcctacaaaattctttgagaaaacctcagaaaaattaagtacggcaaacggctcaaaattaaaaattaattttaagctatcaaatgcaatcattgaaaaccaaggtcttaagattaacacaaactttcttctggtaaaaaaccttaagaatgaagtaatcttaggaacgcccttcattaaagccctgtttcccatccaaatatctaatgaaggaataaccacaaattatttaggaagaaaaattatatttaatttttctactaaaccaatttccagaaacataaatcttatagaaaataagattaatcaaattaacttcttaaaagatcttttaataatatacagatacaactgggaaaaccccaagtaaaagaaaaaatcaatccttattaaatcatattgaatcgaccgtttgttctgaattgccacatgcattttgggacagaaagaaacatattgtcgatctcccttatgagaaagactttagggaaaaacaaattcccacaaaagccagaccaatccaaatgaatgaagaacttcttcaatactgtcaaaaggaaatcaaggatttgcttgataaaggcctaatccaaaaatgcaaaagcccatggtcttgtgcggctttttatgtcaacaaacaatctgagattgagcgtggaacaccccgcttagtcataaattacaaaccattaaatcaagcattacaatggattagatatcctattccaaacaaaaaagatttgcttaacagattaaattctgcaaagatattttcaaaatttgatatgaaatctggattttggcaaatccaaatccaagaatcagataggtacaaaacagcgtttattgtacctttcgggcaatatgaatggaacgtgataccattcggactgaagaataccccttcagaatttcaaaaaattatgaacgatatttttaatccctattcaaaatttgtcattgtctacatagatgatgttttaatcttttcccaaaaca

SEQ ID NO: 10265 - DNA, 1198 bp, Glycine max
  Gm_smallRNAprecursor_3098
acagaaagaaacatattgtcgatctcccttatgagaaagactttagggaaaaacaaattcccacaaaagccagaccaatccaaatgaatgaagaacttcttcaatactgtcaaaaggaaatcaaggatttgcttgataaaggcctaatccaaaaatgcaaaagcccatggtcttgtgcggctttttatgtcaacaaacaatctgagattgagcgtggaacaccccgcttagtcataaattacaaaccattaaatcaagcattacaatggattagatatcctattccaaacaaaaaagatttgcttaacagattaaattctgcaaagatattttcaaaatttgatatgaaatctggattttggcaaatccaaatccaagaatcagataggtacaaaacagcgtttattgtacctttcgggcaatatgaatggaacgtgataccattcggactgaagaataccccttcagaatttcaaaaaattatgaacgatatttttaatccctattcaaaatttgtcattgtctacatagatgatgttttaatcttttcccaaaacattgaccaacatttcaaacatctccaaaccttcatacatatcatcaaacaaaatggtttggcagtctccaaatcaaaaatcaatcttttccaaactcgaattcgattccttggtcacaatatatatcaaggtacaatcattccaatcgaaaggtcaatagagtttgctagcaaattccccaaccaaatcttagacaaaacccagttacaaagatttctaggttgtctaaattacgtaggagaatttgtcccctatttaaacaatattgtcaagccattgcatgataggctgaagaaaaatctgcctccttggtctgacctccatacacaaacagttaaagaaatcaaagtcaaagtccaatccataaaatgtctgtatcttcctattccacaggcattcaaaattgtcgaaactgatgcttcagacataggttatggtggcatcctcaaacaaagagtccatggccaagatcatgtcattgcatatacatcaaaacattggaattctgcacaattaaaatattcaactgttaaaaaagaagttttagcaattgttttgtgcatttccaaatttcaatcggatttattaaaccaaaaatttttaatcagggttgattgtaaatcagccaaagatattttaca

SEQ ID NO: 10266 - DNA, 1234 bp, Glycine max
  Gm_smallRNAprecursor_3099
acagaaagaaacatattgtcgatctcccttatgagaaagactttagggaaaaacaaattcccacaaaagccagaccaatccaaatgaatgaagaacttcttcaatactgtcaaaaggaaatcaaggatttgcttgataaaggcctaatccaaaaatgcaaaagcccatggtcttgtgcggctttttatgtcaacaaacaatctgagattgagcgtggaacaccccgcttagtcataaattacaaaccattaaatcaagcattacaatggattagatatcctattccaaacaaaaaagatttgcttaacagattaaattctgcaaagatattttcaaaatttgatatgaaatctggattttggcaaatccaaatccaagaatcagataggtacaaaacagcgtttattgtacctttcgggcaatatgaatggaacgtgataccattcggactgaagaataccccttcagaatttcaaaaaattatgaacgatatttttaatccctattcaaaatttgtcattgtctacatagatgatgttttaatcttttcccaaaacattgaccaacatttcaaacatctccaaaccttcatacatatcatcaaacaaaatggtttggcagtctccaaatcaaaaatcaatcttttccaaactcgaattcgattccttggtcacaatatatatcaaggtacaatcattccaatcgaaaggtcaatagagtttgctagcaaattccccaaccaaatcttagacaaaacccagttacaaagatttctaggttgtctaaattacgtaggagaatttgtcccctatttaaacaatattgtcaagccattgcatgataggctgaagaaaaatctgcctccttggtctgacctccatacacaaacagttaaagaaatcaaagtcaaagtccaatccataaaatgtctgtatcttcctattccacaggcattcaaaattgtcgaaactgatgcttcagacataggttatggtggcatcctcaaacaaagagtccatggccaagatcatgtcattgcatatacatcaaaacattggaattctgcacaattaaaatattcaactgttaaaaaagaagttttagcaattgttttgtgcatttccaaatttcaatcggatttattaaaccaaaaatttttaatcagggttgattgtaaatcagccaaagatattttacaaaaagatgttaaaaaccttgcctcaaaacaaatttt

SEQ ID NO: 10267 - DNA, 1107 bp, Glycine max
  Gm_smallRNAprecursor_3100
caatctgagattgagcgtggaacaccccgcttagtcataaattacaaaccattaaatcaagcattacaatggattagatatcctattccaaacaaaaaagatttgcttaacagattaaattctgcaaagatattttcaaaatttgatatgaaatctggattttggcaaatccaaatccaagaatcagataggtacaaaacagcgtttattgtacctttcgggcaatatgaatggaacgtgataccattcggactgaagaataccccttcagaatttcaaaaaattatgaacgatatttttaatccctattcaaaatttgtcattgtctacatagatgatgttttaatcttttcccaaaacattgaccaacatttcaaacatctccaaaccttcatacatatcatcaaacaaaatggtttggcagtctccaaatcaaaaatcaatcttttccaaactcgaattcgattccttggtcacaatatatatcaaggtacaatcattccaatcgaaaggtcaatagagtttgctagcaaattccccaaccaaatcttagacaaaacccagttacaaagatttctaggttgtctaaattacgtaggagaatttgtcccctatttaaacaatattgtcaagccattgcatgataggctgaagaaaaatctgcctccttggtctgacctccatacacaaacagttaaagaaatcaaagtcaaagtccaatccataaaatgtctgtatcttcctattccacaggcattcaaaattgtcgaaactgatgcttcagacataggttatggtggcatcctcaaacaaagagtccatggccaagatcatgtcattgcatatacatcaaaacattggaattctgcacaattaaaatattcaactgttaaaaaagaagttttagcaattgttttgtgcatttccaaatttcaatcggatttattaaaccaaaaatttttaatcagggttgattgtaaatcagccaaagatattttacaaaaagatgttaaaaaccttgcctcaaaacaaatttttgcacgatggcaagcaattttaagtgtctttgattttgacatagaatacatcaagggcacctcaaattca

SEQ ID NO: 10268 - DNA, 1151 bp, Glycine max
  Gm_smallRNAprecursor_3101
ttaacagattaaattctgcaaagatattttcaaaatttgatatgaaatctggattttggcaaatccaaatccaagaatcagataggtacaaaacagcgtttattgtacctttcgggcaatatgaatggaacgtgataccattcggactgaagaataccccttcagaatttcaaaaaattatgaacgatatttttaatccctattcaaaatttgtcattgtctacatagatgatgttttaatcttttcccaaaacattgaccaacatttcaaacatctccaaaccttcatacatatcatcaaacaaaatggtttggcagtctccaaatcaaaaatcaatcttttccaaactcgaattcgattccttggtcacaatatatatcaaggtacaatcattccaatcgaaaggtcaatagagtttgctagcaaattccccaaccaaatcttagacaaaacccagttacaaagatttctaggttgtctaaattacgtaggagaatttgtcccctatttaaacaatattgtcaagccattgcatgataggctgaagaaaaatctgcctccttggtctgacctccatacacaaacagttaaagaaatcaaagtcaaagtccaatccataaaatgtctgtatcttcctattccacaggcattcaaaattgtcgaaactgatgcttcagacataggttatggtggcatcctcaaacaaagagtccatggccaagatcatgtcattgcatatacatcaaaacattggaattctgcacaattaaaatattcaactgttaaaaaagaagttttagcaattgttttgtgcatttccaaatttcaatcggatttattaaaccaaaaatttttaatcagggttgattgtaaatcagccaaagatattttacaaaaagatgttaaaaaccttgcctcaaaacaaatttttgcacgatggcaagcaattttaagtgtctttgattttgacatagaatacatcaagggcacctcaaattcactaccttactaccttacccgtgaattcttacagaaaagtggtaatgtctcctaaggcatcgggaatctccctacggggaggaaggagtacaggcaaaggagccagactggctcttccagagccaaccatcaagaaatcatcaacctcttc

SEQ ID NO: 10269 - DNA, 1218 bp, Glycine max
  Gm_smallRNAprecursor_3102
ttaacagattaaattctgcaaagatattttcaaaatttgatatgaaatctggattttggcaaatccaaatccaagaatcagataggtacaaaacagcgtttattgtacctttcgggcaatatgaatggaacgtgataccattcggactgaagaataccccttcagaatttcaaaaaattatgaacgatatttttaatccctattcaaaatttgtcattgtctacatagatgatgttttaatcttttcccaaaacattgaccaacatttcaaacatctccaaaccttcatacatatcatcaaacaaaatggtttggcagtctccaaatcaaaaatcaatcttttccaaactcgaattcgattccttggtcacaatatatatcaaggtacaatcattccaatcgaaaggtcaatagagtttgctagcaaattccccaaccaaatcttagacaaaacccagttacaaagatttctaggttgtctaaattacgtaggagaatttgtcccctatttaaacaatattgtcaagccattgcatgataggctgaagaaaaatctgcctccttggtctgacctccatacacaaacagttaaagaaatcaaagtcaaagtccaatccataaaatgtctgtatcttcctattccacaggcattcaaaattgtcgaaactgatgcttcagacataggttatggtggcatcctcaaacaaagagtccatggccaagatcatgtcattgcatatacatcaaaacattggaattctgcacaattaaaatattcaactgttaaaaaagaagttttagcaattgttttgtgcatttccaaatttcaatcggatttattaaaccaaaaatttttaatcagggttgattgtaaatcagccaaagatattttacaaaaagatgttaaaaaccttgcctcaaaacaaatttttgcacgatggcaagcaattttaagtgtctttgattttgacatagaatacatcaagggcacctcaaattcactaccttactaccttacccgtgaattcttacagaaaagtggtaatgtctcctaaggcatcgggaatctccctacggggaggaaggagtacaggcaaaggagccagactggctcttccagagccaaccatcaagaaatcatcaacctcttctgggtcaccaacccaggctgggtcatctacccagaaaaccaatttagaagggtcatcaacccagatt

SEQ ID NO: 10270 - DNA, 1038 bp, Glycine max
  Gm_smallRNAprecursor_3103
tacctttcgggcaatatgaatggaacgtgataccattcggactgaagaataccccttcagaatttcaaaaaattatgaacgatatttttaatccctattcaaaatttgtcattgtctacatagatgatgttttaatcttttcccaaaacattgaccaacatttcaaacatctccaaaccttcatacatatcatcaaacaaaatggtttggcagtctccaaatcaaaaatcaatcttttccaaactcgaattcgattccttggtcacaatatatatcaaggtacaatcattccaatcgaaaggtcaatagagtttgctagcaaattccccaaccaaatcttagacaaaacccagttacaaagatttctaggttgtctaaattacgtaggagaatttgtcccctatttaaacaatattgtcaagccattgcatgataggctgaagaaaaatctgcctccttggtctgacctccatacacaaacagttaaagaaatcaaagtcaaagtccaatccataaaatgtctgtatcttcctattccacaggcattcaaaattgtcgaaactgatgcttcagacataggttatggtggcatcctcaaacaaagagtccatggccaagatcatgtcattgcatatacatcaaaacattggaattctgcacaattaaaatattcaactgttaaaaaagaagttttagcaattgttttgtgcatttccaaatttcaatcggatttattaaaccaaaaatttttaatcagggttgattgtaaatcagccaaagatattttacaaaaagatgttaaaaaccttgcctcaaaacaaatttttgcacgatggcaagcaattttaagtgtctttgattttgacatagaatacatcaagggcacctcaaattcactaccttactaccttacccgtgaattcttacagaaaagtggtaatgtctcctaaggcatcgggaatctccctacggggaggaaggagtacaggcaaaggagccagactggctcttccagagccaaccatcaagaaatcatca

SEQ ID NO: 10271 - DNA, 1071 bp, Glycine max
  Gm_smallRNAprecursor_3104
tacctttcgggcaatatgaatggaacgtgataccattcggactgaagaataccccttcagaatttcaaaaaattatgaacgatatttttaatccctattcaaaatttgtcattgtctacatagatgatgttttaatcttttcccaaaacattgaccaacatttcaaacatctccaaaccttcatacatatcatcaaacaaaatggtttggcagtctccaaatcaaaaatcaatcttttccaaactcgaattcgattccttggtcacaatatatatcaaggtacaatcattccaatcgaaaggtcaatagagtttgctagcaaattccccaaccaaatcttagacaaaacccagttacaaagatttctaggttgtctaaattacgtaggagaatttgtcccctatttaaacaatattgtcaagccattgcatgataggctgaagaaaaatctgcctccttggtctgacctccatacacaaacagttaaagaaatcaaagtcaaagtccaatccataaaatgtctgtatcttcctattccacaggcattcaaaattgtcgaaactgatgcttcagacataggttatggtggcatcctcaaacaaagagtccatggccaagatcatgtcattgcatatacatcaaaacattggaattctgcacaattaaaatattcaactgttaaaaaagaagttttagcaattgttttgtgcatttccaaatttcaatcggatttattaaaccaaaaatttttaatcagggttgattgtaaatcagccaaagatattttacaaaaagatgttaaaaaccttgcctcaaaacaaatttttgcacgatggcaagcaattttaagtgtctttgattttgacatagaatacatcaagggcacctcaaattcactaccttactaccttacccgtgaattcttacagaaaagtggtaatgtctcctaaggcatcgggaatctccctacggggaggaaggagtacaggcaaaggagccagactggctcttccagagccaaccatcaagaaatcatcaacctcttctgggtcaccaacccaggctgggtca

SEQ ID NO: 10272 - DNA, 1115 bp, Glycine max
  Gm_smallRNAprecursor_3105
tcaatagagtttgctagcaaattccccaaccaaatcttagacaaaacccagttacaaagatttctaggttgtctaaattacgtaggagaatttgtcccctatttaaacaatattgtcaagccattgcatgataggctgaagaaaaatctgcctccttggtctgacctccatacacaaacagttaaagaaatcaaagtcaaagtccaatccataaaatgtctgtatcttcctattccacaggcattcaaaattgtcgaaactgatgcttcagacataggttatggtggcatcctcaaacaaagagtccatggccaagatcatgtcattgcatatacatcaaaacattggaattctgcacaattaaaatattcaactgttaaaaaagaagttttagcaattgttttgtgcatttccaaatttcaatcggatttattaaaccaaaaatttttaatcagggttgattgtaaatcagccaaagatattttacaaaaagatgttaaaaaccttgcctcaaaacaaatttttgcacgatggcaagcaattttaagtgtctttgattttgacatagaatacatcaagggcacctcaaattcactaccttactaccttacccgtgaattcttacagaaaagtggtaatgtctcctaaggcatcgggaatctccctacggggaggaaggagtacaggcaaaggagccagactggctcttccagagccaaccatcaagaaatcatcaacctcttctgggtcaccaacccaggctgggtcatctacccagaaaaccaatttagaagggtcatcaacccagattgcctcaatcaaacctgagccatccactcaggaatctcccaaaccggcaaccgccaaacaaacatcggccgactatgcatggccaattgaaacccttcaggcccttcaagacatgggtctgaccaaatttccaaaaataatcaaaaaatcttgggcagacattgcctcagaatctgatgatgaatctgaatcaaatttacaaacaatgatccaaaaagcgtcaatgaccaaaacagccaccaatactaaaggaaaactacctttagccaaagctcaaacaccacctacaaaacaaactaacaatt

SEQ ID NO: 10273 - DNA, 1157 bp, Glycine max
  Gm_smallRNAprecursor_3106
accatggaaaactgtccgtaagggcatatgttaactgaacttatagatctgaaccatgtacagtaattttaatttaaacagtatatgtttgaacagtattttctggaagcacagcagtctgatattttagttgaatgatactgtagcagtaagtcccgtggttgagaaagggcagtaaggctaaggtgtattgttcaaataaaatattgagacataatatactggtggctataggagtaatgttcaaactatattgtctgtaaaaaaaaatctttttcatctattcagatccaagaagttctgtaacatatagccttatggaaagattcctatggaaccaaatgaaggcaaagatattagagaatgttttaatcatgtctagattattgcgatctttttcccgtatctcctttcgctcaaattcctcctcttcatcttcttcaagaaacaccaatctattaaatgatcaagataaccagacccaagaggtcgccccaaaacacaatctcttcgatgaggaagtccgattcgaagatatcaatcaaaacatggatgactggaacattccagaaatccctcaggatcaactatacgttcctaaaacaattaaggacaaacacaactttgattacataatcaaaacagtagaaaacaatattcctctaggacaagatataggggaagaatttcatttactttcaaaaaattcaatttatgaacatagccgtaagtataaatatctacacatcggttgtgtacaagtagccatcaagcccttaattgatatgggcatagatgcagtagttttaatgtgtctaagagatattaggcataatcaatttgaagactccctaattggaatagtcgaaaccagcctaggacaaggtccaatatattttaattgttatccaaacaaaatagtgagtctgatggacagaaacattcttgactctctgttcttaaacatccactttcatggccttgacatgaaagaaggatcaatcccagcagccttaatttataggatccagtacaaggtcatgaatacttgtgcatctagagtcctgttaaaacctcaaaaaggagaaacaactttgtttatcactgatatgacaaaggctaacgtttctctcccgagaaaaataaaatgggatgaa

SEQ ID NO: 10274 - DNA, 1052 bp, Glycine max
  Gm_smallRNAprecursor_3107
actatagaggtctgcatttcatgagatgattatgggtgaatttgtttaaattttttttaaaaaaaacaactttaaaataagtgttttttatataagcatttttttaagaagcaaataggatttgcttattaaaataagataaaactttttttaagcagaagaaatttagacaaacacacttaaaaaatagaaagttgtttattttattgaaattaaaataaaagtttatttcaataaataagtttaaataaactagcttatatgtattgattgatttggaaactggtatgtttaagtgtgcaaatgaaggggagttaggagagtcgtattaaactttggaaaaggtgaaaagctaggaaagaagctctaaagggttttgttaggtgcacctagcattattgctggtgcacccaacattttttaaaaatatcaaaactacccctgcgctttcttcgcatttgtgatgcgtgtgcgtgagggtggtctataaatcttacggatcaacttgatccgtaagccttttatggatcaagttgattcatatgttgatattaagcgcatacggatcaacttaaaggcttacggatcaaggatatttcagtcttttccccttaagtgtagggtgcaccagcaataatgctgggtgcacctagcaacacccaactctaaatatgaaagtcccgagtaataaagtgtaggttaggactcttaacggctctaccatcctctagtgaccctatctagtgatgaagttaatgttttatttataactagataaagtgacttgtgcaaatgtaccaacaaaagatctgcatggatagcttcaaatattttattgtctttaattttgtaatatttattcttattatttgattttgtcattcttttttggattttgatgggactactattttgtgacacttgtctaaaatgagaaacactaacatcaactaaaagttgaaaccatagcaaaagcgaacgacaaaaaatactccatgaggaccactctttcttccatggaaggacttcttactctaggtgggttttcacct

SEQ ID NO: 10275 - DNA, 1034 bp, Glycine max
  Gm_smallRNAprecursor_3108
tttttttaaaaaaaacaactttaaaataagtgttttttatataagcatttttttaagaagcaaataggatttgcttattaaaataagataaaactttttttaagcagaagaaatttagacaaacacacttaaaaaatagaaagttgtttattttattgaaattaaaataaaagtttatttcaataaataagtttaaataaactagcttatatgtattgattgatttggaaactggtatgtttaagtgtgcaaatgaaggggagttaggagagtcgtattaaactttggaaaaggtgaaaagctaggaaagaagctctaaagggttttgttaggtgcacctagcattattgctggtgcacccaacattttttaaaaatatcaaaactacccctgcgctttcttcgcatttgtgatgcgtgtgcgtgagggtggtctataaatcttacggatcaacttgatccgtaagccttttatggatcaagttgattcatatgttgatattaagcgcatacggatcaacttaaaggcttacggatcaaggatatttcagtcttttccccttaagtgtagggtgcaccagcaataatgctgggtgcacctagcaacacccaactctaaatatgaaagtcccgagtaataaagtgtaggttaggactcttaacggctctaccatcctctagtgaccctatctagtgatgaagttaatgttttatttataactagataaagtgacttgtgcaaatgtaccaacaaaagatctgcatggatagcttcaaatattttattgtctttaattttgtaatatttattcttattatttgattttgtcattcttttttggattttgatgggactactattttgtgacacttgtctaaaatgagaaacactaacatcaactaaaagttgaaaccatagcaaaagcgaacgacaaaaaatactccatgaggaccactctttcttccatggaaggacttcttactctaggtgggttttcacctctttttttactacaaccacttccctcagccacc

SEQ ID NO: 10276 - DNA, 1042 bp, Glycine max
  Gm_smallRNAprecursor_3109
aatcaatcaatactatttatctatctatatgtcaacatgtcattatttacaaccaaattgtgactaaggtcaaaacaaattgtaacaacaatctaataagaatgatccaaattacagccaatatttactattctaccaaagtaatgctaaacaatgaaaaaaaaattcgtcaaatatatcaagtactcaccttgtttagagttcaaatgaagaccttgtattaaagaaataaccttgatgaagtaagctgcaaatttcagaatcaaaaacacacaaaattcagagttagcaattttaaaaatgcagtttcagacaacttccggatcaacatgatccgaaagctgtttctacactacttacggatcaacttgatccgtaagcttctggatcaacatgatccgaaataagcttacggatcaatgtgatccgtaataaagaaaaggtgtaaacacaatttccggatcaacttgatccagaaattgtgttaacaaaccttctggatcaagttgatccgtaagattttcggatcatgttgatccagaaaagcttacggatcaagttgatccggaaccttccctgtcaacacccacggcaaagacgaagacgaagaggaacttacctcgacaatgccgacgcgaggacgcagcaacaccactgtcaacacccacggcggtgcggtcgatgacgacgaagaagacgaagaacacggagaagaagaagaagaacgaaggtcacgaagaacgaagaggaagaagaccgtgctcaagcttttttgagaggaagaagaaggaataacgaaggtcatgaagaagaaaatggcgaaaatggcgaagaagctcagaagaagcaggaatggcgaggaagaagcagaagaagtagaaatggcgaagaacacaggattggaagggagaaaggagaatgaacagttttttttttaaattaattaggtcaggggtacatatgtcttttcctcttaattgctgggtgcaccagcaataatactggatgcacctagcagcactctaatattttcatgccattt

SEQ ID NO: 10277 - DNA, 1074 bp, Glycine max
  Gm_smallRNAprecursor_3110
caagatgatgataatgatgctagaaatgatttggtatttgaagatgatgatgctctaaattgggcaactgtgtattaggcttcgggggttggagagtgtaggatgtatactaggcggaaaaagcaaaaaacaagtgttgctgctgcccaaacttctaaaaaacaggcaatgatttttggatcttcatcaaggaagcaaaaaagaagtccaagacaatgatgaggatctagatgttgaggagaatattgatgttgaatttgaagaagaagaaatcatggtcaattttgaggcgtctgatggggaagagggagagggagatgctccattaccatatgataacaacgaagatgattatgttgggattggagaagatgattagagcctcaaccttcactttgcactttgcattatgtttttatcattttcttattttgaactctttaatgagtttatttggtgttggtacttgattattgtatgaactcatgaaacttttttagtttatttgaatgcaatcctttgtttttttcaatttcaatgagtttatatatatgttttttttttgtccgccatgacatccgccattttccgctacgccatccgccatatttttatggcggatttttgactttctgccatgaaccgccatccgccattaacaacattgtttgtaacaaatatttctaagagatgattgttccttgctaccaatagctttgttatgattaacacattgtcattatcaagcaaaacaatgacctactccttatattagtcgaatgcaccaatatactaattacatgaagttgatcacataatatgttgatttaggagaagattgaacctttttttattgtttggacaatgtttgtagttacatagttgtgacaaccatggataatgcatgtaatgtgggaattaacgtatctttgaatggacattcataaaattaattttgaagtatgattcacctcttgaaatattcagattataaaataggtaggtttatcaaagataaaaggaagagtaagtactctaagttcgcaacaaaaaactactacaattgtatcattt

SEQ ID NO: 10278 - DNA, 1085 bp, Glycine max
  Gm_smallRNAprecursor_3111
aacaaaaaagggatgcaagaaacttgttatgtgcaaaacctcatcaagcaatagacatatatagataatggaatcagatcacaaggaagaatgtggagagaataatagttaaaaccattatatttatagataataataataataataataataataataataataatataaacttgtaatcgatattagaatctaatttgttgaaaagaatttgcgtgatttattataaaaatttttatatcagtctttaattcttataaataaataaaaacttatactttgtaagttagctaatatgcactatgcataatcaattgtgaaatgtaaaatgtcaatgcaggacctcggaattttgttggacagacgagagtttccccaaacacttcaatgaaaagaaatatgattccttcttggttttcaatgtacaaacaaatagccttacccgtaatgaaatgaattggttgatatacttgctatttattttgtgttagttgtacctaaaagttcccccaaacacttcacttggtgatgatgaggactattctatgatctaaaggatacaataccactactctagtcccacgtgtgaagtgttcagaggaactccaagagacaaccaacatttgatcttgatctgagtcatgcttcatggctagacaaagcacgcaaaggattctatttataggggagaaatatgttctgataattaactaaacaatggggatcaatttatgtggacatggaaaatatttcacaaaaaattggtatgtaacactgaacctagtcatgatatctgctaagaaggaaagactgaagagagatcctaattgctctgaatgacaaaattgggttagttggtggtaaagtgattctaagctctagccttcaaaagctaacagatcagttctcaatccctttcagtcgttttcacaactcacactaataaaagtcacgtgtagctcggaaaaagaaaactactgtaaagtcagtaatgcaacatatacatgatccatgatatacgtactctatatatcttcctttacatagacatattccagcttatactttggtagaacagttattca

SEQ ID NO: 10279 - DNA, 1048 bp, Glycine max
  Gm_smallRNAprecursor_3112
gaaacactgaccttcaaattgatcagcaatcaaattgtacactgcacaagcaatagcggtcttccctattcccccaattccataaatccccaccatgcttactccttgattggatccaacatccaaaagtgagttcacctcttgcactctagactccaatccaattggataattagccacatgtaaagggctacgatttatctttctggacacctcttcaacaattttctgaataacttcatgttcatacctacccaaatacaaaatacatataaagttaaatcaaatgcatcaaatccatgcccagtttcattcacaaattcaaatctcattatatctttgtcatgatccttagatttgtaaaggtctattttcctaatttttagtttctcaattcatactggaatatatcagctaaagaaaagaaagaaaaaaacaaaacagaatcaacatatataaagaatcaaatacagctaagtacccatgtttgagtttgaaatgtgaaccagacaaattagctgcttcttgaagagcaagcttccacttttgcagcttctccttatcattcttaaatctttctccaagcttgtccaatgctttcccataagaacctttctgatgtcgcacataagacggagtcaccccgtaaaaaaccggccaaaccaagcgacccttcttcattatgcactcaaggatcatgacaagctcttcaagacagtaagttgaggaagcatagttttcagagaaaacaacaatggcaattcttgactgctgaattgccttgaaaagagcatgtctaatctcttcccctcttctgagcccctcatcatccatgaaggtgtggattccctggtcacaaagagacttgtaaaggcttccagtgaaaccacttcgagtatcatcgcctctgaaactgaggaacacatcataagtccactcacatgtggaagaagaggaacatgattgctgtgtcatgatagatgataactactgaaacaacaaaccttgattgaacgagttattgtgaagattatgtaagtgttttgtt

SEQ ID NO: 10280 - DNA, 1211 bp, Glycine max
  Gm_smallRNAprecursor_3113
ttctgaaatgtactagcttggtggctgaacaaaagcaaacccattttggagagtaaccagctaagtatgaaagttccaatctcgagtagttgcattgatgttaaagatcaactggcaagcttaaaggcatcaatgaagagtccataagtgaaacccattttaaagttgttgagaagagcaactaggaatgtaactttaggtcgactttagtagaactttgtcggcaaatttctcaaactaggttccttttagaaactaattcccaaaagggggctgttttgaaacttttttcaggggggtttgttttttagggggactcgccagtgaggttggcgagttggacacgtggcggcgcctggtggacttgccagtggagttggcgagttgctgtccacgtggcgggtcccgccactcgtactggcgaaatgtttttttacagaaattttttttttaacttcaaacgggtataacttttgataggaatgtccgtttgaggcctataatatgtcaaaatgctcgaaattgaatgaagaatcccttggcaaatccccgaagggatttgatcaactcattttcccaaaaaatggatttaagattcaaccacccattttttaatcttaaatcctatttttgagctacttagaggcattttttgggaaaatgagttgtccaaatctccttcgagaatttgccaaagggattcgtcattcaatttcgagcattttgacatattatgggcctcaaacggacattcctatcaaaagttatacccgtttgaagttaaaaaaaaaatttccgtaaaaaaacatttcgccagtacgagtggcgggacccgccacgtggacagcaactcgccaactccactggcgagtccaccaggcgccgccacgtgtccaactcgccaaccccattggcgagtccccctcaaaaacagaccccccctgaaaaaagtttcaaaacagctcccttttaggaattagtttctaaaaggaacatagtttgaaaaatttgccgaactttgtcacatattctgtgagaagaacacataacgctgcagcaataacatcattgactcctagagctccaaaagagagattgtttgtgccacataaaatccacccaacaatgagattccaccaaacagagccctgtgagaatggcttctaaagtaattaattccttgagagctcaggcacaagtctaataatgtc

SEQ ID NO: 10281 - DNA, 1211 bp, Glycine max; identical to SEQ ID NO: 10280
  Gm_smallRNAprecursor_3114

SEQ ID NO: 10282 - DNA, 1212 bp, Glycine max
  Gm_smallRNAprecursor_3115
ttctgaaatgtactagcttggtggctgaacaaaagcaaacccattttggagagtaaccagctaagtatgaaagttccaatctcgagtagttgcattgatgttaaagatcaactggcaagcttaaaggcatcaatgaagagtccataagtgaaacccattttaaagttgttgagaagagcaactaggaatgtaactttaggtcgactttagtagaactttgtcggcaaatttctcaaactaggttccttttagaaactaattcccaaaagggggctgttttgaaacttttttcaggggggtttgttttttagggggactcgccagtgaggttggcgagttggacacgtggcggcgcctggtggacttgccagtggagttggcgagttgctgtccacgtggcgggtcccgccactcgtactggcgaaatgtttttttacagaaattttttttttaacttcaaacgggtataacttttgataggaatgtccgtttgaggcctataatatgtcaaaatgctcgaaattgaatgaagaatcccttggcaaatccccgaagggatttgatcaactcattttcccaaaaaatggatttaagattcaaccacccattttttaatcttaaatcctatttttgagctacttagaggcattttttgggaaaatgagttgtccaaatctccttcgagaatttgccaaagggattcgtcattcaatttcgagcattttgacatattatgggcctcaaacggacattcctatcaaaagttatacccgtttgaagttaaaaaaaaaatttccgtaaaaaaacatttcgccagtacgagtggcgggacccgccacgtggacagcaactcgccaactccactggcgagtccaccaggcgccgccacgtgtccaactcgccaaccccattggcgagtccccctcaaaaacagaccccccctgaaaaaagtttcaaaacagctcccttttaggaattagtttctaaaaggaacatagtttgaaaaatttgccgaactttgtcacatattctgtgagaagaacacataacgctgcagcaataacatcattgactcctagagctccaaaagagagattgtttgtgccacataaaatccacccaacaatgagattccaccaaacagagccctgtgagaatggcttctaaagtaattaattccttgagagctcaggcacaagtctaataatgtcc

SEQ ID NO: 10283 - DNA, 1190 bp, Glycine max
  Gm_smallRNAprecursor_3116
gatgggatacttaaaaataaatgcctcattaattagtgctctgatagaaagatggaggccggaaacacatacgtttcacatgagatgcggagagtgtactattactctccaagacgtctctgtgttgttaggtataagtgtggatgatttaccattaatcggtccaacaaatcttgattgggctgatttatgtgaggaattattggaagtcagaccacaagaaggtgaaattaaaggtagtatggttaagttaagttggctggctcaccattttgtacaaataaataacgacgacgaagaacaagtacgaaggtttgcccgtgcatggatactgagattcattggaggtgtcttgttcattgacaaaagcagtaacaaagtttcgctaaggtaccttcaatttttacgtgactttgaagaatgtggcacatatgcatggggagctgccgtacttggttttctatatatgtccatcttactacaaatgtgggcatgggaacgatgtccaaccttggctccaaagaggactccttcccaagtagaaaatacaccactggggcacaggttagtcatttttaacagcgtctttcatttcaatagaataaatggttttagacatgtgttaaattttaatctttgtaggtggctgcgacgtggaaaccaacatatcggcaatgatgatgtgagagtttttcgtcgcaagttggatattatgaaacgtcatgaggtaagaacatgctattgtatttgtaaaataaaaaattatatgtgttattttactaaaatgttcacaactatgttgttatatgcagtttgtgtggaagccttacacatcaaccgttatatcattgttgtctcccgtttgttttgtcggaagtctcgcgtggtacgcggtggtgccactaatttgtttccaagttattgagtggcaccaaccggaaagagtattgagacaatttgggatgcagcaaccagttccagagtctccttcacaacccttaaacattcatggcataacattaaaagggaaacatgacgaaaattgggggcaattgttcgccccaatgattcatcaatggaataatcgccatgcatttagggtcgacgcttatccccgacaagaaggcctattgagctttaactcggactacatggtctggtataggcgaaagacaaagatgtttgttgac

SEQ ID NO: 10284 - DNA, 1064 bp, Glycine max
  Gm_smallRNAprecursor_3117
aataaataacgacgacgaagaacaagtacgaaggtttgcccgtgcatggatactgagattcattggaggtgtcttgttcattgacaaaagcagtaacaaagtttcgctaaggtaccttcaatttttacgtgactttgaagaatgtggcacatatgcatggggagctgccgtacttggttttctatatatgtccatcttactacaaatgtgggcatgggaacgatgtccaaccttggctccaaagaggactccttcccaagtagaaaatacaccactggggcacaggttagtcatttttaacagcgtctttcatttcaatagaataaatggttttagacatgtgttaaattttaatctttgtaggtggctgcgacgtggaaaccaacatatcggcaatgatgatgtgagagtttttcgtcgcaagttggatattatgaaacgtcatgaggtaagaacatgctattgtatttgtaaaataaaaaattatatgtgttattttactaaaatgttcacaactatgttgttatatgcagtttgtgtggaagccttacacatcaaccgttatatcattgttgtctcccgtttgttttgtcggaagtctcgcgtggtacgcggtggtgccactaatttgtttccaagttattgagtggcaccaaccggaaagagtattgagacaatttgggatgcagcaaccagttccagagtctccttcacaacccttaaacattcatggcataacattaaaagggaaacatgacgaaaattgggggcaattgttcgccccaatgattcatcaatggaataatcgccatgcatttagggtcgacgcttatccccgacaagaaggcctattgagctttaactcggactacatggtctggtataggcgaaagacaaagatgtttgttgacccacaaaatgcaaagacggctacattggtattttttaatttttttgaatatttaacttgaacatttttttaatgatggccattaattttctgacccttataattgcaggctgaagttgcggagacattacaatacatggtgtctcctcaaggg

SEQ ID NO: 10285 - DNA, 1087 bp, Glycine max
  Gm_smallRNAprecursor_3118
ggacctatttgagatatcatgtgctcatcatcagtgtttggctattgcagtgaacaactttcctattttttgcagcaatcgtaaagggtgtagagtgttatacagttcttgttatgttagatatatgaactctacccttttttcttccctcttgattctaacaaaacaggaccttcaaatactgcaaaaatcagcgtttatacttaattagaagctattcttctgctatgccaaaagtggcattcttggtttgcttggctggtatcaaattacccttttgtggaaactattgctatcaccccttgaacatagaagctgcaattgaaaaaactttgcaactaaaaaaaaaaagagtaaaatatacgtcgaccaataagaagactttgtctcagtgattagtattaatcaaagttgttatgttatgtctgtagacaagtgacatcaattttttctgttttccatgtaagtgtgacacgttttgatttagatttgtcaaagtaatatttgttgcgtctatcttgacttatcttctttcactagaagtaacgtttactctcacttatctttttttattgaaagtgacgtcattcaaatctccgtaacttatatcaaacaatctacttctagtcaggattacatcacgtttcgtataaagtctctggatcctgtgatgatgagtaatgtgcttctaatcctttgttggtgtatttggttttaagcagtaatttgacaggtatgattttggcaatgtattgaatttgcaacaaataatgcaacgtgggtgactgggtcttaaagatattgtagttcaattaagctggcaaattgaatcgccagctgaaatataaaaatatatgattatgaacaagttcgaaagcatatacatgtggacgaacgactatatatatggtgttgtttaaactaaagtacatgttgtttaaaattatatgaaatattataggattcactgtagtaaagctgatgagatttaataggattcatataaaattatatgattcagtataatcacaaacaacaatcaaacataaattccttaaaattctaacttttatttcattgtgaaact

SEQ ID NO: 10286 - DNA, 1035 bp, Glycine max
  Gm_smallRNAprecursor_3119
caattttcattatatggtgtcatacaaattctcaattttaatttcttgaacaacattctggattgttattgtggttttgtcagttcatcttgtcttgatatttatgttattccggtctccaaaataagagaaaataaactggaagtggtattgtataagttagaagatatacaaactctagtgtttctgttgatgaatatggattgataacagatatcttctctgttgtgcgtacactttatctaacagtcgcatttaaaatagcttatcatatgttcataaactaattttatcttatatcaatgatctcttcaggataacttatcaaacaacttacaatttacataaataatttaaccctatttcttcttcaagtatagaaacaacttgtatgtaataaacacttacatgatgagctttcgttcaaatacatcctaaatcacatgattccggcagtcccagctgttttgggtgctatgaagctcggatactctaatcccttgccgtgttcggtgttcgacacgcatccgtgtcagtgtccgacaccgacacgacacccctactacgttctatattttggacattacaggtgtccatgtgtcgtgtcatgtccggtgtccatatcggtgtcaatacttcataatttgggtaaacatcaaacatggtataattagtaattacagcaaaagatattgcgtcttatggataaaggcagacaggtgggtcttgacatctcttcttcattatatggttaaaactttgtttatatcttactcttttcttaagtattttcttttttaaatccataccactagcccactaattgtttcttatttctccagttttaaaggagagaaaataaattatgaatctttaaaacaactaagatttctctgtctctctccagtttctaaatgattcggtaagttctattatccagttttgtttgcactgaaaatatttttgaataaataatagagcatatagactgaactctcttatatttatcactcattacatttacaccatcctaat

SEQ ID NO: 10287 - DNA, 1046 bp, Glycine max
  Gm_smallRNAprecursor_3120
atcttcatgattgctaaaggccatcctgttaattattctaaccaagtcatcatgctcgagatcgacggcgtgaattatatcttaaaaacatttttttttaattagccaaaaaaatatattattgatgtacagtgagatataaggtatatcacctgcagaaatcgaaaaccaggccagtacccccgataagatatatatacatatgtacatgcatgcatgttttctttaatttgtaaaatatatttttccccatgcgtccaattaatttgagcaattgatatcgtaacctctacgatttggagatcctcttgtgaagcaatatcttgccacaaaacaagatatggagaccccacataataaaagtcaacgacattttaaggcagcttctactctgtgcagagtgtataaaaagggcttgtgttatatggaccctcttcaaggaattaattaacacaagccaagccaaatcaagtgataatcaatgaaggggttgattgttcactctccctcaagggcttctcgctttaacatccaagaacaagactagaggcccttggggaggagtaaataagctgttccttatatatatatatatatataacacaaagaagttcatcttgtttctcaccttcataatcattaccaaagttggcttcatttccaaacccttttttagtttctttctgagcccaacgttgggtttttatgcggccaatttttagcgtgcattgctgatcaatcacccttggtgagattggatacataatgggaggttgggttcatatccattttgccacgttaaaaatctgtctcatattttagttttctcacttttttaattatggatactcaacaaagttgacccgatgaggttaagcgcgctctctcttgctcaaacttattagcctaattaacatctaagctaataagaatattggttttttttttatattaactttcattatatttttacaattttttctctcttcttaattcttatcaagttatttgacattttacaaactatatagaagagtataaattat

SEQ ID NO: 10288 - DNA, 1045 bp, Glycine max
  Gm_smallRNAprecursor_3121
tcttcatgattgctaaaggccatcctgttaattattctaaccaagtcatcatgctcgagatcgacggcgtgaattatatcttaaaaacatttttttttaattagccaaaaaaatatattattgatgtacagtgagatataaggtatatcacctgcagaaatcgaaaaccaggccagtacccccgataagatatatatacatatgtacatgcatgcatgttttctttaatttgtaaaatatatttttccccatgcgtccaattaatttgagcaattgatatcgtaacctctacgatttggagatcctcttgtgaagcaatatcttgccacaaaacaagatatggagaccccacataataaaagtcaacgacattttaaggcagcttctactctgtgcagagtgtataaaaagggcttgtgttatatggaccctcttcaaggaattaattaacacaagccaagccaaatcaagtgataatcaatgaaggggttgattgttcactctccctcaagggcttctcgctttaacatccaagaacaagactagaggcccttggggaggagtaaataagctgttccttatatatatatatatatataacacaaagaagttcatcttgtttctcaccttcataatcattaccaaagttggcttcatttccaaacccttttttagtttctttctgagcccaacgttgggtttttatgcggccaatttttagcgtgcattgctgatcaatcacccttggtgagattggatacataatgggaggttgggttcatatccattttgccacgttaaaaatctgtctcatattttagttttctcacttttttaattatggatactcaacaaagttgacccgatgaggttaagcgcgctctctcttgctcaaacttattagcctaattaacatctaagctaataagaatattggttttttttttatattaactttcattatatttttacaattttttctctcttcttaattcttatcaagttatttgacattttacaaactatatagaagagtataaattat

SEQ ID NO: 10289 - DNA, 1045 bp, Glycine max; identical to SEQ ID NO: 10288
  Gm_smallRNAprecursor_3122

SEQ ID NO: 10290 - DNA, 1064 bp, Glycine max
  Gm_smallRNAprecursor_3123
ttgaattacatgtttagtttgaatataatcataaaaatgagtttgaatataatcataaaaatgagtctaacgtaaaatatgaataatttaaataagataataacatacgcataataaatttgtctcattctcttaaattatgtgaaaatcactggctaattaggaaagaaaggttttcactctcaaaaatacactgaaacgctctggtttgaatttagttaagggaaaggggggaaaaacggatatgccctatatagaccctcttaatgttagacgcatcactatatcaaccattaataatatggactccggtgtattttgttgttatgaaacatttaaacgttcttcaaaattgaaatgaaaataatgcttaaaagcaacccatatgaagtgaatcctcacgccaatagactgctagggtgttgctaagtgcatgcactcaatacttaaggtgaaatgacgaaaatactcttaattaagtcatttaagttaatccgtaaaagacttacgaatcaacttgatccgtaagccttttacagatcaacttgatctgtagaagccttacttgatccgtaagtcttttacaaattaagttgatccgtatgcttaatatcaacatacgaatcaactagatccgtatcaaccttacggatcaacttgatctgtacgatttacggaccaccctcacacacacccatcacaaatgaaaaaaagcgcaaggaaaattttagtatttaaaaaaaatgctggatgcacctagcaacacccgattggtatcacaagttggcctatacatttaaatgagcagcccgcgagacttattcacaaaattaggctctatatttctaattgatacatgagatcatagtaaaagaatcacattatcacatccaatatggaaaattaaaaacttcttatttgagaataattatatgacaagaacaatttatacaacactatatatattgcaacaaacatcaaaatcgatcaaatgaatgttggcttataaacgattcttcaagttctctaaaacctcggtagacatgttctgtttggttctgtgg

SEQ ID NO: 10291 - DNA, 1155 bp, Glycine max
  Gm_smallRNAprecursor_3124
ttgaattacatgtttagtttgaatataatcataaaaatgagtttgaatataatcataaaaatgagtctaacgtaaaatatgaataatttaaataagataataacatacgcataataaatttgtctcattctcttaaattatgtgaaaatcactggctaattaggaaagaaaggttttcactctcaaaaatacactgaaacgctctggtttgaatttagttaagggaaaggggggaaaaacggatatgccctatatagaccctcttaatgttagacgcatcactatatcaaccattaataatatggactccggtgtattttgttgttatgaaacatttaaacgttcttcaaaattgaaatgaaaataatgcttaaaagcaacccatatgaagtgaatcctcacgccaatagactgctagggtgttgctaagtgcatgcactcaatacttaaggtgaaatgacgaaaatactcttaattaagtcatttaagttaatccgtaaaagacttacgaatcaacttgatccgtaagccttttacagatcaacttgatctgtagaagccttacttgatccgtaagtcttttacaaattaagttgatccgtatgcttaatatcaacatacgaatcaactagatccgtatcaaccttacggatcaacttgatctgtacgatttacggaccaccctcacacacacccatcacaaatgaaaaaaagcgcaaggaaaattttagtatttaaaaaaaatgctggatgcacctagcaacacccgattggtatcacaagttggcctatacatttaaatgagcagcccgcgagacttattcacaaaattaggctctatatttctaattgatacatgagatcatagtaaaagaatcacattatcacatccaatatggaaaattaaaaacttcttatttgagaataattatatgacaagaacaatttatacaacactatatatattgcaacaaacatcaaaatcgatcaaatgaatgttggcttataaacgattcttcaagttctctaaaacctcggtagacatgttctgtttggttctgtggaagggctaacctccgcacttcagtcatatacctgtatgtaaaaagtcaatcagatcaaaactttaactagatataaacaatgcacctcaat

SEQ ID NO: 10292 - DNA, 1154 bp, Glycine max
  Gm_smallRNAprecursor_3125
tgaattacatgtttagtttgaatataatcataaaaatgagtttgaatataatcataaaaatgagtctaacgtaaaatatgaataatttaaataagataataacatacgcataataaatttgtctcattctcttaaattatgtgaaaatcactggctaattaggaaagaaaggttttcactctcaaaaatacactgaaacgctctggtttgaatttagttaagggaaaggggggaaaaacggatatgccctatatagaccctcttaatgttagacgcatcactatatcaaccattaataatatggactccggtgtattttgttgttatgaaacatttaaacgttcttcaaaattgaaatgaaaataatgcttaaaagcaacccatatgaagtgaatcctcacgccaatagactgctagggtgttgctaagtgcatgcactcaatacttaaggtgaaatgacgaaaatactcttaattaagtcatttaagttaatccgtaaaagacttacgaatcaacttgatccgtaagccttttacagatcaacttgatctgtagaagccttacttgatccgtaagtcttttacaaattaagttgatccgtatgcttaatatcaacatacgaatcaactagatccgtatcaaccttacggatcaacttgatctgtacgatttacggaccaccctcacacacacccatcacaaatgaaaaaaagcgcaaggaaaattttagtatttaaaaaaaatgctggatgcacctagcaacacccgattggtatcacaagttggcctatacatttaaatgagcagcccgcgagacttattcacaaaattaggctctatatttctaattgatacatgagatcatagtaaaagaatcacattatcacatccaatatggaaaattaaaaacttcttatttgagaataattatatgacaagaacaatttatacaacactatatatattgcaacaaacatcaaaatcgatcaaatgaatgttggcttataaacgattcttcaagttctctaaaacctcggtagacatgttctgtttggttctgtggaagggctaacctccgcacttcagtcatatacctgtatgtaaaaagtcaatcagatcaaaactttaactagatataaacaatgcacctcaat

SEQ ID NO: 10293 - DNA, 1092 bp, Glycine max
  Gm_smallRNAprecursor_3126
tatattttgaattaattaattcacgtgtctaaaaaatgataacactaaaattcctatgtaatgggttccatgtatataagttaagtaaggggtgagattaaaatctatgcatgtgcatgcataatttgagaagtggattaacatatgtgcatggttttacatggagtacgtgaatgggttgttaggaagttacataaggttacaaaatgaagaggacatggaaagtgtcattgcattggtactagctagctaactaatctagtggaatattttgaggcccttctagccattcttttagcatttttcctataaataggtgctcctgcccagtgagaaatctaacatccaaactcgaattcttctctgctattttatccctcctttgatgattatcatccctttcgtatctctatgtttagggggaggtaacagtgcatggggtgtagaagaataggggaaaagatgagaaggaggcactgctacttggtaattaaggttgttgacagaagatagagagcacagatgatgatatgcatattatataatatatagcagggaactcatgatgaattgtgcatcttactcctttgtgctctctatacttctgtcatcaccttcagcctccatttctcactattccccctctacaccaactgttagctagtgtagtatatacttcgtttctatctactggaactataattcatatataaattactttaataagcctgttcatatataataatttgatgttcaccctgggtatttattacctagctagctagttttctcttctaattgcagattttaccattataccatacaaggtttttaaaaaactgctgggaatgcaatttcggccgcaaggtcatatggagtgtcagctactgcatcgcgattacaattggatccacaatttgttatcagtttaaaaccttcaaaccatattctcctataaatattaatttgcttgtataaatggtgatggctattaacctttgtattttgcagtcagacgtgaactaccgctgtggctgttgaatactacgaatctgtttgttgatggtaggaggaggttagaatgagaaactg

SEQ ID NO: 10294 - DNA, 1087 bp, Glycine max
  Gm_smallRNAprecursor_3127
tattttgaattaattaattcacgtgtctaaaaaatgataacactaaaattcctatgtaatgggttccatgtatataagttaagtaaggggtgagattaaaatctatgcatgtgcatgcataatttgagaagtggattaacatatgtgcatggttttacatggagtacgtgaatgggttgttaggaagttacataaggttacaaaatgaagaggacatggaaagtgtcattgcattggtactagctagctaactaatctagtggaatattttgaggcccttctagccattcttttagcatttttcctataaataggtgctcctgcccagtgagaaatctaacatccaaactcgaattcttctctgctattttatccctcctttgatgattatcatccctttcgtatctctatgtttagggggaggtaacagtgcatggggtgtagaagaataggggaaaagatgagaaggaggcactgctacttggtaattaaggttgttgacagaagatagagagcacagatgatgatatgcatattatataatatatagcagggaactcatgatgaattgtgcatcttactcctttgtgctctctatacttctgtcatcaccttcagcctccatttctcactattccccctctacaccaactgttagctagtgtagtatatacttcgtttctatctactggaactataattcatatataaattactttaataagcctgttcatatataataatttgatgttcaccctgggtatttattacctagctagctagttttctcttctaattgcagattttaccattataccatacaaggtttttaaaaaactgctgggaatgcaatttcggccgcaaggtcatatggagtgtcagctactgcatcgcgattacaattggatccacaatttgttatcagtttaaaaccttcaaaccatattctcctataaatattaatttgcttgtataaatggtgatggctattaacctttgtattttgcagtcagacgtgaactaccgctgtggctgttgaatactacgaatctgtttgttgatggtaggaggaggttagaatgagaaa

SEQ ID NO: 10295 - DNA, 1032 bp, Glycine max
  Gm_smallRNAprecursor_3128
tcaatttaaattgcctatctacctagaaaaaaatatataacaaagcactaaaaatataacacactatcaaactaataataattacctctacaaataaatccactaaaaaatataaactgcctatctgcaaaaaaaaatatacatatatatatatatatatatatatatatataaatataacaatttatatacattaaataaaaaataaaaaaaactcaccaaataaaaaaactaaccaaacaagggaagggaaacctgcaaacaggggagaagctggctgcaaaaaaaaattatatatatataaaaagattaaaatataatcatttatataaataaaataaattaaaaaaacaaaaaaaaaaaaaagaaaaacctgctgctggggaggggggaatgagaaggggactgctgggggggggggaacacgaagggggagtttgggggagggggggacagcttccgtgggggggtttgggggagggggggatcccatttaagggcgcttggacgcgcctggggccagggcgcgaaccaaggcgcctcgggaacggcacgacgggacgcgcctgcgtgcagggcgcgagcagtagcgcctgcatgcagggcgcgaccttcggcgtctgcaccacctgcagcaccgcctgcagcagcggccacgtgtcgcttcctccggtaagcgcccctcaggtaagcaccttccctgcaaaaacagcaccccttagtaaataaaaagcaaagagacccattctggtaaataatttctaaaagtaacccagaatggtgattttgccctctttcaaatggcaaaaacgtaagaagaataattttcatagaaataatgccccacattttcggatggatcactgataagaacatacactacgcttgtgtacgcctaagagtctctccttattgaatatttgggttccaccgtggtaaggcttcgtttggttggatggaagaaaaattgagaagaaaagaaaaatagagaagaaagaaaaaatttaaaatttaaatgaaaaaaatgagagg

SEQ ID NO: 10296 - DNA, 1079 bp, Glycine max
  Gm_smallRNAprecursor_3129
ttggcacaccatttttcaatagacttatttctcttgtaaaaaaataataaaagaaaaaagtctatcactttggtagctcataaaaaatacaaaaagaaacccaaataggattttgaatccgcgcattttctttatatatttcatacattcacaactaaactgtttttgtgagaccattggtcctactttattacaatttaaatctttgaatatcttatttaagttttttttaacaattttctttttatcacaaacgataaacttagattttacaagattttttttgggatgtttgttcatgtttattcaagaatgatgtgaaggtaacaaataaaattgaacacatttagtttccggggagttcctggataccttatacctatgctaaaaacggaaagtgctgctaggtgcaccaacattattgttggtacacccagtactaaccacaaaaagataaaaatatttcttacggatcaaattgatctgtaagttaatttttaagacttacgaatcaacttgatctgcaagtcttttatagatcaagttgatccgtaagttgatttttaagacttacggatcaagttgatccgtaagtcttttacggatcaagttgatccataagttgatttttaagacttacggatcaacttgatccgtaaggggagaaattagcagggacaattttgtcattttcaaagaatgctggttgcaccagcaataatgctggtgcacctagcaacactcaaaacggaaaaaggccaaatgggccgaagacatatgatccagttctcacagtccaatcgacaaacaaacaaatgcacacgttgatgctacacagacgcaccatcctaaaaccccctttacagggttgaattaacttattttgttctcaaaataacttactattattatctctaccgtgtaaatcaattagcacaaaattattctaacttaatcaatgttattgaattcaaatccaaaatatgcaatgacattaaatgattaagaagtgcaaatacaaccagctcaccaaaaaaaaagtacaaatacaaccgtgcatgtattccggtaagaagaag

SEQ ID NO: 10297 - DNA, 1080 bp, Glycine max
  Gm_smallRNAprecursor_3130
ttggcacaccatttttcaatagacttatttctcttgtaaaaaaataataaaagaaaaaagtctatcactttggtagctcataaaaaatacaaaaagaaacccaaataggattttgaatccgcgcattttctttatatatttcatacattcacaactaaactgtttttgtgagaccattggtcctactttattacaatttaaatctttgaatatcttatttaagttttttttaacaattttctttttatcacaaacgataaacttagattttacaagattttttttgggatgtttgttcatgtttattcaagaatgatgtgaaggtaacaaataaaattgaacacatttagtttccggggagttcctggataccttatacctatgctaaaaacggaaagtgctgctaggtgcaccaacattattgttggtacacccagtactaaccacaaaaagataaaaatatttcttacggatcaaattgatctgtaagttaatttttaagacttacgaatcaacttgatctgcaagtcttttatagatcaagttgatccgtaagttgatttttaagacttacggatcaagttgatccgtaagtcttttacggatcaagttgatccataagttgatttttaagacttacggatcaacttgatccgtaaggggagaaattagcagggacaattttgtcattttcaaagaatgctggttgcaccagcaataatgctggtgcacctagcaacactcaaaacggaaaaaggccaaatgggccgaagacatatgatccagttctcacagtccaatcgacaaacaaacaaatgcacacgttgatgctacacagacgcaccatcctaaaaccccctttacagggttgaattaacttattttgttctcaaaataacttactattattatctctaccgtgtaaatcaattagcacaaaattattctaacttaatcaatgttattgaattcaaatccaaaatatgcaatgacattaaatgattaagaagtgcaaatacaaccagctcaccaaaaaaaaagtacaaatacaaccgtgcatgtattccggtaagaagaagg

SEQ ID NO: 10298 - DNA, 1054 bp, Glycine max
  Gm_smallRNAprecursor_3131
cataaaaaatacaaaaagaaacccaaataggattttgaatccgcgcattttctttatatatttcatacattcacaactaaactgtttttgtgagaccattggtcctactttattacaatttaaatctttgaatatcttatttaagttttttttaacaattttctttttatcacaaacgataaacttagattttacaagattttttttgggatgtttgttcatgtttattcaagaatgatgtgaaggtaacaaataaaattgaacacatttagtttccggggagttcctggataccttatacctatgctaaaaacggaaagtgctgctaggtgcaccaacattattgttggtacacccagtactaaccacaaaaagataaaaatatttcttacggatcaaattgatctgtaagttaatttttaagacttacgaatcaacttgatctgcaagtcttttatagatcaagttgatccgtaagttgatttttaagacttacggatcaagttgatccgtaagtcttttacggatcaagttgatccataagttgatttttaagacttacggatcaacttgatccgtaaggggagaaattagcagggacaattttgtcattttcaaagaatgctggttgcaccagcaataatgctggtgcacctagcaacactcaaaacggaaaaaggccaaatgggccgaagacatatgatccagttctcacagtccaatcgacaaacaaacaaatgcacacgttgatgctacacagacgcaccatcctaaaaccccctttacagggttgaattaacttattttgttctcaaaataacttactattattatctctaccgtgtaaatcaattagcacaaaattattctaacttaatcaatgttattgaattcaaatccaaaatatgcaatgacattaaatgattaagaagtgcaaatacaaccagctcaccaaaaaaaaagtacaaatacaaccgtgcatgtattccggtaagaagaaggccattatcaatctattaaaattttcataagaaattaatttttctaatagaca

SEQ ID NO: 10299 - DNA, 1053 bp, Glycine max
  Gm_smallRNAprecursor_3132
ataaaaaatacaaaaagaaacccaaataggattttgaatccgcgcattttctttatatatttcatacattcacaactaaactgtttttgtgagaccattggtcctactttattacaatttaaatctttgaatatcttatttaagttttttttaacaattttctttttatcacaaacgataaacttagattttacaagattttttttgggatgtttgttcatgtttattcaagaatgatgtgaaggtaacaaataaaattgaacacatttagtttccggggagttcctggataccttatacctatgctaaaaacggaaagtgctgctaggtgcaccaacattattgttggtacacccagtactaaccacaaaaagataaaaatatttcttacggatcaaattgatctgtaagttaatttttaagacttacgaatcaacttgatctgcaagtcttttatagatcaagttgatccgtaagttgatttttaagacttacggatcaagttgatccgtaagtcttttacggatcaagttgatccataagttgatttttaagacttacggatcaacttgatccgtaaggggagaaattagcagggacaattttgtcattttcaaagaatgctggttgcaccagcaataatgctggtgcacctagcaacactcaaaacggaaaaaggccaaatgggccgaagacatatgatccagttctcacagtccaatcgacaaacaaacaaatgcacacgttgatgctacacagacgcaccatcctaaaaccccctttacagggttgaattaacttattttgttctcaaaataacttactattattatctctaccgtgtaaatcaattagcacaaaattattctaacttaatcaatgttattgaattcaaatccaaaatatgcaatgacattaaatgattaagaagtgcaaatacaaccagctcaccaaaaaaaaagtacaaatacaaccgtgcatgtattccggtaagaagaaggccattatcaatctattaaaattttcataagaaattaatttttctaatagaca

SEQ ID NO: 10300 - DNA, 1192 bp, Glycine max
  Gm_smallRNAprecursor_3133
cattttctattgatttcttcctcatttgatccaagatgaatagcacacatgcacttgacatgttaccatactcgctgagcacatgtctagtagcttccattttttcaggcttcaagcctaacttagcctcaacttggtccaaaattgcgggtccaccagggtgtgcaatccagaagatagaattgtaatcggagattcccaagggttggaaggcttcaaccaaggccttctcaatattcttggagatgagtccaggaacatccttgaggagatggaaagtgagaccaacttcgcgaaggtgtccatcaatagccccttcactgtctggaaggattgtctgggcagtccagacaagctgaaacaaaggcttttcaactggtaaggggtctgatccaacaatgacagcggctgcaccatctccaaacaaggcttgacccacaaggctatcaagatgggtgtcagttgggccgcggaatgtgactgcggtgatctcagaacaaacgacaagcacgcgagcacccttgttgttttcagcgaggtctttggccaaacgaagcaccgtgccaccggcaaagcagccttgttggtacatcatgtaacgcttgacggaggggcgaaggcctaatagtttagtgagctgataatcagcaccaggcatgtcgacaccactagtggtgcaaaagatgagatgggtaatcttggacttgggttgaccccattccttgattgccttagttgcagcctcttttcccaactttggtacctccacaaccaccatgtcttgccttgcatccaacgaaggtgccatgtaagcacaaacactcggattctctttcaggatttcttcatttaagtacatgtatcgcttcttaatcatcgacttatcacctgatcgaaataataaattaaatttcattaatatcactaatcaaatcaaaggaatatgttgaaaataagcaatatacatattgtataaagaaatgaagaaaggagagagatatatatcttacacatgcgcttgaatttttctttgagctcggtcatgtgctcgctgttggtgatgcggaaataatagtcaggataggtactctgatcgacacagtttggaggagttgcggtgccaatagccatgacagtggcagggccctctgcacgttgtgcattacggatctcttcaacactgaccatccta

SEQ ID NO: 10301 - DNA, 1192 bp, Glycine max; identical to SEQ ID NO: 10300
  Gm_smallRNAprecursor_3134

SEQ ID NO: 10302 - DNA, 1193 bp, Glycine max
  Gm_smallRNAprecursor_3135
cattttctattgatttcttcctcatttgatccaagatgaatagcacacatgcacttgacatgttaccatactcgctgagcacatgtctagtagcttccattttttcaggcttcaagcctaacttagcctcaacttggtccaaaattgcgggtccaccagggtgtgcaatccagaagatagaattgtaatcggagattcccaagggttggaaggcttcaaccaaggccttctcaatattcttggagatgagtccaggaacatccttgaggagatggaaagtgagaccaacttcgcgaaggtgtccatcaatagccccttcactgtctggaaggattgtctgggcagtccagacaagctgaaacaaaggcttttcaactggtaaggggtctgatccaacaatgacagcggctgcaccatctccaaacaaggcttgacccacaaggctatcaagatgggtgtcagttgggccgcggaatgtgactgcggtgatctcagaacaaacgacaagcacgcgagcacccttgttgttttcagcgaggtctttggccaaacgaagcaccgtgccaccggcaaagcagccttgttggtacatcatgtaacgcttgacggaggggcgaaggcctaatagtttagtgagctgataatcagcaccaggcatgtcgacaccactagtggtgcaaaagatgagatgggtaatcttggacttgggttgaccccattccttgattgccttagttgcagcctcttttcccaactttggtacctccacaaccaccatgtcttgccttgcatccaacgaaggtgccatgtaagcacaaacactcggattctctttcaggatttcttcatttaagtacatgtatcgcttcttaatcatcgacttatcacctgatcgaaataataaattaaatttcattaatatcactaatcaaatcaaaggaatatgttgaaaataagcaatatacatattgtataaagaaatgaagaaaggagagagatatatatcttacacatgcgcttgaatttttctttgagctcggtcatgtgctcgctgttggtgatgcggaaataatagtcaggataggtactctgatcgacacagtttggaggagttgcggtgccaatagccatgacagtggcagggccctctgcacgttgtgcattacggatctcttcaacactgaccatcctag

SEQ ID NO: 10303 - DNA, 1193 bp, Glycine max; identical to SEQ ID NO: 10302
  Gm_smallRNAprecursor_3136

SEQ ID NO: 10304 - DNA, 1192 bp, Glycine max
  Gm_smallRNAprecursor_3137
cattttctattgatttcttcctcatttgatccaagatgaatagcacacatgcacttgacatgttaccatactcgctgagcacatgtctagtagcttccattttttcaggcttcaagcctaacttagcctcaacttggtccaaaattgcgggtccaccagggtgtgcaatccagaagatagaattgtaatcggagattcccaagggttggaaggcttcaaccaaggccttctcaatattcttagagatgagtccaggaacatccttgaggagatggaaagtgagtccaacttcgcgaaggtggccatcaatagccccttcactgtctggaaggattgtttgggcagtccagataagctgaaacaaaggcttttcaactggtaaggggtctgatccaacaatgacagcggctgcaccatctccaaacaaggcttgacccacaaggctatcaagatgggtgtcagttgggccgcggaatgtgactgcggtgatctcagaacaaacgacaagcacgcgagcacccttgttgttttcagcgaggtctttggccaaacgaagcaccgtgccaccggcaaagcagccttgttggtacatcatgtaacgcttgacggagggacgaaggcctaatagtttagtgagctgataatcagcaccaggcatgtcgacaccactagtggtgcaaaagatgagatgggtaatcttggacttgggttgaccccattccttgattgccttagttgcagcctcttttcccaactttggtacctccacaaccaccatgtcttgccttgcatccaacgaaggtgccatatatgcacaaacactgggattctccttcaggatctcttcgtttaagtacatgtatagcttcttaatcatcgacttatcacctgatcgaaataaaaaagttaaatatcattagtatgtattattaatcaaataaatggtgtatgttgaaaataaacaatatacatattatatagtatactgaaatgaagataggataaaagagagagatataaatcttacacatgcgcttgaacttttctttgagctcagtcatgtgctcactgttggtgatgcggaaataatagtcaggataagtactctgatcgacgcagtttggaggagtggcagtgccgatggccatgacggtggcagggccttctgcacgttgtgccttacggattgctt

SEQ ID NO: 10305 - DNA, 1192 bp, Glycine max; identical to SEQ ID NO: 10304
  Gm_smallRNAprecursor_3138

SEQ ID NO: 10306 - DNA, 1193 bp, Glycine max
  Gm_smallRNAprecursor_3139
cattttctattgatttcttcctcatttgatccaagatgaatagcacacatgcacttgacatgttaccatactcgctgagcacatgtctagtagcttccattttttcaggcttcaagcctaacttagcctcaacttggtccaaaattgcgggtccaccagggtgtgcaatccagaagatagaattgtaatcggagattcccaagggttggaaggcttcaaccaaggccttctcaatattcttagagatgagtccaggaacatccttgaggagatggaaagtgagtccaacttcgcgaaggtggccatcaatagccccttcactgtctggaaggattgtttgggcagtccagataagctgaaacaaaggcttttcaactggtaaggggtctgatccaacaatgacagcggctgcaccatctccaaacaaggcttgacccacaaggctatcaagatgggtgtcagttgggccgcggaatgtgactgcggtgatctcagaacaaacgacaagcacgcgagcacccttgttgttttcagcgaggtctttggccaaacgaagcaccgtgccaccggcaaagcagccttgttggtacatcatgtaacgcttgacggagggacgaaggcctaatagtttagtgagctgataatcagcaccaggcatgtcgacaccactagtggtgcaaaagatgagatgggtaatcttggacttgggttgaccccattccttgattgccttagttgcagcctcttttcccaactttggtacctccacaaccaccatgtcttgccttgcatccaacgaaggtgccatatatgcacaaacactgggattctccttcaggatctcttcgtttaagtacatgtatagcttcttaatcatcgacttatcacctgatcgaaataaaaaagttaaatatcattagtatgtattattaatcaaataaatggtgtatgttgaaaataaacaatatacatattatatagtatactgaaatgaagataggataaaagagagagatataaatcttacacatgcgcttgaacttttctttgagctcagtcatgtgctcactgttggtgatgcggaaataatagtcaggataagtactctgatcgacgcagtttggaggagtggcagtgccgatggccatgacggtggcagggccttctgcacgttgtgccttacggattgcttc

SEQ ID NO: 10307 - DNA, 1193 bp, Glycine max; identical to SEQ ID NO: 10306
  Gm_smallRNAprecursor_3140

SEQ ID NO: 10308 - DNA, 1192 bp, Glycine max
  Gm_smallRNAprecursor_3141
cattttctattgatttcttcctcatttgatccaagatgaatagcacgcatgcacttgacatgttaccatactcgctgagcacatgtctagtagcttccattttttcaggcttcaggcctaacttagcctcaacttggtccaaaattgcgggtccaccagggtgtgcaatccagaagatagaattgtaatcggagattcccaagggttggaaggcttcaaccaaggccttctcaatattcttggagatgagtccaggaacatccttgaggagatggaaagtgagaccaacttcgcgaaggtgtccatcaatagccccttcactgtctggaaggattgtctgggcagtccagacaagctgaaacaaaggcttttcaactggtaaggggtctgatccaacaatgacagcggctgcaccatctccaaacaaggcttgacccacaaggctatcaagatgggtgtcagttgggccgcgaaatgtgactgcggtgatctcagaacaaacgacaagcacgcgagcacccttgttgttttcagcgaggtctttggccaaacgaagcaccgtgccaccggcaaagcagccttgttggtacatcatgtaacgcttgacggaggggcgaaggcctaatagtttagtgagctgataatcagcaccaggcatgtcgacaccactagtggtgcaaaagatgagatgggtaatcttggacttgggttgaccccattccttgattgccttagttgcagcctcttttcccaactttggtacctccacaaccaccatgtcttgccttgcatccaacgaaggtgccatgtaagcacaaacactcggattctctttcaggatctcttcgtttaagtacatgtatcgcttcttaatcatcgacttatcacctgatcgaaataataaattaaatttcattaatatcactaatcaaatcaaaggaatatgttgaaaataaacaatatacatattgtataaagaaatgaagaaaggagagagatatatatcttacacatgcgcttgaatttttctttgagctcggtcatgtgctcgctgttggtgatgcggaaataatagtcaggataggtactctgatccacgcagttgggaggagtggcggtgccaatagccatgacagtggcagggccttctgcacgttgcgccttacgaatctcttcaacactcaccatccta

SEQ ID NO: 10309 - DNA, 1192 bp, Glycine max; identical to SEQ ID NO: 10308
  Gm_smallRNAprecursor_3142

SEQ ID NO: 10310 - DNA, 1193 bp, Glycine max
  Gm_smallRNAprecursor_3143
cattttctattgatttcttcctcatttgatccaagatgaatagcacgcatgcacttgacatgttaccatactcgctgagcacatgtctagtagcttccattttttcaggcttcaggcctaacttagcctcaacttggtccaaaattgcgggtccaccagggtgtgcaatccagaagatagaattgtaatcggagattcccaagggttggaaggcttcaaccaaggccttctcaatattcttggagatgagtccaggaacatccttgaggagatggaaagtgagaccaacttcgcgaaggtgtccatcaatagccccttcactgtctggaaggattgtctgggcagtccagacaagctgaaacaaaggcttttcaactggtaaggggtctgatccaacaatgacagcggctgcaccatctccaaacaaggcttgacccacaaggctatcaagatgggtgtcagttgggccgcgaaatgtgactgcggtgatctcagaacaaacgacaagcacgcgagcacccttgttgttttcagcgaggtctttggccaaacgaagcaccgtgccaccggcaaagcagccttgttggtacatcatgtaacgcttgacggaggggcgaaggcctaatagtttagtgagctgataatcagcaccaggcatgtcgacaccactagtggtgcaaaagatgagatgggtaatcttggacttgggttgaccccattccttgattgccttagttgcagcctcttttcccaactttggtacctccacaaccaccatgtcttgccttgcatccaacgaaggtgccatgtaagcacaaacactcggattctctttcaggatctcttcgtttaagtacatgtatcgcttcttaatcatcgacttatcacctgatcgaaataataaattaaatttcattaatatcactaatcaaatcaaaggaatatgttgaaaataaacaatatacatattgtataaagaaatgaagaaaggagagagatatatatcttacacatgcgcttgaatttttctttgagctcggtcatgtgctcgctgttggtgatgcggaaataatagtcaggataggtactctgatccacgcagttgggaggagtggcggtgccaatagccatgacagtggcagggccttctgcacgttgcgccttacgaatctcttcaacactcaccatcctag

SEQ ID NO: 10311 - DNA, 1193 bp, Glycine max; identical to SEQ ID NO: 10310
  Gm_smallRNAprecursor_3144

SEQ ID NO: 10312 - DNA, 1141 bp, Glycine max
  Gm_smallRNAprecursor_3145
gtgctcgcgtgcttgtcgtttgttctgagatcaccgcagtcacattccgcggcccaactgacacccatcttgatagccttgtgggtcaagccttgtttggagatggtgcagccgctgtcattgttggatcagaccccttaccagttgaaaagcctttgtttcagcttgtctggactgcccagacaatccttccagacagtgaaggggctattgatggacaccttcgcgaagttggtctcactttccatctcctcaaggatgttcctggactcatctccaagaatattgagaaggccttggttgaagccttccaacccttgggaatctccgattacaattctatcttctggattgcacaccctggtggacccgcaattttggaccaagttgaggctaagttaggcttgaagcctgaaaaaatggaagctactagacatgtgctcagcgagtatggtaacatgtcaagtgcatgtgtgctattcatcttggatcaaatgaggaagaaatcaatagaaaatggacttggcacaaccggtgaaggccttgactggggtgtgctatttggtttcggccctggactcaccgttgagactgttgtgctccgcagtgtcactgtctaatccatatatcttgtgcaagaccaagtccttttctttcttattcattctttcatgttgagtttgaaaaatgtattctttctcttcctttttttccctgcttccctcacatgcttctttttttatatcagtaaataagaacatgttatattactattaatgcaattaagttttcacaaaattcatctatatattcagttgcaaagtgaatatctcttgtccaatttcatctttattgaaagattctttgtgacttgctataaaagtgactgtagaactttgcaggtttatggcttaattgtgtaaagagaatagtgccaattaacgtagtccacttaggcttaattttttttttttttttttgtgttgattgagttatctaactgtgagtctgtgagaaaaacattataaaaaagggattaataagtatcaagtaaacctagtaggtaagaaattgcacttcctaccttgattacttaatgaacaaaatctaagtcgacaaagtggttggactgctcttcgca

SEQ ID NO: 10313 - DNA, 1192 bp, Glycine max
  Gm_smallRNAprecursor_3146
cattttctattgatttcttccgcatttgatccaagatgaatagcacacatgcacttgacatgttaccatactcgctgagcacatgcctagtagcttccattttttcaggcttcaagcctaacttagcctccacttggtccaaaattgcgggtccaccagggtgtgcaatccagaagatagaattgtaatcggagattcccaagggttggaaggcttcaaccaaggccttctcaatattcttggagatgagtccaggaacatccttgaggagatggaaagtgagaccaacttcgcgaaggtgtccatcaatagccccttcactgtctggaaggattgtctgggcagtccagacaagctgaaacaaaggcttttcaactggtaaggggtctgatccaacaatgacagcggctgcaccatctccaaacaaggcttgacccacaaggctatcaagatgggtgtcagttgggccgcggaatgtgactgcggtgatctcagaacaaacgacaagcacgcgagcacccttgttgttttcagcgaggtctttggccaaacgaagcaccgtgccaccggcaaagcagccttgttggtacatcatgtaacgcttgacggagggacgaaggcctaatagtttagtgagctgataatcagcaccaggcatgtcgacaccactagtggtgcaaaagatgagatgggtaatcttggacttgggttgaccccattccttgattgccttagttgcagcctcttttcccaactttggtacctccataaccaccatgtcttgccttgcatccaacgaaggtgccatatatgcacaaacactgggattctccttcaggatctcttcgtttaagtacatgtatcgcttcttaatcatcgacttatcacctgaaataataaattaaatttcattgatatcattaatgaaatcaaaggtatatgttggaaataagcaacatgcatattatataatgaaatgaagataggataaaagagagagatatcttacacatgcgtttgaatttttctttgagctcggtcatgtgctcgctgttggtgatgcggaaataatagtcaggataggtactctgatccacgcagttgggaggagtggcggtgccaatagccatgacagtggcagggccttctgcacgttgtgcctgacggatctcttcaacactcaccatcctag

SEQ ID NO: 10314 - DNA, 1192 bp, Glycine max; identical to SEQ ID NO: 10313
  Gm_smallRNAprecursor_3147

SEQ ID NO: 10315 - DNA, 1193 bp, Glycine max
  Gm_smallRNAprecursor_3148
cattttctattgatttcttccgcatttgatccaagatgaatagcacacatgcacttgacatgttaccatactcgctgagcacatgcctagtagcttccattttttcaggcttcaagcctaacttagcctccacttggtccaaaattgcgggtccaccagggtgtgcaatccagaagatagaattgtaatcggagattcccaagggttggaaggcttcaaccaaggccttctcaatattcttggagatgagtccaggaacatccttgaggagatggaaagtgagaccaacttcgcgaaggtgtccatcaatagccccttcactgtctggaaggattgtctgggcagtccagacaagctgaaacaaaggcttttcaactggtaaggggtctgatccaacaatgacagcggctgcaccatctccaaacaaggcttgacccacaaggctatcaagatgggtgtcagttgggccgcggaatgtgactgcggtgatctcagaacaaacgacaagcacgcgagcacccttgttgttttcagcgaggtctttggccaaacgaagcaccgtgccaccggcaaagcagccttgttggtacatcatgtaacgcttgacggagggacgaaggcctaatagtttagtgagctgataatcagcaccaggcatgtcgacaccactagtggtgcaaaagatgagatgggtaatcttggacttgggttgaccccattccttgattgccttagttgcagcctcttttcccaactttggtacctccataaccaccatgtcttgccttgcatccaacgaaggtgccatatatgcacaaacactgggattctccttcaggatctcttcgtttaagtacatgtatcgcttcttaatcatcgacttatcacctgaaataataaattaaatttcattgatatcattaatgaaatcaaaggtatatgttggaaataagcaacatgcatattatataatgaaatgaagataggataaaagagagagatatcttacacatgcgtttgaatttttctttgagctcggtcatgtgctcgctgttggtgatgcggaaataatagtcaggataggtactctgatccacgcagttgggaggagtggcggtgccaatagccatgacagtggcagggccttctgcacgttgtgcctgacggatctcttcaacactcaccatcctagc

SEQ ID NO: 10316 - DNA, 1193 bp, Glycine max; identical to SEQ ID NO: 10315
  Gm_smallRNAprecursor_3149

SEQ ID NO: 10317 - DNA, 1120 bp, Glycine max
  Gm_smallRNAprecursor_3150
agtacacttaattaatcacattatcactagttcatctgtgtaagttaagagtgtaattactacaaaagcaatagtaccttttgttaaatgttaaggggagttgatcaataaaaaagtttagaaactaaaaaaatcctaaaatacttaagactaaaaaactaataaactctaaaaataacattattaagaaacattttgcggggtggctcttggatggacttgctggtttcttgacagatttttttattaagaaacatttgggaaataatgaggcacgatataggagatacaatgtttgttttcctttcttagtttatctgatctttgtgaaggttaacttatcatgcattagcctgtaaaaaaaaattatgaacttgttctatttattactgtctaaaaatgttgttgctgcaattctacagaggaaatggagaacgggaagcggtgggggtaacagctaccggcaatcacaaaaaaaaaactatctaagacagttctaaaagaaccgtcgtagtatgtctacgaaactaaggcggtcatggtaataactgtcgtagcaattcaacagcaaaaacgctattctaagacggttattttgataaccgtcttagttactaagacatactacgacggttcttttaaaaccgtcttagaactcgcatgctgactacaacatattacatcgggtttagtacgtggaccgcctttgtatctactacattctaagacggttattaaataaccgtcttagaaaacattagcttttacgacggttcaaaaaccgtcgttgtaagtgtattgtgatattacgacactggcttataagacggttcaaaaccgtcgtaaaaggtcttaaataaccgacctaaaagatcattattgtagtagtgagcgcaaattcaacaatccagtcatatacataacagagaatggtatttcaaaatttacataacataataatttatccattatgatgtggtagatggtcaattacagaagagatataatcttttttaaaattatattaatgaaattattgtacataatttgcaggttacgataattttaatgatgaaaaagtatcacagctcaaagaccaagagagaatagattgccacat

SEQ ID NO: 10318 - DNA, 1118 bp, Glycine max
  Gm_smallRNAprecursor_3151
gtacacttaattaatcacattatcactagttcatctgtgtaagttaagagtgtaattactacaaaagcaatagtaccttttgttaaatgttaaggggagttgatcaataaaaaagtttagaaactaaaaaaatcctaaaatacttaagactaaaaaactaataaactctaaaaataacattattaagaaacattttgcggggtggctcttggatggacttgctggtttcttgacagatttttttattaagaaacatttgggaaataatgaggcacgatataggagatacaatgtttgttttcctttcttagtttatctgatctttgtgaaggttaacttatcatgcattagcctgtaaaaaaaaattatgaacttgttctatttattactgtctaaaaatgttgttgctgcaattctacagaggaaatggagaacgggaagcggtgggggtaacagctaccggcaatcacaaaaaaaaaactatctaagacagttctaaaagaaccgtcgtagtatgtctacgaaactaaggcggtcatggtaataactgtcgtagcaattcaacagcaaaaacgctattctaagacggttattttgataaccgtcttagttactaagacatactacgacggttcttttaaaaccgtcttagaactcgcatgctgactacaacatattacatcgggtttagtacgtggaccgcctttgtatctactacattctaagacggttattaaataaccgtcttagaaaacattagcttttacgacggttcaaaaaccgtcgttgtaagtgtattgtgatattacgacactggcttataagacggttcaaaaccgtcgtaaaaggtcttaaataaccgacctaaaagatcattattgtagtagtgagcgcaaattcaacaatccagtcatatacataacagagaatggtatttcaaaatttacataacataataatttatccattatgatgtggtagatggtcaattacagaagagatataatcttttttaaaattatattaatgaaattattgtacataatttgcaggttacgataattttaatgatgaaaaagtatcacagctcaaagaccaagagagaatagattgccaca

SEQ ID NO: 10319 - DNA, 1119 bp, Glycine max
  Gm_smallRNAprecursor_3152
gtacacttaattaatcacattatcactagttcatctgtgtaagttaagagtgtaattactacaaaagcaatagtaccttttgttaaatgttaaggggagttgatcaataaaaaagtttagaaactaaaaaaatcctaaaatacttaagactaaaaaactaataaactctaaaaataacattattaagaaacattttgcggggtggctcttggatggacttgctggtttcttgacagatttttttattaagaaacatttgggaaataatgaggcacgatataggagatacaatgtttgttttcctttcttagtttatctgatctttgtgaaggttaacttatcatgcattagcctgtaaaaaaaaattatgaacttgttctatttattactgtctaaaaatgttgttgctgcaattctacagaggaaatggagaacgggaagcggtgggggtaacagctaccggcaatcacaaaaaaaaaactatctaagacagttctaaaagaaccgtcgtagtatgtctacgaaactaaggcggtcatggtaataactgtcgtagcaattcaacagcaaaaacgctattctaagacggttattttgataaccgtcttagttactaagacatactacgacggttcttttaaaaccgtcttagaactcgcatgctgactacaacatattacatcgggtttagtacgtggaccgcctttgtatctactacattctaagacggttattaaataaccgtcttagaaaacattagcttttacgacggttcaaaaaccgtcgttgtaagtgtattgtgatattacgacactggcttataagacggttcaaaaccgtcgtaaaaggtcttaaataaccgacctaaaagatcattattgtagtagtgagcgcaaattcaacaatccagtcatatacataacagagaatggtatttcaaaatttacataacataataatttatccattatgatgtggtagatggtcaattacagaagagatataatcttttttaaaattatattaatgaaattattgtacataatttgcaggttacgataattttaatgatgaaaaagtatcacagctcaaagaccaagagagaatagattgccacat

SEQ ID NO: 10320 - DNA, 1123 bp, Glycine max
  Gm_smallRNAprecursor_3153
atgtattaaaaagcaagaaaaaagcagtcaaaacaaagagttattcagtcccaaatacttttcctcctgttctatatttttcttttttggtgaaggttattctatatattcgatctgcataatttacattagctactgttcatcataaaactagctccttgagggttgagtgttagtaggtgcacccagcattctaaaaaaataattaaattacctttatttgattttcctcttccggatcaacttgatccataacttccggatcaacttaattcggaagtctctttcggatcaacttgattcagaagaggaaaaataaaatttttgttaattatacaagatatttaaatatatttatttcattaattataatataattaaatatatttatttattttattaattataatatatttataaatattgatttattataaataattaatgttaatcaatcataatcataatttatgctaatcaatgaatcatgttaatcaatcaatcataatcataattcatgctaatcaatcaatcatgctaatcaatcataattccctaaaagaggatataaataatttgagagttagtaattatgattgattagcatgattgattgattagcatgaattatgattatgattgattaggcttgattatttataatacatcaatatttctcaatctattataattgttaaattaaataaatatatttaattatattataattaatgaaataaatatctttaaatgtataaattatattataaaataaatatctttaaatatcttgtataattaacaaaatttttatttttcctcttccggatcaagttgatccagaagtctctttcggatcaacttgatccgtaagagacttccggatcaagttgatccgaaagttacagatcaacttgatccagaagggaaaaaccaagcaaggacaattttgttatttttttagaatgttgggtgcaccaacaataatgctgggtgcacctagcaaggtttaataccaacatctcctctggaataccaccaacaagccccacctatccactttgctgaccaattccaattaaatgcaaccttctgccaacaacttcatgttcttctgactttc

SEQ ID NO: 10321 - DNA, 1035 bp, Glycine max
  Gm_smallRNAprecursor_3154
ctgctttcttttttcttcataattctcattctgatattgtatccgatgagtgttcatagctttagtcatgactgagctttagaattaggtgatgtcaattttgatattcggaaagaacataggtttaatggtttgatttgatgcttgaatgctcttgtgggagttgagtccttggctactagcctgtttcaaatcctcattcatacgaaagtttgttgagtgttgtcatttgcttattcaaaagagacgggtacataggttgatttcttttcctgggtaagggaagagggtaatcactttaaatttacaaaggataatatgttacactgggtatctgggtggacctgtaaatttctacatatgttacagtatctgggtggacctgttggatttttggagtcttggagtgaagttctgaaggatggcatggcttcggtcccacattggttaattatctgatatgagtgatgtttatatagtattgatgcacacaagtgattggccaaacctaaaagattccaaacaaaaactactgaaactcttaagtttggccttttagctttcaatccaatttaatattttttttataaaaattaatacttaatgattttttttagtttttgttgttgatcctttatgtagggtttctcaaagtgatatctcagtgaggtaaatctttaaccctcctccctataacttaaattgtaagatattaattataaatgcgtaaatttattttttttagtgggtttggtccatttttcattatctttttcccctatttcaaaaggtgtattcttttatatatatatatatatatatatatatatatatatatatatatgtatatatataaaataatttatattataatcttgcttatttatctagaatatatttttgggtaaaattaatttaatactaaattttgtaaaatattcttatgaacttttatgaaatttaaaaggttaaacccctctcttgtgccgaactctctcttgcaaaaggctagtcctcagttttttcaacgcataa

SEQ ID NO: 10322 - DNA, 1151 bp, Glycine max
  Gm_smallRNAprecursor_3155
tgaccgttaattaagaaagagagcgttgatcacacgagccaatagaagcaacctgaacccttaatcacgagaaattattaggttgatgggttaggttagttttatataaatatgatgatatgatatgatatgatgtatataacatgcaccttatggcttatggatgggacgtgttatgttatgtgatgaaaataattagaagagaaacattgaattataaataaaaaataaataaaggttaggttttatatatatgggtgagagtctcctttgtttttgctctctctttctctttctctatcactgcttgctgtagcttacgttccatctccttttttttttctctctctctctcaaactcgtttgtgctgagagaaccaagggtttcttcccttgcagagaagaaaatttggatacatatggttaagtttatttagatatcttgtttgttctttcatctttctcagatatggtttggaaatgggagattggggatgatgggaatgttgtttggctcgaggtaactgcatggtcttaattttgttcatcttttgaagctttaatttatttatgggtttcaatcttttttgatcccttgaaacagaaaaagctttaaaggttggattttgaggctatccctttatgtgatctcggaccaggcttcattcccgtcaaccttatctctctctcttgagatcttctcccatggaggggtgatggcttatggtaattaattaaggcgatgtcaaaacaagactcttgtgatagatatatctggtcaatgatgacattaaaactctcttgtttgttattttttatcggtaaatatgttacttgttaaaatattagttttgttattaagattgatctgtaattttttttcttaaccatccaatctattatatatctcctatacttatttgttttgtttgtgtttgtaaattcagacattgcatgggacaaaacttgaaacatttgtcaagaactctattgaacaagatgcctttgaccttgttgtaattggtgctttgttttttgtcatctttcttatggctccattatactttatatatcttcatttctttcaacatctctctcgatcgtgagttaatttaacggttgagacttgagatttgtgctattatatatta

SEQ ID NO: 10323 - DNA, 1169 bp, Glycine max
  Gm_smallRNAprecursor_3156
ttctaataatttgcataaaaagagaatctggctttggcaacatgtaaaaatggatatttgacaagtactgaagactgctaattgttattgtggactgaaacgatataacagttctacataattgataatgatcagaaaaaaaagagtcttatcattattattattattatgttccaagaaatgactaaattgtccatattatccaataccggatacaaactctaatgtcatcatgaatttctaatctcatgcaagcaaatcccttcttaatccctcaacattggcataattctagtgaattcaccagataaaataaaataagacttacttgggacttcaaagctaggatgtgacgattgtggttgtgaccaagctgaactctgtgctcctattgttgctgcagaggaagaaaaccaaggttgatatgatttgtggtgttgatgagatgatccactcccttgagacaacatcaaagtgttgaactgcatggaattctgaggtaacgttgaagcattgctgctttcttggaacacatttccctaataacataaactaggatgtgatggatgtggctgtggctgtgaggatgaattggatggtcaagaaagcagttcttcgagaagtcttcataactccaatgccattaagagaaaatttggccaagaaagcagcaatgcttcaacgttacctcagcaattctttgcattgattcttcaactaacgcacaaaaatttccatctggattgattctatgtatcttaaattaatagaatatcaaagataaactgattagttgggctaagaataccaatctaatatcttatcatatattctcagataagattagttagactaacaatactgataaaatatcttatcatatattatatcataaacaatctaataaaaaaaatcaagattgttatcttattaaaatataagaacaaattattttactacctatatatatatgggttataagcggaaaaatctctcgttttgaaaagtttatagaccagtcttcttaaacggttcatgattatgtcatatttttgggtcaatcccatctaacccgttgactatgcggatttggtccacgggttgtccgcagcccgcattaggtttgattttcgtgattctgacccaattatattcggtttgtaacattt

SEQ ID NO: 10324 - DNA, 1079 bp, Glycine max
  Gm_smallRNAprecursor_3157
cgtaccaaagcctgcgctttctacaaacatgaaacctacatttcctaccaaaagcactttcaagccaaaaacaaagtgcttaaaacttacttagagttaaaagaaactccacgtaataaactaaataatagcataaaaacccaaattttactcaagagttagccatttaaaaaaaaaagtatattacggtaatctgtttgaagtccatctagtgatggtggcaaggtaggcaaaactactccttgatgatcattctgagattgaatgagaattttattctacaagatttatttatcacgttgactggtccaatccacaatatcaccatttagtggatgggtgttgctaggtgcacccagcacttaaggtaaaatgataaaaatatctttgatccgtaagccatttaagttgatccgtaaaagacttacagatcaacttgatccatagaaaccttacggatcaacttgatccgtaagccttttacggaacaatacggatcaacatgatccgtaagctttttacggatcaacttgatccgtaagacttttacgaatcatgttgatccgtattattccgtaaaaggcttacagatcaagttgatccgtatcgatcttacggattaacttgatccgtacaatttacggatcatccttacacacatccatcacaaatacgaaaaaagtgtagggacaattttggtattttaattaaatgttgggtgcacctaacaacactcttagtggattagaccaatcctcaaccccaatgagtccattggcccactcaaattcaccatgatgattagtccaatccaaagactcaccaagttgattaattgaatcttgaggaacaacaacttgattagtaaaatctaccatcttattttttgctttgagtgacctcaaagtttgaagtgtgatcagttggctctgagagttgttctgcaagcaattaagtttgctttgagccatgcttggcatataactagagcaattagcatcatcttgttgaatgtttctcaacatattaattccatgactagaagctccaccaacctgatttgttgaatttgcaaaatt

SEQ ID NO: 10325 - DNA, 1054 bp, Glycine max
  Gm_smallRNAprecursor_3158
catgaaacctacatttcctaccaaaagcactttcaagccaaaaacaaagtgcttaaaacttacttagagttaaaagaaactccacgtaataaactaaataatagcataaaaacccaaattttactcaagagttagccatttaaaaaaaaaagtatattacggtaatctgtttgaagtccatctagtgatggtggcaaggtaggcaaaactactccttgatgatcattctgagattgaatgagaattttattctacaagatttatttatcacgttgactggtccaatccacaatatcaccatttagtggatgggtgttgctaggtgcacccagcacttaaggtaaaatgataaaaatatctttgatccgtaagccatttaagttgatccgtaaaagacttacagatcaacttgatccatagaaaccttacggatcaacttgatccgtaagccttttacggaacaatacggatcaacatgatccgtaagctttttacggatcaacttgatccgtaagacttttacgaatcatgttgatccgtattattccgtaaaaggcttacagatcaagttgatccgtatcgatcttacggattaacttgatccgtacaatttacggatcatccttacacacatccatcacaaatacgaaaaaagtgtagggacaattttggtattttaattaaatgttgggtgcacctaacaacactcttagtggattagaccaatcctcaaccccaatgagtccattggcccactcaaattcaccatgatgattagtccaatccaaagactcaccaagttgattaattgaatcttgaggaacaacaacttgattagtaaaatctaccatcttattttttgctttgagtgacctcaaagtttgaagtgtgatcagttggctctgagagttgttctgcaagcaattaagtttgctttgagccatgcttggcatataactagagcaattagcatcatcttgttgaatgtttctcaacatattaattccatgactagaagctccaccaacctgatttgttgaatttgcaaaattca

SEQ ID NO: 10326 - DNA, 1039 bp, Glycine max
  Gm_smallRNAprecursor_3159
agcaatcaaagaatacaacatcagaaatcattttgattgcagaacaatttactctgaccaaagaaggctacacttcgtctgcaagttacatgaaaatggttgtacatggagcttgggcgcatgcaattcaaagaggcataacaaatggattatcaagagtataagaggtcatcacacttgtctcgtgccgatgcttagacaagatcatcgccaactcgacaaacacgtcatagcacagatcatccaaccaattgtcaaaacaaacccaactgtctccatcaagacattgattgcagagatcaaaacgttcatgaattataccccatcctataagaagacatggttagcaaagcaaaaagcattggagatgattcatggaaactgggaagaatcatatgccaaactgccaaaattttttggagctttgcaatcttgtgttcccgggactgtggtcgctgctcaaacagaatccttgtatgaggggggagaaatagtaccgggcaaaagattgtttaaacgtgtcttttggtcatttggtccatgcattaatggttttgcatattgcaaacccaatgtacaagtagatggtacatggctttacggaaagtatactggcacactgttgatagctaccgcacaagatggagctaaccatatcttcccgattgcctatgccattgtagaaggggagacaacttcagtttgagggttttttctaaagaatttgagaagacatgttactccgcaaattaacatttctcttatttcagaccgacacccctcaattataagtgcctacaacaacccaagtaacttatgggtccaggacacatcccatttcttttgcctgcgccacattgcacaaaactttcttcgtggtaactcaaattgcaaacatttaaagaaaccacttatgttggctggtgagaatctattttatttattcgttataattttctttcaatcaaattttataacataatacattgattaaatatttacagggtacgcatacacggagaagatgcactggcgacat

SEQ ID NO: 10327 - DNA, 1051 bp, Glycine max
  Gm_smallRNAprecursor_3160
actggcgacatcttggggatattcgtgcgaataagccaagtgcagctgaatgacttgatcaattacccaaacaaaaatgggtacaatgctttgatgaggggaaacgttggggacatatgactaccaatttgtcggagtctgttaattccatgttcaaaaatacaagacatttgccggtgtcatcattggttgaggagacctatttcaagaccgcacaactctttgctaatagaggtcgacaaactcaggcaatgatcaactccggctcacagtattctgaagtcgtcttcgatgcaatcaatagtggtcaacaagaatctaatacacacattgtaaatgaattcgacagacacaatcacacttttattataaccgagactcaatccccacttgaaacacccagaccacctggaaggtttagagtaatgttacaatcccaaaagtgtgattgtggtgaatttcaggctaaacatttaccgtgttctcacatcatggctgcttgtaaatctgtcaatgttgatcccatgacctatgtgccgatgatattcactttacaacacattttgcacatctacgacaactcctttggtttattgccacacgaatcaatgtggcaagaatatgaaggagatcagtggggtcctgatccaaggagaaagaggactgcaaagggtcgtccagtttcaactcgcattcctactgagatggacgaagacgaaaatgaacgagcaagtagaaaaaaatgtggattttgccggcaacatggtcatagcagaaataattgtcctaatgtatcctcatcttagtttttccttagacaaatgtcattgtttaaatattttattgatgacgtagtataatgttcttatataaataaattgttaaaagctttagttttatcatttttaattaaatctaaaaacataaacaaactaattatatttagtaaaatagttaaattaaaaattttaaaattcagattattatacaaaataaatatttactaaaataaatatattattatacaaaattcagattttaaaatatatat

SEQ ID NO: 10328 - DNA, 1052 bp, Glycine max
  Gm_smallRNAprecursor_3161
actggcgacatcttggggatattcgtgcgaataagccaagtgcagctgaatgacttgatcaattacccaaacaaaaatgggtacaatgctttgatgaggggaaacgttggggacatatgactaccaatttgtcggagtctgttaattccatgttcaaaaatacaagacatttgccggtgtcatcattggttgaggagacctatttcaagaccgcacaactctttgctaatagaggtcgacaaactcaggcaatgatcaactccggctcacagtattctgaagtcgtcttcgatgcaatcaatagtggtcaacaagaatctaatacacacattgtaaatgaattcgacagacacaatcacacttttattataaccgagactcaatccccacttgaaacacccagaccacctggaaggtttagagtaatgttacaatcccaaaagtgtgattgtggtgaatttcaggctaaacatttaccgtgttctcacatcatggctgcttgtaaatctgtcaatgttgatcccatgacctatgtgccgatgatattcactttacaacacattttgcacatctacgacaactcctttggtttattgccacacgaatcaatgtggcaagaatatgaaggagatcagtggggtcctgatccaaggagaaagaggactgcaaagggtcgtccagtttcaactcgcattcctactgagatggacgaagacgaaaatgaacgagcaagtagaaaaaaatgtggattttgccggcaacatggtcatagcagaaataattgtcctaatgtatcctcatcttagtttttccttagacaaatgtcattgtttaaatattttattgatgacgtagtataatgttcttatataaataaattgttaaaagctttagttttatcatttttaattaaatctaaaaacataaacaaactaattatatttagtaaaatagttaaattaaaaattttaaaattcagattattatacaaaataaatatttactaaaataaatatattattatacaaaattcagattttaaaatatatatt

SEQ ID NO: 10329 - DNA, 1096 bp, Glycine max
  Gm_smallRNAprecursor_3162
tctgtgtggtctactgttcacatatgtatattaagagttctagtcccacatgataacttcaatcaacacttataatttgggttaaattactgttttgaaatttgaaatttaattcatataatgattaattttgatgtaaatactaatttaattcaaagtataaatgttgattggagttattatttaggactaaaacttttaatatacatttgtttagaaataaacaagatgtgtgcaatttgtatagaaattaattaaaagaaaatttctctccataacatatttgtttagttaacaagtagctttttgagaattttatttaggcaaaattatatttttggtccccagtttatctctagttttgaatttgatccctcagtaatttaatttacgaattgagtcctcctattttataaaatcgtgcaactttagttctctaggccacaattggttgttgaccgttagcaagtgacgttgactgccacgtgtcatgttcttattggatgatgactgtcacgtgtcatgttctgattggatgtcaactccatgaaagataaaatgcattgttgttttcattgatcaattagaatatgacacgtgacagtcatcatccaataacaacgtgacacgtgacaatcaatgtcacttgctaattgtcaacgtccaattgtgacctgaaggaccaacattgcgcgattttagaaaataggaagacccaattcataaattaaattattgagggaccaaatccaaaatcgaagataagctgagagatcaaatttacaattttgccttttccattcatcttatgtatatattagcagtattattttcttcctaatagaatgataaatcatcaacagaacaaactctgattaacaatttaatctagaagggaagatgcttattttatttggggcatcaagaatacttagaattttaacattgttaacggataatgcccatgaaaatattattatttatatatatggaagaaattcactatgatgaacttctcatgtttatgtgttacttgacaaggattattttgacatttggttatctgcctaaaacgtaaaatgaaaaaacaggaaac

SEQ ID NO: 10330 - DNA, 1040 bp, Glycine max
  Gm_smallRNAprecursor_3163
agttgagaatgttggaatcaacaaagtgctcatagatggaggagcggctgtcaacttaatgcctcgatctatgctctacaagatcgggaaacatgacactgatctatctgcccacaacattgtgctttctaattatgagggcaaaactggctattctttgggagccattcaagtagatgttgctgtaggcagtatagttcgaccaactctattcctggtaatacagtccaaggctaattttaacttgctattaggaagggaatggatccatggagttggggctgtgccatctactctccaccagaaactcattatctggagggaggatgggattgttgaaaatatagaggcagatcaaagcttctataagtcagaggttgataatgttactccacaaacctttgacaaaaatttggctaacatagcaccttgtggtgacaaggagattgctttcgagccaagtgataatgttatccactctgtcaaactccatcctacccatgggtttatatgggagagggaggaaattgaggctgtttcctctgaagatggagtcattccaccaactgggtggaatatatatgaagattaatatgcctgaggccactgcatgggccagaattacgacttatatggccgaaaatagactaaatacggcccttgaggctgaatcccaacaaaatatggcagttgaagccaagatcgaagatcatgaaaacaaagaaataaaggatcgaagactggactgcatttatgatgatgagccactgggttttgaaaaaaatcccataagtgaggcgccaaagatgcaggctcaagatcctttggaggagatcgacattggagatggctcgataaaaaggccaacctatatcagtgccaatatcacctcaagtctaaaagaaaagctggtgcctcttcttagagaatttaaagattgttttgcttgggattaccacgaaatgccggggttaagcagagaaatggtcgaaatgaaattacctattaaggagggaagaagaccagtaaaacaactacca

SEQ ID NO: 10331 - DNA, 1157 bp, Glycine max
  Gm_smallRNAprecursor_3164
aagaccagtaaaacaactaccaagaagattcgcaccagaaatcatgtccaagattaaggaagagatcgaaaggctgctgaggagtaaattcatcagatctgccaggtatgtcgaatggttagcaaatatagtccctgtcattaaaaagaatggaactcttagagtatgcatagattttagggatttaaataatgctacacctaaagatgaatatgctatgccagtagcagaaatgttggtagattcagcagctggcttcgaatttttaagcatgttagatggttattctggttataaccaaatatttattgctgaaagtgatgtgtcaaaaacagcatttcgatgccctggtgctttaggcacttatgaatgggtagttatgccctttgggttgaaaaatgctggggccacttatcaaagggccatgaattccatgtttcatgattttattgacacatttatgcaagtttatattgatgatataatcatcaaatcctcctcagaagatagccatttggattaccttaggcaatctttcgaacgaatgaggaaacatggattaaaaatgaatccattaaagtgtgctttttgtgtgcgtgcaggagatttccttggttttgtggtgcataaaaaaggcatcgagataaatcaaaacaagacaaaggctattcttgagacgaagcctccttcgaccaaaaaacagcttcagtctttgctaggaaaaatcaacttcttgaggcgattcatctcgaatctaagtggcaaagctcaaactttttcgccattacttcgactcaagaaagatgaatcattcaaatgggatgaagtgcatcaaaaggcttttgataaaattaaagaatatctgatcaagcctcctgtgttaatgcctcctagtcgaaacaagactatgaagttgtatattgctgcgtctgacaagaccattggtagcatgttggctcaggaagatgatgatggcatagagcatgcaatttattatcttagtcgtgtactaaatgatgcagaaactagatatactgccatagaaaaactttgtctttgtttgtatttctcttgtgcaaaacttaagcaatatataaagcctgttgatgtttatgtatattctcattatgatattattaagcacatgttgtcaaaac

SEQ ID NO: 10332 - DNA, 1082 bp, Glycine max
  Gm_smallRNAprecursor_3165
cagtgatcgaaatgccgcaagactatgtcgatacagagccttggattttgtatttcgatggttcgaaacacaaacatggaactggaattggagttttaataatatccccaaataaagttccaactaaattcaaatataaaatcaaagggctttgttctaataatgaggctgagtatgaggctctaattacaggccttgaaattttaattagcttgggggcaagaaatgttaacataaggggtgattcagaattagtgttgaggcaattaacacaagaatacaaatgtgttaatgaacacttagcaaaatattttgttatggcaagttctcttctgagtcatttcgattacattaacattgagcatatacctcgacaagaaaaccaagaagcaaatgatttagcccaaatagcttcagggtacaaaatgtcgaaggaaaagttaactcagttgatcgaaataaaagataaactggtgttactagagccattaggcactaaattgccaatgccaaaacttgtgggggcaagtacaccacaaaataatgaagatgaaagcatggatgatcttcaggaaaaaattcaaattttggccattgacaatatgttagataatgattggagaaagtccattgttgaatatttggaaaatccaataggtaatgtggctcgaaaggtcaaatatagggctttaaattacgtggttgtgggaaatgatttgtttaaaaagactgcagaaggagtgttgctaaaatgtctaagtgaatcagaagcatacttggcaatttcccatgttcacagtggggcctgtggatcacatcaagcaggccataaaatgaaatggcttttatttcgacaaggtttgtattggccttcgatgttaaaagactgcataaaatttgctaaaggctgtcaggaatgccaaaagcatgcagggatacagcatgtacctgctagtgagttacactccataatcaaaccttggcctttcagaggatgggctttggacttaattggtgaaatcaagcctgcgtcttctaagaaccagcgttatatcatagttggtgtcgattactttacaaaa

SEQ ID NO: 10333 - DNA, 1191 bp, Glycine max
  Gm_smallRNAprecursor_3166
aactttttaatgctttttggtatgtttacaggagccacccctgtctactaccgaaagatccgcagtggaggctgggccaaatgcttcttccctaaccaaaaaggaagaggttaatttttttcaataataattataatattagattgcctttcaaacttttcatataattaaaagcaacaattacaattataagattgtgtacaaacacgtgtttgatattgtgttttatttttatattctacttaatttatttttaatgattttgtaggaagaccttcaacatttgaagaatcttggaataaattcttacagaatgtccatttcatggagtagacttttacctattaaataaattttcgcattaataataattacaatcatgataatatatgttatttttaactatttatattttttctgatgggatatgaatcagaaaaaatattaataattaaaaataatattgaattcaaggacggtgcttatatcagcaatgtctttgaaagtggacattcaaagacggtgcttacatcagcaacgtctttgaaagtcagcattctaagacggtgcttacgtcagcaccgtctttgaatgtcagcttactaagacggtgcttacgtcatcaacgtcttagaatgcctacattcaaagacggtgctgaggtaaacaccgtctttgaaagttgcttactttttaagacggtgctttcagacacgtcgtaatcgttgtcgggaaacaacgacacttgtagcaaagacggtgcctgacccgacgtagaaatagcatttccaccgatgtagatccttaacctttatgaaagttttgcagcatatgttataaatcgtgcattataatcattttcaatatattttgattcaattatgtttatataccatcgaataaaatttttacataaattaataccaattttacttgtagcaaagaaaaaaaatgagaaaaataagttatttataatttttttgaaattagtctatttataataattcaagtgttagacaaacactcaaaaacaaatatttacagttcaaatacaaatattgaataaacaaaaaaaataaaacatgtttaagtgcaatttacaaggatgagtaatgagacttaattaaagtttgactttagcttcaaatggtataaataaatggtaattaaacctacaatactaaaaataaa

SEQ ID NO: 10334 - DNA, 1072 bp, Glycine max
  Gm_smallRNAprecursor_3167
caagttttggaattttttattcccttatatggtggacctaaattggctttttgtgttacttggttttggagtaaagggagcaccaaatatgtctgatgataacaccaaagcttggaatcagatattgttgctgacaattgtgcttgcaatttggtggctactgtgtcatttagcagaggatagagaaaccaatcccattgacaatgaggttgatgatgagctgggggagatattagagcaccccaatggtgaactagaccattattttgatgaggatggtcatcaccgggccgctgagcctggtggcgatgccaatgggagacacggtggttgttccatctgtggaaattttagcaccacaaggtgtgctagctgcaaggctgctagatactgtagggggttgcttttaaaaacaatttacggaagagggtctcttttaaaacaaattgtaaggggggtctcttctgtatgtgggtgccgccattgacactgacgggaagcttgaaccgccagtgacaatggcgggatagggggtgccgctattcgtagcagcgagtgaggggatatcgccattggtgctggcgggacgtgccaacgtgaacagtcccgccattggcacctgcgggacactgatttcgctaaaagcatgccgccaataagaatggcgggacatgccaataatttgataagttcatttattcaaatttacataaaaaaaaatattctgttgtttatgaaaaatacaaaaaaatgcttaattaataaaatagtatctcaacagtacaatcatgcatagacactttagtctttaaaatagtgaacgtgtactaatttattccttaagaaattattaataacctatacttataatcttgatagaatatttagtctcctttttttttctcataaattaaattaggttgagtgatttttttctcaggaatcaaattagatattactctttttttaaaaagaagatattagtcttttgtagtaaaaagttaaaacaactttttcattaaaattaaaaatcttaaataaagcaagtaaatgaaattacacgtttaattaa

SEQ ID NO: 10335 - DNA, 1072 bp, Glycine max; identical to SEQ ID NO: 10334
  Gm_smallRNAprecursor_3168

SEQ ID NO: 10336 - DNA, 1073 bp, Glycine max
  Gm_smallRNAprecursor_3169
caagttttggaattttttattcccttatatggtggacctaaattggctttttgtgttacttggttttggagtaaagggagcaccaaatatgtctgatgataacaccaaagcttggaatcagatattgttgctgacaattgtgcttgcaatttggtggctactgtgtcatttagcagaggatagagaaaccaatcccattgacaatgaggttgatgatgagctgggggagatattagagcaccccaatggtgaactagaccattattttgatgaggatggtcatcaccgggccgctgagcctggtggcgatgccaatgggagacacggtggttgttccatctgtggaaattttagcaccacaaggtgtgctagctgcaaggctgctagatactgtagggggttgcttttaaaaacaatttacggaagagggtctcttttaaaacaaattgtaaggggggtctcttctgtatgtgggtgccgccattgacactgacgggaagcttgaaccgccagtgacaatggcgggatagggggtgccgctattcgtagcagcgagtgaggggatatcgccattggtgctggcgggacgtgccaacgtgaacagtcccgccattggcacctgcgggacactgatttcgctaaaagcatgccgccaataagaatggcgggacatgccaataatttgataagttcatttattcaaatttacataaaaaaaaatattctgttgtttatgaaaaatacaaaaaaatgcttaattaataaaatagtatctcaacagtacaatcatgcatagacactttagtctttaaaatagtgaacgtgtactaatttattccttaagaaattattaataacctatacttataatcttgatagaatatttagtctcctttttttttctcataaattaaattaggttgagtgatttttttctcaggaatcaaattagatattactctttttttaaaaagaagatattagtcttttgtagtaaaaagttaaaacaactttttcattaaaattaaaaatcttaaataaagcaagtaaatgaaattacacgtttaattaat

SEQ ID NO: 10337 - DNA, 1073 bp, Glycine max; identical to SEQ ID NO: 10336
  Gm_smallRNAprecursor_3170

SEQ ID NO: 10338 - DNA, 1059 bp, Glycine max
  Gm_smallRNAprecursor_3171
tctactggacacataggttgctgatattgcaacggaggtgacagaggtgtcgttggtctgccaacaccctcgtcatcggtttggtcatcgctttgctgattgatgtgatcaaagaactattgatcctcatcctcagtaaaatcatccatgttttcatgatgaaatcgtataatgggatcttcgttagcaatgggatgttcatctcggtttgatttttgcgtttgtggtagctgtgaaggtggcgtaaagggggatgaatgatgtttttgttggtcaaaggaggtttgttggccatgaaaaaaggaatcattctcggataatatttgtgtgtatgaagtataaatgtcaaaggggtcttgtgattcaaggtttgttgtatgaagatactggattattgaggtctatgttattgtacgataattgttgtggaggcggtagttgtagttgtggacatgagggttgtggagacgatggttgtggttgagaaataagctcagtaacagcatagaattcggtagaattcaattgtggattctggataattgtttccatcgcgcctctaagatcatcattgtcgaatagttgagctgaaattaaacgtgtctgaccgagatgaattgaaatagggacacgaaataacaattgagcaacttgtttagttgctcgagtaggaagacgattgttaatttttcgaatgagttgtgtaaacataatagaacgactgacgtaaaaaaatattggggtcgtacattggtacgtcgatgcttgaactggatcgtctacaatgtgaccactgtggtaaatgagggtcggaatttctttaggtggagccatggtggtgcttatgggatatgagtggaaattgtgtgagagttacaaatcgagttttgttttgtgagaaaattgttgtgtgtgatatgttgttgtcaaatggtgatattatatataggctgagaaagtttagtaccagagttagattggaatgttaggtgggagagttagattggaaggttggtgggagagttagttacgagggttagatgggagggttaggtgaga

SEQ ID NO: 10339 - DNA, 1140 bp, Glycine max
  Gm_smallRNAprecursor_3172
ctacccaaacctgaaattcgaagtcccacaacgtagaggtgcgcttcacgactccgaaaatggcttccttttgcaatttggagtagaaatggtgagcaaagtttggagctttaatggaggcttcaatggagaggaagaagaagagaaaatcaatgtgggagtgagaagaagagcttctgaattttctgctgaaggaagagagagaatgtggctttttaagaaaatgattttctttttacctatatatttttttttcataaagcacttgccagttgtcccattttgagtggaacaaaaaggggcccacctcttccccttgatgtgacttcatactcagccacaaggagagaaaaatttgaccttttgaatgctaaaatcccgcctcggtttgtgtgccgtttctctggttccagtccctcgcgtttctttgcacctgtcggggcccgttttcgaaagtaaacaatatatatatcaaaatgctcagaatgaaaccctgagcatggttcaaaggttggttttgttaaattttaagttgcacgcaaaacgataatttttagactaattaattgagaattaatctataactgtccagttatggattactcttcgttaatcagcctaacccgcgtatctttcccccaatgtacatacttctaccaggagtatatacatatatactctgaataatacttatatatatataattatttaaaatatatcgtttacaaaattccgggtagaaatttccaggatgtcacaccctccactagaattgatccacaagagatgtaccatctcttgttctcagtcaaacccaagtagatgtaccctctacttgtaccacaaaggatgtaccctccaatgtgttaggacaaagatctcaggcggttaaacctttgatactttgtgaatggggatacaaaagaattctcaggcggttagtcctttgaacacttttgtataagggaatgggaagaatcaaaagaattctcagattgtgtcattttgaattctttgacaagggagaagggagacacaaaagaatttaggcggttagtcctttgttcttttggaaaagggagaagagagacacaaaaagaattcaggcagttagtccttggcgaattctttttggcaaag

SEQ ID NO: 10340 - DNA, 1056 bp, Glycine max
  Gm_smallRNAprecursor_3173
ctcgtggcttctttgagaagctttcccaagaggcttctttgagaagctagatccttatctatccacacccctctattaactaaattaacctccttaaaaataattacggatgaaaataacgcaacaaagaatcaaacatcaaacataatttctattaatatatatatatatatttaccagagatcagcggaataagatcaaacggacagataggaagtaggaatgcagtatgataaaatcaaacgtaagaattataaacttgtaaagcagatatcaagggcacaccgaaacggcttacaaacccaggtttttgaaaacaaagaaaccgaagcggcggcagagccgcacaggatcggtgaggggagaagggagatatgaaaaatagaacttgaaatttattgaaactgaaagaaaagcttacaaagagtttttccctaggcagagcttctctctctaaaacctgattctgagactatctgaaagggtgcctcacaaaggggacgaggactcctttaaatagacccaatttttactgtttctacagtatcggtaatgtttaccggaactgttacaaaaccttttacaaattacattatttaaaagaaactgacaaattagttacaataattcatgattattacaactaattaatcgtcgtccaatgatataccaaaacagtcatcttcattctggtagaatggatcatcttcttggtcatcattagtctctaatgattcagcttccttcttggaaggttcttcttccacttcttgttgaagtagttggagaacttctttgagattctgagcaagactttctttagattttgagcttgctaagaatgctgccagttgcgacttctgatttagaaacaaagatgtctctggatcagcaggtttaaggaactcaggattgctctggaaccagttcttgacttgatctggagcagcctttgaagtatcgaattgtgaccaccattttacaaaggcgtgtctctgtaagggtggatattgcttgttgttttcagtttttccgtatctgtattgccatgaaaag

SEQ ID NO: 10341 - DNA, 1138 bp, Glycine max
  Gm_smallRNAprecursor_3174
cacaccgaaacggcttacaaacccaggtttttgaaaacaaagaaaccgaagcggcggcagagccgcacaggatcggtgaggggagaagggagatatgaaaaatagaacttgaaatttattgaaactgaaagaaaagcttacaaagagtttttccctaggcagagcttctctctctaaaacctgattctgagactatctgaaagggtgcctcacaaaggggacgaggactcctttaaatagacccaatttttactgtttctacagtatcggtaatgtttaccggaactgttacaaaaccttttacaaattacattatttaaaagaaactgacaaattagttacaataattcatgattattacaactaattaatcgtcgtccaatgatataccaaaacagtcatcttcattctggtagaatggatcatcttcttggtcatcattagtctctaatgattcagcttccttcttggaaggttcttcttccacttcttgttgaagtagttggagaacttctttgagattctgagcaagactttctttagattttgagcttgctaagaatgctgccagttgcgacttctgatttagaaacaaagatgtctctggatcagcaggtttaaggaactcaggattgctctggaaccagttcttgacttgatctggagcagcctttgaagtatcgaattgtgaccaccattttacaaaggcgtgtctctgtaagggtggatattgcttgttgttttcagtttttccgtatctgtattgccatgaaaagatccatgacaaggcaaaactggaaaaatactttaaatttgccggaattcatgattccttgctattatagagcttgttgaattgttcgaatccctgttggacttcttctggaaatatttgtggaattggtccgaagtagttccaccattggaggaaccaatttggaaaattatatgcagtattatttttgaagtaaatcagccatgaatgcttgaatttactattttgatgccagaacacattggtccaggcgtcaacgtaatcccaataattataccctgcaggatcaaatggtgcagagaattttttgggttggtttaagtttgagccataatgtcgtggctgcataaccttcaggatttg

SEQ ID NO: 10342 - DNA, 1071 bp, Glycine max
  Gm_smallRNAprecursor_3175
cggcttacaaacccaggtttttgaaaacaaagaaaccgaagcggcggcagagccgcacaggatcggtgaggggagaagggagatatgaaaaatagaacttgaaatttattgaaactgaaagaaaagcttacaaagagtttttccctaggcagagcttctctctctaaaacctgattctgagactatctgaaagggtgcctcacaaaggggacgaggactcctttaaatagacccaatttttactgtttctacagtatcggtaatgtttaccggaactgttacaaaaccttttacaaattacattatttaaaagaaactgacaaattagttacaataattcatgattattacaactaattaatcgtcgtccaatgatataccaaaacagtcatcttcattctggtagaatggatcatcttcttggtcatcattagtctctaatgattcagcttccttcttggaaggttcttcttccacttcttgttgaagtagttggagaacttctttgagattctgagcaagactttctttagattttgagcttgctaagaatgctgccagttgcgacttctgatttagaaacaaagatgtctctggatcagcaggtttaaggaactcaggattgctctggaaccagttcttgacttgatctggagcagcctttgaagtatcgaattgtgaccaccattttacaaaggcgtgtctctgtaagggtggatattgcttgttgttttcagtttttccgtatctgtattgccatgaaaagatccatgacaaggcaaaactggaaaaatactttaaatttgccggaattcatgattccttgctattatagagcttgttgaattgttcgaatccctgttggacttcttctggaaatatttgtggaattggtccgaagtagttccaccattggaggaaccaatttggaaaattatatgcagtattatttttgaagtaaatcagccatgaatgcttgaatttactattttgatgccagaacacattggtccaggcgtcaacgtaatcccaataattataccctgcaggatcaaatggtgcagagaattt

SEQ ID NO: 10343 - DNA, 1072 bp, Glycine max
  Gm_smallRNAprecursor_3176
cggcttacaaacccaggtttttgaaaacaaagaaaccgaagcggcggcagagccgcacaggatcggtgaggggagaagggagatatgaaaaatagaacttgaaatttattgaaactgaaagaaaagcttacaaagagtttttccctaggcagagcttctctctctaaaacctgattctgagactatctgaaagggtgcctcacaaaggggacgaggactcctttaaatagacccaatttttactgtttctacagtatcggtaatgtttaccggaactgttacaaaaccttttacaaattacattatttaaaagaaactgacaaattagttacaataattcatgattattacaactaattaatcgtcgtccaatgatataccaaaacagtcatcttcattctggtagaatggatcatcttcttggtcatcattagtctctaatgattcagcttccttcttggaaggttcttcttccacttcttgttgaagtagttggagaacttctttgagattctgagcaagactttctttagattttgagcttgctaagaatgctgccagttgcgacttctgatttagaaacaaagatgtctctggatcagcaggtttaaggaactcaggattgctctggaaccagttcttgacttgatctggagcagcctttgaagtatcgaattgtgaccaccattttacaaaggcgtgtctctgtaagggtggatattgcttgttgttttcagtttttccgtatctgtattgccatgaaaagatccatgacaaggcaaaactggaaaaatactttaaatttgccggaattcatgattccttgctattatagagcttgttgaattgttcgaatccctgttggacttcttctggaaatatttgtggaattggtccgaagtagttccaccattggaggaaccaatttggaaaattatatgcagtattatttttgaagtaaatcagccatgaatgcttgaatttactattttgatgccagaacacattggtccaggcgtcaacgtaatcccaataattataccctgcaggatcaaatggtgcagagaatttt

SEQ ID NO: 10344 - DNA, 1040 bp, Glycine max
  Gm_smallRNAprecursor_3177
cttacaaacccaggtttttgaaaacaaagaaaccgaagcggcggcagagccgcacaggatcggtgaggggagaagggagatatgaaaaatagaacttgaaatttattgaaactgaaagaaaagcttacaaagagtttttccctaggcagagcttctctctctaaaacctgattctgagactatctgaaagggtgcctcacaaaggggacgaggactcctttaaatagacccaatttttactgtttctacagtatcggtaatgtttaccggaactgttacaaaaccttttacaaattacattatttaaaagaaactgacaaattagttacaataattcatgattattacaactaattaatcgtcgtccaatgatataccaaaacagtcatcttcattctggtagaatggatcatcttcttggtcatcattagtctctaatgattcagcttccttcttggaaggttcttcttccacttcttgttgaagtagttggagaacttctttgagattctgagcaagactttctttagattttgagcttgctaagaatgctgccagttgcgacttctgatttagaaacaaagatgtctctggatcagcaggtttaaggaactcaggattgctctggaaccagttcttgacttgatctggagcagcctttgaagtatcgaattgtgaccaccattttacaaaggcgtgtctctgtaagggtggatattgcttgttgttttcagtttttccgtatctgtattgccatgaaaagatccatgacaaggcaaaactggaaaaatactttaaatttgccggaattcatgattccttgctattatagagcttgttgaattgttcgaatccctgttggacttcttctggaaatatttgtggaattggtccgaagtagttccaccattggaggaaccaatttggaaaattatatgcagtattatttttgaagtaaatcagccatgaatgcttgaatttactattttgatgccagaacacattggtccaggcgtcaacgtaatcccaataattatacc

SEQ ID NO: 10345 - DNA, 1068 bp, Glycine max
  Gm_smallRNAprecursor_3178
cttacaaacccaggtttttgaaaacaaagaaaccgaagcggcggcagagccgcacaggatcggtgaggggagaagggagatatgaaaaatagaacttgaaatttattgaaactgaaagaaaagcttacaaagagtttttccctaggcagagcttctctctctaaaacctgattctgagactatctgaaagggtgcctcacaaaggggacgaggactcctttaaatagacccaatttttactgtttctacagtatcggtaatgtttaccggaactgttacaaaaccttttacaaattacattatttaaaagaaactgacaaattagttacaataattcatgattattacaactaattaatcgtcgtccaatgatataccaaaacagtcatcttcattctggtagaatggatcatcttcttggtcatcattagtctctaatgattcagcttccttcttggaaggttcttcttccacttcttgttgaagtagttggagaacttctttgagattctgagcaagactttctttagattttgagcttgctaagaatgctgccagttgcgacttctgatttagaaacaaagatgtctctggatcagcaggtttaaggaactcaggattgctctggaaccagttcttgacttgatctggagcagcctttgaagtatcgaattgtgaccaccattttacaaaggcgtgtctctgtaagggtggatattgcttgttgttttcagtttttccgtatctgtattgccatgaaaagatccatgacaaggcaaaactggaaaaatactttaaatttgccggaattcatgattccttgctattatagagcttgttgaattgttcgaatccctgttggacttcttctggaaatatttgtggaattggtccgaagtagttccaccattggaggaaccaatttggaaaattatatgcagtattatttttgaagtaaatcagccatgaatgcttgaatttactattttgatgccagaacacattggtccaggcgtcaacgtaatcccaataattataccctgcaggatcaaatggtgcagagaattt

SEQ ID NO: 10346 - DNA, 1069 bp, Glycine max
  Gm_smallRNAprecursor_3179
cttacaaacccaggtttttgaaaacaaagaaaccgaagcggcggcagagccgcacaggatcggtgaggggagaagggagatatgaaaaatagaacttgaaatttattgaaactgaaagaaaagcttacaaagagtttttccctaggcagagcttctctctctaaaacctgattctgagactatctgaaagggtgcctcacaaaggggacgaggactcctttaaatagacccaatttttactgtttctacagtatcggtaatgtttaccggaactgttacaaaaccttttacaaattacattatttaaaagaaactgacaaattagttacaataattcatgattattacaactaattaatcgtcgtccaatgatataccaaaacagtcatcttcattctggtagaatggatcatcttcttggtcatcattagtctctaatgattcagcttccttcttggaaggttcttcttccacttcttgttgaagtagttggagaacttctttgagattctgagcaagactttctttagattttgagcttgctaagaatgctgccagttgcgacttctgatttagaaacaaagatgtctctggatcagcaggtttaaggaactcaggattgctctggaaccagttcttgacttgatctggagcagcctttgaagtatcgaattgtgaccaccattttacaaaggcgtgtctctgtaagggtggatattgcttgttgttttcagtttttccgtatctgtattgccatgaaaagatccatgacaaggcaaaactggaaaaatactttaaatttgccggaattcatgattccttgctattatagagcttgttgaattgttcgaatccctgttggacttcttctggaaatatttgtggaattggtccgaagtagttccaccattggaggaaccaatttggaaaattatatgcagtattatttttgaagtaaatcagccatgaatgcttgaatttactattttgatgccagaacacattggtccaggcgtcaacgtaatcccaataattataccctgcaggatcaaatggtgcagagaatttt

SEQ ID NO: 10347 - DNA, 1048 bp, Glycine max
  Gm_smallRNAprecursor_3180
gggagaagggagatatgaaaaatagaacttgaaatttattgaaactgaaagaaaagcttacaaagagtttttccctaggcagagcttctctctctaaaacctgattctgagactatctgaaagggtgcctcacaaaggggacgaggactcctttaaatagacccaatttttactgtttctacagtatcggtaatgtttaccggaactgttacaaaaccttttacaaattacattatttaaaagaaactgacaaattagttacaataattcatgattattacaactaattaatcgtcgtccaatgatataccaaaacagtcatcttcattctggtagaatggatcatcttcttggtcatcattagtctctaatgattcagcttccttcttggaaggttcttcttccacttcttgttgaagtagttggagaacttctttgagattctgagcaagactttctttagattttgagcttgctaagaatgctgccagttgcgacttctgatttagaaacaaagatgtctctggatcagcaggtttaaggaactcaggattgctctggaaccagttcttgacttgatctggagcagcctttgaagtatcgaattgtgaccaccattttacaaaggcgtgtctctgtaagggtggatattgcttgttgttttcagtttttccgtatctgtattgccatgaaaagatccatgacaaggcaaaactggaaaaatactttaaatttgccggaattcatgattccttgctattatagagcttgttgaattgttcgaatccctgttggacttcttctggaaatatttgtggaattggtccgaagtagttccaccattggaggaaccaatttggaaaattatatgcagtattatttttgaagtaaatcagccatgaatgcttgaatttactattttgatgccagaacacattggtccaggcgtcaacgtaatcccaataattataccctgcaggatcaaatggtgcagagaattttttgggttggtttaagtttgagccataatgtcgtggctgcataacct

SEQ ID NO: 10348 - DNA, 1047 bp, Glycine max
  Gm_smallRNAprecursor_3181
ggagaagggagatatgaaaaatagaacttgaaatttattgaaactgaaagaaaagcttacaaagagtttttccctaggcagagcttctctctctaaaacctgattctgagactatctgaaagggtgcctcacaaaggggacgaggactcctttaaatagacccaatttttactgtttctacagtatcggtaatgtttaccggaactgttacaaaaccttttacaaattacattatttaaaagaaactgacaaattagttacaataattcatgattattacaactaattaatcgtcgtccaatgatataccaaaacagtcatcttcattctggtagaatggatcatcttcttggtcatcattagtctctaatgattcagcttccttcttggaaggttcttcttccacttcttgttgaagtagttggagaacttctttgagattctgagcaagactttctttagattttgagcttgctaagaatgctgccagttgcgacttctgatttagaaacaaagatgtctctggatcagcaggtttaaggaactcaggattgctctggaaccagttcttgacttgatctggagcagcctttgaagtatcgaattgtgaccaccattttacaaaggcgtgtctctgtaagggtggatattgcttgttgttttcagtttttccgtatctgtattgccatgaaaagatccatgacaaggcaaaactggaaaaatactttaaatttgccggaattcatgattccttgctattatagagcttgttgaattgttcgaatccctgttggacttcttctggaaatatttgtggaattggtccgaagtagttccaccattggaggaaccaatttggaaaattatatgcagtattatttttgaagtaaatcagccatgaatgcttgaatttactattttgatgccagaacacattggtccaggcgtcaacgtaatcccaataattataccctgcaggatcaaatggtgcagagaattttttgggttggtttaagtttgagccataatgtcgtggctgcataacct

SEQ ID NO: 10349 - DNA, 1120 bp, Glycine max
  Gm_smallRNAprecursor_3182
aaagaaaagcttacaaagagtttttccctaggcagagcttctctctctaaaacctgattctgagactatctgaaagggtgcctcacaaaggggacgaggactcctttaaatagacccaatttttactgtttctacagtatcggtaatgtttaccggaactgttacaaaaccttttacaaattacattatttaaaagaaactgacaaattagttacaataattcatgattattacaactaattaatcgtcgtccaatgatataccaaaacagtcatcttcattctggtagaatggatcatcttcttggtcatcattagtctctaatgattcagcttccttcttggaaggttcttcttccacttcttgttgaagtagttggagaacttctttgagattctgagcaagactttctttagattttgagcttgctaagaatgctgccagttgcgacttctgatttagaaacaaagatgtctctggatcagcaggtttaaggaactcaggattgctctggaaccagttcttgacttgatctggagcagcctttgaagtatcgaattgtgaccaccattttacaaaggcgtgtctctgtaagggtggatattgcttgttgttttcagtttttccgtatctgtattgccatgaaaagatccatgacaaggcaaaactggaaaaatactttaaatttgccggaattcatgattccttgctattatagagcttgttgaattgttcgaatccctgttggacttcttctggaaatatttgtggaattggtccgaagtagttccaccattggaggaaccaatttggaaaattatatgcagtattatttttgaagtaaatcagccatgaatgcttgaatttactattttgatgccagaacacattggtccaggcgtcaacgtaatcccaataattataccctgcaggatcaaatggtgcagagaattttttgggttggtttaagtttgagccataatgtcgtggctgcataaccttcaggatttggattgtggaatgggtatttaaatttggatctttggggtcattgaagtgtttaatagatactgagtttgtatctattaggatgaattcgtagaatttgcggtttttgttt

SEQ ID NO: 10350 - DNA, 1086 bp, Glycine max
  Gm_smallRNAprecursor_3183
atctgaaagggtgcctcacaaaggggacgaggactcctttaaatagacccaatttttactgtttctacagtatcggtaatgtttaccggaactgttacaaaaccttttacaaattacattatttaaaagaaactgacaaattagttacaataattcatgattattacaactaattaatcgtcgtccaatgatataccaaaacagtcatcttcattctggtagaatggatcatcttcttggtcatcattagtctctaatgattcagcttccttcttggaaggttcttcttccacttcttgttgaagtagttggagaacttctttgagattctgagcaagactttctttagattttgagcttgctaagaatgctgccagttgcgacttctgatttagaaacaaagatgtctctggatcagcaggtttaaggaactcaggattgctctggaaccagttcttgacttgatctggagcagcctttgaagtatcgaattgtgaccaccattttacaaaggcgtgtctctgtaagggtggatattgcttgttgttttcagtttttccgtatctgtattgccatgaaaagatccatgacaaggcaaaactggaaaaatactttaaatttgccggaattcatgattccttgctattatagagcttgttgaattgttcgaatccctgttggacttcttctggaaatatttgtggaattggtccgaagtagttccaccattggaggaaccaatttggaaaattatatgcagtattatttttgaagtaaatcagccatgaatgcttgaatttactattttgatgccagaacacattggtccaggcgtcaacgtaatcccaataattataccctgcaggatcaaatggtgcagagaattttttgggttggtttaagtttgagccataatgtcgtggctgcataaccttcaggatttggattgtggaatgggtatttaaatttggatctttggggtcattgaagtgtttaatagatactgagtttgtatctattaggatgaattcgtagaatttgcggtttttgtttgcggctattggcctgtaatggaatccctggggg

SEQ ID NO: 10351 - DNA, 1086 bp, Glycine max; identical to SEQ ID NO: 10350
  Gm_smallRNAprecursor_3184

SEQ ID NO: 10352 - DNA, 1085 bp, Glycine max
  Gm_smallRNAprecursor_3185
tctgaaagggtgcctcacaaaggggacgaggactcctttaaatagacccaatttttactgtttctacagtatcggtaatgtttaccggaactgttacaaaaccttttacaaattacattatttaaaagaaactgacaaattagttacaataattcatgattattacaactaattaatcgtcgtccaatgatataccaaaacagtcatcttcattctggtagaatggatcatcttcttggtcatcattagtctctaatgattcagcttccttcttggaaggttcttcttccacttcttgttgaagtagttggagaacttctttgagattctgagcaagactttctttagattttgagcttgctaagaatgctgccagttgcgacttctgatttagaaacaaagatgtctctggatcagcaggtttaaggaactcaggattgctctggaaccagttcttgacttgatctggagcagcctttgaagtatcgaattgtgaccaccattttacaaaggcgtgtctctgtaagggtggatattgcttgttgttttcagtttttccgtatctgtattgccatgaaaagatccatgacaaggcaaaactggaaaaatactttaaatttgccggaattcatgattccttgctattatagagcttgttgaattgttcgaatccctgttggacttcttctggaaatatttgtggaattggtccgaagtagttccaccattggaggaaccaatttggaaaattatatgcagtattatttttgaagtaaatcagccatgaatgcttgaatttactattttgatgccagaacacattggtccaggcgtcaacgtaatcccaataattataccctgcaggatcaaatggtgcagagaattttttgggttggtttaagtttgagccataatgtcgtggctgcataaccttcaggatttggattgtggaatgggtatttaaatttggatctttggggtcattgaagtgtttaatagatactgagtttgtatctattaggatgaattcgtagaatttgcggtttttgtttgcggctattggcctgtaatggaatccctggggg

SEQ ID NO: 10353 - DNA, 1032 bp, Glycine max
  Gm_smallRNAprecursor_3186
tttttactgtttctacagtatcggtaatgtttaccggaactgttacaaaaccttttacaaattacattatttaaaagaaactgacaaattagttacaataattcatgattattacaactaattaatcgtcgtccaatgatataccaaaacagtcatcttcattctggtagaatggatcatcttcttggtcatcattagtctctaatgattcagcttccttcttggaaggttcttcttccacttcttgttgaagtagttggagaacttctttgagattctgagcaagactttctttagattttgagcttgctaagaatgctgccagttgcgacttctgatttagaaacaaagatgtctctggatcagcaggtttaaggaactcaggattgctctggaaccagttcttgacttgatctggagcagcctttgaagtatcgaattgtgaccaccattttacaaaggcgtgtctctgtaagggtggatattgcttgttgttttcagtttttccgtatctgtattgccatgaaaagatccatgacaaggcaaaactggaaaaatactttaaatttgccggaattcatgattccttgctattatagagcttgttgaattgttcgaatccctgttggacttcttctggaaatatttgtggaattggtccgaagtagttccaccattggaggaaccaatttggaaaattatatgcagtattatttttgaagtaaatcagccatgaatgcttgaatttactattttgatgccagaacacattggtccaggcgtcaacgtaatcccaataattataccctgcaggatcaaatggtgcagagaattttttgggttggtttaagtttgagccataatgtcgtggctgcataaccttcaggatttggattgtggaatgggtatttaaatttggatctttggggtcattgaagtgtttaatagatactgagtttgtatctattaggatgaattcgtagaatttgcggtttttgtttgcggctattggcctgtaatggaatccctggg

SEQ ID NO: 10354 - DNA, 1038 bp, Glycine max
  Gm_smallRNAprecursor_3187
cccagaagatgttgtagttgcctttttggttattggctctggtagagccagtagaacttctttacctttcgtactggatcttcctcctctgccagaggaactagacaccttaggaggcatcgggaattttctgtaaaaattcacgggtgaggtagtcaggtagagagttggaagagcccttgatatattctatattaaaatcaaagacacttaaaattgcttgccatcttgcaaaaatctgttttgaggcaaggttttttacatccttctgtaaaatatctttggctgatttgcagtcaactcttactaaaaatttttgatttaataaattagattgaaatttcgaaatgcacaaaacaattgctaaaacttcttttttaacagttgaatactttaattgtgcaggattccagtgttttgaagtatatgcgatgacatgttcttgaccatgtacttgttgtttgaggatgccaccgtaaccgatgtctgatgcatcagtttcgacaattttgaatgcctgtggaatgggaagatacagacattttatggattggactttaactttgatttctttaactgtttgggtatggaggtcagaccaaggaggcggatttttctttagcctatcatgcaatggtttgacaatattgtttaagtaggggacaaattcacctacgtaatttagacaacctagaaatctttgtaactgggttttgtctaagatttggttggggaatttgctagcaaactcaattgacctttcgattggaacaattgtaccttgataaatattgtgaccaaggaatcgaattcgtgtttggaaaagattgatttttgatttggagactgccaaaccattttgtttgatgatatggatgaaggtttggagatgtttgaaatgctggtcaatgttttgggaaaagattaaaacatcatctatgtagacaatgacaaattttgaatagggattaaaaatatcgttcataattttttgaaattctgaaggggcattcttcagtccgaatggaattacgttcc

SEQ ID NO: 10355 - DNA, 1180 bp, Glycine max
  Gm_smallRNAprecursor_3188
cctacgtaatttagacaacctagaaatctttgtaactgggttttgtctaagatttggttggggaatttgctagcaaactcaattgacctttcgattggaacaattgtaccttgataaatattgtgaccaaggaatcgaattcgtgtttggaaaagattgatttttgatttggagactgccaaaccattttgtttgatgatatggatgaaggtttggagatgtttgaaatgctggtcaatgttttgggaaaagattaaaacatcatctatgtagacaatgacaaattttgaatagggattaaaaatatcgttcataattttttgaaattctgaaggggcattcttcagtccgaatggaattacgttccactcatattgcccgaaaggtacagtaaacgttgttttgtacctatctgattcttggatttggatttgccaaaatccagatttcatatcaaactttgagaatatctttgcagaatttaatctgttaagcaaatctcttttgtttggaataggatatctaatccattgtaatgcttgatttagtggtttgtaatttatgactaagcggggtgttccacgctcaatctcagattgtttgttgacataaaaagccgcacaagaccatgggcttttgcttttccagattaggcctttatcaagcaaatccttgatttccttttgacagtattgaagaagttcttcattcatttggatcggtctggcttttgtgggaatttgtttttccctaaagtctttctcataggggagatcaacaatatgtttctttcagtcccaaaatgcatgtggcaaatcagaacagacagttgattcaatatgatttagtaaagattgaattttatcttttacttggggttttcctagttgtatctgaatattattaaaagatacttcttcttttaagaagctaatttgattaatcttattttctatgaaatttatatttctggaaattggtttagtagaaaaattaaatataatctttcttcctaaataatttgtggttattccttcattagatatttggatgggaaacagggctctaatgaagggcgttcctaagattacttcattcttaaggttttttaccagaagaaagtttgtgttgatcctaagacattggttttcaatgattgcatttgatagcttaaaattaa

SEQ ID NO: 10356 - DNA, 1037 bp, Glycine max
  Gm_smallRNAprecursor_3189
agatattgatcaacattttaaacacctccagactttcatccatatcattaaacagaatggtttgacagtctccaaatcaaagataaatcttttccagacacggatacgattccttgggcacaatatataccaaggcacaatcattccaatagaaagatcaatagagtttgctaccaaattccctaaccaaatcttagacaagacccagttacgacgatttctagggtgcctaaattatgtaggagaatttgtcccctatctaaacaatattgtcaaaccattacatgataggctgaaaaagaatctgcctccttggtctgacctccatactcaaacagtcaaagaaatcaaagtcaaagtccaatccataaaatgtctgtatcttcccattccacaggcattcaaaattgtcgaaactgatgcatcaaacatcggttatggtggtatccttaaacagcaaatacacggtcaagaacatgtcattgcatatacttcaaaacattggaatcctgcacaattaaaatattcaactgttaaaaaggaagttttagcaattgttttgtgcatttccaaatttcaatctgatttattgaatcaaaaatttttagtaagggttgactgcaaatcagccaaagacattttacaaaaggatgtaaaaaaccttgactcaaaacaaatttttgcaagacggcaggcaatcttaagcgtctttgattttaacatagaatatatcaagggctcttcaaactctctacctgactacctcacccgtgaatttttacagaaaattcccgatgcctcctaaggtgtctagctcctccggcagaggaggaagatccagtactaaaggaaaagatgttatattggctctaccagagccaataaccaagaaggcaactacatcatcttccgggtcatcaacccagaaaggaaagcttgaagggtcattgacccagataaaacctgagtcatcaactcaggaatccccaaaatcaacaacaaaacagactgtggctgactatgcctggtcaatacaa

SEQ ID NO: 10357 - DNA, 1033 bp, Glycine max
  Gm_smallRNAprecursor_3190
caaggcaaccgccaaagtattccccccaggattccattataggccaacagccacaaataaaaccagaaaattctacgaattcatcctaatagatacaaactcagtatctattaaacacttcaaagaccccaaagatccaaatctaaatacccattccacaatccaaatcctaaaggttatgcagccacgacattatggctcaaacttaaaccaacccaaaaatttttttgcaccttttgatcctgcaggatataattattgggaccacattgacgcctggaccaatgtgttctggcatcaaaatagtaaatttaagcattcatggctaatttacttcaagaataacactgtgtataattttccaaattggttcctccaatggtggaactacttcggaccaattccgaagatatttccagaagaagtccaacagggattccaacaattcaccaagctcttcaatagcaaggaatcaagaatttcggcagatttaaagtacttttccagttttgccttgtcatggattttttcatggcaatacagatatggaaaaaccgaaaacaacaaacaatatccaccattgcagatacatgcctttgtaaagtggtggtcacaatttgatacctcaaaggctgctccagaacaagtcaagaattggtttcagagcaaccctgagtttctcaagcctgctgatccagagacatcattgtttctaaatcaaaagtctcaacttgcagcattcttagcaagctcaaaatctaaagagagtcttgctcagaatcttaaggaagttctccagctacttcaataggaagaagaagaagaaccccccaagaaggaagccgaatcatccgagaataatgatgaccaagaagatgatccattctaccagaatgaggatgactgttttggtatatcattagaagatgattagttagttgtagtaatcatgaattattgtaactaattattcggttcccgataataatgtaatttgaaaaggtttttgtaacagttctggtaatcattaccg

SEQ ID NO: 10358 - DNA, 1031 bp, Glycine max
  Gm_smallRNAprecursor_3191
aaggcaaccgccaaagtattccccccaggattccattataggccaacagccacaaataaaaccagaaaattctacgaattcatcctaatagatacaaactcagtatctattaaacacttcaaagaccccaaagatccaaatctaaatacccattccacaatccaaatcctaaaggttatgcagccacgacattatggctcaaacttaaaccaacccaaaaatttttttgcaccttttgatcctgcaggatataattattgggaccacattgacgcctggaccaatgtgttctggcatcaaaatagtaaatttaagcattcatggctaatttacttcaagaataacactgtgtataattttccaaattggttcctccaatggtggaactacttcggaccaattccgaagatatttccagaagaagtccaacagggattccaacaattcaccaagctcttcaatagcaaggaatcaagaatttcggcagatttaaagtacttttccagttttgccttgtcatggattttttcatggcaatacagatatggaaaaaccgaaaacaacaaacaatatccaccattgcagatacatgcctttgtaaagtggtggtcacaatttgatacctcaaaggctgctccagaacaagtcaagaattggtttcagagcaaccctgagtttctcaagcctgctgatccagagacatcattgtttctaaatcaaaagtctcaacttgcagcattcttagcaagctcaaaatctaaagagagtcttgctcagaatcttaaggaagttctccagctacttcaataggaagaagaagaagaaccccccaagaaggaagccgaatcatccgagaataatgatgaccaagaagatgatccattctaccagaatgaggatgactgttttggtatatcattagaagatgattagttagttgtagtaatcatgaattattgtaactaattattcggttcccgataataatgtaatttgaaaaggtttttgtaacagttctggtaatcattacc

SEQ ID NO: 10359 - DNA, 1032 bp, Glycine max
  Gm_smallRNAprecursor_3192
aaggcaaccgccaaagtattccccccaggattccattataggccaacagccacaaataaaaccagaaaattctacgaattcatcctaatagatacaaactcagtatctattaaacacttcaaagaccccaaagatccaaatctaaatacccattccacaatccaaatcctaaaggttatgcagccacgacattatggctcaaacttaaaccaacccaaaaatttttttgcaccttttgatcctgcaggatataattattgggaccacattgacgcctggaccaatgtgttctggcatcaaaatagtaaatttaagcattcatggctaatttacttcaagaataacactgtgtataattttccaaattggttcctccaatggtggaactacttcggaccaattccgaagatatttccagaagaagtccaacagggattccaacaattcaccaagctcttcaatagcaaggaatcaagaatttcggcagatttaaagtacttttccagttttgccttgtcatggattttttcatggcaatacagatatggaaaaaccgaaaacaacaaacaatatccaccattgcagatacatgcctttgtaaagtggtggtcacaatttgatacctcaaaggctgctccagaacaagtcaagaattggtttcagagcaaccctgagtttctcaagcctgctgatccagagacatcattgtttctaaatcaaaagtctcaacttgcagcattcttagcaagctcaaaatctaaagagagtcttgctcagaatcttaaggaagttctccagctacttcaataggaagaagaagaagaaccccccaagaaggaagccgaatcatccgagaataatgatgaccaagaagatgatccattctaccagaatgaggatgactgttttggtatatcattagaagatgattagttagttgtagtaatcatgaattattgtaactaattattcggttcccgataataatgtaatttgaaaaggtttttgtaacagttctggtaatcattaccg

SEQ ID NO: 10360 - DNA, 1167 bp, Glycine max
  Gm_smallRNAprecursor_3193
accaattccgaagatatttccagaagaagtccaacagggattccaacaattcaccaagctcttcaatagcaaggaatcaagaatttcggcagatttaaagtacttttccagttttgccttgtcatggattttttcatggcaatacagatatggaaaaaccgaaaacaacaaacaatatccaccattgcagatacatgcctttgtaaagtggtggtcacaatttgatacctcaaaggctgctccagaacaagtcaagaattggtttcagagcaaccctgagtttctcaagcctgctgatccagagacatcattgtttctaaatcaaaagtctcaacttgcagcattcttagcaagctcaaaatctaaagagagtcttgctcagaatcttaaggaagttctccagctacttcaataggaagaagaagaagaaccccccaagaaggaagccgaatcatccgagaataatgatgaccaagaagatgatccattctaccagaatgaggatgactgttttggtatatcattagaagatgattagttagttgtagtaatcatgaattattgtaactaattattcggttcccgataataatgtaatttgaaaaggtttttgtaacagttctggtaatcattaccgatactgttgaaacagtaaaacattgggtctatttaaaggagtcctcgttccctttgtgaggcaccatttcagatagtctcaaaatcaggttttagagagagaagctctgcctagggaaaacctctttgtaagcttttctttcgatttcaataaattcaaagttctatttttcacatctctcttctcccttcaccgatcctgtgcggctctgccgccgcttcggtttctttgttttcaaaaacctgggtttgtaagccggattccggtgtgcccttgataaccgtttacaagtttttaatttctgcatttgtcatattgcattactcttacttcctatctgtctgtttgtatcctttctgttgatctctggtatcagagccaaatgattatatgcatatatatatatatatatatatatatatatatatatatatattgacattgacttttcagattgatatttaatattgattacttttcagatagattaatagggggcaatgtactttaaaggattgattatatgtttg

SEQ ID NO: 10361 - DNA, 1138 bp, Glycine max
  Gm_smallRNAprecursor_3194
aaactacaaatgcttaatcatggaacccaaacacgttgacgaggccatacaagatgataactgggtgaaagcgatgcaaaaagatcttgactagtttcagaagaatgatgtctagaagctagtcaaattaccaaaaggaaagaaagctgttggagctaaatgggtctttagtaaaaaactaaacagaaatggtaaggttgtgagaaataaggcaaggttagttggcaaattagttaaaataattcatgattacattgtttagccaaaaggaaagaaagttgttggagctaaatgggtctttagtaaattacattgtttaaaagaaactggcaaattagttataataattcatgattactacaactaattaatcatcgtctaatgatataccaaaacagtcatgttcattatggtagaatggatcatcttcttggtcatcattagtctcagatgattcaacttccttcttggaaggttcttcttccacttcttgttgaagtagttggagaacttctttgagattctgagcaaggctctctttagattttgagcttgctaagaatgctgccagttgcgacttctgatttagaaacaaagatgtctccggatcagcaggtttaaggaactcagggttgctctggaaccagttcttgacttgatatggagcagcctttgaagtatcgaattgtgaccaccattttacaaaggcgtgtctctgtaacggtggatattgcttgctgttttcagtttttccgtatctgtattgccatgaaaagatccatgacaaggcaaaactggaaaaatactttaaatctgccggaatacgtgattccttgctattatagagcttgttgaattattggaatccctgttggacttcttctgggaatatttgtggaattggtccgaagtagttccaccattggaggaaccaatttggaaaattatacgcagtattatttttgaagtaaatcagccatgaatgcttgaatttactattttgatgccagaacacattggtccaagcgtcaatgtaatcccaataattatatcctgcagggtcaaatggtgcagaaaattttttgggttggtttaagtttgagccataatgtcgtggctgcataaccttcaagatttg

SEQ ID NO: 10362 - DNA, 1071 bp, Glycine max
  Gm_smallRNAprecursor_3195
tgcttaatcatggaacccaaacacgttgacgaggccatacaagatgataactgggtgaaagcgatgcaaaaagatcttgactagtttcagaagaatgatgtctagaagctagtcaaattaccaaaaggaaagaaagctgttggagctaaatgggtctttagtaaaaaactaaacagaaatggtaaggttgtgagaaataaggcaaggttagttggcaaattagttaaaataattcatgattacattgtttagccaaaaggaaagaaagttgttggagctaaatgggtctttagtaaattacattgtttaaaagaaactggcaaattagttataataattcatgattactacaactaattaatcatcgtctaatgatataccaaaacagtcatgttcattatggtagaatggatcatcttcttggtcatcattagtctcagatgattcaacttccttcttggaaggttcttcttccacttcttgttgaagtagttggagaacttctttgagattctgagcaaggctctctttagattttgagcttgctaagaatgctgccagttgcgacttctgatttagaaacaaagatgtctccggatcagcaggtttaaggaactcagggttgctctggaaccagttcttgacttgatatggagcagcctttgaagtatcgaattgtgaccaccattttacaaaggcgtgtctctgtaacggtggatattgcttgctgttttcagtttttccgtatctgtattgccatgaaaagatccatgacaaggcaaaactggaaaaatactttaaatctgccggaatacgtgattccttgctattatagagcttgttgaattattggaatccctgttggacttcttctgggaatatttgtggaattggtccgaagtagttccaccattggaggaaccaatttggaaaattatacgcagtattatttttgaagtaaatcagccatgaatgcttgaatttactattttgatgccagaacacattggtccaagcgtcaatgtaatcccaataattatatcctgcagggtcaaatggtgcagaaaattt

SEQ ID NO: 10363 - DNA, 1072 bp, Glycine max
  Gm_smallRNAprecursor_3196
tgcttaatcatggaacccaaacacgttgacgaggccatacaagatgataactgggtgaaagcgatgcaaaaagatcttgactagtttcagaagaatgatgtctagaagctagtcaaattaccaaaaggaaagaaagctgttggagctaaatgggtctttagtaaaaaactaaacagaaatggtaaggttgtgagaaataaggcaaggttagttggcaaattagttaaaataattcatgattacattgtttagccaaaaggaaagaaagttgttggagctaaatgggtctttagtaaattacattgtttaaaagaaactggcaaattagttataataattcatgattactacaactaattaatcatcgtctaatgatataccaaaacagtcatgttcattatggtagaatggatcatcttcttggtcatcattagtctcagatgattcaacttccttcttggaaggttcttcttccacttcttgttgaagtagttggagaacttctttgagattctgagcaaggctctctttagattttgagcttgctaagaatgctgccagttgcgacttctgatttagaaacaaagatgtctccggatcagcaggtttaaggaactcagggttgctctggaaccagttcttgacttgatatggagcagcctttgaagtatcgaattgtgaccaccattttacaaaggcgtgtctctgtaacggtggatattgcttgctgttttcagtttttccgtatctgtattgccatgaaaagatccatgacaaggcaaaactggaaaaatactttaaatctgccggaatacgtgattccttgctattatagagcttgttgaattattggaatccctgttggacttcttctgggaatatttgtggaattggtccgaagtagttccaccattggaggaaccaatttggaaaattatacgcagtattatttttgaagtaaatcagccatgaatgcttgaatttactattttgatgccagaacacattggtccaagcgtcaatgtaatcccaataattatatcctgcagggtcaaatggtgcagaaaatttt

SEQ ID NO: 10364 - DNA, 1086 bp, Glycine max
  Gm_smallRNAprecursor_3197
aggttgtgagaaataaggcaaggttagttggcaaattagttaaaataattcatgattacattgtttagccaaaaggaaagaaagttgttggagctaaatgggtctttagtaaattacattgtttaaaagaaactggcaaattagttataataattcatgattactacaactaattaatcatcgtctaatgatataccaaaacagtcatgttcattatggtagaatggatcatcttcttggtcatcattagtctcagatgattcaacttccttcttggaaggttcttcttccacttcttgttgaagtagttggagaacttctttgagattctgagcaaggctctctttagattttgagcttgctaagaatgctgccagttgcgacttctgatttagaaacaaagatgtctccggatcagcaggtttaaggaactcagggttgctctggaaccagttcttgacttgatatggagcagcctttgaagtatcgaattgtgaccaccattttacaaaggcgtgtctctgtaacggtggatattgcttgctgttttcagtttttccgtatctgtattgccatgaaaagatccatgacaaggcaaaactggaaaaatactttaaatctgccggaatacgtgattccttgctattatagagcttgttgaattattggaatccctgttggacttcttctgggaatatttgtggaattggtccgaagtagttccaccattggaggaaccaatttggaaaattatacgcagtattatttttgaagtaaatcagccatgaatgcttgaatttactattttgatgccagaacacattggtccaagcgtcaatgtaatcccaataattatatcctgcagggtcaaatggtgcagaaaattttttgggttggtttaagtttgagccataatgtcgtggctgcataaccttcaagatttggattgtggaatgggtatttagatttggatctttggggtctttgaagtgtttaatagatactgagtttgtatctattagaatgaattcgtagaatttgcgggttttgtttgtggctattggcctgaaatggaatcccggggga

SEQ ID NO: 10365 - DNA, 1086 bp, Glycine max; identical to SEQ ID NO: 10364
  Gm_smallRNAprecursor_3198

SEQ ID NO: 10366 - DNA, 1085 bp, Glycine max
  Gm_smallRNAprecursor_3199
ggttgtgagaaataaggcaaggttagttggcaaattagttaaaataattcatgattacattgtttagccaaaaggaaagaaagttgttggagctaaatgggtctttagtaaattacattgtttaaaagaaactggcaaattagttataataattcatgattactacaactaattaatcatcgtctaatgatataccaaaacagtcatgttcattatggtagaatggatcatcttcttggtcatcattagtctcagatgattcaacttccttcttggaaggttcttcttccacttcttgttgaagtagttggagaacttctttgagattctgagcaaggctctctttagattttgagcttgctaagaatgctgccagttgcgacttctgatttagaaacaaagatgtctccggatcagcaggtttaaggaactcagggttgctctggaaccagttcttgacttgatatggagcagcctttgaagtatcgaattgtgaccaccattttacaaaggcgtgtctctgtaacggtggatattgcttgctgttttcagtttttccgtatctgtattgccatgaaaagatccatgacaaggcaaaactggaaaaatactttaaatctgccggaatacgtgattccttgctattatagagcttgttgaattattggaatccctgttggacttcttctgggaatatttgtggaattggtccgaagtagttccaccattggaggaaccaatttggaaaattatacgcagtattatttttgaagtaaatcagccatgaatgcttgaatttactattttgatgccagaacacattggtccaagcgtcaatgtaatcccaataattatatcctgcagggtcaaatggtgcagaaaattttttgggttggtttaagtttgagccataatgtcgtggctgcataaccttcaagatttggattgtggaatgggtatttagatttggatctttggggtctttgaagtgtttaatagatactgagtttgtatctattagaatgaattcgtagaatttgcgggttttgtttgtggctattggcctgaaatggaatcccggggga

SEQ ID NO: 10367 - DNA, 1032 bp, Glycine max
  Gm_smallRNAprecursor_3200
tgattacattgtttagccaaaaggaaagaaagttgttggagctaaatgggtctttagtaaattacattgtttaaaagaaactggcaaattagttataataattcatgattactacaactaattaatcatcgtctaatgatataccaaaacagtcatgttcattatggtagaatggatcatcttcttggtcatcattagtctcagatgattcaacttccttcttggaaggttcttcttccacttcttgttgaagtagttggagaacttctttgagattctgagcaaggctctctttagattttgagcttgctaagaatgctgccagttgcgacttctgatttagaaacaaagatgtctccggatcagcaggtttaaggaactcagggttgctctggaaccagttcttgacttgatatggagcagcctttgaagtatcgaattgtgaccaccattttacaaaggcgtgtctctgtaacggtggatattgcttgctgttttcagtttttccgtatctgtattgccatgaaaagatccatgacaaggcaaaactggaaaaatactttaaatctgccggaatacgtgattccttgctattatagagcttgttgaattattggaatccctgttggacttcttctgggaatatttgtggaattggtccgaagtagttccaccattggaggaaccaatttggaaaattatacgcagtattatttttgaagtaaatcagccatgaatgcttgaatttactattttgatgccagaacacattggtccaagcgtcaatgtaatcccaataattatatcctgcagggtcaaatggtgcagaaaattttttgggttggtttaagtttgagccataatgtcgtggctgcataaccttcaagatttggattgtggaatgggtatttagatttggatctttggggtctttgaagtgtttaatagatactgagtttgtatctattagaatgaattcgtagaatttgcgggttttgtttgtggctattggcctgaaatggaatcccgggg

SEQ ID NO: 10368 - DNA, 1109 bp, Glycine max
  Gm_smallRNAprecursor_3201
ccggaatacgtgattccttgctattatagagcttgttgaattattggaatccctgttggacttcttctgggaatatttgtggaattggtccgaagtagttccaccattggaggaaccaatttggaaaattatacgcagtattatttttgaagtaaatcagccatgaatgcttgaatttactattttgatgccagaacacattggtccaagcgtcaatgtaatcccaataattatatcctgcagggtcaaatggtgcagaaaattttttgggttggtttaagtttgagccataatgtcgtggctgcataaccttcaagatttggattgtggaatgggtatttagatttggatctttggggtctttgaagtgtttaatagatactgagtttgtatctattagaatgaattcgtagaatttgcgggttttgtttgtggctattggcctgaaatggaatcccgggggaaattctttggcggttgctttgaaaggattcttgtcccagtattctggttccatttgtaaaacattgaaaaatttgttttttgaaatgtaactgttaccgggttgtgatgttgattcttgttgagtcaacgattggcttggtttttggttacagacagttttggtctgtttggccttttggatttgtttttgcagatctatttcagagtcatcgtctgattctgaggccatttctgcccaggtctttttggctaattttggtattttggtgaggcctatatcctctaaggccaagagagtttgtatcgaccaggcatagtcagccacggtctgtttggttgttgttggttttggggattcctgagttgatgactcaggtttgacggtagttgtctgggtcaatgacccttcaagttttcctttctgggttgatgacccagtctgggtagttgacccagaagatgttgtagttgcctttttgattattggctccggtagagccagtagaacctcttttccttttgtactggattttcctcctctgccggaggaactagacaccttaggaggcatcgggaattttctgtaaaaattcacgggtgaggtagtcaggtagagaattggaagagcccttgatatattctat

SEQ ID NO: 10369 - DNA, 1038 bp, Glycine max
  Gm_smallRNAprecursor_3202
cccagaagatgttgtagttgcctttttgattattggctccggtagagccagtagaacctcttttccttttgtactggattttcctcctctgccggaggaactagacaccttaggaggcatcgggaattttctgtaaaaattcacgggtgaggtagtcaggtagagaattggaagagcccttgatatattctatattaaaatcaaagacacttaaaattgcttgccatcttgcaaaaatctgttttaaggcaaggttttttacatccttctgtaaaatgtctttggctgattagcagtcaacccttactaaaaatttttgatttaataaatcagattgaaatttggaaatgcacaaaacaattgctaaaacttcttttttgacagttgaatactttaattgtgcaggattccagtgttttgaagtatatgcgatgacatgttcttgaccatgtacttgttgtttgaggatgccaccgtaaccgatgtctgatgcatcagtttcgacaattttgaatgcctgtggaatgggaagatacagacattttatggattggactttgactttgatttctttaactgtttgggtatggaggtcagaccaaggaggcggatttttctttagcctatcacgcaatggtttgacaatattgtttaagtaggggacaaattctcctacgtaatttagaaaacctagaaatctttgtaactgggttttgtctaagatttggttggggaatttgctagcaaactctattgacctttcgattggaatgattgtaccttgataaattttgtgaccaaggaatcgaattcgagtttggaaaagattgatttttgatttggagactgccaaaccattttgtttgatgatatggatgaaggtttggagatgtttgaaatgttggtcaatgttttgggaaaagattaaaacatcatctatgtagacaatgacaaattttgaatagggattaaaaatgtcattcataattttttggaattctgaaggggcattcttcagtccgaatggcattacattcc

SEQ ID NO: 10370 - DNA, 1196 bp, Glycine max
  Gm_smallRNAprecursor_3203
aaggttttttacatccttctgtaaaatgtctttggctgattagcagtcaacccttactaaaaatttttgatttaataaatcagattgaaatttggaaatgcacaaaacaattgctaaaacttcttttttgacagttgaatactttaattgtgcaggattccagtgttttgaagtatatgcgatgacatgttcttgaccatgtacttgttgtttgaggatgccaccgtaaccgatgtctgatgcatcagtttcgacaattttgaatgcctgtggaatgggaagatacagacattttatggattggactttgactttgatttctttaactgtttgggtatggaggtcagaccaaggaggcggatttttctttagcctatcacgcaatggtttgacaatattgtttaagtaggggacaaattctcctacgtaatttagaaaacctagaaatctttgtaactgggttttgtctaagatttggttggggaatttgctagcaaactctattgacctttcgattggaatgattgtaccttgataaattttgtgaccaaggaatcgaattcgagtttggaaaagattgatttttgatttggagactgccaaaccattttgtttgatgatatggatgaaggtttggagatgtttgaaatgttggtcaatgttttgggaaaagattaaaacatcatctatgtagacaatgacaaattttgaatagggattaaaaatgtcattcataattttttggaattctgaaggggcattcttcagtccgaatggcattacattccattcatattgcccgaaaggtacagtaaacgttgttttgtacctatctgattcttggatttggatttgccaaaatccagatttcatgtcaaattttgaaaatatctttgcagaatttaatctgttaagcaaatcttttttgttttgaataggatatctaatccattgtaatgcttgatttagtggtttgtaatgtatgactaagcggagtgttccacgctcaatctcagattgtttgttgacataaaaagccgcacaagaccatgggctcttgcttttccggattaggcctttatcaagcaaatccttgatttccttttgacagtattgaagaagttcttcattcatttggattggtctggcttttgtgggaatttgtttttccctaaagtctttctcataggggagat

SEQ ID NO: 10371 - DNA, 1033 bp, Glycine max
  Gm_smallRNAprecursor_3204
gcaaagcttcagctctcagtgcaaactcccttcacaaaatctggtttcaggcttaaataggtggcattgtttgtgctcgtgcgcttagcgcaattctgaaccgcttagagcacattagtgaatttcggcttaacgcgttcttttctcgctcaacggatggactgaagcggtgcgcttagtgagataaagcggtgcgcttagcaaacctgtacagctcatcttcttccagattcttcctcgtgcttagccaatgagtgttgcgtttagcggacgctcgctaagccagtagattggcttagtgagaaggtgaaaaacaacacttttcagagtcacctaattaacctgaaattgagagaaaatgattattaaacacacaaaatgtaagtactaagtatttattacctacacttaacaaaaattacttataacactacaaaataaccataaactggggaagtttgatacaatttacacatggattttttcagatttaaagtacttttccagttttgccttgtcatggattttttcatggcaatacagatatggaaaaaccggaaatagcaaacagtagccaccattgcagagacatgcctttgtaaaatggtggtcacaattcgatacctcaaaggctgctccagaacaagtcaagaactggtttcagagcaaccctgagtttctcaagcctgctgatccagagacatctttgtttctgaatcaaaagtctcaacttgcagcgttcttagcaagctcaaaatctaaagagagtcttgctcagaatcttaaggaagttctccaactacttcaacaggaagaagaagaagaactccccaagaaagaagccgaatcatccgagaataatgatgaccaggaagatgatccattctaccagaatgaagatgactgctttggtatattgttagacgatgattagttggttgtagtaatcatgaattattgtaactaattattcggttcccgataataatgtaatttgtaaaagtttttgtaacagttccggtaaacattaccg

SEQ ID NO: 10372 - DNA, 1031 bp, Glycine max
  Gm_smallRNAprecursor_3205
caaagcttcagctctcagtgcaaactcccttcacaaaatctggtttcaggcttaaataggtggcattgtttgtgctcgtgcgcttagcgcaattctgaaccgcttagagcacattagtgaatttcggcttaacgcgttcttttctcgctcaacggatggactgaagcggtgcgcttagtgagataaagcggtgcgcttagcaaacctgtacagctcatcttcttccagattcttcctcgtgcttagccaatgagtgttgcgtttagcggacgctcgctaagccagtagattggcttagtgagaaggtgaaaaacaacacttttcagagtcacctaattaacctgaaattgagagaaaatgattattaaacacacaaaatgtaagtactaagtatttattacctacacttaacaaaaattacttataacactacaaaataaccataaactggggaagtttgatacaatttacacatggattttttcagatttaaagtacttttccagttttgccttgtcatggattttttcatggcaatacagatatggaaaaaccggaaatagcaaacagtagccaccattgcagagacatgcctttgtaaaatggtggtcacaattcgatacctcaaaggctgctccagaacaagtcaagaactggtttcagagcaaccctgagtttctcaagcctgctgatccagagacatctttgtttctgaatcaaaagtctcaacttgcagcgttcttagcaagctcaaaatctaaagagagtcttgctcagaatcttaaggaagttctccaactacttcaacaggaagaagaagaagaactccccaagaaagaagccgaatcatccgagaataatgatgaccaggaagatgatccattctaccagaatgaagatgactgctttggtatattgttagacgatgattagttggttgtagtaatcatgaattattgtaactaattattcggttcccgataataatgtaatttgtaaaagtttttgtaacagttccggtaaacattacc

SEQ ID NO: 10373 - DNA, 1032 bp, Glycine max
  Gm_smallRNAprecursor_3206
caaagcttcagctctcagtgcaaactcccttcacaaaatctggtttcaggcttaaataggtggcattgtttgtgctcgtgcgcttagcgcaattctgaaccgcttagagcacattagtgaatttcggcttaacgcgttcttttctcgctcaacggatggactgaagcggtgcgcttagtgagataaagcggtgcgcttagcaaacctgtacagctcatcttcttccagattcttcctcgtgcttagccaatgagtgttgcgtttagcggacgctcgctaagccagtagattggcttagtgagaaggtgaaaaacaacacttttcagagtcacctaattaacctgaaattgagagaaaatgattattaaacacacaaaatgtaagtactaagtatttattacctacacttaacaaaaattacttataacactacaaaataaccataaactggggaagtttgatacaatttacacatggattttttcagatttaaagtacttttccagttttgccttgtcatggattttttcatggcaatacagatatggaaaaaccggaaatagcaaacagtagccaccattgcagagacatgcctttgtaaaatggtggtcacaattcgatacctcaaaggctgctccagaacaagtcaagaactggtttcagagcaaccctgagtttctcaagcctgctgatccagagacatctttgtttctgaatcaaaagtctcaacttgcagcgttcttagcaagctcaaaatctaaagagagtcttgctcagaatcttaaggaagttctccaactacttcaacaggaagaagaagaagaactccccaagaaagaagccgaatcatccgagaataatgatgaccaggaagatgatccattctaccagaatgaagatgactgctttggtatattgttagacgatgattagttggttgtagtaatcatgaattattgtaactaattattcggttcccgataataatgtaatttgtaaaagtttttgtaacagttccggtaaacattaccg

SEQ ID NO: 10374 - DNA, 1037 bp, Glycine max
  Gm_smallRNAprecursor_3207
tgtcatcttggcagatttttaaggctaccttttggacataggaaattaattgaccatagcttaagttttcatatggaatgtctccattggcagattgactacgaattttatccctaaccttgtctcctaatgatctgggaagaccagctagaaatttttctttcctgaatggttgttgactatcttctctggtgtaaaccctagttaggaaagtatctctgtaccacctaaaatctgctaaggttctacacttaaggtttgataataattctgcagacctatctttccataaggatgggtctccaataaaatgttgagctattctaaaaaataaggtattgacagcgtcaggaatctctctatcatcgtcattagtaatgacttttccgttccacaggcattcaaaattgtcaaaactgatgcatcagacattggttacggtggcatccttaaacagcaaatacatggtcaagaacatgtcattgcatatacttcaaaacattggaatcctgcacaattaaaatattcaactgttaaaaaggaagttttagcaattgttttgtgcatttccaaatttcaatctgatttattgaatcaaaaatttttagtaagggttgactgcaaatcagccaaagacattttacaaaaggatgtaaaaaaccttgcctcaaaacaaatttttgcaagatggcaagcaattttaagcgtctttgattttaacatagaatatatcaagggctcttcaaactctctacctgactacctcactcgtgaattttaacagaaaattcccgatgcctcctaaggtgtctagctcctccggcagaggaggaagatccggtactaaaggtaaagatgttatattggctctaccagagccaataaccaagaaggcaactacatcatcttctgggtcacctactcagactgggtcatcaacccagaaaggaaagcttgaagggtcattgacccagataactaccgttaaacctgagtcatcaactcaggaatccctaaaaccaacaacaacaaaacag

SEQ ID NO: 10375 - DNA, 1058 bp, Glycine max
  Gm_smallRNAprecursor_3208
atgtgagggacgttgttgcggaagtggagtcctaaggaatctcgaaagccatgaaaaagagccaaacaagggaattgtcaaagtccccgaaggaagaaaagcacgaagttgcggatgctggactgtgggttagacggtgttttggttgtcggagggggggggggggggcaatgccctgggtgtggtcacgctggagaaaggaagactcactgatagtgaacgaaagcccgcaatgctttgtgtcacactgttcacacgaacagaaacacaaacactgaaagaaaagaaaattgtttggcgcgtgatggcggcggcggcggtcaccagaaaagtcattggaaaaagagaaagggtcgctggaagatgggcagcgagcagaaaggtccactagggacagtaggtccttgatggagaaccacttttgttattccactgtgaagagtaaccgctgtgatcatggttatcaaactctcgagttaactcgctgacccttacgagtttacgagttgactcttgagtaaactctttttttagtagactctgcataaactttataaactctaagtaaactcggtagactctcgagtttaccatcgagtcaacgagttagctagttaaaaaaattaggccaaaatgtaggtaattttttttattgttttctgtctatttagcattcaacataccttcatttagcgcattattctcaaatacaaaactctcacctttaatgatatcaaaccctttgttctctaataacatcaaaccctctatgagaatgatataccactattataacctctacaagttattatctagtagtaatgtattattactagacttgattatttaaatattctaaacttcatgatttactgttttgctttattatattgttgaaatgtttaattagtatgttatttatagatattttgtaattatttttatatgaagtagactcttacgagtctacaagtcaagtccacgagtcgagtttatgaaactctcacgagtctacgtaaactctcgagtttgataaccttggctgtgataccatatga

SEQ ID NO: 10376 - DNA, 1053 bp, Glycine max
  Gm_smallRNAprecursor_3209
gtgagggacgttgttgcggaagtggagtcctaaggaatctcgaaagccatgaaaaagagccaaacaagggaattgtcaaagtccccgaaggaagaaaagcacgaagttgcggatgctggactgtgggttagacggtgttttggttgtcggagggggggggggggggcaatgccctgggtgtggtcacgctggagaaaggaagactcactgatagtgaacgaaagcccgcaatgctttgtgtcacactgttcacacgaacagaaacacaaacactgaaagaaaagaaaattgtttggcgcgtgatggcggcggcggcggtcaccagaaaagtcattggaaaaagagaaagggtcgctggaagatgggcagcgagcagaaaggtccactagggacagtaggtccttgatggagaaccacttttgttattccactgtgaagagtaaccgctgtgatcatggttatcaaactctcgagttaactcgctgacccttacgagtttacgagttgactcttgagtaaactctttttttagtagactctgcataaactttataaactctaagtaaactcggtagactctcgagtttaccatcgagtcaacgagttagctagttaaaaaaattaggccaaaatgtaggtaattttttttattgttttctgtctatttagcattcaacataccttcatttagcgcattattctcaaatacaaaactctcacctttaatgatatcaaaccctttgttctctaataacatcaaaccctctatgagaatgatataccactattataacctctacaagttattatctagtagtaatgtattattactagacttgattatttaaatattctaaacttcatgatttactgttttgctttattatattgttgaaatgtttaattagtatgttatttatagatattttgtaattatttttatatgaagtagactcttacgagtctacaagtcaagtccacgagtcgagtttatgaaactctcacgagtctacgtaaactctcgagtttgataaccttggctgtgataccata

SEQ ID NO: 10377 - DNA, 1085 bp, Glycine max
  Gm_smallRNAprecursor_3210
gtgagggacgttgttgcggaagtggagtcctaaggaatctcgaaagccatgaaaaagagccaaacaagggaattgtcaaagtccccgaaggaagaaaagcacgaagttgcggatgctggactgtgggttagacggtgttttggttgtcggagggggggggggggggcaatgccctgggtgtggtcacgctggagaaaggaagactcactgatagtgaacgaaagcccgcaatgctttgtgtcacactgttcacacgaacagaaacacaaacactgaaagaaaagaaaattgtttggcgcgtgatggcggcggcggcggtcaccagaaaagtcattggaaaaagagaaagggtcgctggaagatgggcagcgagcagaaaggtccactagggacagtaggtccttgatggagaaccacttttgttattccactgtgaagagtaaccgctgtgatcatggttatcaaactctcgagttaactcgctgacccttacgagtttacgagttgactcttgagtaaactctttttttagtagactctgcataaactttataaactctaagtaaactcggtagactctcgagtttaccatcgagtcaacgagttagctagttaaaaaaattaggccaaaatgtaggtaattttttttattgttttctgtctatttagcattcaacataccttcatttagcgcattattctcaaatacaaaactctcacctttaatgatatcaaaccctttgttctctaataacatcaaaccctctatgagaatgatataccactattataacctctacaagttattatctagtagtaatgtattattactagacttgattatttaaatattctaaacttcatgatttactgttttgctttattatattgttgaaatgtttaattagtatgttatttatagatattttgtaattatttttatatgaagtagactcttacgagtctacaagtcaagtccacgagtcgagtttatgaaactctcacgagtctacgtaaactctcgagtttgataaccttggctgtgataccatatgactgttttattgtgtaatgtcgtaagaatt

SEQ ID NO: 10378 - DNA, 1046 bp, Glycine max
  Gm_smallRNAprecursor_3211
gttttttctcttcctattcaaaacacacaaaaaaaatcagaatccagaatgatacattgatggtaattgaagtaaaaaaaaaaaagaggaaaagagaatggttatgcagacctcgcccattggtgttgacagctacagagataaggttgttgctgtggatttttggttctttttatttgtgtaagtgtgtgtgagttctttttcgtatatatgtctcaattggttcaaaatcatcaaatttgaagaagtcactcattctatcatcatcaaatgacgtgacactaaaattgaccttactaacaacattactttaaaatttaacggaaggactattttgcaatacttatgtaaaagatagggactattttgaatttttcattaagttagggattaatatgcaacaggggtacaaagtcagggactaaattgtctatttactcgttttgttatcatcaaatgacgtgacatcagacacgtccacgtgtcatgccacgtcatcctttagtgccacgtggatagtccacgtggcactaaaattgacctcactaacggcgttactttaaaatttaacggaaggactattttgcaacacttatgcaaagatagggactattttgaatttaatattaagttagggactaatatgcaaaataggtacaatctcagggactaaattgcctattcactctacaagaatatgattgaaaagagagactacactaaacttggctagcttagttctttggtggaaactaacaaagcttgtagatagttttcacttatagtatagaaacacaaaaaaaaaaaaaacaaaaaacatgaacaaaagtgcatgtaaaaaaataaagtcatgatttacattggaacttcccattttttctaacagaaattaaaaatgactttatttaaaaatcacaatagagttttaggaaaagaatgaagtttttttagttgaataaataagaagaaatagttttatttattaaaataattgttttaaggtaaataaaataaatatatgttcttaagaaattaaaaggagattt

SEQ ID NO: 10379 - DNA, 1036 bp, Glycine max
  Gm_smallRNAprecursor_3212
agaccacaagaaggtgaaattaaaggtagtgtggttaaattaagttggctggctcaccattttgatcaaataaataatgatgacgacgaagaacaagtacgaaggtttgcccgtgcatggatactgagatttattggaggtgtcttgttcgttgacaaaaccaataacagagtttcggtaaggtaccttcaatttttacgtgactttgaagaatgtggcagatatgcatggggagctgccgtacttggttttctatatagagagatgtgcagtgccaccgattataaaactaaatcaatcggaggtatgtgcatcttactacaattgtgggcatgggaacgatgtccaaccttggctccaaagaggactccttcccaaatagaaaatacaccactagggcacaggtgagtcatttttaacagcgtctttcatttcaatagaataaatggttttagggtatattaaattttattctttgtaggtggctgcgacgtggaaaccaacatatcggcaatgatgatgtgaaagtttttcgtcgcaagttggatattatgaaacgtcatgaggtaagaagcatgctattgtatttgtaaaataaaaaattatgtcttattttactacagtgttcacaactatgttgttatatgcagtttgtgtgggagccttacccatcaaccgttatatcattgttgcctcccgtttgtttagtcggaagtatcgcgtggtacgtggtggtgccactaatttgtttccaagttattgagtggcaccaaccagacagagtcttgagacaattcgggatgcagcaaccagttccagagtctccttcacaacccctaaacattcatggcataacattaaaggggaaacatgacgaaaattgggggcaattattcgccccaatgattcaacagtggaataatcgacatgcatttagggtcgacgcttatccccgacaagaaggcctattgagttttaactcggactacatggtctggtataggcgaaagacaaagatgtttgttgacccagaaaa

SEQ ID NO: 10380 - DNA, 1196 bp, Glycine max
  Gm_smallRNAprecursor_3213
aaaatgattcctaaaaaagaccatttgaatattatttggtggacgaagggatggaccagagttcaatactcgtgggttttggcggcgtcaatgagaggatgcacgtaatgttcgggtccgtacggcattgccactgtttaaaccatcggacacttgaaagctcaaagcagtgactgtgatgagcagctcgcaatagagaatccaaaattcccaaaagcaaaaacaaaacccaaaaagcaaaagagatatcattgtgtggctgttagataccacagacagcaacatggtaactgaccacccaatccgggctcgacagcgcaacgttagcaaaaccgccctggttttttcccaaaccagaaaccactttatcgccaaaccccaatgtgattagagtgttgctaggtgcacctactgttattgctggtgcacccaaccttctttgataatgataaaattatccgtcttctttttccctttacggatcaagttgatccgcaagttgatttttaagacttacagatcaagttaatcggtaagtcttttatggatcaacttgatccgtaagtcttaaaaattaatttaccaatcaacttgatccgtaagaagcttgcagatcaagttgatccataaaagacttaaaaatcaatttgcggatcaacttgatccgtaagaagcttacgaatcaagttgatccgtaaaagacttacggatcaacttgatccgtaagtcttaacaatctacttgcggatcaacttgatccgtaagaaacttgcagatcatctatatcaactgtagatcaactaaaacatatgcggatcgactcattacatatgtggaccaacctgaatgagctaggtgcacaaaaatatttttaaaaatacatagggatatttttgtcttttcatgttaagtgttaggtgcccaacaacaataatgctgggtgcacttagtaacacccatgtgattagggatatataacaacatagcatactcacactactactcactgcggtttttttctcctccagaagaagaaagatccttaaatcaacattctctctccctcccttggttataatagcaagcttttcaagcatatttccggggtttgttcccttttccttgtttagggttttctttggaaaaaaaaggtaattaggtataataatataattaaagcaaaaaaaaaaaaaata

SEQ ID NO: 10381 - DNA, 1150 bp, Glycine max
  Gm_smallRNAprecursor_3214
gatggaccagagttcaatactcgtgggttttggcggcgtcaatgagaggatgcacgtaatgttcgggtccgtacggcattgccactgtttaaaccatcggacacttgaaagctcaaagcagtgactgtgatgagcagctcgcaatagagaatccaaaattcccaaaagcaaaaacaaaacccaaaaagcaaaagagatatcattgtgtggctgttagataccacagacagcaacatggtaactgaccacccaatccgggctcgacagcgcaacgttagcaaaaccgccctggttttttcccaaaccagaaaccactttatcgccaaaccccaatgtgattagagtgttgctaggtgcacctactgttattgctggtgcacccaaccttctttgataatgataaaattatccgtcttctttttccctttacggatcaagttgatccgcaagttgatttttaagacttacagatcaagttaatcggtaagtcttttatggatcaacttgatccgtaagtcttaaaaattaatttaccaatcaacttgatccgtaagaagcttgcagatcaagttgatccataaaagacttaaaaatcaatttgcggatcaacttgatccgtaagaagcttacgaatcaagttgatccgtaaaagacttacggatcaacttgatccgtaagtcttaacaatctacttgcggatcaacttgatccgtaagaaacttgcagatcatctatatcaactgtagatcaactaaaacatatgcggatcgactcattacatatgtggaccaacctgaatgagctaggtgcacaaaaatatttttaaaaatacatagggatatttttgtcttttcatgttaagtgttaggtgcccaacaacaataatgctgggtgcacttagtaacacccatgtgattagggatatataacaacatagcatactcacactactactcactgcggtttttttctcctccagaagaagaaagatccttaaatcaacattctctctccctcccttggttataatagcaagcttttcaagcatatttccggggtttgttcccttttccttgtttagggttttctttggaaaaaaaaggtaattaggtataataatataattaaagcaaaaaaaaaaaaaataaca

SEQ ID NO: 10382 - DNA, 1082 bp, Glycine max
  Gm_smallRNAprecursor_3215
tccgtacggcattgccactgtttaaaccatcggacacttgaaagctcaaagcagtgactgtgatgagcagctcgcaatagagaatccaaaattcccaaaagcaaaaacaaaacccaaaaagcaaaagagatatcattgtgtggctgttagataccacagacagcaacatggtaactgaccacccaatccgggctcgacagcgcaacgttagcaaaaccgccctggttttttcccaaaccagaaaccactttatcgccaaaccccaatgtgattagagtgttgctaggtgcacctactgttattgctggtgcacccaaccttctttgataatgataaaattatccgtcttctttttccctttacggatcaagttgatccgcaagttgatttttaagacttacagatcaagttaatcggtaagtcttttatggatcaacttgatccgtaagtcttaaaaattaatttaccaatcaacttgatccgtaagaagcttgcagatcaagttgatccataaaagacttaaaaatcaatttgcggatcaacttgatccgtaagaagcttacgaatcaagttgatccgtaaaagacttacggatcaacttgatccgtaagtcttaacaatctacttgcggatcaacttgatccgtaagaaacttgcagatcatctatatcaactgtagatcaactaaaacatatgcggatcgactcattacatatgtggaccaacctgaatgagctaggtgcacaaaaatatttttaaaaatacatagggatatttttgtcttttcatgttaagtgttaggtgcccaacaacaataatgctgggtgcacttagtaacacccatgtgattagggatatataacaacatagcatactcacactactactcactgcggtttttttctcctccagaagaagaaagatccttaaatcaacattctctctccctcccttggttataatagcaagcttttcaagcatatttccggggtttgttcccttttccttgtttagggttttctttggaaaaaaaaggtaattaggtataataatataattaaagcaaaaaaaaaaaaaataac

SEQ ID NO: 10383 - DNA, 1083 bp, Glycine max
  Gm_smallRNAprecursor_3216
tccgtacggcattgccactgtttaaaccatcggacacttgaaagctcaaagcagtgactgtgatgagcagctcgcaatagagaatccaaaattcccaaaagcaaaaacaaaacccaaaaagcaaaagagatatcattgtgtggctgttagataccacagacagcaacatggtaactgaccacccaatccgggctcgacagcgcaacgttagcaaaaccgccctggttttttcccaaaccagaaaccactttatcgccaaaccccaatgtgattagagtgttgctaggtgcacctactgttattgctggtgcacccaaccttctttgataatgataaaattatccgtcttctttttccctttacggatcaagttgatccgcaagttgatttttaagacttacagatcaagttaatcggtaagtcttttatggatcaacttgatccgtaagtcttaaaaattaatttaccaatcaacttgatccgtaagaagcttgcagatcaagttgatccataaaagacttaaaaatcaatttgcggatcaacttgatccgtaagaagcttacgaatcaagttgatccgtaaaagacttacggatcaacttgatccgtaagtcttaacaatctacttgcggatcaacttgatccgtaagaaacttgcagatcatctatatcaactgtagatcaactaaaacatatgcggatcgactcattacatatgtggaccaacctgaatgagctaggtgcacaaaaatatttttaaaaatacatagggatatttttgtcttttcatgttaagtgttaggtgcccaacaacaataatgctgggtgcacttagtaacacccatgtgattagggatatataacaacatagcatactcacactactactcactgcggtttttttctcctccagaagaagaaagatccttaaatcaacattctctctccctcccttggttataatagcaagcttttcaagcatatttccggggtttgttcccttttccttgtttagggttttctttggaaaaaaaaggtaattaggtataataatataattaaagcaaaaaaaaaaaaaataaca

SEQ ID NO: 10384 - DNA, 1045 bp, Glycine max
  Gm_smallRNAprecursor_3217
cgtcaacaccaatgggcaagatatgcataactattctcttttcctctttttttttcttcaattaccatcaatgtatcattccgggttttgattttttttgtgtgtgttttgaataggaagagaaaaaactagaggaaaacaaagtggaggagaaaaaagcaaaggaagaaaaaaagaaagaagaagagaaaaaaccagaggaatcaaaagatgacaaggaatccaaggaggaatctgtgccgccaaaaatcatgcaaggcacaacctttgcaatgcatggacactttaagcacgatttctggcatcttttaagttagggactattttgcaacacttatgaaaaaagataaggactattttgaatttttcattaagttagggattaatatgcaataggagtacaaagtcagggactaaattgtctatttactcgttttgttatcatcaaatgacgtgacatcttttaggaggcacgtccacgtgtcatgtcacgtcatcctttagtgccacgttggatagttcacgtggcactaaaattgacctcactaacggcgttactttaaaatttaacggaaggactattttgcaacacttatgcaaagatagagactattttgaatttaacattaagttagggactaatatgtaaaatagatacaatctcaaggactaaattgtctattcactctggattttagggtatgaatgaacttttcttagtcaaataatgttagttatatacttatatataatatatacatatataattttaaaattttaatatatatcggatcaaaccgaaccaattattggtccaccggttggatccctaacccacattattggatcaatgaccagatcaacttttacactaatgacaaaatatgtttggttggatatttttattttcaattttagaaaacaaattcagtattttaagaatttttgaaaacgaaaataaataattttctacattttcactaatcgtgcagtggcacacgtgtgaaattttttagaccttttttcatttgcgtcatctctttga

SEQ ID NO: 10385 - DNA, 1045 bp, Glycine max; identical to SEQ ID NO: 10384
  Gm_smallRNAprecursor_3218

SEQ ID NO: 10386 - DNA, 1046 bp, Glycine max
  Gm_smallRNAprecursor_3219
cgtcaacaccaatgggcaagatatgcataactattctcttttcctctttttttttcttcaattaccatcaatgtatcattccgggttttgattttttttgtgtgtgttttgaataggaagagaaaaaactagaggaaaacaaagtggaggagaaaaaagcaaaggaagaaaaaaagaaagaagaagagaaaaaaccagaggaatcaaaagatgacaaggaatccaaggaggaatctgtgccgccaaaaatcatgcaaggcacaacctttgcaatgcatggacactttaagcacgatttctggcatcttttaagttagggactattttgcaacacttatgaaaaaagataaggactattttgaatttttcattaagttagggattaatatgcaataggagtacaaagtcagggactaaattgtctatttactcgttttgttatcatcaaatgacgtgacatcttttaggaggcacgtccacgtgtcatgtcacgtcatcctttagtgccacgttggatagttcacgtggcactaaaattgacctcactaacggcgttactttaaaatttaacggaaggactattttgcaacacttatgcaaagatagagactattttgaatttaacattaagttagggactaatatgtaaaatagatacaatctcaaggactaaattgtctattcactctggattttagggtatgaatgaacttttcttagtcaaataatgttagttatatacttatatataatatatacatatataattttaaaattttaatatatatcggatcaaaccgaaccaattattggtccaccggttggatccctaacccacattattggatcaatgaccagatcaacttttacactaatgacaaaatatgtttggttggatatttttattttcaattttagaaaacaaattcagtattttaagaatttttgaaaacgaaaataaataattttctacattttcactaatcgtgcagtggcacacgtgtgaaattttttagaccttttttcatttgcgtcatctctttgaa

SEQ ID NO: 10387 - DNA, 1046 bp, Glycine max; identical to SEQ ID NO: 10386
  Gm_smallRNAprecursor_3220

SEQ ID NO: 10388 - DNA, 1046 bp, Glycine max; identical to SEQ ID NO: 10386
  Gm_smallRNAprecursor_3221

SEQ ID NO: 10389 - DNA, 1046 bp, Glycine max; identical to SEQ ID NO: 10386
  Gm_smallRNAprecursor_3222

SEQ ID NO: 10390 - DNA, 1044 bp, Glycine max
  Gm_smallRNAprecursor_3223
gtcaacaccaatgggcaagatatgcataactattctcttttcctctttttttttcttcaattaccatcaatgtatcattccgggttttgattttttttgtgtgtgttttgaataggaagagaaaaaactagaggaaaacaaagtggaggagaaaaaagcaaaggaagaaaaaaagaaagaagaagagaaaaaaccagaggaatcaaaagatgacaaggaatccaaggaggaatctgtgccgccaaaaatcatgcaaggcacaacctttgcaatgcatggacactttaagcacgatttctggcatcttttaagttagggactattttgcaacacttatgaaaaaagataaggactattttgaatttttcattaagttagggattaatatgcaataggagtacaaagtcagggactaaattgtctatttactcgttttgttatcatcaaatgacgtgacatcttttaggaggcacgtccacgtgtcatgtcacgtcatcctttagtgccacgttggatagttcacgtggcactaaaattgacctcactaacggcgttactttaaaatttaacggaaggactattttgcaacacttatgcaaagatagagactattttgaatttaacattaagttagggactaatatgtaaaatagatacaatctcaaggactaaattgtctattcactctggattttagggtatgaatgaacttttcttagtcaaataatgttagttatatacttatatataatatatacatatataattttaaaattttaatatatatcggatcaaaccgaaccaattattggtccaccggttggatccctaacccacattattggatcaatgaccagatcaacttttacactaatgacaaaatatgtttggttggatatttttattttcaattttagaaaacaaattcagtattttaagaatttttgaaaacgaaaataaataattttctacattttcactaatcgtgcagtggcacacgtgtgaaattttttagaccttttttcatttgcgtcatctctttga

SEQ ID NO: 10391 - DNA, 1044 bp, Glycine max; identical to SEQ ID NO: 10390
  Gm_smallRNAprecursor_3224

SEQ ID NO: 10392 - DNA, 1033 bp, Glycine max
  Gm_smallRNAprecursor_3225
tggctgcaatttgaagcaaaagggttttcttcatggtgaggattttgattttggatttgatctacgatgaaatgaattttgagtaaattgtgcaagttgtagtgtgttgggttgtgtgatgtgtgttttgatggggcgtttgtaaatggggttcatttgttggtaagatgaagttgtttctgaagatatgtttgtgttaatgttcttataaccaattaattgttcagtaattacattgtatgtaattacatttagttaatttagttaatcagtgtcaattatttgtagtatcgtgtcaaaattatcctttttgtgcacttaattacttttgattaatgttttaatgtttggagagagaataattaagtaatataagaaaaaataattaatttatctagaaattagaaaaatgtcttataaaaaggaacctatgaagcaccgacacggacactggacacgacacagacacatggacacctgtaatgtccaaaatatagaatgtagtacgggtgttgtgtcggtgtcggacactgacacggacgcgtgtcggacaccggacacggggctggggtgtccgtgcttcatagaaaggaacaaacaaatttctgaaaaggatcaagcttgttggacttgttaaaacaataaatgaatacattaatttggatttgttttatatatactttttaaaattgcctgatctgatatacaagctttttcggaggtcaatttttagcctttacgagtttagaattgaggcaaggatgtgattgtcaatgaagtgatcttctaaggtctctcttataatatgtaatttgttttatcaatttatactcttttcatataaactgcagaatggaaagcagggaaggcaaatcaatttctgacttgtacgaagaaatttgtcacaaattcagagatttcatgacagagtaatttctaatcacactactttttagcttttagtatttttctatgtgctaaaaatcattggtatatatgtggtagttgtatttgtttatggagtaaataatta

SEQ ID NO: 10393 - DNA, 1035 bp, Glycine max
  Gm_smallRNAprecursor_3226
tggctgcaatttgaagcaaaagggttttcttcatggtgaggattttgattttggatttgatctacgatgaaatgaattttgagtaaattgtgcaagttgtagtgtgttgggttgtgtgatgtgtgttttgatggggcgtttgtaaatggggttcatttgttggtaagatgaagttgtttctgaagatatgtttgtgttaatgttcttataaccaattaattgttcagtaattacattgtatgtaattacatttagttaatttagttaatcagtgtcaattatttgtagtatcgtgtcaaaattatcctttttgtgcacttaattacttttgattaatgttttaatgtttggagagagaataattaagtaatataagaaaaaataattaatttatctagaaattagaaaaatgtcttataaaaaggaacctatgaagcaccgacacggacactggacacgacacagacacatggacacctgtaatgtccaaaatatagaatgtagtacgggtgttgtgtcggtgtcggacactgacacggacgcgtgtcggacaccggacacggggctggggtgtccgtgcttcatagaaaggaacaaacaaatttctgaaaaggatcaagcttgttggacttgttaaaacaataaatgaatacattaatttggatttgttttatatatactttttaaaattgcctgatctgatatacaagctttttcggaggtcaatttttagcctttacgagtttagaattgaggcaaggatgtgattgtcaatgaagtgatcttctaaggtctctcttataatatgtaatttgttttatcaatttatactcttttcatataaactgcagaatggaaagcagggaaggcaaatcaatttctgacttgtacgaagaaatttgtcacaaattcagagatttcatgacagagtaatttctaatcacactactttttagcttttagtatttttctatgtgctaaaaatcattggtatatatgtggtagttgtatttgtttatggagtaaataattata

SEQ ID NO: 10394 - DNA, 1077 bp, Glycine max
  Gm_smallRNAprecursor_3227
cctgatctgatatacaagctttttcggaggtcaatttttagcctttacgagtttagaattgaggcaaggatgtgattgtcaatgaagtgatcttctaaggtctctcttataatatgtaatttgttttatcaatttatactcttttcatataaactgcagaatggaaagcagggaaggcaaatcaatttctgacttgtacgaagaaatttgtcacaaattcagagatttcatgacagagtaatttctaatcacactactttttagcttttagtatttttctatgtgctaaaaatcattggtatatatgtggtagttgtatttgtttatggagtaaataattatatgtttgccttggctgaggctgacccgtcaacattgaaaaattccatgagagattgtagttgttaggttgagaactacttcatatcaatgttgttaatggcggatggcggttcatggcggaaagtaaaaaatccgccataaaaatatggcggatggcgtagcggaaaatggcggatgtcatggcggaccaaaaaaaaaaaaacatatatataaactcattgaaattgaaaaaaacaaaggattgcattcaaataaactaaaaaagtttcatgagttcatacaataatcaagtaccaacaccaaataaactcattaaagagttcaaataaactcagccatttaaaagaggactgaacagaaaaaaaaattgtggtgtcaaatacgaaaaaaaaaatgggactgttaaaagtaaaaaggggtgtcaaatagcaaaaggaaaaaaaaagctgcagacagaaaacagggggtgtcaaacagcaaaaataaaactaaaacctacgccttcttcttcttcgcgacgccttcttcttcttcgcgacagcagcttcgtcttctccgcgagaactcctcgctgcaggccgccgttcgtgacagatgcgtcgctgccggagcttgtcgccgccgtttgtgccggtgcgtcgctgccggaggtcgtcgcggctgcgtgcgcgtgcggctgggtgcgcgtgtggggtgcgggagggacgccattttccgccaccccgccataaccgc

SEQ ID NO: 10395 - DNA, 1039 bp, Glycine max
  Gm_smallRNAprecursor_3228
agcaatcaaagaatacaacatcagaaatcattttgattgcagaacaatttactctgaccaaagaaggctacacttcgtctgcaagttacgtgaaaatggttgtacatgaagcttgggcgcatgcaattcaaagaggcataacaaatggattatcaagagtatcagaggtcatcacacttgtctcgtgccgatgcttagacaagatcatcgccaactcgacaaacacgtcatagcacagatcatccaaccaattgtcaaaacaaacccaactgtctccatcaagacattgattgcagagatcaaaacgttcatgaattataccctatcctacaagaagacatggttagcaaagcaaaaaacattggagatgattcatggaaactgggaagaatcatatgccaaactgccaaaacttttcggagctttgcaatcttgtgttcccgggactgtggtcgctgctcaaacagaatccttgtatgaggggggagaaatagtaccgggcaaaagattgtttaaacgtgtcttttggtcatttggtccatgcattaatggttttgcatattgcaaacccattgtacaagtagatgatacatggctttaaggaaagtatactggcacactgttgatagctaccgcacaagatggagctaaccatatcttcccgattgcctatgccattgtagaaggggagacaacttcagcttgggggttttttctaaagaatttgagaagacatgttactccacaaattaacatttctcttatttcagaccgacacccctcaattataagtgcctacaacaacccaagtaacttatgggtccaggacacattccatttcttttgcttgcgccacattgcacaaaactttcttcgtggtaactcaaactgcaaacatttaaagaaaccacttatgttggctggtgagaatctattttatttattcgttataattttctttcaatcaaattttataacataatacattgattaaatatttacagggtacgcatacacggagaagatgcactggcgacat

SEQ ID NO: 10396 - DNA, 1051 bp, Glycine max
  Gm_smallRNAprecursor_3229
gcactggcgacatcttggggatattcgtgcgaataagccaagtgcagctgaatggcttgatcaattacccaaacaaaaatgggtacaatgctttgatgaggggaaacgttggggacatatgactaccaatttgtcggagtctgttaattccatgttcaaaaccacaagacatttgccggtgtcatcattggttgaggagatctatttcaagaccgcacaactctttgctaatagaggtcgacaaactcaggcaatgatcaactccggctcacagtattctgaagtcgtcttcgatgcaatcaatagtggtcaacaagaatctaatacacattgtaaatgaattcgacagacacaatcacacttttattataaccgagactcaatccccacttgaaacacccagaccacctggaaggtttagagtaatgttacaatcccaaaagtgtgattgtggtgaatttcaggctaaacatttaccgtgttctcacgtcatggctgcctgtaaatctgtcaatgttgatcccatgacctatgtgccgatgatattcactttacaacacattttgcacatctacgacaactcctttagtttattgccacaggaatcaatgtggcaagaatatgaaggagatcagtggggtcctgatccaaggataaagaggattgcaaagggtcgtccagtttcaactcgcattcctactgagatggacgaagacgaaaacgaacgagcaagtagaaaaaaatgtggactttaccggcaacatggtcataacagaaataattgtcctaatgtatcctcatcttagtttttccttagacaaatgtcattgtttaaatattttattgatgacgtagtataatgttcttatataaataaattgttaaaagctttagttttatcatttttaattaaatctaaaaacataaacaaactaattatatttagtaaaatagttaaattaaaaattttaaaattcagattattatacaaaataaatatttactaaaataaatatattattatacaaaattcagattttaaaatatatat

SEQ ID NO: 10397 - DNA, 1052 bp, Glycine max
  Gm_smallRNAprecursor_3230
gcactggcgacatcttggggatattcgtgcgaataagccaagtgcagctgaatggcttgatcaattacccaaacaaaaatgggtacaatgctttgatgaggggaaacgttggggacatatgactaccaatttgtcggagtctgttaattccatgttcaaaaccacaagacatttgccggtgtcatcattggttgaggagatctatttcaagaccgcacaactctttgctaatagaggtcgacaaactcaggcaatgatcaactccggctcacagtattctgaagtcgtcttcgatgcaatcaatagtggtcaacaagaatctaatacacattgtaaatgaattcgacagacacaatcacacttttattataaccgagactcaatccccacttgaaacacccagaccacctggaaggtttagagtaatgttacaatcccaaaagtgtgattgtggtgaatttcaggctaaacatttaccgtgttctcacgtcatggctgcctgtaaatctgtcaatgttgatcccatgacctatgtgccgatgatattcactttacaacacattttgcacatctacgacaactcctttagtttattgccacaggaatcaatgtggcaagaatatgaaggagatcagtggggtcctgatccaaggataaagaggattgcaaagggtcgtccagtttcaactcgcattcctactgagatggacgaagacgaaaacgaacgagcaagtagaaaaaaatgtggactttaccggcaacatggtcataacagaaataattgtcctaatgtatcctcatcttagtttttccttagacaaatgtcattgtttaaatattttattgatgacgtagtataatgttcttatataaataaattgttaaaagctttagttttatcatttttaattaaatctaaaaacataaacaaactaattatatttagtaaaatagttaaattaaaaattttaaaattcagattattatacaaaataaatatttactaaaataaatatattattatacaaaattcagattttaaaatatatatt

SEQ ID NO: 10398 - DNA, 1185 bp, Glycine max
  Gm_smallRNAprecursor_3231
tatattgatcgaccccatttttgttcatcagcaacacaatgtacaaccacgagtcggtgtactcgaggttgacatgaccttcgatgacaaagcacaatgtattcgagcaataaaagaatacaacatcagaaatcattttgattgcagaacaatttactctgaccaaagaaggctacacttcgtctgcaagttacatgaaaatggttgtacatggagcttgggcgcatgcaattcaaagagacataacaaatggattatcaagagtatcagaggtcatcacacttgtctcgtgccgatgctcagacaagatcatcgccaactcgacaaacacgtcatatcacagatcatccaaccaattatcaaaacaaacccaactgtctccattaagacattgattgcagagatcaaaacattcatgaattataccccatcctacaagaagacatggttagcaaagcaaaaagcattggagatgatttatggaaactgggaagaatcatatgccaaactgccaaaacttttcggagctttgcaatcttgtgttcccaggactgtggtcgctgctcaaacagaatccttgtatgaggggggagaaatagtaccgggcaaaagattgtttaaacgtgtcttttggtcatttggtccattcattaatggttttgcatattgcaaacccattgtataagtagatggtacatggctttacggaaagtatactggcacactgttgatagttaccacacaagatagagctaaccatatcttcctgattgcctataccattgtagaaggggagacaacttcagcttggggggttttttctaaagaatttgagaagacatgttactccgcaaattaacatttctcttatttcagaccgacacccctcatttataagtgcctacaacaacccaagtaacttatgggtccaggacacatcccatttcttttgcctgcgccacattgcacaaaactttcttcgtggtaactcaaactgcaaacatttaaagaaaccacttattttggctggtgagaatctattttatttatttgttataattttctttcaatcaaattttataacataatacattgattaaatatttactgggtacgcatacacggagaagatgcactggcgacatcttggggatattcgtgcgaataaaccaagtgcagttgaat

SEQ ID NO: 10399 - DNA, 1178 bp, Glycine max
  Gm_smallRNAprecursor_3232
acacaatgtacaaccacgagtcggtgtactcgaggttgacatgaccttcgatgacaaagcacaatgtattcgagcaataaaagaatacaacatcagaaatcattttgattgcagaacaatttactctgaccaaagaaggctacacttcgtctgcaagttacatgaaaatggttgtacatggagcttgggcgcatgcaattcaaagagacataacaaatggattatcaagagtatcagaggtcatcacacttgtctcgtgccgatgctcagacaagatcatcgccaactcgacaaacacgtcatatcacagatcatccaaccaattatcaaaacaaacccaactgtctccattaagacattgattgcagagatcaaaacattcatgaattataccccatcctacaagaagacatggttagcaaagcaaaaagcattggagatgatttatggaaactgggaagaatcatatgccaaactgccaaaacttttcggagctttgcaatcttgtgttcccaggactgtggtcgctgctcaaacagaatccttgtatgaggggggagaaatagtaccgggcaaaagattgtttaaacgtgtcttttggtcatttggtccattcattaatggttttgcatattgcaaacccattgtataagtagatggtacatggctttacggaaagtatactggcacactgttgatagttaccacacaagatagagctaaccatatcttcctgattgcctataccattgtagaaggggagacaacttcagcttggggggttttttctaaagaatttgagaagacatgttactccgcaaattaacatttctcttatttcagaccgacacccctcatttataagtgcctacaacaacccaagtaacttatgggtccaggacacatcccatttcttttgcctgcgccacattgcacaaaactttcttcgtggtaactcaaactgcaaacatttaaagaaaccacttattttggctggtgagaatctattttatttatttgttataattttctttcaatcaaattttataacataatacattgattaaatatttactgggtacgcatacacggagaagatgcactggcgacatcttggggatattcgtgcgaataaaccaagtgcagttgaatgacttgatcaattacccaaacaaaaa

SEQ ID NO: 10400 - DNA, 1051 bp, Glycine max
  Gm_smallRNAprecursor_3233
actggcgacatcttggggatattcgtgcgaataaaccaagtgcagttgaatgacttgatcaattacccaaacaaaaatgggtacaatgctttgatgaaaggaaacgttggggaaatatgactaccaatttgtcggaatctgttaattccatgttaaaaaacacaagacatttgccggtgtcatcattggttgaggatacctatttcaagaccgcacaactctttgccaatagaggtcgacaaactcaggcaatgatcaactccggctcacagtattctgaagtcgtcttcgatgcaatcaatagtggtcaacaagaatctaatacacacattgtaaatgaattcgacagacacaatcacacttttattataacagagactcaatccccacttgaaacacccagaccacctggaaggtttagagtaatgttacaatcccaaaagtgtgattgtggtgaatttcaggctaaacatttaccgtgttctcacgtcatggctgcctgtaaatctgtcaatgttgatcccatgacctatgtgccgatgatattcactttacaacacattttgcacatctacgacaactcctttgatttattgccacatgaatcaatgtggcaagaatatgaaggagatcggtggggtcctgatccaaggagaaagaggactgcaaagggtcggccgtttcaactcgcattcctactgagatggacgaagacgaaaatgaacgagcaagtagaaaaaaatttggactttgccggcaacatggtcatagtagaaataattgtcctaatgtatcctcatcttagtttttccttagacaaatgtcattgtttaaatattttattgatgacgtagtataatgttgttatataaataaattgttaaaagatttagttttatcatttttaattaaatctaataacagaaacaaattaattatatttagtaaaatagttaaattaaaaattttaaaatttagattattatacaaaataaatatttactaaaataaatatattatacaaaattcagattttaaaacatatattcac

SEQ ID NO: 10401 - DNA, 1052 bp, Glycine max
  Gm_smallRNAprecursor_3234
actggcgacatcttggggatattcgtgcgaataaaccaagtgcagttgaatgacttgatcaattacccaaacaaaaatgggtacaatgctttgatgaaaggaaacgttggggaaatatgactaccaatttgtcggaatctgttaattccatgttaaaaaacacaagacatttgccggtgtcatcattggttgaggatacctatttcaagaccgcacaactctttgccaatagaggtcgacaaactcaggcaatgatcaactccggctcacagtattctgaagtcgtcttcgatgcaatcaatagtggtcaacaagaatctaatacacacattgtaaatgaattcgacagacacaatcacacttttattataacagagactcaatccccacttgaaacacccagaccacctggaaggtttagagtaatgttacaatcccaaaagtgtgattgtggtgaatttcaggctaaacatttaccgtgttctcacgtcatggctgcctgtaaatctgtcaatgttgatcccatgacctatgtgccgatgatattcactttacaacacattttgcacatctacgacaactcctttgatttattgccacatgaatcaatgtggcaagaatatgaaggagatcggtggggtcctgatccaaggagaaagaggactgcaaagggtcggccgtttcaactcgcattcctactgagatggacgaagacgaaaatgaacgagcaagtagaaaaaaatttggactttgccggcaacatggtcatagtagaaataattgtcctaatgtatcctcatcttagtttttccttagacaaatgtcattgtttaaatattttattgatgacgtagtataatgttgttatataaataaattgttaaaagatttagttttatcatttttaattaaatctaataacagaaacaaattaattatatttagtaaaatagttaaattaaaaattttaaaatttagattattatacaaaataaatatttactaaaataaatatattatacaaaattcagattttaaaacatatattcacc

SEQ ID NO: 10402 - DNA, 1135 bp, Glycine max
  Gm_smallRNAprecursor_3235
attccccaggggggggtttttagccaaaaaaggggggggaaaggggccaaagggaaaaaaaaaccccccgacttctcttcttccttttttttttataaaaaagtttatatattattaaaattaaatattatattatataaaattatttttaattaatttgaaaattatttacttattaaattaatttatgtaatattattttataatttaattttgttattaagaaaatgaaatttaagtatttttgttatattatttaaattagttaagatatttttgggtgaatatatgttttaaaatctgaattttgtataataatatatttattttagtaaatatttattttgtataatattttgaattttaaaatttttaatttaactattttactaaatataattagtttgtttatgttattagatttaattaaaaatgataaaactaaagcttttaacaatttatttatatatgaacattatactacgtcatcaataaaatatttcaacaatgacatttgtctaaggaaaaactaagatgaggatacattaggacaattatttatgctatgaccatgttgccggcaaagtccacatttttttctacttgctcgttcattttcgtcttcgtccatctcagtaggaatgcgagttgaaacggtcgaccctttgcagtcctctttctccttggatcaggaccccactgatctccttcatattcttgccacattgattcgtgtggcaataaaccaaaggagttgtcgtagatgtgcaaaatgtgttgtaaagtgaatatcatcggcacataggtcatgggatcaacattgacagatttacaggcagccatgacttgagaacacggtaaatgtttagcctgaaattcaccacaatcacacttttgggattgtaacattactctaaaccttccaggtggtctgggtgtttcaagtggggattgagtctctgttataataaaagtgtgattgtgtctgtcgaattcatttacaatgtgtgtattatattcttgttgaccactattgattgcatcgaagacgacttcagaatactgtgagccggagttgatcattgcctgagtttgttgccctctattagcaaagagttgtgcggtcttgaaatag

SEQ ID NO: 10403 - DNA, 1154 bp, Glycine max
  Gm_smallRNAprecursor_3236
taaaattatttttaattaatttgaaaattatttacttattaaattaatttatgtaatattattttataatttaattttgttattaagaaaatgaaatttaagtatttttgttatattatttaaattagttaagatatttttgggtgaatatatgttttaaaatctgaattttgtataataatatatttattttagtaaatatttattttgtataatattttgaattttaaaatttttaatttaactattttactaaatataattagtttgtttatgttattagatttaattaaaaatgataaaactaaagcttttaacaatttatttatatatgaacattatactacgtcatcaataaaatatttcaacaatgacatttgtctaaggaaaaactaagatgaggatacattaggacaattatttatgctatgaccatgttgccggcaaagtccacatttttttctacttgctcgttcattttcgtcttcgtccatctcagtaggaatgcgagttgaaacggtcgaccctttgcagtcctctttctccttggatcaggaccccactgatctccttcatattcttgccacattgattcgtgtggcaataaaccaaaggagttgtcgtagatgtgcaaaatgtgttgtaaagtgaatatcatcggcacataggtcatgggatcaacattgacagatttacaggcagccatgacttgagaacacggtaaatgtttagcctgaaattcaccacaatcacacttttgggattgtaacattactctaaaccttccaggtggtctgggtgtttcaagtggggattgagtctctgttataataaaagtgtgattgtgtctgtcgaattcatttacaatgtgtgtattatattcttgttgaccactattgattgcatcgaagacgacttcagaatactgtgagccggagttgatcattgcctgagtttgttgccctctattagcaaagagttgtgcggtcttgaaataggtctcctcaaccaatgatgacaccggcaaatgtcttgtgtttttgaacatggaattaacagactccgacaaattggtagtcatatgtccccaacgtttcccctcatcaaaacattgtacctatttttatttgggtaattgatcaagccattcagct

SEQ ID NO: 10404 - DNA, 1119 bp, Glycine max
  Gm_smallRNAprecursor_3237
acgtttcccctcatcaaaacattgtacctatttttatttgggtaattgatcaagccattcagctgcacttggcttattcacacgaatatccccaagatgtcgccagtgcatcttctccgtgtatgcgtaccctataaatatttaatcaatgtattatgttataaaatttgattgaaagaaaattataacgaataaataaaatagattctcactagccaacataagtggtttctttaaatgtttgcagtttgagttaccacgaagaaagttttgtgcaatgtggcgcaggcaaaagaaatgggatgtgtcctggacccataagttacttgggttgttgtaggcacttataattgaggggtgtcggtctgaaataagagaaatgttaatttgcggagtaacatgtcttctcaaattctttagaaaaaaccctcaagctgaagttgtctccccttctacaatggcatagggaatcgggaagatatggttagctccatcttgtgcggtagctatcaacagtgtgctagtatactttccgtaaagccatgtaccatctacttgtacaatgggtttgcaatatgcaaaaccattaatgcatggaccaaatgaccaaaagacacgtttaaacaatcttttgcccggtactatttctcccccctcaaacaaggattctgtttgagcagcgaccacagtcccgggaacacaagattgcaaagctccgaaaagttttggcaatttggcatatgattctttccagtttccatgaatcatctccaatgctttttgctttgctaaccatgtcttcttgtaggatggggtataattcatgaatgttttgatctctgcaatcaacgtcttgatggagatagttgggtttgttttgacaattggttggatgatctgtgctatgacatgtttgtcgagttggcgatgatcttgtctgagcatcggcacgagacaagtgtgatgacctctgatactcttgataatccatttgttatgcctctttgaattgcatgcgcccaagctccatgtacaaccattttcatgtaacttgcatacgaagtttagccttctttggtcagagtaaattgttttgcaatcaaaatgatttctgatgtt

SEQ ID NO: 10405 - DNA, 1200 bp, Glycine max
  Gm_smallRNAprecursor_3238
acgtttcccctcatcaaaacattgtacctatttttatttgggtaattgatcaagccattcagctgcacttggcttattcacacgaatatccccaagatgtcgccagtgcatcttctccgtgtatgcgtaccctataaatatttaatcaatgtattatgttataaaatttgattgaaagaaaattataacgaataaataaaatagattctcactagccaacataagtggtttctttaaatgtttgcagtttgagttaccacgaagaaagttttgtgcaatgtggcgcaggcaaaagaaatgggatgtgtcctggacccataagttacttgggttgttgtaggcacttataattgaggggtgtcggtctgaaataagagaaatgttaatttgcggagtaacatgtcttctcaaattctttagaaaaaaccctcaagctgaagttgtctccccttctacaatggcatagggaatcgggaagatatggttagctccatcttgtgcggtagctatcaacagtgtgctagtatactttccgtaaagccatgtaccatctacttgtacaatgggtttgcaatatgcaaaaccattaatgcatggaccaaatgaccaaaagacacgtttaaacaatcttttgcccggtactatttctcccccctcaaacaaggattctgtttgagcagcgaccacagtcccgggaacacaagattgcaaagctccgaaaagttttggcaatttggcatatgattctttccagtttccatgaatcatctccaatgctttttgctttgctaaccatgtcttcttgtaggatggggtataattcatgaatgttttgatctctgcaatcaacgtcttgatggagatagttgggtttgttttgacaattggttggatgatctgtgctatgacatgtttgtcgagttggcgatgatcttgtctgagcatcggcacgagacaagtgtgatgacctctgatactcttgataatccatttgttatgcctctttgaattgcatgcgcccaagctccatgtacaaccattttcatgtaacttgcatacgaagtttagccttctttggtcagagtaaattgttttgcaatcaaaatgatttctgatgttgtattctttgattgctcgaatacattgtgctttgtcatcgaaggtcatgccaacctcgaatacaccgactggtggtagtac

SEQ ID NO: 10406 - DNA, 1075 bp, Glycine max
  Gm_smallRNAprecursor_3239
gtgtatgcgtaccctataaatatttaatcaatgtattatgttataaaatttgattgaaagaaaattataacgaataaataaaatagattctcactagccaacataagtggtttctttaaatgtttgcagtttgagttaccacgaagaaagttttgtgcaatgtggcgcaggcaaaagaaatgggatgtgtcctggacccataagttacttgggttgttgtaggcacttataattgaggggtgtcggtctgaaataagagaaatgttaatttgcggagtaacatgtcttctcaaattctttagaaaaaaccctcaagctgaagttgtctccccttctacaatggcatagggaatcgggaagatatggttagctccatcttgtgcggtagctatcaacagtgtgctagtatactttccgtaaagccatgtaccatctacttgtacaatgggtttgcaatatgcaaaaccattaatgcatggaccaaatgaccaaaagacacgtttaaacaatcttttgcccggtactatttctcccccctcaaacaaggattctgtttgagcagcgaccacagtcccgggaacacaagattgcaaagctccgaaaagttttggcaatttggcatatgattctttccagtttccatgaatcatctccaatgctttttgctttgctaaccatgtcttcttgtaggatggggtataattcatgaatgttttgatctctgcaatcaacgtcttgatggagatagttgggtttgttttgacaattggttggatgatctgtgctatgacatgtttgtcgagttggcgatgatcttgtctgagcatcggcacgagacaagtgtgatgacctctgatactcttgataatccatttgttatgcctctttgaattgcatgcgcccaagctccatgtacaaccattttcatgtaacttgcatacgaagtttagccttctttggtcagagtaaattgttttgcaatcaaaatgatttctgatgttgtattctttgattgctcgaatacattgtgctttgtcatcgaaggtcatgccaacctcgaatacaccgactggtg

SEQ ID NO: 10407 - DNA, 1077 bp, Glycine max
  Gm_smallRNAprecursor_3240
gtgtatgcgtaccctataaatatttaatcaatgtattatgttataaaatttgattgaaagaaaattataacgaataaataaaatagattctcactagccaacataagtggtttctttaaatgtttgcagtttgagttaccacgaagaaagttttgtgcaatgtggcgcaggcaaaagaaatgggatgtgtcctggacccataagttacttgggttgttgtaggcacttataattgaggggtgtcggtctgaaataagagaaatgttaatttgcggagtaacatgtcttctcaaattctttagaaaaaaccctcaagctgaagttgtctccccttctacaatggcatagggaatcgggaagatatggttagctccatcttgtgcggtagctatcaacagtgtgctagtatactttccgtaaagccatgtaccatctacttgtacaatgggtttgcaatatgcaaaaccattaatgcatggaccaaatgaccaaaagacacgtttaaacaatcttttgcccggtactatttctcccccctcaaacaaggattctgtttgagcagcgaccacagtcccgggaacacaagattgcaaagctccgaaaagttttggcaatttggcatatgattctttccagtttccatgaatcatctccaatgctttttgctttgctaaccatgtcttcttgtaggatggggtataattcatgaatgttttgatctctgcaatcaacgtcttgatggagatagttgggtttgttttgacaattggttggatgatctgtgctatgacatgtttgtcgagttggcgatgatcttgtctgagcatcggcacgagacaagtgtgatgacctctgatactcttgataatccatttgttatgcctctttgaattgcatgcgcccaagctccatgtacaaccattttcatgtaacttgcatacgaagtttagccttctttggtcagagtaaattgttttgcaatcaaaatgatttctgatgttgtattctttgattgctcgaatacattgtgctttgtcatcgaaggtcatgccaacctcgaatacaccgactggtggt

SEQ ID NO: 10408 - DNA, 1078 bp, Glycine max
  Gm_smallRNAprecursor_3241
gtgtatgcgtaccctataaatatttaatcaatgtattatgttataaaatttgattgaaagaaaattataacgaataaataaaatagattctcactagccaacataagtggtttctttaaatgtttgcagtttgagttaccacgaagaaagttttgtgcaatgtggcgcaggcaaaagaaatgggatgtgtcctggacccataagttacttgggttgttgtaggcacttataattgaggggtgtcggtctgaaataagagaaatgttaatttgcggagtaacatgtcttctcaaattctttagaaaaaaccctcaagctgaagttgtctccccttctacaatggcatagggaatcgggaagatatggttagctccatcttgtgcggtagctatcaacagtgtgctagtatactttccgtaaagccatgtaccatctacttgtacaatgggtttgcaatatgcaaaaccattaatgcatggaccaaatgaccaaaagacacgtttaaacaatcttttgcccggtactatttctcccccctcaaacaaggattctgtttgagcagcgaccacagtcccgggaacacaagattgcaaagctccgaaaagttttggcaatttggcatatgattctttccagtttccatgaatcatctccaatgctttttgctttgctaaccatgtcttcttgtaggatggggtataattcatgaatgttttgatctctgcaatcaacgtcttgatggagatagttgggtttgttttgacaattggttggatgatctgtgctatgacatgtttgtcgagttggcgatgatcttgtctgagcatcggcacgagacaagtgtgatgacctctgatactcttgataatccatttgttatgcctctttgaattgcatgcgcccaagctccatgtacaaccattttcatgtaacttgcatacgaagtttagccttctttggtcagagtaaattgttttgcaatcaaaatgatttctgatgttgtattctttgattgctcgaatacattgtgctttgtcatcgaaggtcatgccaacctcgaatacaccgactggtggta

SEQ ID NO: 10409 - DNA, 1063 bp, Glycine max
  Gm_smallRNAprecursor_3242
cgtaccctataaatatttaatcaatgtattatgttataaaatttgattgaaagaaaattataacgaataaataaaatagattctcactagccaacataagtggtttctttaaatgtttgcagtttgagttaccacgaagaaagttttgtgcaatgtggcgcaggcaaaagaaatgggatgtgtcctggacccataagttacttgggttgttgtaggcacttataattgaggggtgtcggtctgaaataagagaaatgttaatttgcggagtaacatgtcttctcaaattctttagaaaaaaccctcaagctgaagttgtctccccttctacaatggcatagggaatcgggaagatatggttagctccatcttgtgcggtagctatcaacagtgtgctagtatactttccgtaaagccatgtaccatctacttgtacaatgggtttgcaatatgcaaaaccattaatgcatggaccaaatgaccaaaagacacgtttaaacaatcttttgcccggtactatttctcccccctcaaacaaggattctgtttgagcagcgaccacagtcccgggaacacaagattgcaaagctccgaaaagttttggcaatttggcatatgattctttccagtttccatgaatcatctccaatgctttttgctttgctaaccatgtcttcttgtaggatggggtataattcatgaatgttttgatctctgcaatcaacgtcttgatggagatagttgggtttgttttgacaattggttggatgatctgtgctatgacatgtttgtcgagttggcgatgatcttgtctgagcatcggcacgagacaagtgtgatgacctctgatactcttgataatccatttgttatgcctctttgaattgcatgcgcccaagctccatgtacaaccattttcatgtaacttgcatacgaagtttagccttctttggtcagagtaaattgttttgcaatcaaaatgatttctgatgttgtattctttgattgctcgaatacattgtgctttgtcatcgaaggtcatgccaacctcgaatacaccgac

SEQ ID NO: 10410 - DNA, 1065 bp, Glycine max
  Gm_smallRNAprecursor_3243
cgtaccctataaatatttaatcaatgtattatgttataaaatttgattgaaagaaaattataacgaataaataaaatagattctcactagccaacataagtggtttctttaaatgtttgcagtttgagttaccacgaagaaagttttgtgcaatgtggcgcaggcaaaagaaatgggatgtgtcctggacccataagttacttgggttgttgtaggcacttataattgaggggtgtcggtctgaaataagagaaatgttaatttgcggagtaacatgtcttctcaaattctttagaaaaaaccctcaagctgaagttgtctccccttctacaatggcatagggaatcgggaagatatggttagctccatcttgtgcggtagctatcaacagtgtgctagtatactttccgtaaagccatgtaccatctacttgtacaatgggtttgcaatatgcaaaaccattaatgcatggaccaaatgaccaaaagacacgtttaaacaatcttttgcccggtactatttctcccccctcaaacaaggattctgtttgagcagcgaccacagtcccgggaacacaagattgcaaagctccgaaaagttttggcaatttggcatatgattctttccagtttccatgaatcatctccaatgctttttgctttgctaaccatgtcttcttgtaggatggggtataattcatgaatgttttgatctctgcaatcaacgtcttgatggagatagttgggtttgttttgacaattggttggatgatctgtgctatgacatgtttgtcgagttggcgatgatcttgtctgagcatcggcacgagacaagtgtgatgacctctgatactcttgataatccatttgttatgcctctttgaattgcatgcgcccaagctccatgtacaaccattttcatgtaacttgcatacgaagtttagccttctttggtcagagtaaattgttttgcaatcaaaatgatttctgatgttgtattctttgattgctcgaatacattgtgctttgtcatcgaaggtcatgccaacctcgaatacaccgactg

SEQ ID NO: 10411 - DNA, 1190 bp, Glycine max
  Gm_smallRNAprecursor_3244
acctctaatcttgaggacttatcaggtgaatacgagacttgttggctcaaaaaccatgatagtgatacgaactcctcttccaggcccgaaggaagtaacttgtttccatcccacgaacctatattcaaacgggattggtaatctacggatcattcatgtctaagttatttcttctttgagattttcatgtaatgtcttatgtctgtcttcagttatcactttacgtattaaaataatttttcctataaatttaaattagcaattttcagtttacccacttttactgcagtagttgacatggtaacataactgtcaaaattcataatactttgtcatttatactacactgtttttaaaaattaaatgtctcatcgacaaaactgacatgaaatggacagctcataatctctttattcactcttaaaataattatggacgtttgctgctttaattacaaggaaaaaatcacaatccaaattgacaatactctgcaatttgcacacgtctctaaaaattaaatgtctcacctgcaaaactgccatgaaatggacagctcatcatctctttattcactctgaaaatcatcatgaacgtttgttgctttaattacatgggaaaaatcacagtccaaattaacaacactctgcattatgagctgtccatttcatgtcagttttacaggtgatacatttaatttttagagacgtgtgcaaaactgacatgagatggacaactcataatctctttgttcactctgaaattataatggacgtctgctacatcacttagtagggaaaaagaaacattggattccaatacacatcaacgtggcagaatactcatacaactataaataacacaacacagacacaatacaaacacacaatctcacacaacataatttcacaaaccaaattcaatcttattactatgtcatttttgggagaaacaagcagtcagaccattactaactccagattagctttcatttttccagatggatcaatcagttacaaccaaactgatgtttattttcaaagtctcattccaacaccaatgcgagttcctaacgactgttcttttgatacactcaagcgtagaatgcacaacacccttcaactaaccaacgatcaattactggatgaaatctactaccgacagtcattcatagatgtaggtcaataatattt

SEQ ID NO: 10412 - DNA, 1046 bp, Glycine max
  Gm_smallRNAprecursor_3245
ttagtttttatggtttctcctaaagcttgtaagtatttgttggtataatttgcctgttccattaggctcttaatgtctttagaggttacttcctcaaaaccccaggttttcataaacaaagaaaccgaagcggcggcagagccgcacaggatcggtgaagggagaagagagaaagatgaaaaatagaaatttattgaatttagaaaggagcgcttacaaaaatcttgtttcagagcacctctcttcagaaacctgaaaaatggctaaatgaaagggtgcctcacaacatgcttgaggactccttatatagccaaaaatctaagaccggtagttgccggtagttttgaccgggactatttgactgtttgttacaagacaagtagttttgaccgggactttaatggctacaggacaggtagtattgtccagcattaattacatattaattacaaacagacggttttgtgaccgaaattaaatttaatataaacagataccaaaacaatcatcttcgttttggtaaaagggatcttcttcttcttcttcagcagaacttgtttcttccttctttgaggatgaagcttcttcttcctgctgtaacatttgtagaacttccttcagatttttagctaagacctcctttgatgttgatcctgctaaaaatactgccagatgagacttttggttcaaaaacacagaagtctctggatcagctgctttgaggaattctggatgggattggaaccaaagttttactttttctggatccgctttggatgagtcaaattgtgtccaccattttacaaatgcgtgtctttgtagtgatggatattggtttgtcttttcagtcttgctgtaacgatattgccatgagaatatccatgacagtgcaaagcttgaaaagtatttaagatctgttggaattcgtgattcctgtgaattgtattgtttcttaaattgggcaaatccttgttggaccgtttctgggaatatctctgggattggtccaaagaagtcccaccattgcaaaaaccaattgggaaaat

SEQ ID NO: 10413 - DNA, 1158 bp, Glycine max
  Gm_smallRNAprecursor_3246
ttggtataatttgcctgttccattaggctcttaatgtctttagaggttacttcctcaaaaccccaggttttcataaacaaagaaaccgaagcggcggcagagccgcacaggatcggtgaagggagaagagagaaagatgaaaaatagaaatttattgaatttagaaaggagcgcttacaaaaatcttgtttcagagcacctctcttcagaaacctgaaaaatggctaaatgaaagggtgcctcacaacatgcttgaggactccttatatagccaaaaatctaagaccggtagttgccggtagttttgaccgggactatttgactgtttgttacaagacaagtagttttgaccgggactttaatggctacaggacaggtagtattgtccagcattaattacatattaattacaaacagacggttttgtgaccgaaattaaatttaatataaacagataccaaaacaatcatcttcgttttggtaaaagggatcttcttcttcttcttcagcagaacttgtttcttccttctttgaggatgaagcttcttcttcctgctgtaacatttgtagaacttccttcagatttttagctaagacctcctttgatgttgatcctgctaaaaatactgccagatgagacttttggttcaaaaacacagaagtctctggatcagctgctttgaggaattctggatgggattggaaccaaagttttactttttctggatccgctttggatgagtcaaattgtgtccaccattttacaaatgcgtgtctttgtagtgatggatattggtttgtcttttcagtcttgctgtaacgatattgccatgagaatatccatgacagtgcaaagcttgaaaagtatttaagatctgttggaattcgtgattcctgtgaattgtattgtttcttaaattgggcaaatccttgttggaccgtttctgggaatatctctgggattggtccaaagaagtcccaccattgcaaaaaccaattgggaaaattgtaaattgtgttggtcttgaaatatatcagccatgaatgcttgaagcgggtattttggtgccaaaataccttagtccaagcatcaacgtaatcccaataggtataacctaccggatcaaatggaactgaaaatctctttcctttgttcaa

SEQ ID NO: 10414 - DNA, 1184 bp, Glycine max
  Gm_smallRNAprecursor_3247
ttgtttcagagcacctctcttcagaaacctgaaaaatggctaaatgaaagggtgcctcacaacatgcttgaggactccttatatagccaaaaatctaagaccggtagttgccggtagttttgaccgggactatttgactgtttgttacaagacaagtagttttgaccgggactttaatggctacaggacaggtagtattgtccagcattaattacatattaattacaaacagacggttttgtgaccgaaattaaatttaatataaacagataccaaaacaatcatcttcgttttggtaaaagggatcttcttcttcttcttcagcagaacttgtttcttccttctttgaggatgaagcttcttcttcctgctgtaacatttgtagaacttccttcagatttttagctaagacctcctttgatgttgatcctgctaaaaatactgccagatgagacttttggttcaaaaacacagaagtctctggatcagctgctttgaggaattctggatgggattggaaccaaagttttactttttctggatccgctttggatgagtcaaattgtgtccaccattttacaaatgcgtgtctttgtagtgatggatattggtttgtcttttcagtcttgctgtaacgatattgccatgagaatatccatgacagtgcaaagcttgaaaagtatttaagatctgttggaattcgtgattcctgtgaattgtattgtttcttaaattgggcaaatccttgttggaccgtttctgggaatatctctgggattggtccaaagaagtcccaccattgcaaaaaccaattgggaaaattgtaaattgtgttggtcttgaaatatatcagccatgaatgcttgaagcgggtattttggtgccaaaataccttagtccaagcatcaacgtaatcccaataggtataacctaccggatcaaatggaactgaaaatctctttcctttgttcaagtccgaaccaaagtgtcttggttgaagaacttttagtatttggatggttgagtgggtgtttaaggtttggtcttttggatctttgaaatgtttgatagatactgagtttgaatctactaaaatcaattcataaaaagttcttgtcttcaggatggtggttggtttgtagtgaaatcctggtgggaaagccttggccgtcgccttgaaggga

SEQ ID NO: 10415 - DNA, 1031 bp, Glycine max
  Gm_smallRNAprecursor_3248
acaagtagttttgaccgggactttaatggctacaggacaggtagtattgtccagcattaattacatattaattacaaacagacggttttgtgaccgaaattaaatttaatataaacagataccaaaacaatcatcttcgttttggtaaaagggatcttcttcttcttcttcagcagaacttgtttcttccttctttgaggatgaagcttcttcttcctgctgtaacatttgtagaacttccttcagatttttagctaagacctcctttgatgttgatcctgctaaaaatactgccagatgagacttttggttcaaaaacacagaagtctctggatcagctgctttgaggaattctggatgggattggaaccaaagttttactttttctggatccgctttggatgagtcaaattgtgtccaccattttacaaatgcgtgtctttgtagtgatggatattggtttgtcttttcagtcttgctgtaacgatattgccatgagaatatccatgacagtgcaaagcttgaaaagtatttaagatctgttggaattcgtgattcctgtgaattgtattgtttcttaaattgggcaaatccttgttggaccgtttctgggaatatctctgggattggtccaaagaagtcccaccattgcaaaaaccaattgggaaaattgtaaattgtgttggtcttgaaatatatcagccatgaatgcttgaagcgggtattttggtgccaaaataccttagtccaagcatcaacgtaatcccaataggtataacctaccggatcaaatggaactgaaaatctctttcctttgttcaagtccgaaccaaagtgtcttggttgaagaacttttagtatttggatggttgagtgggtgtttaaggtttggtcttttggatctttgaaatgtttgatagatactgagtttgaatctactaaaatcaattcataaaaagttcttgtcttcaggatggtggttggtttgtagtgaaatcctggtgggaaagccttggccgtcgccttgaagg

SEQ ID NO: 10416 - DNA, 1114 bp, Glycine max
  Gm_smallRNAprecursor_3249
ggactttaatggctacaggacaggtagtattgtccagcattaattacatattaattacaaacagacggttttgtgaccgaaattaaatttaatataaacagataccaaaacaatcatcttcgttttggtaaaagggatcttcttcttcttcttcagcagaacttgtttcttccttctttgaggatgaagcttcttcttcctgctgtaacatttgtagaacttccttcagatttttagctaagacctcctttgatgttgatcctgctaaaaatactgccagatgagacttttggttcaaaaacacagaagtctctggatcagctgctttgaggaattctggatgggattggaaccaaagttttactttttctggatccgctttggatgagtcaaattgtgtccaccattttacaaatgcgtgtctttgtagtgatggatattggtttgtcttttcagtcttgctgtaacgatattgccatgagaatatccatgacagtgcaaagcttgaaaagtatttaagatctgttggaattcgtgattcctgtgaattgtattgtttcttaaattgggcaaatccttgttggaccgtttctgggaatatctctgggattggtccaaagaagtcccaccattgcaaaaaccaattgggaaaattgtaaattgtgttggtcttgaaatatatcagccatgaatgcttgaagcgggtattttggtgccaaaataccttagtccaagcatcaacgtaatcccaataggtataacctaccggatcaaatggaactgaaaatctctttcctttgttcaagtccgaaccaaagtgtcttggttgaagaacttttagtatttggatggttgagtgggtgtttaaggtttggtcttttggatctttgaaatgtttgatagatactgagtttgaatctactaaaatcaattcataaaaagttcttgtcttcaggatggtggttggtttgtagtgaaatcctggtgggaaagccttggccgtcgccttgaagggatttttgtcccaaaattcaggttccatctgcaaaacagttaacaatttatttttataaatataattgttagtttgtttggtaggtggtgtttgagcttt

SEQ ID NO: 10417 - DNA, 1101 bp, Glycine max
  Gm_smallRNAprecursor_3250
tacaggacaggtagtattgtccagcattaattacatattaattacaaacagacggttttgtgaccgaaattaaatttaatataaacagataccaaaacaatcatcttcgttttggtaaaagggatcttcttcttcttcttcagcagaacttgtttcttccttctttgaggatgaagcttcttcttcctgctgtaacatttgtagaacttccttcagatttttagctaagacctcctttgatgttgatcctgctaaaaatactgccagatgagacttttggttcaaaaacacagaagtctctggatcagctgctttgaggaattctggatgggattggaaccaaagttttactttttctggatccgctttggatgagtcaaattgtgtccaccattttacaaatgcgtgtctttgtagtgatggatattggtttgtcttttcagtcttgctgtaacgatattgccatgagaatatccatgacagtgcaaagcttgaaaagtatttaagatctgttggaattcgtgattcctgtgaattgtattgtttcttaaattgggcaaatccttgttggaccgtttctgggaatatctctgggattggtccaaagaagtcccaccattgcaaaaaccaattgggaaaattgtaaattgtgttggtcttgaaatatatcagccatgaatgcttgaagcgggtattttggtgccaaaataccttagtccaagcatcaacgtaatcccaataggtataacctaccggatcaaatggaactgaaaatctctttcctttgttcaagtccgaaccaaagtgtcttggttgaagaacttttagtatttggatggttgagtgggtgtttaaggtttggtcttttggatctttgaaatgtttgatagatactgagtttgaatctactaaaatcaattcataaaaagttcttgtcttcaggatggtggttggtttgtagtgaaatcctggtgggaaagccttggccgtcgccttgaagggatttttgtcccaaaattcaggttccatctgcaaaacagttaacaatttatttttataaatataattgttagtttgtttggtaggtggtgtttgagcttt

SEQ ID NO: 10418 - DNA, 1247 bp, Glycine max
  Gm_smallRNAprecursor_3251
tacaggacaggtagtattgtccagcattaattacatattaattacaaacagacggttttgtgaccgaaattaaatttaatataaacagataccaaaacaatcatcttcgttttggtaaaagggatcttcttcttcttcttcagcagaacttgtttcttccttctttgaggatgaagcttcttcttcctgctgtaacatttgtagaacttccttcagatttttagctaagacctcctttgatgttgatcctgctaaaaatactgccagatgagacttttggttcaaaaacacagaagtctctggatcagctgctttgaggaattctggatgggattggaaccaaagttttactttttctggatccgctttggatgagtcaaattgtgtccaccattttacaaatgcgtgtctttgtagtgatggatattggtttgtcttttcagtcttgctgtaacgatattgccatgagaatatccatgacagtgcaaagcttgaaaagtatttaagatctgttggaattcgtgattcctgtgaattgtattgtttcttaaattgggcaaatccttgttggaccgtttctgggaatatctctgggattggtccaaagaagtcccaccattgcaaaaaccaattgggaaaattgtaaattgtgttggtcttgaaatatatcagccatgaatgcttgaagcgggtattttggtgccaaaataccttagtccaagcatcaacgtaatcccaataggtataacctaccggatcaaatggaactgaaaatctctttcctttgttcaagtccgaaccaaagtgtcttggttgaagaacttttagtatttggatggttgagtgggtgtttaaggtttggtcttttggatctttgaaatgtttgatagatactgagtttgaatctactaaaatcaattcataaaaagttcttgtcttcaggatggtggttggtttgtagtgaaatcctggtgggaaagccttggccgtcgccttgaagggatttttgtcccaaaattcaggttccatctgcaaaacagttaacaatttatttttataaatataattgttagtttgtttggtaggtggtgtttgagctttggctaaaggtagttttcctttagtattggtggctgttttggtcattgacgcatttttgatcattgtttataaatttgattcagattcatcatcagattctgaggcaatgtctgcccaagattttttgattatttttggaaatttgg

SEQ ID NO: 10419 - DNA, 1072 bp, Glycine max
  Gm_smallRNAprecursor_3252
gcttcttcttcctgctgtaacatttgtagaacttccttcagatttttagctaagacctcctttgatgttgatcctgctaaaaatactgccagatgagacttttggttcaaaaacacagaagtctctggatcagctgctttgaggaattctggatgggattggaaccaaagttttactttttctggatccgctttggatgagtcaaattgtgtccaccattttacaaatgcgtgtctttgtagtgatggatattggtttgtcttttcagtcttgctgtaacgatattgccatgagaatatccatgacagtgcaaagcttgaaaagtatttaagatctgttggaattcgtgattcctgtgaattgtattgtttcttaaattgggcaaatccttgttggaccgtttctgggaatatctctgggattggtccaaagaagtcccaccattgcaaaaaccaattgggaaaattgtaaattgtgttggtcttgaaatatatcagccatgaatgcttgaagcgggtattttggtgccaaaataccttagtccaagcatcaacgtaatcccaataggtataacctaccggatcaaatggaactgaaaatctctttcctttgttcaagtccgaaccaaagtgtcttggttgaagaacttttagtatttggatggttgagtgggtgtttaaggtttggtcttttggatctttgaaatgtttgatagatactgagtttgaatctactaaaatcaattcataaaaagttcttgtcttcaggatggtggttggtttgtagtgaaatcctggtgggaaagccttggccgtcgccttgaagggatttttgtcccaaaattcaggttccatctgcaaaacagttaacaatttatttttataaatataattgttagtttgtttggtaggtggtgtttgagctttggctaaaggtagttttcctttagtattggtggctgttttggtcattgacgcatttttgatcattgtttataaatttgattcagattcatcatcagattctgaggcaatgtctgcccaagattttttgattatttttggaaatttgg

SEQ ID NO: 10420 - DNA, 1124 bp, Glycine max
  Gm_smallRNAprecursor_3253
ccttcagatttttagctaagacctcctttgatgttgatcctgctaaaaatactgccagatgagacttttggttcaaaaacacagaagtctctggatcagctgctttgaggaattctggatgggattggaaccaaagttttactttttctggatccgctttggatgagtcaaattgtgtccaccattttacaaatgcgtgtctttgtagtgatggatattggtttgtcttttcagtcttgctgtaacgatattgccatgagaatatccatgacagtgcaaagcttgaaaagtatttaagatctgttggaattcgtgattcctgtgaattgtattgtttcttaaattgggcaaatccttgttggaccgtttctgggaatatctctgggattggtccaaagaagtcccaccattgcaaaaaccaattgggaaaattgtaaattgtgttggtcttgaaatatatcagccatgaatgcttgaagcgggtattttggtgccaaaataccttagtccaagcatcaacgtaatcccaataggtataacctaccggatcaaatggaactgaaaatctctttcctttgttcaagtccgaaccaaagtgtcttggttgaagaacttttagtatttggatggttgagtgggtgtttaaggtttggtcttttggatctttgaaatgtttgatagatactgagtttgaatctactaaaatcaattcataaaaagttcttgtcttcaggatggtggttggtttgtagtgaaatcctggtgggaaagccttggccgtcgccttgaagggatttttgtcccaaaattcaggttccatctgcaaaacagttaacaatttatttttataaatataattgttagtttgtttggtaggtggtgtttgagctttggctaaaggtagttttcctttagtattggtggctgttttggtcattgacgcatttttgatcattgtttataaatttgattcagattcatcatcagattctgaggcaatgtctgcccaagattttttgattatttttggaaatttggtcagacccatgtcttgaagggcctgaagggtttcaattggccatgcatagtcggccaatgtttgtttggcggttgccgatttggga

SEQ ID NO: 10421 - DNA, 1130 bp, Glycine max
  Gm_smallRNAprecursor_3254
ccttcagatttttagctaagacctcctttgatgttgatcctgctaaaaatactgccagatgagacttttggttcaaaaacacagaagtctctggatcagctgctttgaggaattctggatgggattggaaccaaagttttactttttctggatccgctttggatgagtcaaattgtgtccaccattttacaaatgcgtgtctttgtagtgatggatattggtttgtcttttcagtcttgctgtaacgatattgccatgagaatatccatgacagtgcaaagcttgaaaagtatttaagatctgttggaattcgtgattcctgtgaattgtattgtttcttaaattgggcaaatccttgttggaccgtttctgggaatatctctgggattggtccaaagaagtcccaccattgcaaaaaccaattgggaaaattgtaaattgtgttggtcttgaaatatatcagccatgaatgcttgaagcgggtattttggtgccaaaataccttagtccaagcatcaacgtaatcccaataggtataacctaccggatcaaatggaactgaaaatctctttcctttgttcaagtccgaaccaaagtgtcttggttgaagaacttttagtatttggatggttgagtgggtgtttaaggtttggtcttttggatctttgaaatgtttgatagatactgagtttgaatctactaaaatcaattcataaaaagttcttgtcttcaggatggtggttggtttgtagtgaaatcctggtgggaaagccttggccgtcgccttgaagggatttttgtcccaaaattcaggttccatctgcaaaacagttaacaatttatttttataaatataattgttagtttgtttggtaggtggtgtttgagctttggctaaaggtagttttcctttagtattggtggctgttttggtcattgacgcatttttgatcattgtttataaatttgattcagattcatcatcagattctgaggcaatgtctgcccaagattttttgattatttttggaaatttggtcagacccatgtcttgaagggcctgaagggtttcaattggccatgcatagtcggccaatgtttgtttggcggttgccgatttgggagattcc

SEQ ID NO: 10422 - DNA, 1087 bp, Glycine max
  Gm_smallRNAprecursor_3255
tcctgctaaaaatactgccagatgagacttttggttcaaaaacacagaagtctctggatcagctgctttgaggaattctggatgggattggaaccaaagttttactttttctggatccgctttggatgagtcaaattgtgtccaccattttacaaatgcgtgtctttgtagtgatggatattggtttgtcttttcagtcttgctgtaacgatattgccatgagaatatccatgacagtgcaaagcttgaaaagtatttaagatctgttggaattcgtgattcctgtgaattgtattgtttcttaaattgggcaaatccttgttggaccgtttctgggaatatctctgggattggtccaaagaagtcccaccattgcaaaaaccaattgggaaaattgtaaattgtgttggtcttgaaatatatcagccatgaatgcttgaagcgggtattttggtgccaaaataccttagtccaagcatcaacgtaatcccaataggtataacctaccggatcaaatggaactgaaaatctctttcctttgttcaagtccgaaccaaagtgtcttggttgaagaacttttagtatttggatggttgagtgggtgtttaaggtttggtcttttggatctttgaaatgtttgatagatactgagtttgaatctactaaaatcaattcataaaaagttcttgtcttcaggatggtggttggtttgtagtgaaatcctggtgggaaagccttggccgtcgccttgaagggatttttgtcccaaaattcaggttccatctgcaaaacagttaacaatttatttttataaatataattgttagtttgtttggtaggtggtgtttgagctttggctaaaggtagttttcctttagtattggtggctgttttggtcattgacgcatttttgatcattgtttataaatttgattcagattcatcatcagattctgaggcaatgtctgcccaagattttttgattatttttggaaatttggtcagacccatgtcttgaagggcctgaagggtttcaattggccatgcatagtcggccaatgtttgtttggcggttgccgatttggga

SEQ ID NO: 10423 - DNA, 1129 bp, Glycine max
  Gm_smallRNAprecursor_3256
ctgcaaaacagttaacaatttatttttataaatataattgttagtttgtttggtaggtggtgtttgagctttggctaaaggtagttttcctttagtattggtggctgttttggtcattgacgcatttttgatcattgtttataaatttgattcagattcatcatcagattctgaggcaatgtctgcccaagattttttgattatttttggaaatttggtcagacccatgtcttgaagggcctgaagggtttcaattggccatgcatagtcggccaatgtttgtttggcggttgccgatttgggagattcctgagtggatggctcaggtttgattgagacaatctgggttgatgacccttctaaattggttttctgggtagatgacccagcctgggttggtgacccagaagaggttgatgatttcttgatggttggctctggaagagccagtctggctcctttgcctatactccttcctccccgtagggagattcccgatgccttaggaggcattaccacttttctgtaagaattcacgggtaaggtagtcaggtagtgaatttgaggtgcccttgatgtattctatgtcaaaatcaaagacacttaaaattgcttgccatcgtgcaaaaatttgttttgaggcaaggtttttaacatctttttgtaaaatatctttggctgatttacaatcaaccctgattaaaaatttttggtttaataaatccgattgaaatttggaaatgcacaaaacaattgctaaaacttcttttttaacagttgaatattttaattgtgcaggattccaatgttttgatgtatatgcaatgacatgatcttggccatggactctttgtttgaggatgccaccataacctatgtctgaagcatcagtttcgacaattttgaatgcctgtggaataggaagatacagacattttatggattggactttgactttgatttctttaactgtttgtgtatggaggtcagaccaaggaggcggatttttcttcagcctatcatgcaatggcttgacaatattgtttaaataggggacaaattctcctacgtaatttagacaacctagaaatctttgtaactgggttttgtctaagatttggttggggaa

SEQ ID NO: 10424 - DNA, 1115 bp, Glycine max
  Gm_smallRNAprecursor_3257
acaatttatttttataaatataattgttagtttgtttggtaggtggtgtttgagctttggctaaaggtagttttcctttagtattggtggctgttttggtcattgacgcatttttgatcattgtttataaatttgattcagattcatcatcagattctgaggcaatgtctgcccaagattttttgattatttttggaaatttggtcagacccatgtcttgaagggcctgaagggtttcaattggccatgcatagtcggccaatgtttgtttggcggttgccgatttgggagattcctgagtggatggctcaggtttgattgagacaatctgggttgatgacccttctaaattggttttctgggtagatgacccagcctgggttggtgacccagaagaggttgatgatttcttgatggttggctctggaagagccagtctggctcctttgcctatactccttcctccccgtagggagattcccgatgccttaggaggcattaccacttttctgtaagaattcacgggtaaggtagtcaggtagtgaatttgaggtgcccttgatgtattctatgtcaaaatcaaagacacttaaaattgcttgccatcgtgcaaaaatttgttttgaggcaaggtttttaacatctttttgtaaaatatctttggctgatttacaatcaaccctgattaaaaatttttggtttaataaatccgattgaaatttggaaatgcacaaaacaattgctaaaacttcttttttaacagttgaatattttaattgtgcaggattccaatgttttgatgtatatgcaatgacatgatcttggccatggactctttgtttgaggatgccaccataacctatgtctgaagcatcagtttcgacaattttgaatgcctgtggaataggaagatacagacattttatggattggactttgactttgatttctttaactgtttgtgtatggaggtcagaccaaggaggcggatttttcttcagcctatcatgcaatggcttgacaatattgtttaaataggggacaaattctcctacgtaatttagacaacctagaaatctttgtaactgggttttgtctaagatttggttggggaa

SEQ ID NO: 10425 - DNA, 1121 bp, Glycine max
  Gm_smallRNAprecursor_3258
tggcggttgccgatttgggagattcctgagtggatggctcaggtttgattgagacaatctgggttgatgacccttctaaattggttttctgggtagatgacccagcctgggttggtgacccagaagaggttgatgatttcttgatggttggctctggaagagccagtctggctcctttgcctatactccttcctccccgtagggagattcccgatgccttaggaggcattaccacttttctgtaagaattcacgggtaaggtagtcaggtagtgaatttgaggtgcccttgatgtattctatgtcaaaatcaaagacacttaaaattgcttgccatcgtgcaaaaatttgttttgaggcaaggtttttaacatctttttgtaaaatatctttggctgatttacaatcaaccctgattaaaaatttttggtttaataaatccgattgaaatttggaaatgcacaaaacaattgctaaaacttcttttttaacagttgaatattttaattgtgcaggattccaatgttttgatgtatatgcaatgacatgatcttggccatggactctttgtttgaggatgccaccataacctatgtctgaagcatcagtttcgacaattttgaatgcctgtggaataggaagatacagacattttatggattggactttgactttgatttctttaactgtttgtgtatggaggtcagaccaaggaggcggatttttcttcagcctatcatgcaatggcttgacaatattgtttaaataggggacaaattctcctacgtaatttagacaacctagaaatctttgtaactgggttttgtctaagatttggttggggaatttgctagcaaactctattgacctttcgattggaatgattgtaccttgatatatattgtgaccaaggaatcgaattcgagtttggaaaagattgatttttgatttggagactgccaaaccattttgtttgatgatatgtatgaaggtttggagatgtttgaaatgttggtcaatgttttgggaaaagattaaaacatcatctatgtagacaatgacaaattttgaatagggattaaaaatatcgttcataattttttgaaattctgaaggggtatt

SEQ ID NO: 10426 - DNA, 1121 bp, Glycine max; identical to SEQ ID NO: 10425
  Gm_smallRNAprecursor_3259

SEQ ID NO: 10427 - DNA, 1218 bp, Glycine max
  Gm_smallRNAprecursor_3260
tggctcaggtttgattgagacaatctgggttgatgacccttctaaattggttttctgggtagatgacccagcctgggttggtgacccagaagaggttgatgatttcttgatggttggctctggaagagccagtctggctcctttgcctatactccttcctccccgtagggagattcccgatgccttaggaggcattaccacttttctgtaagaattcacgggtaaggtagtcaggtagtgaatttgaggtgcccttgatgtattctatgtcaaaatcaaagacacttaaaattgcttgccatcgtgcaaaaatttgttttgaggcaaggtttttaacatctttttgtaaaatatctttggctgatttacaatcaaccctgattaaaaatttttggtttaataaatccgattgaaatttggaaatgcacaaaacaattgctaaaacttcttttttaacagttgaatattttaattgtgcaggattccaatgttttgatgtatatgcaatgacatgatcttggccatggactctttgtttgaggatgccaccataacctatgtctgaagcatcagtttcgacaattttgaatgcctgtggaataggaagatacagacattttatggattggactttgactttgatttctttaactgtttgtgtatggaggtcagaccaaggaggcggatttttcttcagcctatcatgcaatggcttgacaatattgtttaaataggggacaaattctcctacgtaatttagacaacctagaaatctttgtaactgggttttgtctaagatttggttggggaatttgctagcaaactctattgacctttcgattggaatgattgtaccttgatatatattgtgaccaaggaatcgaattcgagtttggaaaagattgatttttgatttggagactgccaaaccattttgtttgatgatatgtatgaaggtttggagatgtttgaaatgttggtcaatgttttgggaaaagattaaaacatcatctatgtagacaatgacaaattttgaatagggattaaaaatatcgttcataattttttgaaattctgaaggggtattcttcagtccgaatggtatcacgttccattcatattgcccgaaaggtacaataaacgctgttttgtacctatctgattcttggatttggatttgccaaaatccagatttcatatcaaattttgaaaatatct

SEQ ID NO: 10428 - DNA, 1071 bp, Glycine max
  Gm_smallRNAprecursor_3261
taaattggttttctgggtagatgacccagcctgggttggtgacccagaagaggttgatgatttcttgatggttggctctggaagagccagtctggctcctttgcctatactccttcctccccgtagggagattcccgatgccttaggaggcattaccacttttctgtaagaattcacgggtaaggtagtcaggtagtgaatttgaggtgcccttgatgtattctatgtcaaaatcaaagacacttaaaattgcttgccatcgtgcaaaaatttgttttgaggcaaggtttttaacatctttttgtaaaatatctttggctgatttacaatcaaccctgattaaaaatttttggtttaataaatccgattgaaatttggaaatgcacaaaacaattgctaaaacttcttttttaacagttgaatattttaattgtgcaggattccaatgttttgatgtatatgcaatgacatgatcttggccatggactctttgtttgaggatgccaccataacctatgtctgaagcatcagtttcgacaattttgaatgcctgtggaataggaagatacagacattttatggattggactttgactttgatttctttaactgtttgtgtatggaggtcagaccaaggaggcggatttttcttcagcctatcatgcaatggcttgacaatattgtttaaataggggacaaattctcctacgtaatttagacaacctagaaatctttgtaactgggttttgtctaagatttggttggggaatttgctagcaaactctattgacctttcgattggaatgattgtaccttgatatatattgtgaccaaggaatcgaattcgagtttggaaaagattgatttttgatttggagactgccaaaccattttgtttgatgatatgtatgaaggtttggagatgtttgaaatgttggtcaatgttttgggaaaagattaaaacatcatctatgtagacaatgacaaattttgaatagggattaaaaatatcgttcataattttttgaaattctgaaggggtattcttcagtccgaatggtatcacgttcc

SEQ ID NO: 10429 - DNA, 1151 bp, Glycine max
  Gm_smallRNAprecursor_3262
ccagcctgggttggtgacccagaagaggttgatgatttcttgatggttggctctggaagagccagtctggctcctttgcctatactccttcctccccgtagggagattcccgatgccttaggaggcattaccacttttctgtaagaattcacgggtaaggtagtcaggtagtgaatttgaggtgcccttgatgtattctatgtcaaaatcaaagacacttaaaattgcttgccatcgtgcaaaaatttgttttgaggcaaggtttttaacatctttttgtaaaatatctttggctgatttacaatcaaccctgattaaaaatttttggtttaataaatccgattgaaatttggaaatgcacaaaacaattgctaaaacttcttttttaacagttgaatattttaattgtgcaggattccaatgttttgatgtatatgcaatgacatgatcttggccatggactctttgtttgaggatgccaccataacctatgtctgaagcatcagtttcgacaattttgaatgcctgtggaataggaagatacagacattttatggattggactttgactttgatttctttaactgtttgtgtatggaggtcagaccaaggaggcggatttttcttcagcctatcatgcaatggcttgacaatattgtttaaataggggacaaattctcctacgtaatttagacaacctagaaatctttgtaactgggttttgtctaagatttggttggggaatttgctagcaaactctattgacctttcgattggaatgattgtaccttgatatatattgtgaccaaggaatcgaattcgagtttggaaaagattgatttttgatttggagactgccaaaccattttgtttgatgatatgtatgaaggtttggagatgtttgaaatgttggtcaatgttttgggaaaagattaaaacatcatctatgtagacaatgacaaattttgaatagggattaaaaatatcgttcataattttttgaaattctgaaggggtattcttcagtccgaatggtatcacgttccattcatattgcccgaaaggtacaataaacgctgttttgtacctatctgattcttggatttggatttgccaaaatccagatttcatatcaaattttgaaaatatct

SEQ ID NO: 10430 - DNA, 1038 bp, Glycine max
  Gm_smallRNAprecursor_3263
ggttggtgacccagaagaggttgatgatttcttgatggttggctctggaagagccagtctggctcctttgcctatactccttcctccccgtagggagattcccgatgccttaggaggcattaccacttttctgtaagaattcacgggtaaggtagtcaggtagtgaatttgaggtgcccttgatgtattctatgtcaaaatcaaagacacttaaaattgcttgccatcgtgcaaaaatttgttttgaggcaaggtttttaacatctttttgtaaaatatctttggctgatttacaatcaaccctgattaaaaatttttggtttaataaatccgattgaaatttggaaatgcacaaaacaattgctaaaacttcttttttaacagttgaatattttaattgtgcaggattccaatgttttgatgtatatgcaatgacatgatcttggccatggactctttgtttgaggatgccaccataacctatgtctgaagcatcagtttcgacaattttgaatgcctgtggaataggaagatacagacattttatggattggactttgactttgatttctttaactgtttgtgtatggaggtcagaccaaggaggcggatttttcttcagcctatcatgcaatggcttgacaatattgtttaaataggggacaaattctcctacgtaatttagacaacctagaaatctttgtaactgggttttgtctaagatttggttggggaatttgctagcaaactctattgacctttcgattggaatgattgtaccttgatatatattgtgaccaaggaatcgaattcgagtttggaaaagattgatttttgatttggagactgccaaaccattttgtttgatgatatgtatgaaggtttggagatgtttgaaatgttggtcaatgttttgggaaaagattaaaacatcatctatgtagacaatgacaaattttgaatagggattaaaaatatcgttcataattttttgaaattctgaaggggtattcttcagtccgaatggtatcacgttcc

SEQ ID NO: 10431 - DNA, 1228 bp, Glycine max
  Gm_smallRNAprecursor_3264
atgatttcttgatggttggctctggaagagccagtctggctcctttgcctatactccttcctccccgtagggagattcccgatgccttaggaggcattaccacttttctgtaagaattcacgggtaaggtagtcaggtagtgaatttgaggtgcccttgatgtattctatgtcaaaatcaaagacacttaaaattgcttgccatcgtgcaaaaatttgttttgaggcaaggtttttaacatctttttgtaaaatatctttggctgatttacaatcaaccctgattaaaaatttttggtttaataaatccgattgaaatttggaaatgcacaaaacaattgctaaaacttcttttttaacagttgaatattttaattgtgcaggattccaatgttttgatgtatatgcaatgacatgatcttggccatggactctttgtttgaggatgccaccataacctatgtctgaagcatcagtttcgacaattttgaatgcctgtggaataggaagatacagacattttatggattggactttgactttgatttctttaactgtttgtgtatggaggtcagaccaaggaggcggatttttcttcagcctatcatgcaatggcttgacaatattgtttaaataggggacaaattctcctacgtaatttagacaacctagaaatctttgtaactgggttttgtctaagatttggttggggaatttgctagcaaactctattgacctttcgattggaatgattgtaccttgatatatattgtgaccaaggaatcgaattcgagtttggaaaagattgatttttgatttggagactgccaaaccattttgtttgatgatatgtatgaaggtttggagatgtttgaaatgttggtcaatgttttgggaaaagattaaaacatcatctatgtagacaatgacaaattttgaatagggattaaaaatatcgttcataattttttgaaattctgaaggggtattcttcagtccgaatggtatcacgttccattcatattgcccgaaaggtacaataaacgctgttttgtacctatctgattcttggatttggatttgccaaaatccagatttcatatcaaattttgaaaatatctttgcagaatttaatctgttaagcaaatcttttttgtttggaataggatatctaatccattgtaatgcttgatttaatggtttgtaatttatgactaagcggggtgttc

SEQ ID NO: 10432 - DNA, 1109 bp, Glycine max
  Gm_smallRNAprecursor_3265
acgggtaaggtagtcaggtagtgaatttgaggtgcccttgatgtattctatgtcaaaatcaaagacacttaaaattgcttgccatcgtgcaaaaatttgttttgaggcaaggtttttaacatctttttgtaaaatatctttggctgatttacaatcaaccctgattaaaaatttttggtttaataaatccgattgaaatttggaaatgcacaaaacaattgctaaaacttcttttttaacagttgaatattttaattgtgcaggattccaatgttttgatgtatatgcaatgacatgatcttggccatggactctttgtttgaggatgccaccataacctatgtctgaagcatcagtttcgacaattttgaatgcctgtggaataggaagatacagacattttatggattggactttgactttgatttctttaactgtttgtgtatggaggtcagaccaaggaggcggatttttcttcagcctatcatgcaatggcttgacaatattgtttaaataggggacaaattctcctacgtaatttagacaacctagaaatctttgtaactgggttttgtctaagatttggttggggaatttgctagcaaactctattgacctttcgattggaatgattgtaccttgatatatattgtgaccaaggaatcgaattcgagtttggaaaagattgatttttgatttggagactgccaaaccattttgtttgatgatatgtatgaaggtttggagatgtttgaaatgttggtcaatgttttgggaaaagattaaaacatcatctatgtagacaatgacaaattttgaatagggattaaaaatatcgttcataattttttgaaattctgaaggggtattcttcagtccgaatggtatcacgttccattcatattgcccgaaaggtacaataaacgctgttttgtacctatctgattcttggatttggatttgccaaaatccagatttcatatcaaattttgaaaatatctttgcagaatttaatctgttaagcaaatcttttttgtttggaataggatatctaatccattgtaatgcttgatttaatggtttgtaatttatgactaagcggggtgttc

SEQ ID NO: 10433 - DNA, 1196 bp, Glycine max
  Gm_smallRNAprecursor_3266
aaggtttttaacatctttttgtaaaatatctttggctgatttacaatcaaccctgattaaaaatttttggtttaataaatccgattgaaatttggaaatgcacaaaacaattgctaaaacttcttttttaacagttgaatattttaattgtgcaggattccaatgttttgatgtatatgcaatgacatgatcttggccatggactctttgtttgaggatgccaccataacctatgtctgaagcatcagtttcgacaattttgaatgcctgtggaataggaagatacagacattttatggattggactttgactttgatttctttaactgtttgtgtatggaggtcagaccaaggaggcggatttttcttcagcctatcatgcaatggcttgacaatattgtttaaataggggacaaattctcctacgtaatttagacaacctagaaatctttgtaactgggttttgtctaagatttggttggggaatttgctagcaaactctattgacctttcgattggaatgattgtaccttgatatatattgtgaccaaggaatcgaattcgagtttggaaaagattgatttttgatttggagactgccaaaccattttgtttgatgatatgtatgaaggtttggagatgtttgaaatgttggtcaatgttttgggaaaagattaaaacatcatctatgtagacaatgacaaattttgaatagggattaaaaatatcgttcataattttttgaaattctgaaggggtattcttcagtccgaatggtatcacgttccattcatattgcccgaaaggtacaataaacgctgttttgtacctatctgattcttggatttggatttgccaaaatccagatttcatatcaaattttgaaaatatctttgcagaatttaatctgttaagcaaatcttttttgtttggaataggatatctaatccattgtaatgcttgatttaatggtttgtaatttatgactaagcggggtgttccacgctcaatctcagattgtttgttgacataaaaagccgcacaagaccatgggcttttgcatttttggattaggcctttatcaagcaaatccttgatttccttttgacagtattgaagaagttcttcattcatttggattggtctggcttttgtgggaatttgtttttccctaaagtctttctcataagggagat

SEQ ID NO: 10434 - DNA, 1080 bp, Glycine max
  Gm_smallRNAprecursor_3267
gatgtttgaaatgttggtcaatgttttgggaaaagattaaaacatcatctatgtagacaatgacaaattttgaatagggattaaaaatatcgttcataattttttgaaattctgaaggggtattcttcagtccgaatggtatcacgttccattcatattgcccgaaaggtacaataaacgctgttttgtacctatctgattcttggatttggatttgccaaaatccagatttcatatcaaattttgaaaatatctttgcagaatttaatctgttaagcaaatcttttttgtttggaataggatatctaatccattgtaatgcttgatttaatggtttgtaatttatgactaagcggggtgttccacgctcaatctcagattgtttgttgacataaaaagccgcacaagaccatgggcttttgcatttttggattaggcctttatcaagcaaatccttgatttccttttgacagtattgaagaagttcttcattcatttggattggtctggcttttgtgggaatttgtttttccctaaagtctttctcataagggagatcgacaatatgtttctttctgtcccaaaatgcatgtggcaattcagaacaaacggtcgattcaatatgatttaataaggattgaattttttcttttacttggggttttcccagttgtatctgaatattattaaaagatacttcttcttttaagaagttaatttgattaatcttattttctataagatttatgtttctggaaattggtttagtagaaaaattaaatataatttttcttcctaaataatttgtggttattccttcattagatatttggatgggaaacagggctttaatgaagggcgttcctaagattacttcattcttaaggttttttaccagaagaaagtttgtgttaatcttaagaccttggttttcaatgattgcatttgatagcttaaaattaatttttaattttgagccgtttgccgtacttaatttttctgaggttttctcaaagaattttgtaggaattaatccttctaaaatgcagtttgaatcagcccctgtgtcaaatagggcca

SEQ ID NO: 10435 - DNA, 1126 bp, Glycine max
  Gm_smallRNAprecursor_3268
aaggtcttaagattaacacaaactttcttctggtaaaaaaccttaagaatgaagtaatcttaggaacgcccttcattaaagccctgtttcccatccaaatatctaatgaaggaataaccacaaattatttaggaagaaaaattatatttaatttttctactaaaccaatttccagaaacataaatcttatagaaaataagattaatcaaattaacttcttaaaagatcttttaataatatacagatacaactgggaaaaccccaagtaaaagaaaaaatcaatccttattaaatcatattgaatcgaccgtttgttctgaattgccacatgcattttgggacagaaagaaacatattgtcgatctcccttatgagaaagactttagggaaaaacaaattcccacaaaagccagaccaatccaaatgaatgaagaacttcttcaatactgtcaaaaggaaatcaaggatttgcttgataaaggcctaatccaaaaatgcaaaagcccatggtcttgtgcggctttttatgtcaacaaacaatctgagattgagcgtggaacaccccgcttagtcataaattacaaaccattaaatcaagcattacaatggattagatatcctattccaaacaaaaaagatttgcttaacagattaaattctgcaaagatattttcaaaatttgatatgaaatctggattttggcaaatccaaatccaagaatcagataggtacaaaacagcgtttattgtacctttcgggcaatatgaatggaacgtgataccattcggactgaagaataccccttcagaatttcaaaaaattatgaacgatatttttaatccctattcaaaatttgtcattgtctacatagatgatgttttaatcttttcccaaaacattgaccaacatttcaaacatctccaaaccttcatacatatcatcaaacaaaatggtttggcagtctccaaatcaaaaatcaatcttttccaaactcgaattcgattccttggtcacaatatatatcaaggtacaatcattccaatcgaaaggtcaatagagtttgctagcaaattccccaaccaaatcttagacaaaacccagttacaaagatttctaggttgtctaa

SEQ ID NO: 10436 - DNA, 1063 bp, Glycine max
  Gm_smallRNAprecursor_3269
aaagccctgtttcccatccaaatatctaatgaaggaataaccacaaattatttaggaagaaaaattatatttaatttttctactaaaccaatttccagaaacataaatcttatagaaaataagattaatcaaattaacttcttaaaagatcttttaataatatacagatacaactgggaaaaccccaagtaaaagaaaaaatcaatccttattaaatcatattgaatcgaccgtttgttctgaattgccacatgcattttgggacagaaagaaacatattgtcgatctcccttatgagaaagactttagggaaaaacaaattcccacaaaagccagaccaatccaaatgaatgaagaacttcttcaatactgtcaaaaggaaatcaaggatttgcttgataaaggcctaatccaaaaatgcaaaagcccatggtcttgtgcggctttttatgtcaacaaacaatctgagattgagcgtggaacaccccgcttagtcataaattacaaaccattaaatcaagcattacaatggattagatatcctattccaaacaaaaaagatttgcttaacagattaaattctgcaaagatattttcaaaatttgatatgaaatctggattttggcaaatccaaatccaagaatcagataggtacaaaacagcgtttattgtacctttcgggcaatatgaatggaacgtgataccattcggactgaagaataccccttcagaatttcaaaaaattatgaacgatatttttaatccctattcaaaatttgtcattgtctacatagatgatgttttaatcttttcccaaaacattgaccaacatttcaaacatctccaaaccttcatacatatcatcaaacaaaatggtttggcagtctccaaatcaaaaatcaatcttttccaaactcgaattcgattccttggtcacaatatatatcaaggtacaatcattccaatcgaaaggtcaatagagtttgctagcaaattccccaaccaaatcttagacaaaacccagttacaaagatttctaggttgtctaaattacgtaggagaa

SEQ ID NO: 10437 - DNA, 1080 bp, Glycine max
  Gm_smallRNAprecursor_3270
aaatgcaaaagcccatggtcttgtgcggctttttatgtcaacaaacaatctgagattgagcgtggaacaccccgcttagtcataaattacaaaccattaaatcaagcattacaatggattagatatcctattccaaacaaaaaagatttgcttaacagattaaattctgcaaagatattttcaaaatttgatatgaaatctggattttggcaaatccaaatccaagaatcagataggtacaaaacagcgtttattgtacctttcgggcaatatgaatggaacgtgataccattcggactgaagaataccccttcagaatttcaaaaaattatgaacgatatttttaatccctattcaaaatttgtcattgtctacatagatgatgttttaatcttttcccaaaacattgaccaacatttcaaacatctccaaaccttcatacatatcatcaaacaaaatggtttggcagtctccaaatcaaaaatcaatcttttccaaactcgaattcgattccttggtcacaatatatatcaaggtacaatcattccaatcgaaaggtcaatagagtttgctagcaaattccccaaccaaatcttagacaaaacccagttacaaagatttctaggttgtctaaattacgtaggagaatttgtcccctatttaaacaatattgtcaagccattgcatgataggctgaagaaaaatctgcctccttggtctgacctccatacacaaacagttaaagaaatcaaagtcaaagtccaatccataaaatgtctgtatcttcctattccacaggcattcaaaattgtcgaaactgatgcttcagacataggttatggtggcatcctcaaacaaagagtccatggccaagatcatgtcattgcatatacatcaaaacattggaattctgcacaattaaaatattcaactgttaaaaaagaagttttagcaattgttttgtgcatttccaaatttcaatcggatttattaaaccaaaaatttttaatcagggttgattgtaaatcagccaaagatattttacaaaaagatgttaaaaaccttgcctcaaaacaaatt

SEQ ID NO: 10438 - DNA, 1168 bp, Glycine max
  Gm_smallRNAprecursor_3271
atggtcttgtgcggctttttatgtcaacaaacaatctgagattgagcgtggaacaccccgcttagtcataaattacaaaccattaaatcaagcattacaatggattagatatcctattccaaacaaaaaagatttgcttaacagattaaattctgcaaagatattttcaaaatttgatatgaaatctggattttggcaaatccaaatccaagaatcagataggtacaaaacagcgtttattgtacctttcgggcaatatgaatggaacgtgataccattcggactgaagaataccccttcagaatttcaaaaaattatgaacgatatttttaatccctattcaaaatttgtcattgtctacatagatgatgttttaatcttttcccaaaacattgaccaacatttcaaacatctccaaaccttcatacatatcatcaaacaaaatggtttggcagtctccaaatcaaaaatcaatcttttccaaactcgaattcgattccttggtcacaatatatatcaaggtacaatcattccaatcgaaaggtcaatagagtttgctagcaaattccccaaccaaatcttagacaaaacccagttacaaagatttctaggttgtctaaattacgtaggagaatttgtcccctatttaaacaatattgtcaagccattgcatgataggctgaagaaaaatctgcctccttggtctgacctccatacacaaacagttaaagaaatcaaagtcaaagtccaatccataaaatgtctgtatcttcctattccacaggcattcaaaattgtcgaaactgatgcttcagacataggttatggtggcatcctcaaacaaagagtccatggccaagatcatgtcattgcatatacatcaaaacattggaattctgcacaattaaaatattcaactgttaaaaaagaagttttagcaattgttttgtgcatttccaaatttcaatcggatttattaaaccaaaaatttttaatcagggttgattgtaaatcagccaaagatattttacaaaaagatgttaaaaaccttgcctcaaaacaaatttttgcacgatggcaagcaattttaagtgtctttgattttgacatagaatacatcaagggcacctcaaattcactaccttactaccttacccgtgaattctta

SEQ ID NO: 10439 - DNA, 1095 bp, Glycine max
  Gm_smallRNAprecursor_3272
tgaatggaacgtgataccattcggactgaagaataccccttcagaatttcaaaaaattatgaacgatatttttaatccctattcaaaatttgtcattgtctacatagatgatgttttaatcttttcccaaaacattgaccaacatttcaaacatctccaaaccttcatacatatcatcaaacaaaatggtttggcagtctccaaatcaaaaatcaatcttttccaaactcgaattcgattccttggtcacaatatatatcaaggtacaatcattccaatcgaaaggtcaatagagtttgctagcaaattccccaaccaaatcttagacaaaacccagttacaaagatttctaggttgtctaaattacgtaggagaatttgtcccctatttaaacaatattgtcaagccattgcatgataggctgaagaaaaatctgcctccttggtctgacctccatacacaaacagttaaagaaatcaaagtcaaagtccaatccataaaatgtctgtatcttcctattccacaggcattcaaaattgtcgaaactgatgcttcagacataggttatggtggcatcctcaaacaaagagtccatggccaagatcatgtcattgcatatacatcaaaacattggaattctgcacaattaaaatattcaactgttaaaaaagaagttttagcaattgttttgtgcatttccaaatttcaatcggatttattaaaccaaaaatttttaatcagggttgattgtaaatcagccaaagatattttacaaaaagatgttaaaaaccttgcctcaaaacaaatttttgcacgatggcaagcaattttaagtgtctttgattttgacatagaatacatcaagggcacctcaaattcactaccttactaccttacccgtgaattcttacagaaaagtggtaatgtctcctaaggcatcgggaatctccctacggggaggaaggagtacaggcaaaggagccagactggctcttccagagccaaccatcaagaaatcatcaacctcttctgggtcaccaacccaggctgggtcatctacccagaaaaccaatttagaagggtcatcaacccaga

SEQ ID NO: 10440 - DNA, 1095 bp, Glycine max; identical to SEQ ID NO: 10439
  Gm_smallRNAprecursor_3273

SEQ ID NO: 10441 - DNA, 1095 bp, Glycine max; identical to SEQ ID NO: 10439
  Gm_smallRNAprecursor_3274

SEQ ID NO: 10442 - DNA, 1095 bp, Glycine max; identical to SEQ ID NO: 10439
  Gm_smallRNAprecursor_3275

SEQ ID NO: 10443 - DNA, 1113 bp, Glycine max
  Gm_smallRNAprecursor_3276
attgtctacatagatgatgttttaatcttttcccaaaacattgaccaacatttcaaacatctccaaaccttcatacatatcatcaaacaaaatggtttggcagtctccaaatcaaaaatcaatcttttccaaactcgaattcgattccttggtcacaatatatatcaaggtacaatcattccaatcgaaaggtcaatagagtttgctagcaaattccccaaccaaatcttagacaaaacccagttacaaagatttctaggttgtctaaattacgtaggagaatttgtcccctatttaaacaatattgtcaagccattgcatgataggctgaagaaaaatctgcctccttggtctgacctccatacacaaacagttaaagaaatcaaagtcaaagtccaatccataaaatgtctgtatcttcctattccacaggcattcaaaattgtcgaaactgatgcttcagacataggttatggtggcatcctcaaacaaagagtccatggccaagatcatgtcattgcatatacatcaaaacattggaattctgcacaattaaaatattcaactgttaaaaaagaagttttagcaattgttttgtgcatttccaaatttcaatcggatttattaaaccaaaaatttttaatcagggttgattgtaaatcagccaaagatattttacaaaaagatgttaaaaaccttgcctcaaaacaaatttttgcacgatggcaagcaattttaagtgtctttgattttgacatagaatacatcaagggcacctcaaattcactaccttactaccttacccgtgaattcttacagaaaagtggtaatgtctcctaaggcatcgggaatctccctacggggaggaaggagtacaggcaaaggagccagactggctcttccagagccaaccatcaagaaatcatcaacctcttctgggtcaccaacccaggctgggtcatctacccagaaaaccaatttagaagggtcatcaacccagattgcctcaatcaaacctgagccatccactcaggaatctcccaaaccggcaaccgccaaacaaacatcggccgactatgcatggccaattgaaacccttcaggcccttcaaga

SEQ ID NO: 10444 - DNA, 1113 bp, Glycine max; identical to SEQ ID NO: 10443
  Gm_smallRNAprecursor_3277

SEQ ID NO: 10445 - DNA, 1114 bp, Glycine max
  Gm_smallRNAprecursor_3278
attgtctacatagatgatgttttaatcttttcccaaaacattgaccaacatttcaaacatctccaaaccttcatacatatcatcaaacaaaatggtttggcagtctccaaatcaaaaatcaatcttttccaaactcgaattcgattccttggtcacaatatatatcaaggtacaatcattccaatcgaaaggtcaatagagtttgctagcaaattccccaaccaaatcttagacaaaacccagttacaaagatttctaggttgtctaaattacgtaggagaatttgtcccctatttaaacaatattgtcaagccattgcatgataggctgaagaaaaatctgcctccttggtctgacctccatacacaaacagttaaagaaatcaaagtcaaagtccaatccataaaatgtctgtatcttcctattccacaggcattcaaaattgtcgaaactgatgcttcagacataggttatggtggcatcctcaaacaaagagtccatggccaagatcatgtcattgcatatacatcaaaacattggaattctgcacaattaaaatattcaactgttaaaaaagaagttttagcaattgttttgtgcatttccaaatttcaatcggatttattaaaccaaaaatttttaatcagggttgattgtaaatcagccaaagatattttacaaaaagatgttaaaaaccttgcctcaaaacaaatttttgcacgatggcaagcaattttaagtgtctttgattttgacatagaatacatcaagggcacctcaaattcactaccttactaccttacccgtgaattcttacagaaaagtggtaatgtctcctaaggcatcgggaatctccctacggggaggaaggagtacaggcaaaggagccagactggctcttccagagccaaccatcaagaaatcatcaacctcttctgggtcaccaacccaggctgggtcatctacccagaaaaccaatttagaagggtcatcaacccagattgcctcaatcaaacctgagccatccactcaggaatctcccaaaccggcaaccgccaaacaaacatcggccgactatgcatggccaattgaaacccttcaggcccttcaagac

SEQ ID NO: 10446 - DNA, 1114 bp, Glycine max; identical to SEQ ID NO: 10445
  Gm_smallRNAprecursor_3279

SEQ ID NO: 10447 - DNA, 1157 bp, Glycine max
  Gm_smallRNAprecursor_3280
catggaaaactgtccgtaagggcatatgttaactgaacttatagatctgaaccatgtacagtaattttaatttaaacagtatatgtttgaacagtattttctggaagcacagcagtctgatattttagttgaatgatactgtagcagtaagtcccgtggttgagaaagggcagtaaggctaaggtgtattgttcaaataaaatattgagacataatatactggtggctataggagtaatgttcaaactatattgtctgtaaaaaaaaatctttttcatctattcagatccaagaagttctgtaacatatagccttatggaaagattcctatggaaccaaatgaaggcaaagatattagagaatgttttaatcatgtctagattattgcgatctttttcccgtatctcctttcgctcaaattcctcctcttcatcttcttcaagaaacaccaatctattaaatgatcaagataaccagacccaagaggtcgccccaaaacacaatctcttcgatgaggaagtccgattcgaagatatcaatcaaaacatggatgactggaacattccagaaatccctcaggatcaactatacgttcctaaaacaattaaggacaaacacaactttgattacataatcaaaacagtagaaaacaatattcctctaggacaagatataggggaagaatttcatttactttcaaaaaattcaatttatgaacatagccgtaagtataaatatctacacatcggttgtgtacaagtagccatcaagcccttaattgatatgggcatagatgcagtagttttaatgtgtctaagagatattaggcataatcaatttgaagactccctaattggaatagtcgaaaccagcctaggacaaggtccaatatattttaattgttatccaaacaaaatagtgagtctgatggacagaaacattcttgactctctgttcttaaacatccactttcatggccttgacatgaaagaaggatcaatcccagcagccttaatttataggatccagtacaaggtcatgaatacttgtgcatctagagtcctgttaaaacctcaaaaaggagaaacaactttgtttatcactgatatgacaaaggctaacgtttctctcccgagaaaaataaaatgggatgaagt

SEQ ID NO: 10448 - DNA, 1033 bp, Glycine max
  Gm_smallRNAprecursor_3281
agtaaggctaaggtgtattgttcaaataaaatattgagacataatatactggtggctataggagtaatgttcaaactatattgtctgtaaaaaaaaatctttttcatctattcagatccaagaagttctgtaacatatagccttatggaaagattcctatggaaccaaatgaaggcaaagatattagagaatgttttaatcatgtctagattattgcgatctttttcccgtatctcctttcgctcaaattcctcctcttcatcttcttcaagaaacaccaatctattaaatgatcaagataaccagacccaagaggtcgccccaaaacacaatctcttcgatgaggaagtccgattcgaagatatcaatcaaaacatggatgactggaacattccagaaatccctcaggatcaactatacgttcctaaaacaattaaggacaaacacaactttgattacataatcaaaacagtagaaaacaatattcctctaggacaagatataggggaagaatttcatttactttcaaaaaattcaatttatgaacatagccgtaagtataaatatctacacatcggttgtgtacaagtagccatcaagcccttaattgatatgggcatagatgcagtagttttaatgtgtctaagagatattaggcataatcaatttgaagactccctaattggaatagtcgaaaccagcctaggacaaggtccaatatattttaattgttatccaaacaaaatagtgagtctgatggacagaaacattcttgactctctgttcttaaacatccactttcatggccttgacatgaaagaaggatcaatcccagcagccttaatttataggatccagtacaaggtcatgaatacttgtgcatctagagtcctgttaaaacctcaaaaaggagaaacaactttgtttatcactgatatgacaaaggctaacgtttctctcccgagaaaaataaaatgggatgaagtaactcttcccgaaagatggtttatggataaggcaacaccgtctattc

SEQ ID NO: 10449 - DNA, 1047 bp, Glycine max
  Gm_smallRNAprecursor_3282
attgagacataatatactggtggctataggagtaatgttcaaactatattgtctgtaaaaaaaaatctttttcatctattcagatccaagaagttctgtaacatatagccttatggaaagattcctatggaaccaaatgaaggcaaagatattagagaatgttttaatcatgtctagattattgcgatctttttcccgtatctcctttcgctcaaattcctcctcttcatcttcttcaagaaacaccaatctattaaatgatcaagataaccagacccaagaggtcgccccaaaacacaatctcttcgatgaggaagtccgattcgaagatatcaatcaaaacatggatgactggaacattccagaaatccctcaggatcaactatacgttcctaaaacaattaaggacaaacacaactttgattacataatcaaaacagtagaaaacaatattcctctaggacaagatataggggaagaatttcatttactttcaaaaaattcaatttatgaacatagccgtaagtataaatatctacacatcggttgtgtacaagtagccatcaagcccttaattgatatgggcatagatgcagtagttttaatgtgtctaagagatattaggcataatcaatttgaagactccctaattggaatagtcgaaaccagcctaggacaaggtccaatatattttaattgttatccaaacaaaatagtgagtctgatggacagaaacattcttgactctctgttcttaaacatccactttcatggccttgacatgaaagaaggatcaatcccagcagccttaatttataggatccagtacaaggtcatgaatacttgtgcatctagagtcctgttaaaacctcaaaaaggagaaacaactttgtttatcactgatatgacaaaggctaacgtttctctcccgagaaaaataaaatgggatgaagtaactcttcccgaaagatggtttatggataaggcaacaccgtctattccccgacccgctccaaccatagagcatattaagcaagataactccgg

SEQ ID NO: 10450 - DNA, 1053 bp, Glycine max
  Gm_smallRNAprecursor_3283
ttcattgcacaaatacatgcaagcaagcaagaacccttttaataagagtataagaaaacatgcatatatcgccacaaagcagtaagtgttgcatcaccaaaatccttgatggccacttagtccttccattccattgtcatcttacctgtgtgtctccactggtaagttgctttctaaacccataagcactaaactaactattctttgctaggctgtttcctatttaagatttaaattacctttaagcaaccagttcaaacttaaaccatctcataaaatatacaatagtctactggaaaaacagcatgttgttcacaacaaagtttactggttcaattgtatacttattaattatgatacagtcaaccaataagtaataaggaaaagttttctaccaagtgagcatcaatagttgtcagctacggtgtcaatcccatgattgtcaaactctcgagttaacttgttaactcttacgagtttaccagtccccttgtcttctgcgagttgactcttgagtaaattctttttttagtagactctcaacaaactctataaactctaagtaaactcggtagactctcaagtttaccactgagtcaacaagttagcaagttaaaaaaaatcagaccaaaatgcaagttattttttattgttttctgtataacattcaacataccttcgtttagtgtattattctcaaatacaaaattctcatctttaatcatatcaaatctttgttccttaataacatcaaatcttggatgagaatgatctaccactactataacctttataagttattatctagaagtgatatattattactagatttgattatttaaatattctgaactttatgatttattattttattttgttatattgttgaaatgtttaattaaaatgttatttgtagatattttattattatgttcatatgaagtagactcttatgagtctatgagttgaatcatgaatcgagtttatgaaattatcaaggatctaaagtgaattttcaagtttgataatcttgataaatctaacttaatttca

SEQ ID NO: 10451 - DNA, 1044 bp, Glycine max
  Gm_smallRNAprecursor_3284
acatggtaggtcttgataaatcttgcacttctttttcatcgcaagtttttcactcacttggaacctagaggaaaatcactttttgtctctctcccacttctagggttgttcaacttgggaaagtggggcatgaatcccaaactgggtctgaaattttcagatctcttactttgacaggttttgtaataaccccatcttttttttcttttttttgctccccatgcggtattatgtgtatacgactgcttaagtggcctatgtatgacaatggtatttttgtttgaaatttgaaatacaacttctccagtaataaaatttgactgaatttataaagggatttataaaactgagagaccaaatgtgtgaattaaaatataaggggaccaaaattgaaattggagtaaaattgggggatcaaaagtgcaattttacctacaaaaaatgaagcctttacaagaaaccactcagacgttgacacgtggcagtcacacgtgacagtcaacgtctgaggttaacggtcaacatccaaatcgggcttccagaaccaattttgcagggatttataaaactgggaaatcaaatttgtgaattaaattatagggggaccaaatctgaaattggagataaactaggagaccaaaaatgtaattttatcttttttttatagatgaaaataaaaaacagtgtcattgttagaaggtttacaataactcacacatcttgtttaaccaatttccattagtatgatgtggtgtatatgaaaagatttgggagagcatcacgtaaaatcttcaaaattatacacctttggaggccgaaacaaaagcactacatgagggaataaggtggacaaagtctttgaatattccaaatgtcatcctcgaatcagatagcaagcaggtcgttgacgcattcaagttcaacagaaacactttcatgaatacatgcagcgttgataacaatcattttcaaaacctctatatcaaattcattcgtaggcaaacaaatcaagttgttcacattttaactaaggcgtctaggttc

SEQ ID NO: 10452 - DNA, 1130 bp, Glycine max
  Gm_smallRNAprecursor_3285
atcacattaaatttaaggacatttatttgatttagttattatttttctgttacgagctgggattggctcagtgaatttcctagagttggaggcctaggaacctccatgaagggaaaggtaaggaaagagttttgtattaatttttttaatcctaaaactatgattgaaagcaagtattatgaatgttgttttattattttttttctaaatttaatcattgtaacttagattaattatcattcaaattttatttaattataacaaatttttaatacttacagaatttttataaatcacaaatgaaccaaattaaattaaaaaaattgatttgatttagtttgaatttcataaataaaaatcagtccaaactgcaagacacttaatttttttgtttcgttcaaattaattttaacctaaactcgtatcaaatcgcaccacaaataccactaaatcctatatcattttaatgtttttttttgtttgctttctatcaactggtacgaacggatcctaacttacgacaaattgctcaaactaggtcccttttaaaaactaattctcaaaagggggctgttttgaaacttttttcaggggggtctgtttctgaaggggactcgccagtgaagttggcgagttggacacgtggcggcgcctggtggactcgccagtggaattggcgagttcccaaaaaatgcctctaagtagctcaaatataggatttaggatgacatagttgggtggttgaatcttaaatccattttttgggaaaatgagttgaccaaatccccttcgggaatttccaagggattcttcattcaatttcgagcattttgacatattatggacctcaaacggacattcctatcaaaagttatacccgtttgaagttaaaaaaaaaaatttcgtaaaaaagtatttcgccagtacgagtggcgggacccgccacatggacagcaactcgccaactccagtggcgagtctaccaggcgccgccacgtgtccaactcgccaactccactggcgagtccccttcagatacagaccccccccccctccccgtaaaaagttccaaaacagcccccataattagtttctaaaagggacctagtttgagcaatttgttcctaact

SEQ ID NO: 10453 - DNA, 1083 bp, Glycine max
  Gm_smallRNAprecursor_3286
agatacgatggaacatcccattttcatgtattcatctgtgatatgagtaccatggaaatagagtaccctgtcaacaaagcaaatcacaaaagaccaagcattaatagtgaagaaagtcaaccacataagacacagaaaacagatgaaaatatgaacaagagtaattccaatttgcaggacactgacattcataaagaagccagagaccacaaaggcaagattctagattcctaatgtatttatttaattgtcagatttttagccacagaattagaagaattattataaagaatttagcttttcttatggttgataattttccctcttttaggtaagggaaacatggaagggtcatccattagtaactgtggaaatcatgaagcagctggaaatacttcattcaccgtgataatgaaatcaagctacgtaagtaagcggatcatggtatgatttcaaactaagcaatcatataagagaatatagtgtatacctatgaagcaccgacaccgacacggacaccggacacgacacggacacggacacgtggatacctgtaatgtccaaaatatagaacgtaatacgggtgtcgtgtcggtgtcggacactgacacggacgcgtgtcggacaccggacacggcaaagggctgaagtgtccgtgcttcataggtgtatacatttgagactctcatccaatcaaaatctacataaatttaatgacttttataatacttaccttaaaagtcatgtaaaatatgattttctgaccgatgataatgtaaaattatttacaatcaaagtacatataaatttggtttatcatatttttgttcaatctcgaatcaaaatctgagaggtgaaaaatgcatatcatgcagtatctgccaaagagcccactgaagcgctataccaaatctggtgaacaatatgtcaagcttttggttggggacagatcatggagggttaaagtgacctattgtcgaaataaaacattgagttactttactggagattggctagtttttgcaaaggaaaatgatttaaaagaaggagatgcttgcttgttccaacttctaagcaatggtg

SEQ ID NO: 10454 - DNA, 1084 bp, Glycine max
  Gm_smallRNAprecursor_3287
agatacgatggaacatcccattttcatgtattcatctgtgatatgagtaccatggaaatagagtaccctgtcaacaaagcaaatcacaaaagaccaagcattaatagtgaagaaagtcaaccacataagacacagaaaacagatgaaaatatgaacaagagtaattccaatttgcaggacactgacattcataaagaagccagagaccacaaaggcaagattctagattcctaatgtatttatttaattgtcagatttttagccacagaattagaagaattattataaagaatttagcttttcttatggttgataattttccctcttttaggtaagggaaacatggaagggtcatccattagtaactgtggaaatcatgaagcagctggaaatacttcattcaccgtgataatgaaatcaagctacgtaagtaagcggatcatggtatgatttcaaactaagcaatcatataagagaatatagtgtatacctatgaagcaccgacaccgacacggacaccggacacgacacggacacggacacgtggatacctgtaatgtccaaaatatagaacgtaatacgggtgtcgtgtcggtgtcggacactgacacggacgcgtgtcggacaccggacacggcaaagggctgaagtgtccgtgcttcataggtgtatacatttgagactctcatccaatcaaaatctacataaatttaatgacttttataatacttaccttaaaagtcatgtaaaatatgattttctgaccgatgataatgtaaaattatttacaatcaaagtacatataaatttggtttatcatatttttgttcaatctcgaatcaaaatctgagaggtgaaaaatgcatatcatgcagtatctgccaaagagcccactgaagcgctataccaaatctggtgaacaatatgtcaagcttttggttggggacagatcatggagggttaaagtgacctattgtcgaaataaaacattgagttactttactggagattggctagtttttgcaaaggaaaatgatttaaaagaaggagatgcttgcttgttccaacttctaagcaatggtga

SEQ ID NO: 10455 - DNA, 1085 bp, Glycine max
  Gm_smallRNAprecursor_3288
agatacgatggaacatcccattttcatgtattcatctgtgatatgagtaccatggaaatagagtaccctgtcaacaaagcaaatcacaaaagaccaagcattaatagtgaagaaagtcaaccacataagacacagaaaacagatgaaaatatgaacaagagtaattccaatttgcaggacactgacattcataaagaagccagagaccacaaaggcaagattctagattcctaatgtatttatttaattgtcagatttttagccacagaattagaagaattattataaagaatttagcttttcttatggttgataattttccctcttttaggtaagggaaacatggaagggtcatccattagtaactgtggaaatcatgaagcagctggaaatacttcattcaccgtgataatgaaatcaagctacgtaagtaagcggatcatggtatgatttcaaactaagcaatcatataagagaatatagtgtatacctatgaagcaccgacaccgacacggacaccggacacgacacggacacggacacgtggatacctgtaatgtccaaaatatagaacgtaatacgggtgtcgtgtcggtgtcggacactgacacggacgcgtgtcggacaccggacacggcaaagggctgaagtgtccgtgcttcataggtgtatacatttgagactctcatccaatcaaaatctacataaatttaatgacttttataatacttaccttaaaagtcatgtaaaatatgattttctgaccgatgataatgtaaaattatttacaatcaaagtacatataaatttggtttatcatatttttgttcaatctcgaatcaaaatctgagaggtgaaaaatgcatatcatgcagtatctgccaaagagcccactgaagcgctataccaaatctggtgaacaatatgtcaagcttttggttggggacagatcatggagggttaaagtgacctattgtcgaaataaaacattgagttactttactggagattggctagtttttgcaaaggaaaatgatttaaaagaaggagatgcttgcttgttccaacttctaagcaatggtgat

SEQ ID NO: 10456 - DNA, 1107 bp, Glycine max
  Gm_smallRNAprecursor_3289
agatacgatggaacatcccattttcatgtattcatctgtgatatgagtaccatggaaatagagtaccctgtcaacaaagcaaatcacaaaagaccaagcattaatagtgaagaaagtcaaccacataagacacagaaaacagatgaaaatatgaacaagagtaattccaatttgcaggacactgacattcataaagaagccagagaccacaaaggcaagattctagattcctaatgtatttatttaattgtcagatttttagccacagaattagaagaattattataaagaatttagcttttcttatggttgataattttccctcttttaggtaagggaaacatggaagggtcatccattagtaactgtggaaatcatgaagcagctggaaatacttcattcaccgtgataatgaaatcaagctacgtaagtaagcggatcatggtatgatttcaaactaagcaatcatataagagaatatagtgtatacctatgaagcaccgacaccgacacggacaccggacacgacacggacacggacacgtggatacctgtaatgtccaaaatatagaacgtaatacgggtgtcgtgtcggtgtcggacactgacacggacgcgtgtcggacaccggacacggcaaagggctgaagtgtccgtgcttcataggtgtatacatttgagactctcatccaatcaaaatctacataaatttaatgacttttataatacttaccttaaaagtcatgtaaaatatgattttctgaccgatgataatgtaaaattatttacaatcaaagtacatataaatttggtttatcatatttttgttcaatctcgaatcaaaatctgagaggtgaaaaatgcatatcatgcagtatctgccaaagagcccactgaagcgctataccaaatctggtgaacaatatgtcaagcttttggttggggacagatcatggagggttaaagtgacctattgtcgaaataaaacattgagttactttactggagattggctagtttttgcaaaggaaaatgatttaaaagaaggagatgcttgcttgttccaacttctaagcaatggtgatggcatcgtgatgaaggtttcta

SEQ ID NO: 10457 - DNA, 1112 bp, Glycine max
  Gm_smallRNAprecursor_3290
agatacgatggaacatcccattttcatgtattcatctgtgatatgagtaccatggaaatagagtaccctgtcaacaaagcaaatcacaaaagaccaagcattaatagtgaagaaagtcaaccacataagacacagaaaacagatgaaaatatgaacaagagtaattccaatttgcaggacactgacattcataaagaagccagagaccacaaaggcaagattctagattcctaatgtatttatttaattgtcagatttttagccacagaattagaagaattattataaagaatttagcttttcttatggttgataattttccctcttttaggtaagggaaacatggaagggtcatccattagtaactgtggaaatcatgaagcagctggaaatacttcattcaccgtgataatgaaatcaagctacgtaagtaagcggatcatggtatgatttcaaactaagcaatcatataagagaatatagtgtatacctatgaagcaccgacaccgacacggacaccggacacgacacggacacggacacgtggatacctgtaatgtccaaaatatagaacgtaatacgggtgtcgtgtcggtgtcggacactgacacggacgcgtgtcggacaccggacacggcaaagggctgaagtgtccgtgcttcataggtgtatacatttgagactctcatccaatcaaaatctacataaatttaatgacttttataatacttaccttaaaagtcatgtaaaatatgattttctgaccgatgataatgtaaaattatttacaatcaaagtacatataaatttggtttatcatatttttgttcaatctcgaatcaaaatctgagaggtgaaaaatgcatatcatgcagtatctgccaaagagcccactgaagcgctataccaaatctggtgaacaatatgtcaagcttttggttggggacagatcatggagggttaaagtgacctattgtcgaaataaaacattgagttactttactggagattggctagtttttgcaaaggaaaatgatttaaaagaaggagatgcttgcttgttccaacttctaagcaatggtgatggcatcgtgatgaaggtttctatttcc

SEQ ID NO: 10458 - DNA, 1113 bp, Glycine max
  Gm_smallRNAprecursor_3291
agatacgatggaacatcccattttcatgtattcatctgtgatatgagtaccatggaaatagagtaccctgtcaacaaagcaaatcacaaaagaccaagcattaatagtgaagaaagtcaaccacataagacacagaaaacagatgaaaatatgaacaagagtaattccaatttgcaggacactgacattcataaagaagccagagaccacaaaggcaagattctagattcctaatgtatttatttaattgtcagatttttagccacagaattagaagaattattataaagaatttagcttttcttatggttgataattttccctcttttaggtaagggaaacatggaagggtcatccattagtaactgtggaaatcatgaagcagctggaaatacttcattcaccgtgataatgaaatcaagctacgtaagtaagcggatcatggtatgatttcaaactaagcaatcatataagagaatatagtgtatacctatgaagcaccgacaccgacacggacaccggacacgacacggacacggacacgtggatacctgtaatgtccaaaatatagaacgtaatacgggtgtcgtgtcggtgtcggacactgacacggacgcgtgtcggacaccggacacggcaaagggctgaagtgtccgtgcttcataggtgtatacatttgagactctcatccaatcaaaatctacataaatttaatgacttttataatacttaccttaaaagtcatgtaaaatatgattttctgaccgatgataatgtaaaattatttacaatcaaagtacatataaatttggtttatcatatttttgttcaatctcgaatcaaaatctgagaggtgaaaaatgcatatcatgcagtatctgccaaagagcccactgaagcgctataccaaatctggtgaacaatatgtcaagcttttggttggggacagatcatggagggttaaagtgacctattgtcgaaataaaacattgagttactttactggagattggctagtttttgcaaaggaaaatgatttaaaagaaggagatgcttgcttgttccaacttctaagcaatggtgatggcatcgtgatgaaggtttctatttcca

SEQ ID NO: 10459 - DNA, 1113 bp, Glycine max; identical to SEQ ID NO: 10458
  Gm_smallRNAprecursor_3292

SEQ ID NO: 10460 - DNA, 1118 bp, Glycine max
  Gm_smallRNAprecursor_3293
agatacgatggaacatcccattttcatgtattcatctgtgatatgagtaccatggaaatagagtaccctgtcaacaaagcaaatcacaaaagaccaagcattaatagtgaagaaagtcaaccacataagacacagaaaacagatgaaaatatgaacaagagtaattccaatttgcaggacactgacattcataaagaagccagagaccacaaaggcaagattctagattcctaatgtatttatttaattgtcagatttttagccacagaattagaagaattattataaagaatttagcttttcttatggttgataattttccctcttttaggtaagggaaacatggaagggtcatccattagtaactgtggaaatcatgaagcagctggaaatacttcattcaccgtgataatgaaatcaagctacgtaagtaagcggatcatggtatgatttcaaactaagcaatcatataagagaatatagtgtatacctatgaagcaccgacaccgacacggacaccggacacgacacggacacggacacgtggatacctgtaatgtccaaaatatagaacgtaatacgggtgtcgtgtcggtgtcggacactgacacggacgcgtgtcggacaccggacacggcaaagggctgaagtgtccgtgcttcataggtgtatacatttgagactctcatccaatcaaaatctacataaatttaatgacttttataatacttaccttaaaagtcatgtaaaatatgattttctgaccgatgataatgtaaaattatttacaatcaaagtacatataaatttggtttatcatatttttgttcaatctcgaatcaaaatctgagaggtgaaaaatgcatatcatgcagtatctgccaaagagcccactgaagcgctataccaaatctggtgaacaatatgtcaagcttttggttggggacagatcatggagggttaaagtgacctattgtcgaaataaaacattgagttactttactggagattggctagtttttgcaaaggaaaatgatttaaaagaaggagatgcttgcttgttccaacttctaagcaatggtgatggcatcgtgatgaaggtttctatttccagacgg

SEQ ID NO: 10461 - DNA, 1119 bp, Glycine max
  Gm_smallRNAprecursor_3294
agatacgatggaacatcccattttcatgtattcatctgtgatatgagtaccatggaaatagagtaccctgtcaacaaagcaaatcacaaaagaccaagcattaatagtgaagaaagtcaaccacataagacacagaaaacagatgaaaatatgaacaagagtaattccaatttgcaggacactgacattcataaagaagccagagaccacaaaggcaagattctagattcctaatgtatttatttaattgtcagatttttagccacagaattagaagaattattataaagaatttagcttttcttatggttgataattttccctcttttaggtaagggaaacatggaagggtcatccattagtaactgtggaaatcatgaagcagctggaaatacttcattcaccgtgataatgaaatcaagctacgtaagtaagcggatcatggtatgatttcaaactaagcaatcatataagagaatatagtgtatacctatgaagcaccgacaccgacacggacaccggacacgacacggacacggacacgtggatacctgtaatgtccaaaatatagaacgtaatacgggtgtcgtgtcggtgtcggacactgacacggacgcgtgtcggacaccggacacggcaaagggctgaagtgtccgtgcttcataggtgtatacatttgagactctcatccaatcaaaatctacataaatttaatgacttttataatacttaccttaaaagtcatgtaaaatatgattttctgaccgatgataatgtaaaattatttacaatcaaagtacatataaatttggtttatcatatttttgttcaatctcgaatcaaaatctgagaggtgaaaaatgcatatcatgcagtatctgccaaagagcccactgaagcgctataccaaatctggtgaacaatatgtcaagcttttggttggggacagatcatggagggttaaagtgacctattgtcgaaataaaacattgagttactttactggagattggctagtttttgcaaaggaaaatgatttaaaagaaggagatgcttgcttgttccaacttctaagcaatggtgatggcatcgtgatgaaggtttctatttccagacggg

SEQ ID NO: 10462 - DNA, 1119 bp, Glycine max; identical to SEQ ID NO: 10461
  Gm_smallRNAprecursor_3295

SEQ ID NO: 10463 - DNA, 1120 bp, Glycine max
  Gm_smallRNAprecursor_3296
agatacgatggaacatcccattttcatgtattcatctgtgatatgagtaccatggaaatagagtaccctgtcaacaaagcaaatcacaaaagaccaagcattaatagtgaagaaagtcaaccacataagacacagaaaacagatgaaaatatgaacaagagtaattccaatttgcaggacactgacattcataaagaagccagagaccacaaaggcaagattctagattcctaatgtatttatttaattgtcagatttttagccacagaattagaagaattattataaagaatttagcttttcttatggttgataattttccctcttttaggtaagggaaacatggaagggtcatccattagtaactgtggaaatcatgaagcagctggaaatacttcattcaccgtgataatgaaatcaagctacgtaagtaagcggatcatggtatgatttcaaactaagcaatcatataagagaatatagtgtatacctatgaagcaccgacaccgacacggacaccggacacgacacggacacggacacgtggatacctgtaatgtccaaaatatagaacgtaatacgggtgtcgtgtcggtgtcggacactgacacggacgcgtgtcggacaccggacacggcaaagggctgaagtgtccgtgcttcataggtgtatacatttgagactctcatccaatcaaaatctacataaatttaatgacttttataatacttaccttaaaagtcatgtaaaatatgattttctgaccgatgataatgtaaaattatttacaatcaaagtacatataaatttggtttatcatatttttgttcaatctcgaatcaaaatctgagaggtgaaaaatgcatatcatgcagtatctgccaaagagcccactgaagcgctataccaaatctggtgaacaatatgtcaagcttttggttggggacagatcatggagggttaaagtgacctattgtcgaaataaaacattgagttactttactggagattggctagtttttgcaaaggaaaatgatttaaaagaaggagatgcttgcttgttccaacttctaagcaatggtgatggcatcgtgatgaaggtttctatttccagacgggt

SEQ ID NO: 10464 - DNA, 1082 bp, Glycine max
  Gm_smallRNAprecursor_3297
gatacgatggaacatcccattttcatgtattcatctgtgatatgagtaccatggaaatagagtaccctgtcaacaaagcaaatcacaaaagaccaagcattaatagtgaagaaagtcaaccacataagacacagaaaacagatgaaaatatgaacaagagtaattccaatttgcaggacactgacattcataaagaagccagagaccacaaaggcaagattctagattcctaatgtatttatttaattgtcagatttttagccacagaattagaagaattattataaagaatttagcttttcttatggttgataattttccctcttttaggtaagggaaacatggaagggtcatccattagtaactgtggaaatcatgaagcagctggaaatacttcattcaccgtgataatgaaatcaagctacgtaagtaagcggatcatggtatgatttcaaactaagcaatcatataagagaatatagtgtatacctatgaagcaccgacaccgacacggacaccggacacgacacggacacggacacgtggatacctgtaatgtccaaaatatagaacgtaatacgggtgtcgtgtcggtgtcggacactgacacggacgcgtgtcggacaccggacacggcaaagggctgaagtgtccgtgcttcataggtgtatacatttgagactctcatccaatcaaaatctacataaatttaatgacttttataatacttaccttaaaagtcatgtaaaatatgattttctgaccgatgataatgtaaaattatttacaatcaaagtacatataaatttggtttatcatatttttgttcaatctcgaatcaaaatctgagaggtgaaaaatgcatatcatgcagtatctgccaaagagcccactgaagcgctataccaaatctggtgaacaatatgtcaagcttttggttggggacagatcatggagggttaaagtgacctattgtcgaaataaaacattgagttactttactggagattggctagtttttgcaaaggaaaatgatttaaaagaaggagatgcttgcttgttccaacttctaagcaatggtg

SEQ ID NO: 10465 - DNA, 1082 bp, Glycine max; identical to SEQ ID NO: 10464
  Gm_smallRNAprecursor_3298

SEQ ID NO: 10466 - DNA, 1083 bp, Glycine max
  Gm_smallRNAprecursor_3299
gatacgatggaacatcccattttcatgtattcatctgtgatatgagtaccatggaaatagagtaccctgtcaacaaagcaaatcacaaaagaccaagcattaatagtgaagaaagtcaaccacataagacacagaaaacagatgaaaatatgaacaagagtaattccaatttgcaggacactgacattcataaagaagccagagaccacaaaggcaagattctagattcctaatgtatttatttaattgtcagatttttagccacagaattagaagaattattataaagaatttagcttttcttatggttgataattttccctcttttaggtaagggaaacatggaagggtcatccattagtaactgtggaaatcatgaagcagctggaaatacttcattcaccgtgataatgaaatcaagctacgtaagtaagcggatcatggtatgatttcaaactaagcaatcatataagagaatatagtgtatacctatgaagcaccgacaccgacacggacaccggacacgacacggacacggacacgtggatacctgtaatgtccaaaatatagaacgtaatacgggtgtcgtgtcggtgtcggacactgacacggacgcgtgtcggacaccggacacggcaaagggctgaagtgtccgtgcttcataggtgtatacatttgagactctcatccaatcaaaatctacataaatttaatgacttttataatacttaccttaaaagtcatgtaaaatatgattttctgaccgatgataatgtaaaattatttacaatcaaagtacatataaatttggtttatcatatttttgttcaatctcgaatcaaaatctgagaggtgaaaaatgcatatcatgcagtatctgccaaagagcccactgaagcgctataccaaatctggtgaacaatatgtcaagcttttggttggggacagatcatggagggttaaagtgacctattgtcgaaataaaacattgagttactttactggagattggctagtttttgcaaaggaaaatgatttaaaagaaggagatgcttgcttgttccaacttctaagcaatggtga

SEQ ID NO: 10467 - DNA, 1117 bp, Glycine max
  Gm_smallRNAprecursor_3300
gatacgatggaacatcccattttcatgtattcatctgtgatatgagtaccatggaaatagagtaccctgtcaacaaagcaaatcacaaaagaccaagcattaatagtgaagaaagtcaaccacataagacacagaaaacagatgaaaatatgaacaagagtaattccaatttgcaggacactgacattcataaagaagccagagaccacaaaggcaagattctagattcctaatgtatttatttaattgtcagatttttagccacagaattagaagaattattataaagaatttagcttttcttatggttgataattttccctcttttaggtaagggaaacatggaagggtcatccattagtaactgtggaaatcatgaagcagctggaaatacttcattcaccgtgataatgaaatcaagctacgtaagtaagcggatcatggtatgatttcaaactaagcaatcatataagagaatatagtgtatacctatgaagcaccgacaccgacacggacaccggacacgacacggacacggacacgtggatacctgtaatgtccaaaatatagaacgtaatacgggtgtcgtgtcggtgtcggacactgacacggacgcgtgtcggacaccggacacggcaaagggctgaagtgtccgtgcttcataggtgtatacatttgagactctcatccaatcaaaatctacataaatttaatgacttttataatacttaccttaaaagtcatgtaaaatatgattttctgaccgatgataatgtaaaattatttacaatcaaagtacatataaatttggtttatcatatttttgttcaatctcgaatcaaaatctgagaggtgaaaaatgcatatcatgcagtatctgccaaagagcccactgaagcgctataccaaatctggtgaacaatatgtcaagcttttggttggggacagatcatggagggttaaagtgacctattgtcgaaataaaacattgagttactttactggagattggctagtttttgcaaaggaaaatgatttaaaagaaggagatgcttgcttgttccaacttctaagcaatggtgatggcatcgtgatgaaggtttctatttccagacgg

SEQ ID NO: 10468 - DNA, 1117 bp, Glycine max; identical to SEQ ID NO: 10467
  Gm_smallRNAprecursor_3301

SEQ ID NO: 10469 - DNA, 1118 bp, Glycine max
  Gm_smallRNAprecursor_3302
gatacgatggaacatcccattttcatgtattcatctgtgatatgagtaccatggaaatagagtaccctgtcaacaaagcaaatcacaaaagaccaagcattaatagtgaagaaagtcaaccacataagacacagaaaacagatgaaaatatgaacaagagtaattccaatttgcaggacactgacattcataaagaagccagagaccacaaaggcaagattctagattcctaatgtatttatttaattgtcagatttttagccacagaattagaagaattattataaagaatttagcttttcttatggttgataattttccctcttttaggtaagggaaacatggaagggtcatccattagtaactgtggaaatcatgaagcagctggaaatacttcattcaccgtgataatgaaatcaagctacgtaagtaagcggatcatggtatgatttcaaactaagcaatcatataagagaatatagtgtatacctatgaagcaccgacaccgacacggacaccggacacgacacggacacggacacgtggatacctgtaatgtccaaaatatagaacgtaatacgggtgtcgtgtcggtgtcggacactgacacggacgcgtgtcggacaccggacacggcaaagggctgaagtgtccgtgcttcataggtgtatacatttgagactctcatccaatcaaaatctacataaatttaatgacttttataatacttaccttaaaagtcatgtaaaatatgattttctgaccgatgataatgtaaaattatttacaatcaaagtacatataaatttggtttatcatatttttgttcaatctcgaatcaaaatctgagaggtgaaaaatgcatatcatgcagtatctgccaaagagcccactgaagcgctataccaaatctggtgaacaatatgtcaagcttttggttggggacagatcatggagggttaaagtgacctattgtcgaaataaaacattgagttactttactggagattggctagtttttgcaaaggaaaatgatttaaaagaaggagatgcttgcttgttccaacttctaagcaatggtgatggcatcgtgatgaaggtttctatttccagacggg

SEQ ID NO: 10470 - DNA, 1077 bp, Glycine max
  Gm_smallRNAprecursor_3303
gatggaacatcccattttcatgtattcatctgtgatatgagtaccatggaaatagagtaccctgtcaacaaagcaaatcacaaaagaccaagcattaatagtgaagaaagtcaaccacataagacacagaaaacagatgaaaatatgaacaagagtaattccaatttgcaggacactgacattcataaagaagccagagaccacaaaggcaagattctagattcctaatgtatttatttaattgtcagatttttagccacagaattagaagaattattataaagaatttagcttttcttatggttgataattttccctcttttaggtaagggaaacatggaagggtcatccattagtaactgtggaaatcatgaagcagctggaaatacttcattcaccgtgataatgaaatcaagctacgtaagtaagcggatcatggtatgatttcaaactaagcaatcatataagagaatatagtgtatacctatgaagcaccgacaccgacacggacaccggacacgacacggacacggacacgtggatacctgtaatgtccaaaatatagaacgtaatacgggtgtcgtgtcggtgtcggacactgacacggacgcgtgtcggacaccggacacggcaaagggctgaagtgtccgtgcttcataggtgtatacatttgagactctcatccaatcaaaatctacataaatttaatgacttttataatacttaccttaaaagtcatgtaaaatatgattttctgaccgatgataatgtaaaattatttacaatcaaagtacatataaatttggtttatcatatttttgttcaatctcgaatcaaaatctgagaggtgaaaaatgcatatcatgcagtatctgccaaagagcccactgaagcgctataccaaatctggtgaacaatatgtcaagcttttggttggggacagatcatggagggttaaagtgacctattgtcgaaataaaacattgagttactttactggagattggctagtttttgcaaaggaaaatgatttaaaagaaggagatgcttgcttgttccaacttctaagcaatggtg

SEQ ID NO: 10471 - DNA, 1077 bp, Glycine max; identical to SEQ ID NO: 10470
  Gm_smallRNAprecursor_3304

SEQ ID NO: 10472 - DNA, 1078 bp, Glycine max
  Gm_smallRNAprecursor_3305
gatggaacatcccattttcatgtattcatctgtgatatgagtaccatggaaatagagtaccctgtcaacaaagcaaatcacaaaagaccaagcattaatagtgaagaaagtcaaccacataagacacagaaaacagatgaaaatatgaacaagagtaattccaatttgcaggacactgacattcataaagaagccagagaccacaaaggcaagattctagattcctaatgtatttatttaattgtcagatttttagccacagaattagaagaattattataaagaatttagcttttcttatggttgataattttccctcttttaggtaagggaaacatggaagggtcatccattagtaactgtggaaatcatgaagcagctggaaatacttcattcaccgtgataatgaaatcaagctacgtaagtaagcggatcatggtatgatttcaaactaagcaatcatataagagaatatagtgtatacctatgaagcaccgacaccgacacggacaccggacacgacacggacacggacacgtggatacctgtaatgtccaaaatatagaacgtaatacgggtgtcgtgtcggtgtcggacactgacacggacgcgtgtcggacaccggacacggcaaagggctgaagtgtccgtgcttcataggtgtatacatttgagactctcatccaatcaaaatctacataaatttaatgacttttataatacttaccttaaaagtcatgtaaaatatgattttctgaccgatgataatgtaaaattatttacaatcaaagtacatataaatttggtttatcatatttttgttcaatctcgaatcaaaatctgagaggtgaaaaatgcatatcatgcagtatctgccaaagagcccactgaagcgctataccaaatctggtgaacaatatgtcaagcttttggttggggacagatcatggagggttaaagtgacctattgtcgaaataaaacattgagttactttactggagattggctagtttttgcaaaggaaaatgatttaaaagaaggagatgcttgcttgttccaacttctaagcaatggtga

SEQ ID NO: 10473 - DNA, 1078 bp, Glycine max; identical to SEQ ID NO: 10472
  Gm_smallRNAprecursor_3306

SEQ ID NO: 10474 - DNA, 1079 bp, Glycine max
  Gm_smallRNAprecursor_3307
gatggaacatcccattttcatgtattcatctgtgatatgagtaccatggaaatagagtaccctgtcaacaaagcaaatcacaaaagaccaagcattaatagtgaagaaagtcaaccacataagacacagaaaacagatgaaaatatgaacaagagtaattccaatttgcaggacactgacattcataaagaagccagagaccacaaaggcaagattctagattcctaatgtatttatttaattgtcagatttttagccacagaattagaagaattattataaagaatttagcttttcttatggttgataattttccctcttttaggtaagggaaacatggaagggtcatccattagtaactgtggaaatcatgaagcagctggaaatacttcattcaccgtgataatgaaatcaagctacgtaagtaagcggatcatggtatgatttcaaactaagcaatcatataagagaatatagtgtatacctatgaagcaccgacaccgacacggacaccggacacgacacggacacggacacgtggatacctgtaatgtccaaaatatagaacgtaatacgggtgtcgtgtcggtgtcggacactgacacggacgcgtgtcggacaccggacacggcaaagggctgaagtgtccgtgcttcataggtgtatacatttgagactctcatccaatcaaaatctacataaatttaatgacttttataatacttaccttaaaagtcatgtaaaatatgattttctgaccgatgataatgtaaaattatttacaatcaaagtacatataaatttggtttatcatatttttgttcaatctcgaatcaaaatctgagaggtgaaaaatgcatatcatgcagtatctgccaaagagcccactgaagcgctataccaaatctggtgaacaatatgtcaagcttttggttggggacagatcatggagggttaaagtgacctattgtcgaaataaaacattgagttactttactggagattggctagtttttgcaaaggaaaatgatttaaaagaaggagatgcttgcttgttccaacttctaagcaatggtgat

SEQ ID NO: 10475 - DNA, 1079 bp, Glycine max; identical to SEQ ID NO: 10474
  Gm_smallRNAprecursor_3308

SEQ ID NO: 10476 - DNA, 1080 bp, Glycine max
  Gm_smallRNAprecursor_3309
gatggaacatcccattttcatgtattcatctgtgatatgagtaccatggaaatagagtaccctgtcaacaaagcaaatcacaaaagaccaagcattaatagtgaagaaagtcaaccacataagacacagaaaacagatgaaaatatgaacaagagtaattccaatttgcaggacactgacattcataaagaagccagagaccacaaaggcaagattctagattcctaatgtatttatttaattgtcagatttttagccacagaattagaagaattattataaagaatttagcttttcttatggttgataattttccctcttttaggtaagggaaacatggaagggtcatccattagtaactgtggaaatcatgaagcagctggaaatacttcattcaccgtgataatgaaatcaagctacgtaagtaagcggatcatggtatgatttcaaactaagcaatcatataagagaatatagtgtatacctatgaagcaccgacaccgacacggacaccggacacgacacggacacggacacgtggatacctgtaatgtccaaaatatagaacgtaatacgggtgtcgtgtcggtgtcggacactgacacggacgcgtgtcggacaccggacacggcaaagggctgaagtgtccgtgcttcataggtgtatacatttgagactctcatccaatcaaaatctacataaatttaatgacttttataatacttaccttaaaagtcatgtaaaatatgattttctgaccgatgataatgtaaaattatttacaatcaaagtacatataaatttggtttatcatatttttgttcaatctcgaatcaaaatctgagaggtgaaaaatgcatatcatgcagtatctgccaaagagcccactgaagcgctataccaaatctggtgaacaatatgtcaagcttttggttggggacagatcatggagggttaaagtgacctattgtcgaaataaaacattgagttactttactggagattggctagtttttgcaaaggaaaatgatttaaaagaaggagatgcttgcttgttccaacttctaagcaatggtgatg

SEQ ID NO: 10477 - DNA, 1080 bp, Glycine max; identical to SEQ ID NO: 10476
  Gm_smallRNAprecursor_3310

SEQ ID NO: 10478 - DNA, 1101 bp, Glycine max
  Gm_smallRNAprecursor_3311
gatggaacatcccattttcatgtattcatctgtgatatgagtaccatggaaatagagtaccctgtcaacaaagcaaatcacaaaagaccaagcattaatagtgaagaaagtcaaccacataagacacagaaaacagatgaaaatatgaacaagagtaattccaatttgcaggacactgacattcataaagaagccagagaccacaaaggcaagattctagattcctaatgtatttatttaattgtcagatttttagccacagaattagaagaattattataaagaatttagcttttcttatggttgataattttccctcttttaggtaagggaaacatggaagggtcatccattagtaactgtggaaatcatgaagcagctggaaatacttcattcaccgtgataatgaaatcaagctacgtaagtaagcggatcatggtatgatttcaaactaagcaatcatataagagaatatagtgtatacctatgaagcaccgacaccgacacggacaccggacacgacacggacacggacacgtggatacctgtaatgtccaaaatatagaacgtaatacgggtgtcgtgtcggtgtcggacactgacacggacgcgtgtcggacaccggacacggcaaagggctgaagtgtccgtgcttcataggtgtatacatttgagactctcatccaatcaaaatctacataaatttaatgacttttataatacttaccttaaaagtcatgtaaaatatgattttctgaccgatgataatgtaaaattatttacaatcaaagtacatataaatttggtttatcatatttttgttcaatctcgaatcaaaatctgagaggtgaaaaatgcatatcatgcagtatctgccaaagagcccactgaagcgctataccaaatctggtgaacaatatgtcaagcttttggttggggacagatcatggagggttaaagtgacctattgtcgaaataaaacattgagttactttactggagattggctagtttttgcaaaggaaaatgatttaaaagaaggagatgcttgcttgttccaacttctaagcaatggtgatggcatcgtgatgaaggtttcta

SEQ ID NO: 10479 - DNA, 1101 bp, Glycine max; identical to SEQ ID NO: 10478
  Gm_smallRNAprecursor_3312

SEQ ID NO: 10480 - DNA, 1112 bp, Glycine max
  Gm_smallRNAprecursor_3313
gatggaacatcccattttcatgtattcatctgtgatatgagtaccatggaaatagagtaccctgtcaacaaagcaaatcacaaaagaccaagcattaatagtgaagaaagtcaaccacataagacacagaaaacagatgaaaatatgaacaagagtaattccaatttgcaggacactgacattcataaagaagccagagaccacaaaggcaagattctagattcctaatgtatttatttaattgtcagatttttagccacagaattagaagaattattataaagaatttagcttttcttatggttgataattttccctcttttaggtaagggaaacatggaagggtcatccattagtaactgtggaaatcatgaagcagctggaaatacttcattcaccgtgataatgaaatcaagctacgtaagtaagcggatcatggtatgatttcaaactaagcaatcatataagagaatatagtgtatacctatgaagcaccgacaccgacacggacaccggacacgacacggacacggacacgtggatacctgtaatgtccaaaatatagaacgtaatacgggtgtcgtgtcggtgtcggacactgacacggacgcgtgtcggacaccggacacggcaaagggctgaagtgtccgtgcttcataggtgtatacatttgagactctcatccaatcaaaatctacataaatttaatgacttttataatacttaccttaaaagtcatgtaaaatatgattttctgaccgatgataatgtaaaattatttacaatcaaagtacatataaatttggtttatcatatttttgttcaatctcgaatcaaaatctgagaggtgaaaaatgcatatcatgcagtatctgccaaagagcccactgaagcgctataccaaatctggtgaacaatatgtcaagcttttggttggggacagatcatggagggttaaagtgacctattgtcgaaataaaacattgagttactttactggagattggctagtttttgcaaaggaaaatgatttaaaagaaggagatgcttgcttgttccaacttctaagcaatggtgatggcatcgtgatgaaggtttctatttccagacgg

SEQ ID NO: 10481 - DNA, 1112 bp, Glycine max; identical to SEQ ID NO: 10480
  Gm_smallRNAprecursor_3314

SEQ ID NO: 10482 - DNA, 1113 bp, Glycine max
  Gm_smallRNAprecursor_3315
gatggaacatcccattttcatgtattcatctgtgatatgagtaccatggaaatagagtaccctgtcaacaaagcaaatcacaaaagaccaagcattaatagtgaagaaagtcaaccacataagacacagaaaacagatgaaaatatgaacaagagtaattccaatttgcaggacactgacattcataaagaagccagagaccacaaaggcaagattctagattcctaatgtatttatttaattgtcagatttttagccacagaattagaagaattattataaagaatttagcttttcttatggttgataattttccctcttttaggtaagggaaacatggaagggtcatccattagtaactgtggaaatcatgaagcagctggaaatacttcattcaccgtgataatgaaatcaagctacgtaagtaagcggatcatggtatgatttcaaactaagcaatcatataagagaatatagtgtatacctatgaagcaccgacaccgacacggacaccggacacgacacggacacggacacgtggatacctgtaatgtccaaaatatagaacgtaatacgggtgtcgtgtcggtgtcggacactgacacggacgcgtgtcggacaccggacacggcaaagggctgaagtgtccgtgcttcataggtgtatacatttgagactctcatccaatcaaaatctacataaatttaatgacttttataatacttaccttaaaagtcatgtaaaatatgattttctgaccgatgataatgtaaaattatttacaatcaaagtacatataaatttggtttatcatatttttgttcaatctcgaatcaaaatctgagaggtgaaaaatgcatatcatgcagtatctgccaaagagcccactgaagcgctataccaaatctggtgaacaatatgtcaagcttttggttggggacagatcatggagggttaaagtgacctattgtcgaaataaaacattgagttactttactggagattggctagtttttgcaaaggaaaatgatttaaaagaaggagatgcttgcttgttccaacttctaagcaatggtgatggcatcgtgatgaaggtttctatttccagacggg

SEQ ID NO: 10483 - DNA, 1113 bp, Glycine max; identical to SEQ ID NO: 10482
  Gm_smallRNAprecursor_3316

SEQ ID NO: 10484 - DNA, 1113 bp, Glycine max; identical to SEQ ID NO: 10482
  Gm_smallRNAprecursor_3317

SEQ ID NO: 10485 - DNA, 1113 bp, Glycine max; identical to SEQ ID NO: 10482
  Gm_smallRNAprecursor_3318

SEQ ID NO: 10486 - DNA, 1114 bp, Glycine max
  Gm_smallRNAprecursor_3319
gatggaacatcccattttcatgtattcatctgtgatatgagtaccatggaaatagagtaccctgtcaacaaagcaaatcacaaaagaccaagcattaatagtgaagaaagtcaaccacataagacacagaaaacagatgaaaatatgaacaagagtaattccaatttgcaggacactgacattcataaagaagccagagaccacaaaggcaagattctagattcctaatgtatttatttaattgtcagatttttagccacagaattagaagaattattataaagaatttagcttttcttatggttgataattttccctcttttaggtaagggaaacatggaagggtcatccattagtaactgtggaaatcatgaagcagctggaaatacttcattcaccgtgataatgaaatcaagctacgtaagtaagcggatcatggtatgatttcaaactaagcaatcatataagagaatatagtgtatacctatgaagcaccgacaccgacacggacaccggacacgacacggacacggacacgtggatacctgtaatgtccaaaatatagaacgtaatacgggtgtcgtgtcggtgtcggacactgacacggacgcgtgtcggacaccggacacggcaaagggctgaagtgtccgtgcttcataggtgtatacatttgagactctcatccaatcaaaatctacataaatttaatgacttttataatacttaccttaaaagtcatgtaaaatatgattttctgaccgatgataatgtaaaattatttacaatcaaagtacatataaatttggtttatcatatttttgttcaatctcgaatcaaaatctgagaggtgaaaaatgcatatcatgcagtatctgccaaagagcccactgaagcgctataccaaatctggtgaacaatatgtcaagcttttggttggggacagatcatggagggttaaagtgacctattgtcgaaataaaacattgagttactttactggagattggctagtttttgcaaaggaaaatgatttaaaagaaggagatgcttgcttgttccaacttctaagcaatggtgatggcatcgtgatgaaggtttctatttccagacgggt

SEQ ID NO: 10487 - DNA, 1114 bp, Glycine max; identical to SEQ ID NO: 10486
  Gm_smallRNAprecursor_3320

SEQ ID NO: 10488 - DNA, 1115 bp, Glycine max
  Gm_smallRNAprecursor_3321
gatggaacatcccattttcatgtattcatctgtgatatgagtaccatggaaatagagtaccctgtcaacaaagcaaatcacaaaagaccaagcattaatagtgaagaaagtcaaccacataagacacagaaaacagatgaaaatatgaacaagagtaattccaatttgcaggacactgacattcataaagaagccagagaccacaaaggcaagattctagattcctaatgtatttatttaattgtcagatttttagccacagaattagaagaattattataaagaatttagcttttcttatggttgataattttccctcttttaggtaagggaaacatggaagggtcatccattagtaactgtggaaatcatgaagcagctggaaatacttcattcaccgtgataatgaaatcaagctacgtaagtaagcggatcatggtatgatttcaaactaagcaatcatataagagaatatagtgtatacctatgaagcaccgacaccgacacggacaccggacacgacacggacacggacacgtggatacctgtaatgtccaaaatatagaacgtaatacgggtgtcgtgtcggtgtcggacactgacacggacgcgtgtcggacaccggacacggcaaagggctgaagtgtccgtgcttcataggtgtatacatttgagactctcatccaatcaaaatctacataaatttaatgacttttataatacttaccttaaaagtcatgtaaaatatgattttctgaccgatgataatgtaaaattatttacaatcaaagtacatataaatttggtttatcatatttttgttcaatctcgaatcaaaatctgagaggtgaaaaatgcatatcatgcagtatctgccaaagagcccactgaagcgctataccaaatctggtgaacaatatgtcaagcttttggttggggacagatcatggagggttaaagtgacctattgtcgaaataaaacattgagttactttactggagattggctagtttttgcaaaggaaaatgatttaaaagaaggagatgcttgcttgttccaacttctaagcaatggtgatggcatcgtgatgaaggtttctatttccagacgggtt

SEQ ID NO: 10489 - DNA, 1115 bp, Glycine max; identical to SEQ ID NO: 10488
  Gm_smallRNAprecursor_3322

SEQ ID NO: 10490 - DNA, 1116 bp, Glycine max
  Gm_smallRNAprecursor_3323
gatggaacatcccattttcatgtattcatctgtgatatgagtaccatggaaatagagtaccctgtcaacaaagcaaatcacaaaagaccaagcattaatagtgaagaaagtcaaccacataagacacagaaaacagatgaaaatatgaacaagagtaattccaatttgcaggacactgacattcataaagaagccagagaccacaaaggcaagattctagattcctaatgtatttatttaattgtcagatttttagccacagaattagaagaattattataaagaatttagcttttcttatggttgataattttccctcttttaggtaagggaaacatggaagggtcatccattagtaactgtggaaatcatgaagcagctggaaatacttcattcaccgtgataatgaaatcaagctacgtaagtaagcggatcatggtatgatttcaaactaagcaatcatataagagaatatagtgtatacctatgaagcaccgacaccgacacggacaccggacacgacacggacacggacacgtggatacctgtaatgtccaaaatatagaacgtaatacgggtgtcgtgtcggtgtcggacactgacacggacgcgtgtcggacaccggacacggcaaagggctgaagtgtccgtgcttcataggtgtatacatttgagactctcatccaatcaaaatctacataaatttaatgacttttataatacttaccttaaaagtcatgtaaaatatgattttctgaccgatgataatgtaaaattatttacaatcaaagtacatataaatttggtttatcatatttttgttcaatctcgaatcaaaatctgagaggtgaaaaatgcatatcatgcagtatctgccaaagagcccactgaagcgctataccaaatctggtgaacaatatgtcaagcttttggttggggacagatcatggagggttaaagtgacctattgtcgaaataaaacattgagttactttactggagattggctagtttttgcaaaggaaaatgatttaaaagaaggagatgcttgcttgttccaacttctaagcaatggtgatggcatcgtgatgaaggtttctatttccagacgggttt

SEQ ID NO: 10491 - DNA, 1116 bp, Glycine max; identical to SEQ ID NO: 10490
  Gm_smallRNAprecursor_3324

SEQ ID NO: 10492 - DNA, 1076 bp, Glycine max
  Gm_smallRNAprecursor_3325
atggaacatcccattttcatgtattcatctgtgatatgagtaccatggaaatagagtaccctgtcaacaaagcaaatcacaaaagaccaagcattaatagtgaagaaagtcaaccacataagacacagaaaacagatgaaaatatgaacaagagtaattccaatttgcaggacactgacattcataaagaagccagagaccacaaaggcaagattctagattcctaatgtatttatttaattgtcagatttttagccacagaattagaagaattattataaagaatttagcttttcttatggttgataattttccctcttttaggtaagggaaacatggaagggtcatccattagtaactgtggaaatcatgaagcagctggaaatacttcattcaccgtgataatgaaatcaagctacgtaagtaagcggatcatggtatgatttcaaactaagcaatcatataagagaatatagtgtatacctatgaagcaccgacaccgacacggacaccggacacgacacggacacggacacgtggatacctgtaatgtccaaaatatagaacgtaatacgggtgtcgtgtcggtgtcggacactgacacggacgcgtgtcggacaccggacacggcaaagggctgaagtgtccgtgcttcataggtgtatacatttgagactctcatccaatcaaaatctacataaatttaatgacttttataatacttaccttaaaagtcatgtaaaatatgattttctgaccgatgataatgtaaaattatttacaatcaaagtacatataaatttggtttatcatatttttgttcaatctcgaatcaaaatctgagaggtgaaaaatgcatatcatgcagtatctgccaaagagcccactgaagcgctataccaaatctggtgaacaatatgtcaagcttttggttggggacagatcatggagggttaaagtgacctattgtcgaaataaaacattgagttactttactggagattggctagtttttgcaaaggaaaatgatttaaaagaaggagatgcttgcttgttccaacttctaagcaatggtg

SEQ ID NO: 10493 - DNA, 1076 bp, Glycine max; identical to SEQ ID NO: 10492
  Gm_smallRNAprecursor_3326

SEQ ID NO: 10494 - DNA, 1076 bp, Glycine max; identical to SEQ ID NO: 10492
  Gm_smallRNAprecursor_3327

SEQ ID NO: 10495 - DNA, 1076 bp, Glycine max; identical to SEQ ID NO: 10492
  Gm_smallRNAprecursor_3328

SEQ ID NO: 10496 - DNA, 1077 bp, Glycine max
  Gm_smallRNAprecursor_3329
atggaacatcccattttcatgtattcatctgtgatatgagtaccatggaaatagagtaccctgtcaacaaagcaaatcacaaaagaccaagcattaatagtgaagaaagtcaaccacataagacacagaaaacagatgaaaatatgaacaagagtaattccaatttgcaggacactgacattcataaagaagccagagaccacaaaggcaagattctagattcctaatgtatttatttaattgtcagatttttagccacagaattagaagaattattataaagaatttagcttttcttatggttgataattttccctcttttaggtaagggaaacatggaagggtcatccattagtaactgtggaaatcatgaagcagctggaaatacttcattcaccgtgataatgaaatcaagctacgtaagtaagcggatcatggtatgatttcaaactaagcaatcatataagagaatatagtgtatacctatgaagcaccgacaccgacacggacaccggacacgacacggacacggacacgtggatacctgtaatgtccaaaatatagaacgtaatacgggtgtcgtgtcggtgtcggacactgacacggacgcgtgtcggacaccggacacggcaaagggctgaagtgtccgtgcttcataggtgtatacatttgagactctcatccaatcaaaatctacataaatttaatgacttttataatacttaccttaaaagtcatgtaaaatatgattttctgaccgatgataatgtaaaattatttacaatcaaagtacatataaatttggtttatcatatttttgttcaatctcgaatcaaaatctgagaggtgaaaaatgcatatcatgcagtatctgccaaagagcccactgaagcgctataccaaatctggtgaacaatatgtcaagcttttggttggggacagatcatggagggttaaagtgacctattgtcgaaataaaacattgagttactttactggagattggctagtttttgcaaaggaaaatgatttaaaagaaggagatgcttgcttgttccaacttctaagcaatggtga

SEQ ID NO: 10497 - DNA, 1077 bp, Glycine max; identical to SEQ ID NO: 10496
  Gm_smallRNAprecursor_3330

SEQ ID NO: 10498 - DNA, 1078 bp, Glycine max
  Gm_smallRNAprecursor_3331
atggaacatcccattttcatgtattcatctgtgatatgagtaccatggaaatagagtaccctgtcaacaaagcaaatcacaaaagaccaagcattaatagtgaagaaagtcaaccacataagacacagaaaacagatgaaaatatgaacaagagtaattccaatttgcaggacactgacattcataaagaagccagagaccacaaaggcaagattctagattcctaatgtatttatttaattgtcagatttttagccacagaattagaagaattattataaagaatttagcttttcttatggttgataattttccctcttttaggtaagggaaacatggaagggtcatccattagtaactgtggaaatcatgaagcagctggaaatacttcattcaccgtgataatgaaatcaagctacgtaagtaagcggatcatggtatgatttcaaactaagcaatcatataagagaatatagtgtatacctatgaagcaccgacaccgacacggacaccggacacgacacggacacggacacgtggatacctgtaatgtccaaaatatagaacgtaatacgggtgtcgtgtcggtgtcggacactgacacggacgcgtgtcggacaccggacacggcaaagggctgaagtgtccgtgcttcataggtgtatacatttgagactctcatccaatcaaaatctacataaatttaatgacttttataatacttaccttaaaagtcatgtaaaatatgattttctgaccgatgataatgtaaaattatttacaatcaaagtacatataaatttggtttatcatatttttgttcaatctcgaatcaaaatctgagaggtgaaaaatgcatatcatgcagtatctgccaaagagcccactgaagcgctataccaaatctggtgaacaatatgtcaagcttttggttggggacagatcatggagggttaaagtgacctattgtcgaaataaaacattgagttactttactggagattggctagtttttgcaaaggaaaatgatttaaaagaaggagatgcttgcttgttccaacttctaagcaatggtgat

SEQ ID NO: 10499 - DNA, 1033 bp, Glycine max
  Gm_smallRNAprecursor_3332
aaatcacaaaagaccaagcattaatagtgaagaaagtcaaccacataagacacagaaaacagatgaaaatatgaacaagagtaattccaatttgcaggacactgacattcataaagaagccagagaccacaaaggcaagattctagattcctaatgtatttatttaattgtcagatttttagccacagaattagaagaattattataaagaatttagcttttcttatggttgataattttccctcttttaggtaagggaaacatggaagggtcatccattagtaactgtggaaatcatgaagcagctggaaatacttcattcaccgtgataatgaaatcaagctacgtaagtaagcggatcatggtatgatttcaaactaagcaatcatataagagaatatagtgtatacctatgaagcaccgacaccgacacggacaccggacacgacacggacacggacacgtggatacctgtaatgtccaaaatatagaacgtaatacgggtgtcgtgtcggtgtcggacactgacacggacgcgtgtcggacaccggacacggcaaagggctgaagtgtccgtgcttcataggtgtatacatttgagactctcatccaatcaaaatctacataaatttaatgacttttataatacttaccttaaaagtcatgtaaaatatgattttctgaccgatgataatgtaaaattatttacaatcaaagtacatataaatttggtttatcatatttttgttcaatctcgaatcaaaatctgagaggtgaaaaatgcatatcatgcagtatctgccaaagagcccactgaagcgctataccaaatctggtgaacaatatgtcaagcttttggttggggacagatcatggagggttaaagtgacctattgtcgaaataaaacattgagttactttactggagattggctagtttttgcaaaggaaaatgatttaaaagaaggagatgcttgcttgttccaacttctaagcaatggtgatggcatcgtgatgaaggtttctatttcca

SEQ ID NO: 10500 - DNA, 1038 bp, Glycine max
  Gm_smallRNAprecursor_3333
cacaaaagaccaagcattaatagtgaagaaagtcaaccacataagacacagaaaacagatgaaaatatgaacaagagtaattccaatttgcaggacactgacattcataaagaagccagagaccacaaaggcaagattctagattcctaatgtatttatttaattgtcagatttttagccacagaattagaagaattattataaagaatttagcttttcttatggttgataattttccctcttttaggtaagggaaacatggaagggtcatccattagtaactgtggaaatcatgaagcagctggaaatacttcattcaccgtgataatgaaatcaagctacgtaagtaagcggatcatggtatgatttcaaactaagcaatcatataagagaatatagtgtatacctatgaagcaccgacaccgacacggacaccggacacgacacggacacggacacgtggatacctgtaatgtccaaaatatagaacgtaatacgggtgtcgtgtcggtgtcggacactgacacggacgcgtgtcggacaccggacacggcaaagggctgaagtgtccgtgcttcataggtgtatacatttgagactctcatccaatcaaaatctacataaatttaatgacttttataatacttaccttaaaagtcatgtaaaatatgattttctgaccgatgataatgtaaaattatttacaatcaaagtacatataaatttggtttatcatatttttgttcaatctcgaatcaaaatctgagaggtgaaaaatgcatatcatgcagtatctgccaaagagcccactgaagcgctataccaaatctggtgaacaatatgtcaagcttttggttggggacagatcatggagggttaaagtgacctattgtcgaaataaaacattgagttactttactggagattggctagtttttgcaaaggaaaatgatttaaaagaaggagatgcttgcttgttccaacttctaagcaatggtgatggcatcgtgatgaaggtttctatttccagacgggttt

SEQ ID NO: 10501 - DNA, 1034 bp, Glycine max
  Gm_smallRNAprecursor_3334
acaaaagaccaagcattaatagtgaagaaagtcaaccacataagacacagaaaacagatgaaaatatgaacaagagtaattccaatttgcaggacactgacattcataaagaagccagagaccacaaaggcaagattctagattcctaatgtatttatttaattgtcagatttttagccacagaattagaagaattattataaagaatttagcttttcttatggttgataattttccctcttttaggtaagggaaacatggaagggtcatccattagtaactgtggaaatcatgaagcagctggaaatacttcattcaccgtgataatgaaatcaagctacgtaagtaagcggatcatggtatgatttcaaactaagcaatcatataagagaatatagtgtatacctatgaagcaccgacaccgacacggacaccggacacgacacggacacggacacgtggatacctgtaatgtccaaaatatagaacgtaatacgggtgtcgtgtcggtgtcggacactgacacggacgcgtgtcggacaccggacacggcaaagggctgaagtgtccgtgcttcataggtgtatacatttgagactctcatccaatcaaaatctacataaatttaatgacttttataatacttaccttaaaagtcatgtaaaatatgattttctgaccgatgataatgtaaaattatttacaatcaaagtacatataaatttggtttatcatatttttgttcaatctcgaatcaaaatctgagaggtgaaaaatgcatatcatgcagtatctgccaaagagcccactgaagcgctataccaaatctggtgaacaatatgtcaagcttttggttggggacagatcatggagggttaaagtgacctattgtcgaaataaaacattgagttactttactggagattggctagtttttgcaaaggaaaatgatttaaaagaaggagatgcttgcttgttccaacttctaagcaatggtgatggcatcgtgatgaaggtttctatttccagacggg

SEQ ID NO: 10502 - DNA, 1036 bp, Glycine max
  Gm_smallRNAprecursor_3335
acaaaagaccaagcattaatagtgaagaaagtcaaccacataagacacagaaaacagatgaaaatatgaacaagagtaattccaatttgcaggacactgacattcataaagaagccagagaccacaaaggcaagattctagattcctaatgtatttatttaattgtcagatttttagccacagaattagaagaattattataaagaatttagcttttcttatggttgataattttccctcttttaggtaagggaaacatggaagggtcatccattagtaactgtggaaatcatgaagcagctggaaatacttcattcaccgtgataatgaaatcaagctacgtaagtaagcggatcatggtatgatttcaaactaagcaatcatataagagaatatagtgtatacctatgaagcaccgacaccgacacggacaccggacacgacacggacacggacacgtggatacctgtaatgtccaaaatatagaacgtaatacgggtgtcgtgtcggtgtcggacactgacacggacgcgtgtcggacaccggacacggcaaagggctgaagtgtccgtgcttcataggtgtatacatttgagactctcatccaatcaaaatctacataaatttaatgacttttataatacttaccttaaaagtcatgtaaaatatgattttctgaccgatgataatgtaaaattatttacaatcaaagtacatataaatttggtttatcatatttttgttcaatctcgaatcaaaatctgagaggtgaaaaatgcatatcatgcagtatctgccaaagagcccactgaagcgctataccaaatctggtgaacaatatgtcaagcttttggttggggacagatcatggagggttaaagtgacctattgtcgaaataaaacattgagttactttactggagattggctagtttttgcaaaggaaaatgatttaaaagaaggagatgcttgcttgttccaacttctaagcaatggtgatggcatcgtgatgaaggtttctatttccagacgggtt

SEQ ID NO: 10503 - DNA, 1037 bp, Glycine max
  Gm_smallRNAprecursor_3336
acaaaagaccaagcattaatagtgaagaaagtcaaccacataagacacagaaaacagatgaaaatatgaacaagagtaattccaatttgcaggacactgacattcataaagaagccagagaccacaaaggcaagattctagattcctaatgtatttatttaattgtcagatttttagccacagaattagaagaattattataaagaatttagcttttcttatggttgataattttccctcttttaggtaagggaaacatggaagggtcatccattagtaactgtggaaatcatgaagcagctggaaatacttcattcaccgtgataatgaaatcaagctacgtaagtaagcggatcatggtatgatttcaaactaagcaatcatataagagaatatagtgtatacctatgaagcaccgacaccgacacggacaccggacacgacacggacacggacacgtggatacctgtaatgtccaaaatatagaacgtaatacgggtgtcgtgtcggtgtcggacactgacacggacgcgtgtcggacaccggacacggcaaagggctgaagtgtccgtgcttcataggtgtatacatttgagactctcatccaatcaaaatctacataaatttaatgacttttataatacttaccttaaaagtcatgtaaaatatgattttctgaccgatgataatgtaaaattatttacaatcaaagtacatataaatttggtttatcatatttttgttcaatctcgaatcaaaatctgagaggtgaaaaatgcatatcatgcagtatctgccaaagagcccactgaagcgctataccaaatctggtgaacaatatgtcaagcttttggttggggacagatcatggagggttaaagtgacctattgtcgaaataaaacattgagttactttactggagattggctagtttttgcaaaggaaaatgatttaaaagaaggagatgcttgcttgttccaacttctaagcaatggtgatggcatcgtgatgaaggtttctatttccagacgggttt

SEQ ID NO: 10504 - DNA, 1211 bp, Glycine max
  Gm_smallRNAprecursor_3337
ctgaaatgtactagcttggtggctgaacaaaagcaaacccattttggagagtaaccagctaagtatgaaagttccaatctcgagtagttgcattgatgttaaagatcaactggcaagcttaaaggcatcaatgaagagtccataagtgaaacccattttaaagttgttgagaagagcaactaggaatgtaactttaggtcgactttagtagaactttgtcggcaaatttctcaaactaggttccttttagaaactaattcccaaaagggggctgttttgaaacttttttcaggggggtttgttttttagggggactcgccagtgaggttggcgagttggacacgtggcggcgcctggtggacttgccagtggagttggcgagttgctgtccacgtggcgggtcccgccactcgtactggcgaaatgtttttttacagaaattttttttttaacttcaaacgggtataacttttgataggaatgtccgtttgaggcctataatatgtcaaaatgctcgaaattgaatgaagaatcccttggcaaatccccgaagggatttgatcaactcattttcccaaaaaatggatttaagattcaaccacccattttttaatcttaaatcctatttttgagctacttagaggcattttttgggaaaatgagttgtccaaatctccttcgagaatttgccaaagggattcgtcattcaatttcgagcattttgacatattatgggcctcaaacggacattcctatcaaaagttatacccgtttgaagttaaaaaaaaaatttccgtaaaaaaacatttcgccagtacgagtggcgggacccgccacgtggacagcaactcgccaactccactggcgagtccaccaggcgccgccacgtgtccaactcgccaaccccattggcgagtccccctcaaaaacagaccccccctgaaaaaagtttcaaaacagctcccttttaggaattagtttctaaaaggaacatagtttgaaaaatttgccgaactttgtcacatattctgtgagaagaacacataacgctgcagcaataacatcattgactcctagagctccaaaagagagattgtttgtgccacataaaatccacccaacaatgagattccaccaaacagagccctgtgagaatggcttctaaagtaattaattccttgagagctcaggcacaagtctaataatgtcca

SEQ ID NO: 10505 - DNA, 1211 bp, Glycine max; identical to SEQ ID NO: 10504
  Gm_smallRNAprecursor_3338

SEQ ID NO: 10506 - DNA, 1212 bp, Glycine max
  Gm_smallRNAprecursor_3339
ctgaaatgtactagcttggtggctgaacaaaagcaaacccattttggagagtaaccagctaagtatgaaagttccaatctcgagtagttgcattgatgttaaagatcaactggcaagcttaaaggcatcaatgaagagtccataagtgaaacccattttaaagttgttgagaagagcaactaggaatgtaactttaggtcgactttagtagaactttgtcggcaaatttctcaaactaggttccttttagaaactaattcccaaaagggggctgttttgaaacttttttcaggggggtttgttttttagggggactcgccagtgaggttggcgagttggacacgtggcggcgcctggtggacttgccagtggagttggcgagttgctgtccacgtggcgggtcccgccactcgtactggcgaaatgtttttttacagaaattttttttttaacttcaaacgggtataacttttgataggaatgtccgtttgaggcctataatatgtcaaaatgctcgaaattgaatgaagaatcccttggcaaatccccgaagggatttgatcaactcattttcccaaaaaatggatttaagattcaaccacccattttttaatcttaaatcctatttttgagctacttagaggcattttttgggaaaatgagttgtccaaatctccttcgagaatttgccaaagggattcgtcattcaatttcgagcattttgacatattatgggcctcaaacggacattcctatcaaaagttatacccgtttgaagttaaaaaaaaaatttccgtaaaaaaacatttcgccagtacgagtggcgggacccgccacgtggacagcaactcgccaactccactggcgagtccaccaggcgccgccacgtgtccaactcgccaaccccattggcgagtccccctcaaaaacagaccccccctgaaaaaagtttcaaaacagctcccttttaggaattagtttctaaaaggaacatagtttgaaaaatttgccgaactttgtcacatattctgtgagaagaacacataacgctgcagcaataacatcattgactcctagagctccaaaagagagattgtttgtgccacataaaatccacccaacaatgagattccaccaaacagagccctgtgagaatggcttctaaagtaattaattccttgagagctcaggcacaagtctaataatgtccac

SEQ ID NO: 10507 - DNA, 1212 bp, Glycine max; identical to SEQ ID NO: 10506
  Gm_smallRNAprecursor_3340

SEQ ID NO: 10508 - DNA, 1036 bp, Glycine max
  Gm_smallRNAprecursor_3341
gtccaacaaatcttgattgggctgatttatgtgaggaattattggaagtcagaccacaagaaggtgaaattaaaggtagtatggttaagttaagttggctggctcaccattttgtacaaataaataacgacgacgaagaacaagtacgaaggtttgcccgtgcatggatactgagattcattggaggtgtcttgttcattgacaaaagcagtaacaaagtttcgctaaggtaccttcaatttttacgtgactttgaagaatgtggcacatatgcatggggagctgccgtacttggttttctatatatgtccatcttactacaaatgtgggcatgggaacgatgtccaaccttggctccaaagaggactccttcccaagtagaaaatacaccactggggcacaggttagtcatttttaacagcgtctttcatttcaatagaataaatggttttagacatgtgttaaattttaatctttgtaggtggctgcgacgtggaaaccaacatatcggcaatgatgatgtgagagtttttcgtcgcaagttggatattatgaaacgtcatgaggtaagaacatgctattgtatttgtaaaataaaaaattatatgtgttattttactaaaatgttcacaactatgttgttatatgcagtttgtgtggaagccttacacatcaaccgttatatcattgttgtctcccgtttgttttgtcggaagtctcgcgtggtacgcggtggtgccactaatttgtttccaagttattgagtggcaccaaccggaaagagtattgagacaatttgggatgcagcaaccagttccagagtctccttcacaacccttaaacattcatggcataacattaaaagggaaacatgacgaaaattgggggcaattgttcgccccaatgattcatcaatggaataatcgccatgcatttagggtcgacgcttatccccgacaagaaggcctattgagctttaactcggactacatggtctggtataggcgaaagacaaagatgtttgttgacccacaaa

SEQ ID NO: 10509 - DNA, 1130 bp, Glycine max
  Gm_smallRNAprecursor_3342
ttacaagattggtgctgaccactttggttccgactttgcaatggctcaaaggaaaacccattctcctagtaagaaacttttatcatactattttttttatgtattagtgttataattcagaattctaagttatgctcttggttggtaattggtattgtagcatattggtggcgaatgtttgggtcacaaactccaaatttgcagaagctggctattaagattttgagtttgacttgcagtgcttcaggatgtgaaagaaattggagtgtgtttgagcaagtaattgtgacaaaactctaactatactttttaattttatttaattttgatgatcaagttatatttggagtatatttgagattgaaatcaacatttatttgttatgttgtagattcattccaaaaaaagaaataggcttgagcacaagaggttgcatgatttggtgtttgtcaaatacaaccaacaattgaagcaaagatataatgcaagagatgaaattgatccaatttctcttaatgatattgatgtatgcaatgaatggctcgtgggagagatggatcaagatgatgataatgatgctggaaatgatttggtatttgaagatgatgatgctctaaattgggcaactgtgtatcaggcttcgggggttggagagtgtaggatgtatactaggcggaaaaagcaaaaaacaagtgttgctgctgcccaaacttctaaaaaacaggcaatggttgttggatcttcatcaaggaagcaaaaagcagtccaagaaaatgatgaggatctagatgttcaggagaatattgatgttgaatctgaagaagaagaaatcatggtcaattttgaggcgtctgatggggaagagggagatggagatgctccattaccatatgataacaacgaagatgattatgttgggattggagaagatgattagagtctcaaccttcactttacactttgcattatgtttttatcattttcttattttgaactctttaatgagtttatttggtgttggtacttgattattgtatgaactcatgaaacttttttagtttatttgaatgcaatcctttgtttttttcaatttcaatgagtttatatatatgttttttttttgtgtccgc

SEQ ID NO: 10510 - DNA, 1076 bp, Glycine max
  Gm_smallRNAprecursor_3343
tcaagatgatgataatgatgctggaaatgatttggtatttgaagatgatgatgctctaaattgggcaactgtgtatcaggcttcgggggttggagagtgtaggatgtatactaggcggaaaaagcaaaaaacaagtgttgctgctgcccaaacttctaaaaaacaggcaatggttgttggatcttcatcaaggaagcaaaaagcagtccaagaaaatgatgaggatctagatgttcaggagaatattgatgttgaatctgaagaagaagaaatcatggtcaattttgaggcgtctgatggggaagagggagatggagatgctccattaccatatgataacaacgaagatgattatgttgggattggagaagatgattagagtctcaaccttcactttacactttgcattatgtttttatcattttcttattttgaactctttaatgagtttatttggtgttggtacttgattattgtatgaactcatgaaacttttttagtttatttgaatgcaatcctttgtttttttcaatttcaatgagtttatatatatgttttttttttgtgtccgccatgacatccgccattttccgctacgccatccgccatatttttatggcggatttttgactttccgccatgaaccgtcatccgccattaacaacattgtcattaacttaattggactcaccaaagaacaacaaaaaaggcaaaaaaacactattctggaaaattcaatgcattttttcttaaaactagcaagtaagtcaagactgttaaaaagctaagaggttcccaattattttggtttagtttatctaacattggcaaccttctctgtcatgcacagaagcacggaaaagaacagcctagcttcgaggactaggaacctccataagagagaaggataaggaagaaaacttgtattatttttctgctgtcctctattacatactaagcatcccttatatagaggcactagccaagggtgccgctacgaaaacagaaggtgctagaatgcgaaaagaaaataacagaaaagtggaaaatgatgacaatgcagtgctgcacgatgg

SEQ ID NO: 10511 - DNA, 1083 bp, Glycine max
  Gm_smallRNAprecursor_3344
ctcctatagtacagtacagagaaaataaaaatattataactttatggtgttacttaaactgggttcttgaaacaagatttcaagttgcattcttctataaaacctttgattaggtagattttttttttatgaaaattaattattaataaatttgatagatattttgtgacaacacattagtaacccaaaaaaaatatgaatagagaaaagtaaagaaaaattacaaagtttaagaaaaaagttgagcattttttttgtttaaattaaatacaagtcgttgaaaaacaaaaaatgttccatttgtacagagtagagtatgttgatggagctaactagtcatgcaatagggctttcttgtcatctctgtgttgttgaacgatcaaaactgagccatgaatatcgaagtctgaagaggccaagacatcatcaactgttccaagctattaagcacggacacttcagccctttgctgtgtccggtgtctgacacacgtccgtgtcagtgtccgacaccgacacgacacccgtattacgttctatattttggacattacaggtgtccacacgtgtctgtatccgtgtcgtgtccggtgtccgtgtccgtatcggtgcttcataggttccaagttctggacactcttcccagtcactcatcccaactgtcaacgaactctgtcctctaccaccttttcctactacaaacaaagagtatatgccccctatctctttgagagactccagtgtttgtgctccatccttgacaaacttttccacatggcctatttggccagaagtcacatacgtattgtagaaatcaaccatgaaggtgttgccaatctcattcacagtctcctccctagacaatgacattaagatctctttgtcctcagattctccactctcaatctgttcattctgtgacgaggaactcaacaagaatctaataattgtcaagttgacacgcggactacccgaaatgcgcaggctccacgcaatagcctcgcggtcatcagggccaccaaagaaaagtgttgcaacattttgtatggattcagatgctactagttctgagaagccgggtacc

SEQ ID NO: 10512 - DNA, 1031 bp, Glycine max
  Gm_smallRNAprecursor_3345
gttgtcaaattttattcttagtttgtgaaacttataaatcagaggtgtatggtgatgaattttggacacctgagaggaggagttcaaggcagagtattcggtcaataaagtagaatttggttctgttatttgttttatcttttagcttagtcttatttattgacttggatagtgttcttgaagggatgatatgcaaatcctgtcttcctcttattttcctgcctatgcacaaggataatgaccaccctcatgatgcaatagtgtttctagagtgttataagccatctttttaccaaaagataggcaatctttttagaacggttgtcaacataatcgatctaaaaagttatgactttttataatttgattttttaaaatgaccgtacaatcgatttaaaaattatttttggtccttctaaaaagtcttttttataccgcactcagcacttaaggggaaaagactgaaatatccttgatccgtaagtctttaagttgatccgtaaaagacttacggatcaagttgatccgtaaaagacttacggatcaagttgatccgtaagatttatggatcactctcacaaagtgtaagggtaattttggcattttcaaaaaatgttgggtgcaccagcaatatgttggatgcacctagtaacaccctacatacttttggagccttaaatttagttttatattttttggacttgtcaggctttagtattgggtggccgatcaagtaacttatataaaataaagagaatttgatagatataattaagataagaaaaaaaaaaatcttctactagagaaatagaaatattctttaaaatcagataatattttttctatttacattatttatcaaaaatatagagatattccttaaaatcggatattatttattattagaaaaaaaaaatcatattttttcttatttacattatcttacttacaagaagaattaagatcctattatttaattttacttttataaaagaaacgatcaagctttaaataaactaattctaatccaa

SEQ ID NO: 10513 - DNA, 1041 bp, Glycine max
  Gm_smallRNAprecursor_3346
tgtcaaattttattcttagtttgtgaaacttataaatcagaggtgtatggtgatgaattttggacacctgagaggaggagttcaaggcagagtattcggtcaataaagtagaatttggttctgttatttgttttatcttttagcttagtcttatttattgacttggatagtgttcttgaagggatgatatgcaaatcctgtcttcctcttattttcctgcctatgcacaaggataatgaccaccctcatgatgcaatagtgtttctagagtgttataagccatctttttaccaaaagataggcaatctttttagaacggttgtcaacataatcgatctaaaaagttatgactttttataatttgattttttaaaatgaccgtacaatcgatttaaaaattatttttggtccttctaaaaagtcttttttataccgcactcagcacttaaggggaaaagactgaaatatccttgatccgtaagtctttaagttgatccgtaaaagacttacggatcaagttgatccgtaaaagacttacggatcaagttgatccgtaagatttatggatcactctcacaaagtgtaagggtaattttggcattttcaaaaaatgttgggtgcaccagcaatatgttggatgcacctagtaacaccctacatacttttggagccttaaatttagttttatattttttggacttgtcaggctttagtattgggtggccgatcaagtaacttatataaaataaagagaatttgatagatataattaagataagaaaaaaaaaaatcttctactagagaaatagaaatattctttaaaatcagataatattttttctatttacattatttatcaaaaatatagagatattccttaaaatcggatattatttattattagaaaaaaaaaatcatattttttcttatttacattatcttacttacaagaagaattaagatcctattatttaattttacttttataaaagaaacgatcaagctttaaataaactaattctaatccaacttccttgaaga

SEQ ID NO: 10514 - DNA, 1092 bp, Glycine max
  Gm_smallRNAprecursor_3347
ttacagttcctcaagaactataacatgggatccaggaaacaaaggcaccacggaaaaaacaagagagacgagctcgagctcaaagtcaaatagtgtgaagtccactcaatgttgttaatggcggatggcggttcatggcggaaagtcaaaaatccgccataaaaatatggcggatggcatagcggaaaatggcggatgtcatggcggacacaaaaaaaaaaaaaaacatatatataaactcattgaaattgaaaaaaacaaaggattgcattcaaataaactaaaaaagtttcatgagttcatacaataatcaagtaccaacaccaaataaactcattaaagagttcaaaataagaaaatgataaaaacataatgcaaagtgcaaagtgaaggttgaggctctaatcatcttctccaatcccaacataatcatcttcgttgttatcatatggtaatggagcatctccctctccctcttccccatcagacgcctcaaaattgaccatgatttcttcttcttcagattcaacatcaatattctcctcaacatctagatcctcatcattttcttggattgctttttgcttccttgatgaagatccaacaaccattgcctgttttttagaagtttgggcagcagcaacacttgttttttgctttttccgcctagtatacatcctacactctccaacccccgaagcctgatacacagttgcccaatttagagcatcatcatcttcaaataccaaatcatttccagcatcattatcatcatcttgatccatctctcccacgagccattcattgcatacatcaatatcattaagagaaattggatcaatttcatcttttgcattatatctttgcttcaattgttggttgtatttgacaaacaccaaatcatgcaacctcttgtgctcaagcctatttctttttttggaatgaatctacaacataacaaataaatgttgatttcaatctcaaatatactccaaatataacttgatcatcaaaattaaataaaattaaaaagtatagttagagttttgtcacaattacttgctcaaacacactccaatttctttcacatcc

SEQ ID NO: 10515 - DNA, 1133 bp, Glycine max
  Gm_smallRNAprecursor_3348
gaaaatggcggatgtcatggcggacacaaaaaaaaaaaaaaacatatatataaactcattgaaattgaaaaaaacaaaggattgcattcaaataaactaaaaaagtttcatgagttcatacaataatcaagtaccaacaccaaataaactcattaaagagttcaaaataagaaaatgataaaaacataatgcaaagtgcaaagtgaaggttgaggctctaatcatcttctccaatcccaacataatcatcttcgttgttatcatatggtaatggagcatctccctctccctcttccccatcagacgcctcaaaattgaccatgatttcttcttcttcagattcaacatcaatattctcctcaacatctagatcctcatcattttcttggattgctttttgcttccttgatgaagatccaacaaccattgcctgttttttagaagtttgggcagcagcaacacttgttttttgctttttccgcctagtatacatcctacactctccaacccccgaagcctgatacacagttgcccaatttagagcatcatcatcttcaaataccaaatcatttccagcatcattatcatcatcttgatccatctctcccacgagccattcattgcatacatcaatatcattaagagaaattggatcaatttcatcttttgcattatatctttgcttcaattgttggttgtatttgacaaacaccaaatcatgcaacctcttgtgctcaagcctatttctttttttggaatgaatctacaacataacaaataaatgttgatttcaatctcaaatatactccaaatataacttgatcatcaaaattaaataaaattaaaaagtatagttagagttttgtcacaattacttgctcaaacacactccaatttctttcacatcctgaagcactgcaagtcaaactcaaaatcttaatagccagcttctgcaaatttggagtttgtgacccaaacattcgccaccaatatgctgcaataccaattaccaaccaagagcataacttagaattctgaattctaacactaatacataaaaaaaatagtatgataaaagtttcttactaggagaatgggttttcctttgagccattgcaaagtcggaaccaaag

SEQ ID NO: 10516 - DNA, 1185 bp, Glycine max
  Gm_smallRNAprecursor_3349
ttttgtttgggcaattgatcaagccattcagctgcacttggcttattcgcatgcatatccccaagatgtcgctagtgcatcttcttcgtgtatgcgtaacctgtaaatattcaatcaatctattacgttataaaatttgattgaaaaagtttaacgaataaataaaatagattctcaccagccagcataagtggtttctttaaatgtttgcagtttgagttactgcgaaaaaaaatttgtgcaatgtggcacaggcaaaaaaaatgggacgtgtcctgaaaccataagttacttgggttgttgtaggcacttataattgaggggtgtctgtctgaaatgagagaaatgttaatttgcagagtaacatgtcttctcaaattctttagaaaaaacatgaagctgaagttgtctccccttctataatgacgtaggcaatcgggaagatatggttagcttcatcttgtgcagtagctatcaacaatgtgccagtatacttcctgtaaagccatgtaccatctacttgtactatgtgtttgcaatatgcaaaaccattaatgcatggaccaaatgaccaaaagacacgtttaaacattcttttgtccggtacaatttctcctccctcatacacggattctgtttgagcaacgaccacagtcccgggaacacaagattgcaaagctcccaaaagttttggcagtttggcatatgattcttctcagtttccatgaataatctccaacactctttgctttgctaaccatgtcttcttgtaggatggggtataattcatgaacattttgatctctgcaatcaacgtcttgatggagacggttgggtttgttttgacaattggttggatgatctgtgctatgacgtgtttgtcgagttgtcgatgatcttgtctgagcattgacgcgagacaagtgtgatgacctctgatactcttgataatccatttgttatgcctctttgaattgcatgcacctaagctccatgtacaaccatcttcatgtaatttacacacgaagtttagccttctctggtcagagtaaattgttctgcaatcaaaatgatttctgaagttgtattctttgactgctcgaatacattgtgctttttcatcgaaggtcatgccaacctcgagtgcaccagttggtgattgtacattatgttgctgacttgctg

SEQ ID NO: 10517 - DNA, 1051 bp, Glycine max
  Gm_smallRNAprecursor_3350
agatattttttgggtgaatatatgttttaaaatttgaattttgtataataatatatttattttagtaaatatttattttgtataataatctgaattttaaaatttttaatttaactattttactaaatataattagtttgtttatgttattagatttaattaaaaatgataaaaaaactaaagcttttaacaatttatttatataagaacattatactacgtcatcaataaaatatttaaacaatgacatttgtttaaggaaaaacttaagatgaggatacattaggacaattatttctgctatgatcatgttgccgacaaagttcacatttttttctacttactcgttcattttcgtcttcgtccatctcagtaggaatgcgagttgaaacggaacgaccctttgcagtcctctttctccttggatcaggaccccactgatctccttcatattcttgccacattaattcgtgtgacaataaaccaaaggagttgtcgtagatgtgcaaaatgtgttgtaaagtgaatatcatcggcacataggtcatgagatcaacattgacagatttacaggcagccttgacgtgagaacacgataaatgtttagcctgatattcaccacaatcacacttttggaattgtaatgttactctaaaccttccaggtggtctgggtgtttcaagtggggattgagtctctattataataaaagtgtgattgtgtctatcgaattcatttgcaatgtgtgtattagattcttgttgaccactattcattacatcgaagacgacttcagaatagtgtgagccggagttgatcattgcctgagtttgtcgacctctattagcaaagagttgtgcggtcttgaaataggtctcctcaaccaacgatgacaccgacaaatgtcttgtgtttttgaacatggaattaacaaactccgacaaattggtagtcatatgtccccaacgtttcccctcatcaaagcattgtacccatttttatttgggtaattgatcaagccattcagctgcacttggcttattcgcacgaa

SEQ ID NO: 10518 - DNA, 1234 bp, Glycine max
  Gm_smallRNAprecursor_3351
acagaaagaaacatattgttgatctcccctatgagaaagactttagggaaaaacaaattcccacaaaagctagaccaatccaaatgaatgaagaacttcttcaatactgtcaaaaggaaatcaaggatttgcttgataaaggcctaatccggaaaagcaaaagcccatggtcttgtgcggctttttatgtcaacaaacaatctgagattgagcgtggaacaccccgcttagtcataaattacaaaccactaaatcaagcattacaatggattagatatcctattccaaacaaaaaagatttgcttaatagattaaattctgcaaagatattttcaaaatttgatatgaaatctggattttggcaaatccaaatccaagaatcagataggtacaaaacagcgtttactgtacctttcgggcaatatgaatggaatgtaatgccattcggactgaagaatgccccttcagaatttcaaaaaattatgaatgatatttttaatccctattcaaaatttgtcattgtctacataaatgatgttttaatcttttcccaaaacattgaccagcatttcaaacatctccaaaccttcatccatatcatcaaacaaaatggtttggcagtctccaaatcaaaaatcaatcttttccaaacacgaattcgattccttggtcacaatatttatcaaggtacaatcgttccaatcgaaaggtcaattgagtttgctagcaaattccccaaccaaatcttagacaaaacccagttacaaagatttctaggttgtctaaattacgtaggtgaatttgtcccctacttaaacaatattgtcaagccattgcatgataggctaaagaaaaatccgcctccttggtctgacctccatacccaaacagttaaagaaatcaaagtcaaagtccaatccataaaatgtctatatcttcccattccacaggcattcaaaattgtcgaaactgatgcatcagacatcggttacggtggcatcctcaaacaacaagtacatggtcaagaacatgtcatcgcatatacttcaaaacactggaatcctgcacaattaaagtattcaactgttaaaaaagaagttttagcaattgttttgtgcatttccaaatttcaatctgatttattaaatcaaaaatttttagtaagagttgactgcaaatcagccaaagacattttacagaaggatgtaaaaaaccttgcctcaaaacaaatttt

SEQ ID NO: 10519 - DNA, 1157 bp, Glycine max
  Gm_smallRNAprecursor_3352
cctattccaaacaaaaaagatttgcttaatagattaaattctgcaaagatattttcaaaatttgatatgaaatctggattttggcaaatccaaatccaagaatcagataggtacaaaacagcgtttactgtacctttcgggcaatatgaatggaatgtaatgccattcggactgaagaatgccccttcagaatttcaaaaaattatgaatgatatttttaatccctattcaaaatttgtcattgtctacataaatgatgttttaatcttttcccaaaacattgaccagcatttcaaacatctccaaaccttcatccatatcatcaaacaaaatggtttggcagtctccaaatcaaaaatcaatcttttccaaacacgaattcgattccttggtcacaatatttatcaaggtacaatcgttccaatcgaaaggtcaattgagtttgctagcaaattccccaaccaaatcttagacaaaacccagttacaaagatttctaggttgtctaaattacgtaggtgaatttgtcccctacttaaacaatattgtcaagccattgcatgataggctaaagaaaaatccgcctccttggtctgacctccatacccaaacagttaaagaaatcaaagtcaaagtccaatccataaaatgtctatatcttcccattccacaggcattcaaaattgtcgaaactgatgcatcagacatcggttacggtggcatcctcaaacaacaagtacatggtcaagaacatgtcatcgcatatacttcaaaacactggaatcctgcacaattaaagtattcaactgttaaaaaagaagttttagcaattgttttgtgcatttccaaatttcaatctgatttattaaatcaaaaatttttagtaagagttgactgcaaatcagccaaagacattttacagaaggatgtaaaaaaccttgcctcaaaacaaatttttgcaagatggcaagcaattttaagtgtctttgattttaatatagaatatatcaagggctcttccaactctctacctgactacctcacccgtgaatttttacagaaaattcccgatgcctcttaaggtgtctagttcctccggcagaggaggaagatccagtacaaaaggtaaagaagttctactggctctaccagagccaa

SEQ ID NO: 10520 - DNA, 1038 bp, Glycine max
  Gm_smallRNAprecursor_3353
tacctttcgggcaatatgaatggaatgtaatgccattcggactgaagaatgccccttcagaatttcaaaaaattatgaatgatatttttaatccctattcaaaatttgtcattgtctacataaatgatgttttaatcttttcccaaaacattgaccagcatttcaaacatctccaaaccttcatccatatcatcaaacaaaatggtttggcagtctccaaatcaaaaatcaatcttttccaaacacgaattcgattccttggtcacaatatttatcaaggtacaatcgttccaatcgaaaggtcaattgagtttgctagcaaattccccaaccaaatcttagacaaaacccagttacaaagatttctaggttgtctaaattacgtaggtgaatttgtcccctacttaaacaatattgtcaagccattgcatgataggctaaagaaaaatccgcctccttggtctgacctccatacccaaacagttaaagaaatcaaagtcaaagtccaatccataaaatgtctatatcttcccattccacaggcattcaaaattgtcgaaactgatgcatcagacatcggttacggtggcatcctcaaacaacaagtacatggtcaagaacatgtcatcgcatatacttcaaaacactggaatcctgcacaattaaagtattcaactgttaaaaaagaagttttagcaattgttttgtgcatttccaaatttcaatctgatttattaaatcaaaaatttttagtaagagttgactgcaaatcagccaaagacattttacagaaggatgtaaaaaaccttgcctcaaaacaaatttttgcaagatggcaagcaattttaagtgtctttgattttaatatagaatatatcaagggctcttccaactctctacctgactacctcacccgtgaatttttacagaaaattcccgatgcctcttaaggtgtctagttcctccggcagaggaggaagatccagtacaaaaggtaaagaagttctactggctctaccagagccaataaacaaaagg

SEQ ID NO: 10521 - DNA, 1122 bp, Glycine max
  Gm_smallRNAprecursor_3354
agatataggcctcaccaaaataccaaaattagccaaaaagacctgggcagaaatggcctcagaatcagacgatgattctgaaacagatctgcaaaaacaaatccaaaaagccaaacagaccaaaacggtctgtaaccaaaaaccaagccaatcgttgactcaacaagaatcaacaccgcaacccggtaacagttacatttcaaaaaacaaatttttcaatgttttacaaatggaaccagaatactgggacaagaatcctttcaaagcaaccgccaaagtattttccccgggattccattacaggccaatagccacaaacaaaacccgtaaattctacgaattcatcctaatagatacaaactcagtatctattaaacacttcaaagaccccaaagatccaaatctaaatacccattccacaatccaaatcttgaaagttatgcagccacgacattatggctcaaacttaaaccaacccaaaaaattctctgcaccatttgaccctgcaggatataattattgggattacattgacgcctggaccaatgtgttctggcatcaaaatagtaaattcaagcattcatggctaatttacttcaaaaataatactgcatataattttccaaattggttcctccaatggtggaactacttcggaccaattccccaaatatttccagaagaagtccaacagggattcgaacaattcaacaagctctataatagcaaggaatcacgtattccggcagacttaaagtacttttccaattttgccttgtcatggatcttttcatggcaatacagatacggaaaaactgaaaacaacaagcaatatccaccgttacagagacacacctttgtaaaatggtggtcacaattcgatacttcaaaggctgctccagatcaagtcaagaactggttccagagcaatcctgagttccttaaacctgctgatccggagacatctttgtttctaaatcagaagtcgcaactggcagcattcttagaaagctcaaaatctaaagagagtcttgctcagaatctcaaagaagttctccaactacttcaacaggaagtggaagaagaaccttccaagaaggaagctgaatcatccgagactaa

SEQ ID NO: 10522 - DNA, 1137 bp, Glycine max
  Gm_smallRNAprecursor_3355
taaatacccattccacaatccaaatcttgaaagttatgcagccacgacattatggctcaaacttaaaccaacccaaaaaattctctgcaccatttgaccctgcaggatataattattgggattacattgacgcctggaccaatgtgttctggcatcaaaatagtaaattcaagcattcatggctaatttacttcaaaaataatactgcatataattttccaaattggttcctccaatggtggaactacttcggaccaattccccaaatatttccagaagaagtccaacagggattcgaacaattcaacaagctctataatagcaaggaatcacgtattccggcagacttaaagtacttttccaattttgccttgtcatggatcttttcatggcaatacagatacggaaaaactgaaaacaacaagcaatatccaccgttacagagacacacctttgtaaaatggtggtcacaattcgatacttcaaaggctgctccagatcaagtcaagaactggttccagagcaatcctgagttccttaaacctgctgatccggagacatctttgtttctaaatcagaagtcgcaactggcagcattcttagaaagctcaaaatctaaagagagtcttgctcagaatctcaaagaagttctccaactacttcaacaggaagtggaagaagaaccttccaagaaggaagctgaatcatccgagactaatgatgaccaagaagatgatccattctaccagaatgaagatgactgttttggcatatcattggacgacgattaattagttgtagtaatcatgaattattgtaactaatttgtcagtttcttttaaataatgtaatttgtaaaagttttgtaatagtttcggtaaacactaccgatactgtagaaacagtaaaaattgggtctatttaaaggagtcctcgtcccctttgtgaggcaccctttcagatagtcccagaatcaggtttttagagagagaagctcagcctagggaaaaactctttgtaagcttttctttcggttttaataaatttcaagttctatttttcatatctcccttctcccctcaccgatcctgtgcggctctgccgccgcttcggtttctttgttttcaaaaacctggg

SEQ ID NO: 10523 - DNA, 1121 bp, Glycine max
  Gm_smallRNAprecursor_3356
cattccacaatccaaatcttgaaagttatgcagccacgacattatggctcaaacttaaaccaacccaaaaaattctctgcaccatttgaccctgcaggatataattattgggattacattgacgcctggaccaatgtgttctggcatcaaaatagtaaattcaagcattcatggctaatttacttcaaaaataatactgcatataattttccaaattggttcctccaatggtggaactacttcggaccaattccccaaatatttccagaagaagtccaacagggattcgaacaattcaacaagctctataatagcaaggaatcacgtattccggcagacttaaagtacttttccaattttgccttgtcatggatcttttcatggcaatacagatacggaaaaactgaaaacaacaagcaatatccaccgttacagagacacacctttgtaaaatggtggtcacaattcgatacttcaaaggctgctccagatcaagtcaagaactggttccagagcaatcctgagttccttaaacctgctgatccggagacatctttgtttctaaatcagaagtcgcaactggcagcattcttagaaagctcaaaatctaaagagagtcttgctcagaatctcaaagaagttctccaactacttcaacaggaagtggaagaagaaccttccaagaaggaagctgaatcatccgagactaatgatgaccaagaagatgatccattctaccagaatgaagatgactgttttggcatatcattggacgacgattaattagttgtagtaatcatgaattattgtaactaatttgtcagtttcttttaaataatgtaatttgtaaaagttttgtaatagtttcggtaaacactaccgatactgtagaaacagtaaaaattgggtctatttaaaggagtcctcgtcccctttgtgaggcaccctttcagatagtcccagaatcaggtttttagagagagaagctcagcctagggaaaaactctttgtaagcttttctttcggttttaataaatttcaagttctatttttcatatctcccttctcccctcaccgatcctgtgcggctctgccgccgcttcggtttctttgttttcaaa

SEQ ID NO: 10524 - DNA, 1048 bp, Glycine max
  Gm_smallRNAprecursor_3357
attccacaatccaaatcttgaaagttatgcagccacgacattatggctcaaacttaaaccaacccaaaaaattctctgcaccatttgaccctgcaggatataattattgggattacattgacgcctggaccaatgtgttctggcatcaaaatagtaaattcaagcattcatggctaatttacttcaaaaataatactgcatataattttccaaattggttcctccaatggtggaactacttcggaccaattccccaaatatttccagaagaagtccaacagggattcgaacaattcaacaagctctataatagcaaggaatcacgtattccggcagacttaaagtacttttccaattttgccttgtcatggatcttttcatggcaatacagatacggaaaaactgaaaacaacaagcaatatccaccgttacagagacacacctttgtaaaatggtggtcacaattcgatacttcaaaggctgctccagatcaagtcaagaactggttccagagcaatcctgagttccttaaacctgctgatccggagacatctttgtttctaaatcagaagtcgcaactggcagcattcttagaaagctcaaaatctaaagagagtcttgctcagaatctcaaagaagttctccaactacttcaacaggaagtggaagaagaaccttccaagaaggaagctgaatcatccgagactaatgatgaccaagaagatgatccattctaccagaatgaagatgactgttttggcatatcattggacgacgattaattagttgtagtaatcatgaattattgtaactaatttgtcagtttcttttaaataatgtaatttgtaaaagttttgtaatagtttcggtaaacactaccgatactgtagaaacagtaaaaattgggtctatttaaaggagtcctcgtcccctttgtgaggcaccctttcagatagtcccagaatcaggtttttagagagagaagctcagcctagggaaaaactctttgtaagcttttctttcggttttaataaatttcaagttctat

SEQ ID NO: 10525 - DNA, 1048 bp, Glycine max; identical to SEQ ID NO: 10524
  Gm_smallRNAprecursor_3358

SEQ ID NO: 10526 - DNA, 1098 bp, Glycine max
  Gm_smallRNAprecursor_3359
attccacaatccaaatcttgaaagttatgcagccacgacattatggctcaaacttaaaccaacccaaaaaattctctgcaccatttgaccctgcaggatataattattgggattacattgacgcctggaccaatgtgttctggcatcaaaatagtaaattcaagcattcatggctaatttacttcaaaaataatactgcatataattttccaaattggttcctccaatggtggaactacttcggaccaattccccaaatatttccagaagaagtccaacagggattcgaacaattcaacaagctctataatagcaaggaatcacgtattccggcagacttaaagtacttttccaattttgccttgtcatggatcttttcatggcaatacagatacggaaaaactgaaaacaacaagcaatatccaccgttacagagacacacctttgtaaaatggtggtcacaattcgatacttcaaaggctgctccagatcaagtcaagaactggttccagagcaatcctgagttccttaaacctgctgatccggagacatctttgtttctaaatcagaagtcgcaactggcagcattcttagaaagctcaaaatctaaagagagtcttgctcagaatctcaaagaagttctccaactacttcaacaggaagtggaagaagaaccttccaagaaggaagctgaatcatccgagactaatgatgaccaagaagatgatccattctaccagaatgaagatgactgttttggcatatcattggacgacgattaattagttgtagtaatcatgaattattgtaactaatttgtcagtttcttttaaataatgtaatttgtaaaagttttgtaatagtttcggtaaacactaccgatactgtagaaacagtaaaaattgggtctatttaaaggagtcctcgtcccctttgtgaggcaccctttcagatagtcccagaatcaggtttttagagagagaagctcagcctagggaaaaactctttgtaagcttttctttcggttttaataaatttcaagttctatttttcatatctcccttctcccctcaccgatcctgtgcggctctgccgccg

SEQ ID NO: 10527 - DNA, 1120 bp, Glycine max
  Gm_smallRNAprecursor_3360
attccacaatccaaatcttgaaagttatgcagccacgacattatggctcaaacttaaaccaacccaaaaaattctctgcaccatttgaccctgcaggatataattattgggattacattgacgcctggaccaatgtgttctggcatcaaaatagtaaattcaagcattcatggctaatttacttcaaaaataatactgcatataattttccaaattggttcctccaatggtggaactacttcggaccaattccccaaatatttccagaagaagtccaacagggattcgaacaattcaacaagctctataatagcaaggaatcacgtattccggcagacttaaagtacttttccaattttgccttgtcatggatcttttcatggcaatacagatacggaaaaactgaaaacaacaagcaatatccaccgttacagagacacacctttgtaaaatggtggtcacaattcgatacttcaaaggctgctccagatcaagtcaagaactggttccagagcaatcctgagttccttaaacctgctgatccggagacatctttgtttctaaatcagaagtcgcaactggcagcattcttagaaagctcaaaatctaaagagagtcttgctcagaatctcaaagaagttctccaactacttcaacaggaagtggaagaagaaccttccaagaaggaagctgaatcatccgagactaatgatgaccaagaagatgatccattctaccagaatgaagatgactgttttggcatatcattggacgacgattaattagttgtagtaatcatgaattattgtaactaatttgtcagtttcttttaaataatgtaatttgtaaaagttttgtaatagtttcggtaaacactaccgatactgtagaaacagtaaaaattgggtctatttaaaggagtcctcgtcccctttgtgaggcaccctttcagatagtcccagaatcaggtttttagagagagaagctcagcctagggaaaaactctttgtaagcttttctttcggttttaataaatttcaagttctatttttcatatctcccttctcccctcaccgatcctgtgcggctctgccgccgcttcggtttctttgttttcaaa

SEQ ID NO: 10528 - DNA, 1070 bp, Glycine max
  Gm_smallRNAprecursor_3361
tcaaacttaaaccaacccaaaaaattctctgcaccatttgaccctgcaggatataattattgggattacattgacgcctggaccaatgtgttctggcatcaaaatagtaaattcaagcattcatggctaatttacttcaaaaataatactgcatataattttccaaattggttcctccaatggtggaactacttcggaccaattccccaaatatttccagaagaagtccaacagggattcgaacaattcaacaagctctataatagcaaggaatcacgtattccggcagacttaaagtacttttccaattttgccttgtcatggatcttttcatggcaatacagatacggaaaaactgaaaacaacaagcaatatccaccgttacagagacacacctttgtaaaatggtggtcacaattcgatacttcaaaggctgctccagatcaagtcaagaactggttccagagcaatcctgagttccttaaacctgctgatccggagacatctttgtttctaaatcagaagtcgcaactggcagcattcttagaaagctcaaaatctaaagagagtcttgctcagaatctcaaagaagttctccaactacttcaacaggaagtggaagaagaaccttccaagaaggaagctgaatcatccgagactaatgatgaccaagaagatgatccattctaccagaatgaagatgactgttttggcatatcattggacgacgattaattagttgtagtaatcatgaattattgtaactaatttgtcagtttcttttaaataatgtaatttgtaaaagttttgtaatagtttcggtaaacactaccgatactgtagaaacagtaaaaattgggtctatttaaaggagtcctcgtcccctttgtgaggcaccctttcagatagtcccagaatcaggtttttagagagagaagctcagcctagggaaaaactctttgtaagcttttctttcggttttaataaatttcaagttctatttttcatatctcccttctcccctcaccgatcctgtgcggctctgccgccgcttcggtttctttgttttc

SEQ ID NO: 10529 - DNA, 1071 bp, Glycine max
  Gm_smallRNAprecursor_3362
tcaaacttaaaccaacccaaaaaattctctgcaccatttgaccctgcaggatataattattgggattacattgacgcctggaccaatgtgttctggcatcaaaatagtaaattcaagcattcatggctaatttacttcaaaaataatactgcatataattttccaaattggttcctccaatggtggaactacttcggaccaattccccaaatatttccagaagaagtccaacagggattcgaacaattcaacaagctctataatagcaaggaatcacgtattccggcagacttaaagtacttttccaattttgccttgtcatggatcttttcatggcaatacagatacggaaaaactgaaaacaacaagcaatatccaccgttacagagacacacctttgtaaaatggtggtcacaattcgatacttcaaaggctgctccagatcaagtcaagaactggttccagagcaatcctgagttccttaaacctgctgatccggagacatctttgtttctaaatcagaagtcgcaactggcagcattcttagaaagctcaaaatctaaagagagtcttgctcagaatctcaaagaagttctccaactacttcaacaggaagtggaagaagaaccttccaagaaggaagctgaatcatccgagactaatgatgaccaagaagatgatccattctaccagaatgaagatgactgttttggcatatcattggacgacgattaattagttgtagtaatcatgaattattgtaactaatttgtcagtttcttttaaataatgtaatttgtaaaagttttgtaatagtttcggtaaacactaccgatactgtagaaacagtaaaaattgggtctatttaaaggagtcctcgtcccctttgtgaggcaccctttcagatagtcccagaatcaggtttttagagagagaagctcagcctagggaaaaactctttgtaagcttttctttcggttttaataaatttcaagttctatttttcatatctcccttctcccctcaccgatcctgtgcggctctgccgccgcttcggtttctttgttttca

SEQ ID NO: 10530 - DNA, 1172 bp, Glycine max
  Gm_smallRNAprecursor_3363
gaccaatgtgttctggcatcaaaatagtaaattcaagcattcatggctaatttacttcaaaaataatactgcatataattttccaaattggttcctccaatggtggaactacttcggaccaattccccaaatatttccagaagaagtccaacagggattcgaacaattcaacaagctctataatagcaaggaatcacgtattccggcagacttaaagtacttttccaattttgccttgtcatggatcttttcatggcaatacagatacggaaaaactgaaaacaacaagcaatatccaccgttacagagacacacctttgtaaaatggtggtcacaattcgatacttcaaaggctgctccagatcaagtcaagaactggttccagagcaatcctgagttccttaaacctgctgatccggagacatctttgtttctaaatcagaagtcgcaactggcagcattcttagaaagctcaaaatctaaagagagtcttgctcagaatctcaaagaagttctccaactacttcaacaggaagtggaagaagaaccttccaagaaggaagctgaatcatccgagactaatgatgaccaagaagatgatccattctaccagaatgaagatgactgttttggcatatcattggacgacgattaattagttgtagtaatcatgaattattgtaactaatttgtcagtttcttttaaataatgtaatttgtaaaagttttgtaatagtttcggtaaacactaccgatactgtagaaacagtaaaaattgggtctatttaaaggagtcctcgtcccctttgtgaggcaccctttcagatagtcccagaatcaggtttttagagagagaagctcagcctagggaaaaactctttgtaagcttttctttcggttttaataaatttcaagttctatttttcatatctcccttctcccctcaccgatcctgtgcggctctgccgccgcttcggtttctttgttttcaaaaacctgggtttgtaagccgtttcggtgtgcccttgatatctgctttacaagtttataattcttattcttgattatcatactgcaaggacatatgttaatatatatatatatatatatatatatatatatatatgtatatatatatatatatatatatatatatatatattgttggatca

SEQ ID NO: 10531 - DNA, 1106 bp, Glycine max
  Gm_smallRNAprecursor_3364
tactgcatataattttccaaattggttcctccaatggtggaactacttcggaccaattccccaaatatttccagaagaagtccaacagggattcgaacaattcaacaagctctataatagcaaggaatcacgtattccggcagacttaaagtacttttccaattttgccttgtcatggatcttttcatggcaatacagatacggaaaaactgaaaacaacaagcaatatccaccgttacagagacacacctttgtaaaatggtggtcacaattcgatacttcaaaggctgctccagatcaagtcaagaactggttccagagcaatcctgagttccttaaacctgctgatccggagacatctttgtttctaaatcagaagtcgcaactggcagcattcttagaaagctcaaaatctaaagagagtcttgctcagaatctcaaagaagttctccaactacttcaacaggaagtggaagaagaaccttccaagaaggaagctgaatcatccgagactaatgatgaccaagaagatgatccattctaccagaatgaagatgactgttttggcatatcattggacgacgattaattagttgtagtaatcatgaattattgtaactaatttgtcagtttcttttaaataatgtaatttgtaaaagttttgtaatagtttcggtaaacactaccgatactgtagaaacagtaaaaattgggtctatttaaaggagtcctcgtcccctttgtgaggcaccctttcagatagtcccagaatcaggtttttagagagagaagctcagcctagggaaaaactctttgtaagcttttctttcggttttaataaatttcaagttctatttttcatatctcccttctcccctcaccgatcctgtgcggctctgccgccgcttcggtttctttgttttcaaaaacctgggtttgtaagccgtttcggtgtgcccttgatatctgctttacaagtttataattcttattcttgattatcatactgcaaggacatatgttaatatatatatatatatatatatatatatatatatatgtatatatatatatatatatatatatatatatatattgttggatca

SEQ ID NO: 10532 - DNA, 1136 bp, Glycine max
  Gm_smallRNAprecursor_3365
ctaatacaggtcacaaaccaactaaaaaaattaaaaatgatcaataaaaaataattaaagtacacgattatgtggatttttagtctgaacaaagttttgaatttatgatatatatatatatatatatccagagatcagcggagtaggatcaaacggacaaataggaagtaagaatgcaatatgataaaatcaaacgtaagaattgtaaacttgtaaagcagatatcaagggcacaccggagaccggcttacaaatcccaggttttcataaacaaagaaaccgaagcggcggcagagccgcacaggatcggtgaagggagaagagagaaggataaaaaatagaaatttattgaatctagaaagaagcgcttacaaaaatcttgtttcagagcacctctcttccgaaacctgaaaaatggctcaatgaaagggtgcctcacaacatacttgaggactccttatatagccaaaaatctaagaccggtagttgccggtagttttgaccgggactatttgactgtttgttacaagacaagtagttttgaccgggactttaatggctacaggacaggtagtattgtccatcattaattacacattaattacaaacagacggttttgtgaccgaaatttaatctaaacagataccaaaacaatcatcttcgttttggtaaaagggatcttcttcgtcttcttcaggagaacttgtttcttccttctttgaggatgaagcttcttcttcctgttgtaacatttgtagaacttccttcagatttttagctaagacctcctttgatgtcgatcctgctaaaaatgccgccagatgagacttttggttcaagaacacagaagtctctggatcagccgctttgagaaattctggatgggattggaaccatagttttacttgttctggatccgctttggatgagtcaaattgtgtccaccattttacaaatgtgtgtctttgtagtgatggatattggtttgtcttttcagtcttgttgtaacgatattgccatgagaatatccatgacagtgcaaagcttgaaaagtatttaagatctgctggaattcgtgattcctgcgaattgtattgtttcttaaattgggaaaatccttgttggaccgtttctg

SEQ ID NO: 10533 - DNA, 1149 bp, Glycine max
  Gm_smallRNAprecursor_3366
ctaatacaggtcacaaaccaactaaaaaaattaaaaatgatcaataaaaaataattaaagtacacgattatgtggatttttagtctgaacaaagttttgaatttatgatatatatatatatatatatccagagatcagcggagtaggatcaaacggacaaataggaagtaagaatgcaatatgataaaatcaaacgtaagaattgtaaacttgtaaagcagatatcaagggcacaccggagaccggcttacaaatcccaggttttcataaacaaagaaaccgaagcggcggcagagccgcacaggatcggtgaagggagaagagagaaggataaaaaatagaaatttattgaatctagaaagaagcgcttacaaaaatcttgtttcagagcacctctcttccgaaacctgaaaaatggctcaatgaaagggtgcctcacaacatacttgaggactccttatatagccaaaaatctaagaccggtagttgccggtagttttgaccgggactatttgactgtttgttacaagacaagtagttttgaccgggactttaatggctacaggacaggtagtattgtccatcattaattacacattaattacaaacagacggttttgtgaccgaaatttaatctaaacagataccaaaacaatcatcttcgttttggtaaaagggatcttcttcgtcttcttcaggagaacttgtttcttccttctttgaggatgaagcttcttcttcctgttgtaacatttgtagaacttccttcagatttttagctaagacctcctttgatgtcgatcctgctaaaaatgccgccagatgagacttttggttcaagaacacagaagtctctggatcagccgctttgagaaattctggatgggattggaaccatagttttacttgttctggatccgctttggatgagtcaaattgtgtccaccattttacaaatgtgtgtctttgtagtgatggatattggtttgtcttttcagtcttgttgtaacgatattgccatgagaatatccatgacagtgcaaagcttgaaaagtatttaagatctgctggaattcgtgattcctgcgaattgtattgtttcttaaattgggaaaatccttgttggaccgtttctgggaatatctctag

SEQ ID NO: 10534 - DNA, 1209 bp, Glycine max
  Gm_smallRNAprecursor_3367
cagcggagtaggatcaaacggacaaataggaagtaagaatgcaatatgataaaatcaaacgtaagaattgtaaacttgtaaagcagatatcaagggcacaccggagaccggcttacaaatcccaggttttcataaacaaagaaaccgaagcggcggcagagccgcacaggatcggtgaagggagaagagagaaggataaaaaatagaaatttattgaatctagaaagaagcgcttacaaaaatcttgtttcagagcacctctcttccgaaacctgaaaaatggctcaatgaaagggtgcctcacaacatacttgaggactccttatatagccaaaaatctaagaccggtagttgccggtagttttgaccgggactatttgactgtttgttacaagacaagtagttttgaccgggactttaatggctacaggacaggtagtattgtccatcattaattacacattaattacaaacagacggttttgtgaccgaaatttaatctaaacagataccaaaacaatcatcttcgttttggtaaaagggatcttcttcgtcttcttcaggagaacttgtttcttccttctttgaggatgaagcttcttcttcctgttgtaacatttgtagaacttccttcagatttttagctaagacctcctttgatgtcgatcctgctaaaaatgccgccagatgagacttttggttcaagaacacagaagtctctggatcagccgctttgagaaattctggatgggattggaaccatagttttacttgttctggatccgctttggatgagtcaaattgtgtccaccattttacaaatgtgtgtctttgtagtgatggatattggtttgtcttttcagtcttgttgtaacgatattgccatgagaatatccatgacagtgcaaagcttgaaaagtatttaagatctgctggaattcgtgattcctgcgaattgtattgtttcttaaattgggaaaatccttgttggaccgtttctgggaatatctctaggattggtccaaagaagtcccaccattgcaaaaaccaattgggaaaattgtaaattgtgttggtcttgaaatatatcagccatgaatgcttgaagcgggtattttggtgccaaaacaccttagtccaagcatcaacgtaatcccaataggtataacctaccggatcaaatggaactgaaaatctctttcctttgtt

SEQ ID NO: 10535 - DNA, 1083 bp, Glycine max
  Gm_smallRNAprecursor_3368
cggagtaggatcaaacggacaaataggaagtaagaatgcaatatgataaaatcaaacgtaagaattgtaaacttgtaaagcagatatcaagggcacaccggagaccggcttacaaatcccaggttttcataaacaaagaaaccgaagcggcggcagagccgcacaggatcggtgaagggagaagagagaaggataaaaaatagaaatttattgaatctagaaagaagcgcttacaaaaatcttgtttcagagcacctctcttccgaaacctgaaaaatggctcaatgaaagggtgcctcacaacatacttgaggactccttatatagccaaaaatctaagaccggtagttgccggtagttttgaccgggactatttgactgtttgttacaagacaagtagttttgaccgggactttaatggctacaggacaggtagtattgtccatcattaattacacattaattacaaacagacggttttgtgaccgaaatttaatctaaacagataccaaaacaatcatcttcgttttggtaaaagggatcttcttcgtcttcttcaggagaacttgtttcttccttctttgaggatgaagcttcttcttcctgttgtaacatttgtagaacttccttcagatttttagctaagacctcctttgatgtcgatcctgctaaaaatgccgccagatgagacttttggttcaagaacacagaagtctctggatcagccgctttgagaaattctggatgggattggaaccatagttttacttgttctggatccgctttggatgagtcaaattgtgtccaccattttacaaatgtgtgtctttgtagtgatggatattggtttgtcttttcagtcttgttgtaacgatattgccatgagaatatccatgacagtgcaaagcttgaaaagtatttaagatctgctggaattcgtgattcctgcgaattgtattgtttcttaaattgggaaaatccttgttggaccgtttctgggaatatctctaggattggtccaaagaagtcccaccattgcaaaaaccaattgggaaaattgtaaattgtgttggtcttgaaata

SEQ ID NO: 10536 - DNA, 1082 bp, Glycine max
  Gm_smallRNAprecursor_3369
ggagtaggatcaaacggacaaataggaagtaagaatgcaatatgataaaatcaaacgtaagaattgtaaacttgtaaagcagatatcaagggcacaccggagaccggcttacaaatcccaggttttcataaacaaagaaaccgaagcggcggcagagccgcacaggatcggtgaagggagaagagagaaggataaaaaatagaaatttattgaatctagaaagaagcgcttacaaaaatcttgtttcagagcacctctcttccgaaacctgaaaaatggctcaatgaaagggtgcctcacaacatacttgaggactccttatatagccaaaaatctaagaccggtagttgccggtagttttgaccgggactatttgactgtttgttacaagacaagtagttttgaccgggactttaatggctacaggacaggtagtattgtccatcattaattacacattaattacaaacagacggttttgtgaccgaaatttaatctaaacagataccaaaacaatcatcttcgttttggtaaaagggatcttcttcgtcttcttcaggagaacttgtttcttccttctttgaggatgaagcttcttcttcctgttgtaacatttgtagaacttccttcagatttttagctaagacctcctttgatgtcgatcctgctaaaaatgccgccagatgagacttttggttcaagaacacagaagtctctggatcagccgctttgagaaattctggatgggattggaaccatagttttacttgttctggatccgctttggatgagtcaaattgtgtccaccattttacaaatgtgtgtctttgtagtgatggatattggtttgtcttttcagtcttgttgtaacgatattgccatgagaatatccatgacagtgcaaagcttgaaaagtatttaagatctgctggaattcgtgattcctgcgaattgtattgtttcttaaattgggaaaatccttgttggaccgtttctgggaatatctctaggattggtccaaagaagtcccaccattgcaaaaaccaattgggaaaattgtaaattgtgttggtcttgaaata

SEQ ID NO: 10537 - DNA, 1081 bp, Glycine max
  Gm_smallRNAprecursor_3370
gagtaggatcaaacggacaaataggaagtaagaatgcaatatgataaaatcaaacgtaagaattgtaaacttgtaaagcagatatcaagggcacaccggagaccggcttacaaatcccaggttttcataaacaaagaaaccgaagcggcggcagagccgcacaggatcggtgaagggagaagagagaaggataaaaaatagaaatttattgaatctagaaagaagcgcttacaaaaatcttgtttcagagcacctctcttccgaaacctgaaaaatggctcaatgaaagggtgcctcacaacatacttgaggactccttatatagccaaaaatctaagaccggtagttgccggtagttttgaccgggactatttgactgtttgttacaagacaagtagttttgaccgggactttaatggctacaggacaggtagtattgtccatcattaattacacattaattacaaacagacggttttgtgaccgaaatttaatctaaacagataccaaaacaatcatcttcgttttggtaaaagggatcttcttcgtcttcttcaggagaacttgtttcttccttctttgaggatgaagcttcttcttcctgttgtaacatttgtagaacttccttcagatttttagctaagacctcctttgatgtcgatcctgctaaaaatgccgccagatgagacttttggttcaagaacacagaagtctctggatcagccgctttgagaaattctggatgggattggaaccatagttttacttgttctggatccgctttggatgagtcaaattgtgtccaccattttacaaatgtgtgtctttgtagtgatggatattggtttgtcttttcagtcttgttgtaacgatattgccatgagaatatccatgacagtgcaaagcttgaaaagtatttaagatctgctggaattcgtgattcctgcgaattgtattgtttcttaaattgggaaaatccttgttggaccgtttctgggaatatctctaggattggtccaaagaagtcccaccattgcaaaaaccaattgggaaaattgtaaattgtgttggtcttgaaata

SEQ ID NO: 10538 - DNA, 1131 bp, Glycine max
  Gm_smallRNAprecursor_3371
acaagacaagtagttttgaccgggactttaatggctacaggacaggtagtattgtccatcattaattacacattaattacaaacagacggttttgtgaccgaaatttaatctaaacagataccaaaacaatcatcttcgttttggtaaaagggatcttcttcgtcttcttcaggagaacttgtttcttccttctttgaggatgaagcttcttcttcctgttgtaacatttgtagaacttccttcagatttttagctaagacctcctttgatgtcgatcctgctaaaaatgccgccagatgagacttttggttcaagaacacagaagtctctggatcagccgctttgagaaattctggatgggattggaaccatagttttacttgttctggatccgctttggatgagtcaaattgtgtccaccattttacaaatgtgtgtctttgtagtgatggatattggtttgtcttttcagtcttgttgtaacgatattgccatgagaatatccatgacagtgcaaagcttgaaaagtatttaagatctgctggaattcgtgattcctgcgaattgtattgtttcttaaattgggaaaatccttgttggaccgtttctgggaatatctctaggattggtccaaagaagtcccaccattgcaaaaaccaattgggaaaattgtaaattgtgttggtcttgaaatatatcagccatgaatgcttgaagcgggtattttggtgccaaaacaccttagtccaagcatcaacgtaatcccaataggtataacctaccggatcaaatggaactgaaaatctctttcctttgttcaagtccgaaccaaagtgtcttggttgaagaacttttagtatttggatggttgagtgggtgtttaaagtttggtcttttggatctttgaaatgtttgatagatactgagtttgaatctaccaaaatcaattcataaaaagttcttgtcttcaggatggtggttggtttgtagtgaaatcctggtgggaaagccttggccgtcgccttgaagggatttttgtcccaaaattcaggttccatctgcaaaacagttaacaatttatttttataaatataattgttagtttgtttggtaggtggtgtttgagcttt

SEQ ID NO: 10539 - DNA, 1146 bp, Glycine max
  Gm_smallRNAprecursor_3372
taatggctacaggacaggtagtattgtccatcattaattacacattaattacaaacagacggttttgtgaccgaaatttaatctaaacagataccaaaacaatcatcttcgttttggtaaaagggatcttcttcgtcttcttcaggagaacttgtttcttccttctttgaggatgaagcttcttcttcctgttgtaacatttgtagaacttccttcagatttttagctaagacctcctttgatgtcgatcctgctaaaaatgccgccagatgagacttttggttcaagaacacagaagtctctggatcagccgctttgagaaattctggatgggattggaaccatagttttacttgttctggatccgctttggatgagtcaaattgtgtccaccattttacaaatgtgtgtctttgtagtgatggatattggtttgtcttttcagtcttgttgtaacgatattgccatgagaatatccatgacagtgcaaagcttgaaaagtatttaagatctgctggaattcgtgattcctgcgaattgtattgtttcttaaattgggaaaatccttgttggaccgtttctgggaatatctctaggattggtccaaagaagtcccaccattgcaaaaaccaattgggaaaattgtaaattgtgttggtcttgaaatatatcagccatgaatgcttgaagcgggtattttggtgccaaaacaccttagtccaagcatcaacgtaatcccaataggtataacctaccggatcaaatggaactgaaaatctctttcctttgttcaagtccgaaccaaagtgtcttggttgaagaacttttagtatttggatggttgagtgggtgtttaaagtttggtcttttggatctttgaaatgtttgatagatactgagtttgaatctaccaaaatcaattcataaaaagttcttgtcttcaggatggtggttggtttgtagtgaaatcctggtgggaaagccttggccgtcgccttgaagggatttttgtcccaaaattcaggttccatctgcaaaacagttaacaatttatttttataaatataattgttagtttgtttggtaggtggtgtttgagctttggctaaaggtagttttcctttagtattggtggctgttttggtc

SEQ ID NO: 10540 - DNA, 1080 bp, Glycine max
  Gm_smallRNAprecursor_3373
ttcaggagaacttgtttcttccttctttgaggatgaagcttcttcttcctgttgtaacatttgtagaacttccttcagatttttagctaagacctcctttgatgtcgatcctgctaaaaatgccgccagatgagacttttggttcaagaacacagaagtctctggatcagccgctttgagaaattctggatgggattggaaccatagttttacttgttctggatccgctttggatgagtcaaattgtgtccaccattttacaaatgtgtgtctttgtagtgatggatattggtttgtcttttcagtcttgttgtaacgatattgccatgagaatatccatgacagtgcaaagcttgaaaagtatttaagatctgctggaattcgtgattcctgcgaattgtattgtttcttaaattgggaaaatccttgttggaccgtttctgggaatatctctaggattggtccaaagaagtcccaccattgcaaaaaccaattgggaaaattgtaaattgtgttggtcttgaaatatatcagccatgaatgcttgaagcgggtattttggtgccaaaacaccttagtccaagcatcaacgtaatcccaataggtataacctaccggatcaaatggaactgaaaatctctttcctttgttcaagtccgaaccaaagtgtcttggttgaagaacttttagtatttggatggttgagtgggtgtttaaagtttggtcttttggatctttgaaatgtttgatagatactgagtttgaatctaccaaaatcaattcataaaaagttcttgtcttcaggatggtggttggtttgtagtgaaatcctggtgggaaagccttggccgtcgccttgaagggatttttgtcccaaaattcaggttccatctgcaaaacagttaacaatttatttttataaatataattgttagtttgtttggtaggtggtgtttgagctttggctaaaggtagttttcctttagtattggtggctgttttggtcattgacgcattttggatcattgtttgtaaatttgattcagattcatcatcagattctgaggcaatgtctgccca

SEQ ID NO: 10541 - DNA, 1104 bp, Glycine max
  Gm_smallRNAprecursor_3374
ttcaggagaacttgtttcttccttctttgaggatgaagcttcttcttcctgttgtaacatttgtagaacttccttcagatttttagctaagacctcctttgatgtcgatcctgctaaaaatgccgccagatgagacttttggttcaagaacacagaagtctctggatcagccgctttgagaaattctggatgggattggaaccatagttttacttgttctggatccgctttggatgagtcaaattgtgtccaccattttacaaatgtgtgtctttgtagtgatggatattggtttgtcttttcagtcttgttgtaacgatattgccatgagaatatccatgacagtgcaaagcttgaaaagtatttaagatctgctggaattcgtgattcctgcgaattgtattgtttcttaaattgggaaaatccttgttggaccgtttctgggaatatctctaggattggtccaaagaagtcccaccattgcaaaaaccaattgggaaaattgtaaattgtgttggtcttgaaatatatcagccatgaatgcttgaagcgggtattttggtgccaaaacaccttagtccaagcatcaacgtaatcccaataggtataacctaccggatcaaatggaactgaaaatctctttcctttgttcaagtccgaaccaaagtgtcttggttgaagaacttttagtatttggatggttgagtgggtgtttaaagtttggtcttttggatctttgaaatgtttgatagatactgagtttgaatctaccaaaatcaattcataaaaagttcttgtcttcaggatggtggttggtttgtagtgaaatcctggtgggaaagccttggccgtcgccttgaagggatttttgtcccaaaattcaggttccatctgcaaaacagttaacaatttatttttataaatataattgttagtttgtttggtaggtggtgtttgagctttggctaaaggtagttttcctttagtattggtggctgttttggtcattgacgcattttggatcattgtttgtaaatttgattcagattcatcatcagattctgaggcaatgtctgcccaagattttttgattatttttggaaa

SEQ ID NO: 10542 - DNA, 1107 bp, Glycine max
  Gm_smallRNAprecursor_3375
gtagaacttccttcagatttttagctaagacctcctttgatgtcgatcctgctaaaaatgccgccagatgagacttttggttcaagaacacagaagtctctggatcagccgctttgagaaattctggatgggattggaaccatagttttacttgttctggatccgctttggatgagtcaaattgtgtccaccattttacaaatgtgtgtctttgtagtgatggatattggtttgtcttttcagtcttgttgtaacgatattgccatgagaatatccatgacagtgcaaagcttgaaaagtatttaagatctgctggaattcgtgattcctgcgaattgtattgtttcttaaattgggaaaatccttgttggaccgtttctgggaatatctctaggattggtccaaagaagtcccaccattgcaaaaaccaattgggaaaattgtaaattgtgttggtcttgaaatatatcagccatgaatgcttgaagcgggtattttggtgccaaaacaccttagtccaagcatcaacgtaatcccaataggtataacctaccggatcaaatggaactgaaaatctctttcctttgttcaagtccgaaccaaagtgtcttggttgaagaacttttagtatttggatggttgagtgggtgtttaaagtttggtcttttggatctttgaaatgtttgatagatactgagtttgaatctaccaaaatcaattcataaaaagttcttgtcttcaggatggtggttggtttgtagtgaaatcctggtgggaaagccttggccgtcgccttgaagggatttttgtcccaaaattcaggttccatctgcaaaacagttaacaatttatttttataaatataattgttagtttgtttggtaggtggtgtttgagctttggctaaaggtagttttcctttagtattggtggctgttttggtcattgacgcattttggatcattgtttgtaaatttgattcagattcatcatcagattctgaggcaatgtctgcccaagattttttgattatttttggaaatttggtcagacccatgtcttgaagggcctgaagggtttcaattggccatgcatagtcggccgatg

SEQ ID NO: 10543 - DNA, 1107 bp, Glycine max; identical to SEQ ID NO: 10542
  Gm_smallRNAprecursor_3376

SEQ ID NO: 10544 - DNA, 1108 bp, Glycine max
  Gm_smallRNAprecursor_3377
gtagaacttccttcagatttttagctaagacctcctttgatgtcgatcctgctaaaaatgccgccagatgagacttttggttcaagaacacagaagtctctggatcagccgctttgagaaattctggatgggattggaaccatagttttacttgttctggatccgctttggatgagtcaaattgtgtccaccattttacaaatgtgtgtctttgtagtgatggatattggtttgtcttttcagtcttgttgtaacgatattgccatgagaatatccatgacagtgcaaagcttgaaaagtatttaagatctgctggaattcgtgattcctgcgaattgtattgtttcttaaattgggaaaatccttgttggaccgtttctgggaatatctctaggattggtccaaagaagtcccaccattgcaaaaaccaattgggaaaattgtaaattgtgttggtcttgaaatatatcagccatgaatgcttgaagcgggtattttggtgccaaaacaccttagtccaagcatcaacgtaatcccaataggtataacctaccggatcaaatggaactgaaaatctctttcctttgttcaagtccgaaccaaagtgtcttggttgaagaacttttagtatttggatggttgagtgggtgtttaaagtttggtcttttggatctttgaaatgtttgatagatactgagtttgaatctaccaaaatcaattcataaaaagttcttgtcttcaggatggtggttggtttgtagtgaaatcctggtgggaaagccttggccgtcgccttgaagggatttttgtcccaaaattcaggttccatctgcaaaacagttaacaatttatttttataaatataattgttagtttgtttggtaggtggtgtttgagctttggctaaaggtagttttcctttagtattggtggctgttttggtcattgacgcattttggatcattgtttgtaaatttgattcagattcatcatcagattctgaggcaatgtctgcccaagattttttgattatttttggaaatttggtcagacccatgtcttgaagggcctgaagggtttcaattggccatgcatagtcggccgatgt

SEQ ID NO: 10545 - DNA, 1101 bp, Glycine max
  Gm_smallRNAprecursor_3378
gaacttccttcagatttttagctaagacctcctttgatgtcgatcctgctaaaaatgccgccagatgagacttttggttcaagaacacagaagtctctggatcagccgctttgagaaattctggatgggattggaaccatagttttacttgttctggatccgctttggatgagtcaaattgtgtccaccattttacaaatgtgtgtctttgtagtgatggatattggtttgtcttttcagtcttgttgtaacgatattgccatgagaatatccatgacagtgcaaagcttgaaaagtatttaagatctgctggaattcgtgattcctgcgaattgtattgtttcttaaattgggaaaatccttgttggaccgtttctgggaatatctctaggattggtccaaagaagtcccaccattgcaaaaaccaattgggaaaattgtaaattgtgttggtcttgaaatatatcagccatgaatgcttgaagcgggtattttggtgccaaaacaccttagtccaagcatcaacgtaatcccaataggtataacctaccggatcaaatggaactgaaaatctctttcctttgttcaagtccgaaccaaagtgtcttggttgaagaacttttagtatttggatggttgagtgggtgtttaaagtttggtcttttggatctttgaaatgtttgatagatactgagtttgaatctaccaaaatcaattcataaaaagttcttgtcttcaggatggtggttggtttgtagtgaaatcctggtgggaaagccttggccgtcgccttgaagggatttttgtcccaaaattcaggttccatctgcaaaacagttaacaatttatttttataaatataattgttagtttgtttggtaggtggtgtttgagctttggctaaaggtagttttcctttagtattggtggctgttttggtcattgacgcattttggatcattgtttgtaaatttgattcagattcatcatcagattctgaggcaatgtctgcccaagattttttgattatttttggaaatttggtcagacccatgtcttgaagggcctgaagggtttcaattggccatgcatagtcggccg

SEQ ID NO: 10546 - DNA, 1140 bp, Glycine max
  Gm_smallRNAprecursor_3379
tttttagctaagacctcctttgatgtcgatcctgctaaaaatgccgccagatgagacttttggttcaagaacacagaagtctctggatcagccgctttgagaaattctggatgggattggaaccatagttttacttgttctggatccgctttggatgagtcaaattgtgtccaccattttacaaatgtgtgtctttgtagtgatggatattggtttgtcttttcagtcttgttgtaacgatattgccatgagaatatccatgacagtgcaaagcttgaaaagtatttaagatctgctggaattcgtgattcctgcgaattgtattgtttcttaaattgggaaaatccttgttggaccgtttctgggaatatctctaggattggtccaaagaagtcccaccattgcaaaaaccaattgggaaaattgtaaattgtgttggtcttgaaatatatcagccatgaatgcttgaagcgggtattttggtgccaaaacaccttagtccaagcatcaacgtaatcccaataggtataacctaccggatcaaatggaactgaaaatctctttcctttgttcaagtccgaaccaaagtgtcttggttgaagaacttttagtatttggatggttgagtgggtgtttaaagtttggtcttttggatctttgaaatgtttgatagatactgagtttgaatctaccaaaatcaattcataaaaagttcttgtcttcaggatggtggttggtttgtagtgaaatcctggtgggaaagccttggccgtcgccttgaagggatttttgtcccaaaattcaggttccatctgcaaaacagttaacaatttatttttataaatataattgttagtttgtttggtaggtggtgtttgagctttggctaaaggtagttttcctttagtattggtggctgttttggtcattgacgcattttggatcattgtttgtaaatttgattcagattcatcatcagattctgaggcaatgtctgcccaagattttttgattatttttggaaatttggtcagacccatgtcttgaagggcctgaagggtttcaattggccatgcatagtcggccgatgtttgtttggcggttgccggtttgggagattcctgagtggatggctcaggt

SEQ ID NO: 10547 - DNA, 1090 bp, Glycine max
  Gm_smallRNAprecursor_3380
gtcgatcctgctaaaaatgccgccagatgagacttttggttcaagaacacagaagtctctggatcagccgctttgagaaattctggatgggattggaaccatagttttacttgttctggatccgctttggatgagtcaaattgtgtccaccattttacaaatgtgtgtctttgtagtgatggatattggtttgtcttttcagtcttgttgtaacgatattgccatgagaatatccatgacagtgcaaagcttgaaaagtatttaagatctgctggaattcgtgattcctgcgaattgtattgtttcttaaattgggaaaatccttgttggaccgtttctgggaatatctctaggattggtccaaagaagtcccaccattgcaaaaaccaattgggaaaattgtaaattgtgttggtcttgaaatatatcagccatgaatgcttgaagcgggtattttggtgccaaaacaccttagtccaagcatcaacgtaatcccaataggtataacctaccggatcaaatggaactgaaaatctctttcctttgttcaagtccgaaccaaagtgtcttggttgaagaacttttagtatttggatggttgagtgggtgtttaaagtttggtcttttggatctttgaaatgtttgatagatactgagtttgaatctaccaaaatcaattcataaaaagttcttgtcttcaggatggtggttggtttgtagtgaaatcctggtgggaaagccttggccgtcgccttgaagggatttttgtcccaaaattcaggttccatctgcaaaacagttaacaatttatttttataaatataattgttagtttgtttggtaggtggtgtttgagctttggctaaaggtagttttcctttagtattggtggctgttttggtcattgacgcattttggatcattgtttgtaaatttgattcagattcatcatcagattctgaggcaatgtctgcccaagattttttgattatttttggaaatttggtcagacccatgtcttgaagggcctgaagggtttcaattggccatgcatagtcggccgatgtttgtttggcggttgccggtttgg

SEQ ID NO: 10548 - DNA, 1087 bp, Glycine max
  Gm_smallRNAprecursor_3381
gatcctgctaaaaatgccgccagatgagacttttggttcaagaacacagaagtctctggatcagccgctttgagaaattctggatgggattggaaccatagttttacttgttctggatccgctttggatgagtcaaattgtgtccaccattttacaaatgtgtgtctttgtagtgatggatattggtttgtcttttcagtcttgttgtaacgatattgccatgagaatatccatgacagtgcaaagcttgaaaagtatttaagatctgctggaattcgtgattcctgcgaattgtattgtttcttaaattgggaaaatccttgttggaccgtttctgggaatatctctaggattggtccaaagaagtcccaccattgcaaaaaccaattgggaaaattgtaaattgtgttggtcttgaaatatatcagccatgaatgcttgaagcgggtattttggtgccaaaacaccttagtccaagcatcaacgtaatcccaataggtataacctaccggatcaaatggaactgaaaatctctttcctttgttcaagtccgaaccaaagtgtcttggttgaagaacttttagtatttggatggttgagtgggtgtttaaagtttggtcttttggatctttgaaatgtttgatagatactgagtttgaatctaccaaaatcaattcataaaaagttcttgtcttcaggatggtggttggtttgtagtgaaatcctggtgggaaagccttggccgtcgccttgaagggatttttgtcccaaaattcaggttccatctgcaaaacagttaacaatttatttttataaatataattgttagtttgtttggtaggtggtgtttgagctttggctaaaggtagttttcctttagtattggtggctgttttggtcattgacgcattttggatcattgtttgtaaatttgattcagattcatcatcagattctgaggcaatgtctgcccaagattttttgattatttttggaaatttggtcagacccatgtcttgaagggcctgaagggtttcaattggccatgcatagtcggccgatgtttgtttggcggttgccggtttgg

SEQ ID NO: 10549 - DNA, 1189 bp, Glycine max
  Gm_smallRNAprecursor_3382
acacagaagtctctggatcagccgctttgagaaattctggatgggattggaaccatagttttacttgttctggatccgctttggatgagtcaaattgtgtccaccattttacaaatgtgtgtctttgtagtgatggatattggtttgtcttttcagtcttgttgtaacgatattgccatgagaatatccatgacagtgcaaagcttgaaaagtatttaagatctgctggaattcgtgattcctgcgaattgtattgtttcttaaattgggaaaatccttgttggaccgtttctgggaatatctctaggattggtccaaagaagtcccaccattgcaaaaaccaattgggaaaattgtaaattgtgttggtcttgaaatatatcagccatgaatgcttgaagcgggtattttggtgccaaaacaccttagtccaagcatcaacgtaatcccaataggtataacctaccggatcaaatggaactgaaaatctctttcctttgttcaagtccgaaccaaagtgtcttggttgaagaacttttagtatttggatggttgagtgggtgtttaaagtttggtcttttggatctttgaaatgtttgatagatactgagtttgaatctaccaaaatcaattcataaaaagttcttgtcttcaggatggtggttggtttgtagtgaaatcctggtgggaaagccttggccgtcgccttgaagggatttttgtcccaaaattcaggttccatctgcaaaacagttaacaatttatttttataaatataattgttagtttgtttggtaggtggtgtttgagctttggctaaaggtagttttcctttagtattggtggctgttttggtcattgacgcattttggatcattgtttgtaaatttgattcagattcatcatcagattctgaggcaatgtctgcccaagattttttgattatttttggaaatttggtcagacccatgtcttgaagggcctgaagggtttcaattggccatgcatagtcggccgatgtttgtttggcggttgccggtttgggagattcctgagtggatggctcaggtttgattgaggcaatctgggttgatgacccttctaaattggttttctgggtagatgacccagcctgggttggtgacccagaagaggtagatgatttcttgatggttggctctggaagagc

SEQ ID NO: 10550 - DNA, 1224 bp, Glycine max
  Gm_smallRNAprecursor_3383
cgctttgagaaattctggatgggattggaaccatagttttacttgttctggatccgctttggatgagtcaaattgtgtccaccattttacaaatgtgtgtctttgtagtgatggatattggtttgtcttttcagtcttgttgtaacgatattgccatgagaatatccatgacagtgcaaagcttgaaaagtatttaagatctgctggaattcgtgattcctgcgaattgtattgtttcttaaattgggaaaatccttgttggaccgtttctgggaatatctctaggattggtccaaagaagtcccaccattgcaaaaaccaattgggaaaattgtaaattgtgttggtcttgaaatatatcagccatgaatgcttgaagcgggtattttggtgccaaaacaccttagtccaagcatcaacgtaatcccaataggtataacctaccggatcaaatggaactgaaaatctctttcctttgttcaagtccgaaccaaagtgtcttggttgaagaacttttagtatttggatggttgagtgggtgtttaaagtttggtcttttggatctttgaaatgtttgatagatactgagtttgaatctaccaaaatcaattcataaaaagttcttgtcttcaggatggtggttggtttgtagtgaaatcctggtgggaaagccttggccgtcgccttgaagggatttttgtcccaaaattcaggttccatctgcaaaacagttaacaatttatttttataaatataattgttagtttgtttggtaggtggtgtttgagctttggctaaaggtagttttcctttagtattggtggctgttttggtcattgacgcattttggatcattgtttgtaaatttgattcagattcatcatcagattctgaggcaatgtctgcccaagattttttgattatttttggaaatttggtcagacccatgtcttgaagggcctgaagggtttcaattggccatgcatagtcggccgatgtttgtttggcggttgccggtttgggagattcctgagtggatggctcaggtttgattgaggcaatctgggttgatgacccttctaaattggttttctgggtagatgacccagcctgggttggtgacccagaagaggtagatgatttcttgatggttggctctggaagagccagcctggctcctttgcctgtactccttcctccccgtagggagattcccgatgcctt

SEQ ID NO: 10551 - DNA, 1222 bp, Glycine max
  Gm_smallRNAprecursor_3384
ctttgagaaattctggatgggattggaaccatagttttacttgttctggatccgctttggatgagtcaaattgtgtccaccattttacaaatgtgtgtctttgtagtgatggatattggtttgtcttttcagtcttgttgtaacgatattgccatgagaatatccatgacagtgcaaagcttgaaaagtatttaagatctgctggaattcgtgattcctgcgaattgtattgtttcttaaattgggaaaatccttgttggaccgtttctgggaatatctctaggattggtccaaagaagtcccaccattgcaaaaaccaattgggaaaattgtaaattgtgttggtcttgaaatatatcagccatgaatgcttgaagcgggtattttggtgccaaaacaccttagtccaagcatcaacgtaatcccaataggtataacctaccggatcaaatggaactgaaaatctctttcctttgttcaagtccgaaccaaagtgtcttggttgaagaacttttagtatttggatggttgagtgggtgtttaaagtttggtcttttggatctttgaaatgtttgatagatactgagtttgaatctaccaaaatcaattcataaaaagttcttgtcttcaggatggtggttggtttgtagtgaaatcctggtgggaaagccttggccgtcgccttgaagggatttttgtcccaaaattcaggttccatctgcaaaacagttaacaatttatttttataaatataattgttagtttgtttggtaggtggtgtttgagctttggctaaaggtagttttcctttagtattggtggctgttttggtcattgacgcattttggatcattgtttgtaaatttgattcagattcatcatcagattctgaggcaatgtctgcccaagattttttgattatttttggaaatttggtcagacccatgtcttgaagggcctgaagggtttcaattggccatgcatagtcggccgatgtttgtttggcggttgccggtttgggagattcctgagtggatggctcaggtttgattgaggcaatctgggttgatgacccttctaaattggttttctgggtagatgacccagcctgggttggtgacccagaagaggtagatgatttcttgatggttggctctggaagagccagcctggctcctttgcctgtactccttcctccccgtagggagattcccgatgcctt

SEQ ID NO: 10552 - DNA, 1159 bp, Glycine max
  Gm_smallRNAprecursor_3385
ctggatccgctttggatgagtcaaattgtgtccaccattttacaaatgtgtgtctttgtagtgatggatattggtttgtcttttcagtcttgttgtaacgatattgccatgagaatatccatgacagtgcaaagcttgaaaagtatttaagatctgctggaattcgtgattcctgcgaattgtattgtttcttaaattgggaaaatccttgttggaccgtttctgggaatatctctaggattggtccaaagaagtcccaccattgcaaaaaccaattgggaaaattgtaaattgtgttggtcttgaaatatatcagccatgaatgcttgaagcgggtattttggtgccaaaacaccttagtccaagcatcaacgtaatcccaataggtataacctaccggatcaaatggaactgaaaatctctttcctttgttcaagtccgaaccaaagtgtcttggttgaagaacttttagtatttggatggttgagtgggtgtttaaagtttggtcttttggatctttgaaatgtttgatagatactgagtttgaatctaccaaaatcaattcataaaaagttcttgtcttcaggatggtggttggtttgtagtgaaatcctggtgggaaagccttggccgtcgccttgaagggatttttgtcccaaaattcaggttccatctgcaaaacagttaacaatttatttttataaatataattgttagtttgtttggtaggtggtgtttgagctttggctaaaggtagttttcctttagtattggtggctgttttggtcattgacgcattttggatcattgtttgtaaatttgattcagattcatcatcagattctgaggcaatgtctgcccaagattttttgattatttttggaaatttggtcagacccatgtcttgaagggcctgaagggtttcaattggccatgcatagtcggccgatgtttgtttggcggttgccggtttgggagattcctgagtggatggctcaggtttgattgaggcaatctgggttgatgacccttctaaattggttttctgggtagatgacccagcctgggttggtgacccagaagaggtagatgatttcttgatggttggctctggaagagccagcctggctcctttgcctgtactccttcctccccgtag

SEQ ID NO: 10553 - DNA, 1098 bp, Glycine max
  Gm_smallRNAprecursor_3386
gtgtctttgtagtgatggatattggtttgtcttttcagtcttgttgtaacgatattgccatgagaatatccatgacagtgcaaagcttgaaaagtatttaagatctgctggaattcgtgattcctgcgaattgtattgtttcttaaattgggaaaatccttgttggaccgtttctgggaatatctctaggattggtccaaagaagtcccaccattgcaaaaaccaattgggaaaattgtaaattgtgttggtcttgaaatatatcagccatgaatgcttgaagcgggtattttggtgccaaaacaccttagtccaagcatcaacgtaatcccaataggtataacctaccggatcaaatggaactgaaaatctctttcctttgttcaagtccgaaccaaagtgtcttggttgaagaacttttagtatttggatggttgagtgggtgtttaaagtttggtcttttggatctttgaaatgtttgatagatactgagtttgaatctaccaaaatcaattcataaaaagttcttgtcttcaggatggtggttggtttgtagtgaaatcctggtgggaaagccttggccgtcgccttgaagggatttttgtcccaaaattcaggttccatctgcaaaacagttaacaatttatttttataaatataattgttagtttgtttggtaggtggtgtttgagctttggctaaaggtagttttcctttagtattggtggctgttttggtcattgacgcattttggatcattgtttgtaaatttgattcagattcatcatcagattctgaggcaatgtctgcccaagattttttgattatttttggaaatttggtcagacccatgtcttgaagggcctgaagggtttcaattggccatgcatagtcggccgatgtttgtttggcggttgccggtttgggagattcctgagtggatggctcaggtttgattgaggcaatctgggttgatgacccttctaaattggttttctgggtagatgacccagcctgggttggtgacccagaagaggtagatgatttcttgatggttggctctggaagagccagcctggctcctttgcctgtactcct

SEQ ID NO: 10554 - DNA, 1098 bp, Glycine max
  Gm_smallRNAprecursor_3387
ttggtttgtcttttcagtcttgttgtaacgatattgccatgagaatatccatgacagtgcaaagcttgaaaagtatttaagatctgctggaattcgtgattcctgcgaattgtattgtttcttaaattgggaaaatccttgttggaccgtttctgggaatatctctaggattggtccaaagaagtcccaccattgcaaaaaccaattgggaaaattgtaaattgtgttggtcttgaaatatatcagccatgaatgcttgaagcgggtattttggtgccaaaacaccttagtccaagcatcaacgtaatcccaataggtataacctaccggatcaaatggaactgaaaatctctttcctttgttcaagtccgaaccaaagtgtcttggttgaagaacttttagtatttggatggttgagtgggtgtttaaagtttggtcttttggatctttgaaatgtttgatagatactgagtttgaatctaccaaaatcaattcataaaaagttcttgtcttcaggatggtggttggtttgtagtgaaatcctggtgggaaagccttggccgtcgccttgaagggatttttgtcccaaaattcaggttccatctgcaaaacagttaacaatttatttttataaatataattgttagtttgtttggtaggtggtgtttgagctttggctaaaggtagttttcctttagtattggtggctgttttggtcattgacgcattttggatcattgtttgtaaatttgattcagattcatcatcagattctgaggcaatgtctgcccaagattttttgattatttttggaaatttggtcagacccatgtcttgaagggcctgaagggtttcaattggccatgcatagtcggccgatgtttgtttggcggttgccggtttgggagattcctgagtggatggctcaggtttgattgaggcaatctgggttgatgacccttctaaattggttttctgggtagatgacccagcctgggttggtgacccagaagaggtagatgatttcttgatggttggctctggaagagccagcctggctcctttgcctgtactccttcctccccgtagggagattcc

SEQ ID NO: 10555 - DNA, 1090 bp, Glycine max
  Gm_smallRNAprecursor_3388
gcgaattgtattgtttcttaaattgggaaaatccttgttggaccgtttctgggaatatctctaggattggtccaaagaagtcccaccattgcaaaaaccaattgggaaaattgtaaattgtgttggtcttgaaatatatcagccatgaatgcttgaagcgggtattttggtgccaaaacaccttagtccaagcatcaacgtaatcccaataggtataacctaccggatcaaatggaactgaaaatctctttcctttgttcaagtccgaaccaaagtgtcttggttgaagaacttttagtatttggatggttgagtgggtgtttaaagtttggtcttttggatctttgaaatgtttgatagatactgagtttgaatctaccaaaatcaattcataaaaagttcttgtcttcaggatggtggttggtttgtagtgaaatcctggtgggaaagccttggccgtcgccttgaagggatttttgtcccaaaattcaggttccatctgcaaaacagttaacaatttatttttataaatataattgttagtttgtttggtaggtggtgtttgagctttggctaaaggtagttttcctttagtattggtggctgttttggtcattgacgcattttggatcattgtttgtaaatttgattcagattcatcatcagattctgaggcaatgtctgcccaagattttttgattatttttggaaatttggtcagacccatgtcttgaagggcctgaagggtttcaattggccatgcatagtcggccgatgtttgtttggcggttgccggtttgggagattcctgagtggatggctcaggtttgattgaggcaatctgggttgatgacccttctaaattggttttctgggtagatgacccagcctgggttggtgacccagaagaggtagatgatttcttgatggttggctctggaagagccagcctggctcctttgcctgtactccttcctccccgtagggagattcccgatgccttaggaggcattaccacttttctgtaagaattcacgggtaaggtagtcaggtagtgaatttgaggtgcccttgatgtattctatgtcaa

SEQ ID NO: 10556 - DNA, 1113 bp, Glycine max
  Gm_smallRNAprecursor_3389
ggaaatttggtcagacccatgtcttgaagggcctgaagggtttcaattggccatgcatagtcggccgatgtttgtttggcggttgccggtttgggagattcctgagtggatggctcaggtttgattgaggcaatctgggttgatgacccttctaaattggttttctgggtagatgacccagcctgggttggtgacccagaagaggtagatgatttcttgatggttggctctggaagagccagcctggctcctttgcctgtactccttcctccccgtagggagattcccgatgccttaggaggcattaccacttttctgtaagaattcacgggtaaggtagtcaggtagtgaatttgaggtgcccttgatgtattctatgtcaaaatcaaagacacttaaaattgcttgccatcgtgcaaaaatttgttttgaggcaaggtttttaacatctttttgtaaaatatctttggctgatttacaatcaaccctgattaaaaatttttggtttaataaatccgattgaaatttggaaatgcacaaaacaattgctaaaacttcttttttaacagttgaatattttaattgtgcaggattccaatgttttgatgtatatgcaatgacatgatcttggccatggactctttgtttgaggatgccaccataacctatgtctgaagcatcagtttcgacaattttaaatgcctgtggaataggaagatacagacatttaatggattggactttgactttgatttctttaaccgtttgtgtatggaggtcagaccaaggaggcggatttttcttcagcctatcatgtaatggcttgacaatattatttaaataggggacaaattctcctacgtaatttagacaacctagaaatctttgtaactgggttttgtctaagatttggttggggaatttgctagcaaactctattgacctttcgaatggaatgattgtaccttgatatatattgtgaccaaggaatctaattcgagtttggaaaagattgatttttgatttggagactgccaaaccattttgtttgatgatatgtatgaaggtttggagatgtttgaaatgttggtcaatgttttgggaaaagattaa

SEQ ID NO: 10557 - DNA, 1113 bp, Glycine max; identical to SEQ ID NO: 10556
  Gm_smallRNAprecursor_3390

SEQ ID NO: 10558 - DNA, 1114 bp, Glycine max
  Gm_smallRNAprecursor_3391
ggaaatttggtcagacccatgtcttgaagggcctgaagggtttcaattggccatgcatagtcggccgatgtttgtttggcggttgccggtttgggagattcctgagtggatggctcaggtttgattgaggcaatctgggttgatgacccttctaaattggttttctgggtagatgacccagcctgggttggtgacccagaagaggtagatgatttcttgatggttggctctggaagagccagcctggctcctttgcctgtactccttcctccccgtagggagattcccgatgccttaggaggcattaccacttttctgtaagaattcacgggtaaggtagtcaggtagtgaatttgaggtgcccttgatgtattctatgtcaaaatcaaagacacttaaaattgcttgccatcgtgcaaaaatttgttttgaggcaaggtttttaacatctttttgtaaaatatctttggctgatttacaatcaaccctgattaaaaatttttggtttaataaatccgattgaaatttggaaatgcacaaaacaattgctaaaacttcttttttaacagttgaatattttaattgtgcaggattccaatgttttgatgtatatgcaatgacatgatcttggccatggactctttgtttgaggatgccaccataacctatgtctgaagcatcagtttcgacaattttaaatgcctgtggaataggaagatacagacatttaatggattggactttgactttgatttctttaaccgtttgtgtatggaggtcagaccaaggaggcggatttttcttcagcctatcatgtaatggcttgacaatattatttaaataggggacaaattctcctacgtaatttagacaacctagaaatctttgtaactgggttttgtctaagatttggttggggaatttgctagcaaactctattgacctttcgaatggaatgattgtaccttgatatatattgtgaccaaggaatctaattcgagtttggaaaagattgatttttgatttggagactgccaaaccattttgtttgatgatatgtatgaaggtttggagatgtttgaaatgttggtcaatgttttgggaaaagattaaa

SEQ ID NO: 10559 - DNA, 1207 bp, Glycine max
  Gm_smallRNAprecursor_3392
ggaaatttggtcagacccatgtcttgaagggcctgaagggtttcaattggccatgcatagtcggccgatgtttgtttggcggttgccggtttgggagattcctgagtggatggctcaggtttgattgaggcaatctgggttgatgacccttctaaattggttttctgggtagatgacccagcctgggttggtgacccagaagaggtagatgatttcttgatggttggctctggaagagccagcctggctcctttgcctgtactccttcctccccgtagggagattcccgatgccttaggaggcattaccacttttctgtaagaattcacgggtaaggtagtcaggtagtgaatttgaggtgcccttgatgtattctatgtcaaaatcaaagacacttaaaattgcttgccatcgtgcaaaaatttgttttgaggcaaggtttttaacatctttttgtaaaatatctttggctgatttacaatcaaccctgattaaaaatttttggtttaataaatccgattgaaatttggaaatgcacaaaacaattgctaaaacttcttttttaacagttgaatattttaattgtgcaggattccaatgttttgatgtatatgcaatgacatgatcttggccatggactctttgtttgaggatgccaccataacctatgtctgaagcatcagtttcgacaattttaaatgcctgtggaataggaagatacagacatttaatggattggactttgactttgatttctttaaccgtttgtgtatggaggtcagaccaaggaggcggatttttcttcagcctatcatgtaatggcttgacaatattatttaaataggggacaaattctcctacgtaatttagacaacctagaaatctttgtaactgggttttgtctaagatttggttggggaatttgctagcaaactctattgacctttcgaatggaatgattgtaccttgatatatattgtgaccaaggaatctaattcgagtttggaaaagattgatttttgatttggagactgccaaaccattttgtttgatgatatgtatgaaggtttggagatgtttgaaatgttggtcaatgttttgggaaaagattaaaacatcatctatgtagacaatgacaaattttgaataaggattaaaaatattgttcataattttttgaaattctgaaggggcattcttcagtccg

SEQ ID NO: 10560 - DNA, 1035 bp, Glycine max
  Gm_smallRNAprecursor_3393
gcggttgccggtttgggagattcctgagtggatggctcaggtttgattgaggcaatctgggttgatgacccttctaaattggttttctgggtagatgacccagcctgggttggtgacccagaagaggtagatgatttcttgatggttggctctggaagagccagcctggctcctttgcctgtactccttcctccccgtagggagattcccgatgccttaggaggcattaccacttttctgtaagaattcacgggtaaggtagtcaggtagtgaatttgaggtgcccttgatgtattctatgtcaaaatcaaagacacttaaaattgcttgccatcgtgcaaaaatttgttttgaggcaaggtttttaacatctttttgtaaaatatctttggctgatttacaatcaaccctgattaaaaatttttggtttaataaatccgattgaaatttggaaatgcacaaaacaattgctaaaacttcttttttaacagttgaatattttaattgtgcaggattccaatgttttgatgtatatgcaatgacatgatcttggccatggactctttgtttgaggatgccaccataacctatgtctgaagcatcagtttcgacaattttaaatgcctgtggaataggaagatacagacatttaatggattggactttgactttgatttctttaaccgtttgtgtatggaggtcagaccaaggaggcggatttttcttcagcctatcatgtaatggcttgacaatattatttaaataggggacaaattctcctacgtaatttagacaacctagaaatctttgtaactgggttttgtctaagatttggttggggaatttgctagcaaactctattgacctttcgaatggaatgattgtaccttgatatatattgtgaccaaggaatctaattcgagtttggaaaagattgatttttgatttggagactgccaaaccattttgtttgatgatatgtatgaaggtttggagatgtttgaaatgttggtcaatgttttgggaaaagattaa

SEQ ID NO: 10561 - DNA, 1247 bp, Glycine max
  Gm_smallRNAprecursor_3394
agatgatttcttgatggttggctctggaagagccagcctggctcctttgcctgtactccttcctccccgtagggagattcccgatgccttaggaggcattaccacttttctgtaagaattcacgggtaaggtagtcaggtagtgaatttgaggtgcccttgatgtattctatgtcaaaatcaaagacacttaaaattgcttgccatcgtgcaaaaatttgttttgaggcaaggtttttaacatctttttgtaaaatatctttggctgatttacaatcaaccctgattaaaaatttttggtttaataaatccgattgaaatttggaaatgcacaaaacaattgctaaaacttcttttttaacagttgaatattttaattgtgcaggattccaatgttttgatgtatatgcaatgacatgatcttggccatggactctttgtttgaggatgccaccataacctatgtctgaagcatcagtttcgacaattttaaatgcctgtggaataggaagatacagacatttaatggattggactttgactttgatttctttaaccgtttgtgtatggaggtcagaccaaggaggcggatttttcttcagcctatcatgtaatggcttgacaatattatttaaataggggacaaattctcctacgtaatttagacaacctagaaatctttgtaactgggttttgtctaagatttggttggggaatttgctagcaaactctattgacctttcgaatggaatgattgtaccttgatatatattgtgaccaaggaatctaattcgagtttggaaaagattgatttttgatttggagactgccaaaccattttgtttgatgatatgtatgaaggtttggagatgtttgaaatgttggtcaatgttttgggaaaagattaaaacatcatctatgtagacaatgacaaattttgaataaggattaaaaatattgttcataattttttgaaattctgaaggggcattcttcagtccgaatggcatcacgttccattcatattgcccgaaaggtacagtaaacgctgttttgtacctatctgattcttggatttggatttgccaaaatccagatttcatatcaaattttgaaaatatctttgcagaatttaatctgttaagcaaatcttttttgtttggaataggatatctaatccattgtaatgcttgatttaatggtttgtaatttatgactaagcggggtgttccacgctcaatctcagat

SEQ ID NO: 10562 - DNA, 1246 bp, Glycine max
  Gm_smallRNAprecursor_3395
gatgatttcttgatggttggctctggaagagccagcctggctcctttgcctgtactccttcctccccgtagggagattcccgatgccttaggaggcattaccacttttctgtaagaattcacgggtaaggtagtcaggtagtgaatttgaggtgcccttgatgtattctatgtcaaaatcaaagacacttaaaattgcttgccatcgtgcaaaaatttgttttgaggcaaggtttttaacatctttttgtaaaatatctttggctgatttacaatcaaccctgattaaaaatttttggtttaataaatccgattgaaatttggaaatgcacaaaacaattgctaaaacttcttttttaacagttgaatattttaattgtgcaggattccaatgttttgatgtatatgcaatgacatgatcttggccatggactctttgtttgaggatgccaccataacctatgtctgaagcatcagtttcgacaattttaaatgcctgtggaataggaagatacagacatttaatggattggactttgactttgatttctttaaccgtttgtgtatggaggtcagaccaaggaggcggatttttcttcagcctatcatgtaatggcttgacaatattatttaaataggggacaaattctcctacgtaatttagacaacctagaaatctttgtaactgggttttgtctaagatttggttggggaatttgctagcaaactctattgacctttcgaatggaatgattgtaccttgatatatattgtgaccaaggaatctaattcgagtttggaaaagattgatttttgatttggagactgccaaaccattttgtttgatgatatgtatgaaggtttggagatgtttgaaatgttggtcaatgttttgggaaaagattaaaacatcatctatgtagacaatgacaaattttgaataaggattaaaaatattgttcataattttttgaaattctgaaggggcattcttcagtccgaatggcatcacgttccattcatattgcccgaaaggtacagtaaacgctgttttgtacctatctgattcttggatttggatttgccaaaatccagatttcatatcaaattttgaaaatatctttgcagaatttaatctgttaagcaaatcttttttgtttggaataggatatctaatccattgtaatgcttgatttaatggtttgtaatttatgactaagcggggtgttccacgctcaatctcagat

SEQ ID NO: 10563 - DNA, 1061 bp, Glycine max
  Gm_smallRNAprecursor_3396
tatttaaataggggacaaattctcctacgtaatttagacaacctagaaatctttgtaactgggttttgtctaagatttggttggggaatttgctagcaaactctattgacctttcgaatggaatgattgtaccttgatatatattgtgaccaaggaatctaattcgagtttggaaaagattgatttttgatttggagactgccaaaccattttgtttgatgatatgtatgaaggtttggagatgtttgaaatgttggtcaatgttttgggaaaagattaaaacatcatctatgtagacaatgacaaattttgaataaggattaaaaatattgttcataattttttgaaattctgaaggggcattcttcagtccgaatggcatcacgttccattcatattgcccgaaaggtacagtaaacgctgttttgtacctatctgattcttggatttggatttgccaaaatccagatttcatatcaaattttgaaaatatctttgcagaatttaatctgttaagcaaatcttttttgtttggaataggatatctaatccattgtaatgcttgatttaatggtttgtaatttatgactaagcggggtgttccacgctcaatctcagattgtttgttaacataaaaagccgcacaagaccatgggcttttgcttttccggattaggccttcatcaagcaaatccttgatttccttttgacaatattgaagaagttcttcattcatttggattggtctggcttttgtgggaatttgtttttccctaaagtctttctcataagggagatcgacaatatgtttctttctgtcccaaaatgcatgtggcaattcagaacaaacggtcgattcaatatgatttaataaagattgaattctttcttttacttggggttttcccagttgtatctgaatattattaaaagatacttcttcttttaagaagttaatttgattaatcttattttctataagatttatatttctggaaattggtttagtagaaaaattaaatataatttttcttcctaaataatttgtggttattccttca

SEQ ID NO: 10564 - DNA, 1127 bp, Glycine max
  Gm_smallRNAprecursor_3397
ggacaaattctcctacgtaatttagacaacctagaaatctttgtaactgggttttgtctaagatttggttggggaatttgctagcaaactctattgacctttcgaatggaatgattgtaccttgatatatattgtgaccaaggaatctaattcgagtttggaaaagattgatttttgatttggagactgccaaaccattttgtttgatgatatgtatgaaggtttggagatgtttgaaatgttggtcaatgttttgggaaaagattaaaacatcatctatgtagacaatgacaaattttgaataaggattaaaaatattgttcataattttttgaaattctgaaggggcattcttcagtccgaatggcatcacgttccattcatattgcccgaaaggtacagtaaacgctgttttgtacctatctgattcttggatttggatttgccaaaatccagatttcatatcaaattttgaaaatatctttgcagaatttaatctgttaagcaaatcttttttgtttggaataggatatctaatccattgtaatgcttgatttaatggtttgtaatttatgactaagcggggtgttccacgctcaatctcagattgtttgttaacataaaaagccgcacaagaccatgggcttttgcttttccggattaggccttcatcaagcaaatccttgatttccttttgacaatattgaagaagttcttcattcatttggattggtctggcttttgtgggaatttgtttttccctaaagtctttctcataagggagatcgacaatatgtttctttctgtcccaaaatgcatgtggcaattcagaacaaacggtcgattcaatatgatttaataaagattgaattctttcttttacttggggttttcccagttgtatctgaatattattaaaagatacttcttcttttaagaagttaatttgattaatcttattttctataagatttatatttctggaaattggtttagtagaaaaattaaatataatttttcttcctaaataatttgtggttattccttcattagatatttggatgggaaacagggctctaatgaagggcgttcctaagattacttcattcttaaggttttttaccaga

SEQ ID NO: 10565 - DNA, 1159 bp, Glycine max
  Gm_smallRNAprecursor_3398
acccatctttcgggaagagttacttcatcccattttatttttctcgggagagacacgttagcctttgtcatatcagtgataaacaaggttgtttctcctttttgaggttttaacaggactctagatgcacaagtattcatgaccttgtactggatcctataaattaaggctgctgggattgatccttctttcatgtcaaggccatgaaagtggatgtttaagaacagagagtcaagaatgtttctgtccatcagactcactgttttgtttggataacaattaaaatatattggaccttgtcctaggctggtttcgactgttccaattagggagtcttcaaattgattatgcctaatatctcttagacacattaaaactgctgcatctatgcccatatcaattaagggcttgatggctacttgtatacaaccgatgtgtagatatttatacttacggctatgttcataaattgaattttttgaaagtagatgaaattcttcccctatatcttgtcctagaggaatattgttttctacttttttgattatataatcaaagttgtgtttgtctttaattgtttcaggaacatatagttgatcctgagggatttctggaatgttccagtcatccatgttttgattaatatcttcgaatcggacttcctcatcgaagagattgtgttttggggcgacctcttgggtctggttatcttgatcatttaagagattggtgtttcttgaagaagatgaagaggaggaatttgagcgaaaagagatacgggaaaaggatcgcaataatctagacatgattaaaacattctctaatatctttgccttcatttggttccataggaatctttccataaggctatatgttacagaacttcttggatctgaataaatgaaaaagaagatttttttttttttaactacagacaatatagtttgaacattactcctatagccaccagtatattatgtctcaatattttatttgaacaatacaccttagccttactgccctttctcatccacgggacttactgctacagtatcattcaactaaaatatcagactgctgtgcttccagaaaatactgttcaaacacatactgtttaaattaaaatcactgtacatgcttcagtgattatgggatggga

SEQ ID NO: 10566 - DNA, 1189 bp, Glycine max
  Gm_smallRNAprecursor_3399
ttcctcgtggcttctttgagaagctttctcaagagacttctttgagaagctagatccttatctatccacacccctctattaactaaattaaccttcttaaaaataattacggatgaaaataacgcaacaaagaatcaaacatcaaacataatttctaatcaaattggcaagtgaaggatggtgagttaatccaatcggaattacctcccgcaacacaatatcaactaccaaatatcaaacggacagataggaagtaagaatgcagtatgataaatgaaaggaaaatataaactggtaaaacagatatcaagggcacaccagagaccggcttacaaatcccaggttttcattaaaaaaaagaaaccgaagcggcggcagagccgcacaggatcggtaaagagagagaagaggaatgaaaaatagaaatttattgaaacttgaaagaagcgcttacaaaatcgtgtttcagagcacctcttcttcagaaacctgaaaaatggctaaatgaaagggtgcctcacaacatacttgaggactccttatatagccaaaaatctaagaccggtagttttgatcgggactatttgactgtttgttacaagacaagtagtttcgaccgggactttaatggctacaggacaggtagtattgtccagcattaattacacattaattacaaacagacggttttgtgaccgaaattaaatttaatctaaacagataccaaaacaatcatcttcgttttggtaaaaggggtcttcttcttcttcttcagcagaacttgtttcttccttctttgaggataaactttcttcttcctgctgtaacatttgcagaacttcctttagatttttagctaagacctcctttgatttcgatcctgctaaaaatgctgccatatgagacttttggttcaaaaacacagaagtttctggatcagcggctttgaggaattctggatgggattggaaccagagttttacttgttctggatccgctttggatgagtcaaattgtgtccaccattttacaaacgcgtgtctttgtagtgatggatattggtttgtcttttcagtcttgctgtaacgatattgccatgagaagatccatgacagtgcaaagcttgaaaagtatttaagatctgctggaattcgtgattcctgcgaattgtattgtctctcaaattgag

SEQ ID NO: 10567 - DNA, 1061 bp, Glycine max
  Gm_smallRNAprecursor_3400
acacaatatcaactaccaaatatcaaacggacagataggaagtaagaatgcagtatgataaatgaaaggaaaatataaactggtaaaacagatatcaagggcacaccagagaccggcttacaaatcccaggttttcattaaaaaaaagaaaccgaagcggcggcagagccgcacaggatcggtaaagagagagaagaggaatgaaaaatagaaatttattgaaacttgaaagaagcgcttacaaaatcgtgtttcagagcacctcttcttcagaaacctgaaaaatggctaaatgaaagggtgcctcacaacatacttgaggactccttatatagccaaaaatctaagaccggtagttttgatcgggactatttgactgtttgttacaagacaagtagtttcgaccgggactttaatggctacaggacaggtagtattgtccagcattaattacacattaattacaaacagacggttttgtgaccgaaattaaatttaatctaaacagataccaaaacaatcatcttcgttttggtaaaaggggtcttcttcttcttcttcagcagaacttgtttcttccttctttgaggataaactttcttcttcctgctgtaacatttgcagaacttcctttagatttttagctaagacctcctttgatttcgatcctgctaaaaatgctgccatatgagacttttggttcaaaaacacagaagtttctggatcagcggctttgaggaattctggatgggattggaaccagagttttacttgttctggatccgctttggatgagtcaaattgtgtccaccattttacaaacgcgtgtctttgtagtgatggatattggtttgtcttttcagtcttgctgtaacgatattgccatgagaagatccatgacagtgcaaagcttgaaaagtatttaagatctgctggaattcgtgattcctgcgaattgtattgtctctcaaattgagcaaatccttgttggactgtttctgggaatatctctgggattggtccaaagaagtcccaccattgcaaaaaccaattgggaaaat

SEQ ID NO: 10568 - DNA, 1063 bp, Glycine max
  Gm_smallRNAprecursor_3401
acacaatatcaactaccaaatatcaaacggacagataggaagtaagaatgcagtatgataaatgaaaggaaaatataaactggtaaaacagatatcaagggcacaccagagaccggcttacaaatcccaggttttcattaaaaaaaagaaaccgaagcggcggcagagccgcacaggatcggtaaagagagagaagaggaatgaaaaatagaaatttattgaaacttgaaagaagcgcttacaaaatcgtgtttcagagcacctcttcttcagaaacctgaaaaatggctaaatgaaagggtgcctcacaacatacttgaggactccttatatagccaaaaatctaagaccggtagttttgatcgggactatttgactgtttgttacaagacaagtagtttcgaccgggactttaatggctacaggacaggtagtattgtccagcattaattacacattaattacaaacagacggttttgtgaccgaaattaaatttaatctaaacagataccaaaacaatcatcttcgttttggtaaaaggggtcttcttcttcttcttcagcagaacttgtttcttccttctttgaggataaactttcttcttcctgctgtaacatttgcagaacttcctttagatttttagctaagacctcctttgatttcgatcctgctaaaaatgctgccatatgagacttttggttcaaaaacacagaagtttctggatcagcggctttgaggaattctggatgggattggaaccagagttttacttgttctggatccgctttggatgagtcaaattgtgtccaccattttacaaacgcgtgtctttgtagtgatggatattggtttgtcttttcagtcttgctgtaacgatattgccatgagaagatccatgacagtgcaaagcttgaaaagtatttaagatctgctggaattcgtgattcctgcgaattgtattgtctctcaaattgagcaaatccttgttggactgtttctgggaatatctctgggattggtccaaagaagtcccaccattgcaaaaaccaattgggaaaattg

SEQ ID NO: 10569 - DNA, 1063 bp, Glycine max; identical to SEQ ID NO: 10568
  Gm_smallRNAprecursor_3402

SEQ ID NO: 10570 - DNA, 1064 bp, Glycine max
  Gm_smallRNAprecursor_3403
acacaatatcaactaccaaatatcaaacggacagataggaagtaagaatgcagtatgataaatgaaaggaaaatataaactggtaaaacagatatcaagggcacaccagagaccggcttacaaatcccaggttttcattaaaaaaaagaaaccgaagcggcggcagagccgcacaggatcggtaaagagagagaagaggaatgaaaaatagaaatttattgaaacttgaaagaagcgcttacaaaatcgtgtttcagagcacctcttcttcagaaacctgaaaaatggctaaatgaaagggtgcctcacaacatacttgaggactccttatatagccaaaaatctaagaccggtagttttgatcgggactatttgactgtttgttacaagacaagtagtttcgaccgggactttaatggctacaggacaggtagtattgtccagcattaattacacattaattacaaacagacggttttgtgaccgaaattaaatttaatctaaacagataccaaaacaatcatcttcgttttggtaaaaggggtcttcttcttcttcttcagcagaacttgtttcttccttctttgaggataaactttcttcttcctgctgtaacatttgcagaacttcctttagatttttagctaagacctcctttgatttcgatcctgctaaaaatgctgccatatgagacttttggttcaaaaacacagaagtttctggatcagcggctttgaggaattctggatgggattggaaccagagttttacttgttctggatccgctttggatgagtcaaattgtgtccaccattttacaaacgcgtgtctttgtagtgatggatattggtttgtcttttcagtcttgctgtaacgatattgccatgagaagatccatgacagtgcaaagcttgaaaagtatttaagatctgctggaattcgtgattcctgcgaattgtattgtctctcaaattgagcaaatccttgttggactgtttctgggaatatctctgggattggtccaaagaagtcccaccattgcaaaaaccaattgggaaaattgt

SEQ ID NO: 10571 - DNA, 1057 bp, Glycine max
  Gm_smallRNAprecursor_3404
caatatcaactaccaaatatcaaacggacagataggaagtaagaatgcagtatgataaatgaaaggaaaatataaactggtaaaacagatatcaagggcacaccagagaccggcttacaaatcccaggttttcattaaaaaaaagaaaccgaagcggcggcagagccgcacaggatcggtaaagagagagaagaggaatgaaaaatagaaatttattgaaacttgaaagaagcgcttacaaaatcgtgtttcagagcacctcttcttcagaaacctgaaaaatggctaaatgaaagggtgcctcacaacatacttgaggactccttatatagccaaaaatctaagaccggtagttttgatcgggactatttgactgtttgttacaagacaagtagtttcgaccgggactttaatggctacaggacaggtagtattgtccagcattaattacacattaattacaaacagacggttttgtgaccgaaattaaatttaatctaaacagataccaaaacaatcatcttcgttttggtaaaaggggtcttcttcttcttcttcagcagaacttgtttcttccttctttgaggataaactttcttcttcctgctgtaacatttgcagaacttcctttagatttttagctaagacctcctttgatttcgatcctgctaaaaatgctgccatatgagacttttggttcaaaaacacagaagtttctggatcagcggctttgaggaattctggatgggattggaaccagagttttacttgttctggatccgctttggatgagtcaaattgtgtccaccattttacaaacgcgtgtctttgtagtgatggatattggtttgtcttttcagtcttgctgtaacgatattgccatgagaagatccatgacagtgcaaagcttgaaaagtatttaagatctgctggaattcgtgattcctgcgaattgtattgtctctcaaattgagcaaatccttgttggactgtttctgggaatatctctgggattggtccaaagaagtcccaccattgcaaaaaccaattgggaaaa

SEQ ID NO: 10572 - DNA, 1058 bp, Glycine max
  Gm_smallRNAprecursor_3405
caatatcaactaccaaatatcaaacggacagataggaagtaagaatgcagtatgataaatgaaaggaaaatataaactggtaaaacagatatcaagggcacaccagagaccggcttacaaatcccaggttttcattaaaaaaaagaaaccgaagcggcggcagagccgcacaggatcggtaaagagagagaagaggaatgaaaaatagaaatttattgaaacttgaaagaagcgcttacaaaatcgtgtttcagagcacctcttcttcagaaacctgaaaaatggctaaatgaaagggtgcctcacaacatacttgaggactccttatatagccaaaaatctaagaccggtagttttgatcgggactatttgactgtttgttacaagacaagtagtttcgaccgggactttaatggctacaggacaggtagtattgtccagcattaattacacattaattacaaacagacggttttgtgaccgaaattaaatttaatctaaacagataccaaaacaatcatcttcgttttggtaaaaggggtcttcttcttcttcttcagcagaacttgtttcttccttctttgaggataaactttcttcttcctgctgtaacatttgcagaacttcctttagatttttagctaagacctcctttgatttcgatcctgctaaaaatgctgccatatgagacttttggttcaaaaacacagaagtttctggatcagcggctttgaggaattctggatgggattggaaccagagttttacttgttctggatccgctttggatgagtcaaattgtgtccaccattttacaaacgcgtgtctttgtagtgatggatattggtttgtcttttcagtcttgctgtaacgatattgccatgagaagatccatgacagtgcaaagcttgaaaagtatttaagatctgctggaattcgtgattcctgcgaattgtattgtctctcaaattgagcaaatccttgttggactgtttctgggaatatctctgggattggtccaaagaagtcccaccattgcaaaaaccaattgggaaaat

SEQ ID NO: 10573 - DNA, 1056 bp, Glycine max
  Gm_smallRNAprecursor_3406
aatatcaactaccaaatatcaaacggacagataggaagtaagaatgcagtatgataaatgaaaggaaaatataaactggtaaaacagatatcaagggcacaccagagaccggcttacaaatcccaggttttcattaaaaaaaagaaaccgaagcggcggcagagccgcacaggatcggtaaagagagagaagaggaatgaaaaatagaaatttattgaaacttgaaagaagcgcttacaaaatcgtgtttcagagcacctcttcttcagaaacctgaaaaatggctaaatgaaagggtgcctcacaacatacttgaggactccttatatagccaaaaatctaagaccggtagttttgatcgggactatttgactgtttgttacaagacaagtagtttcgaccgggactttaatggctacaggacaggtagtattgtccagcattaattacacattaattacaaacagacggttttgtgaccgaaattaaatttaatctaaacagataccaaaacaatcatcttcgttttggtaaaaggggtcttcttcttcttcttcagcagaacttgtttcttccttctttgaggataaactttcttcttcctgctgtaacatttgcagaacttcctttagatttttagctaagacctcctttgatttcgatcctgctaaaaatgctgccatatgagacttttggttcaaaaacacagaagtttctggatcagcggctttgaggaattctggatgggattggaaccagagttttacttgttctggatccgctttggatgagtcaaattgtgtccaccattttacaaacgcgtgtctttgtagtgatggatattggtttgtcttttcagtcttgctgtaacgatattgccatgagaagatccatgacagtgcaaagcttgaaaagtatttaagatctgctggaattcgtgattcctgcgaattgtattgtctctcaaattgagcaaatccttgttggactgtttctgggaatatctctgggattggtccaaagaagtcccaccattgcaaaaaccaattgggaaaa

SEQ ID NO: 10574 - DNA, 1056 bp, Glycine max; identical to SEQ ID NO: 10573
  Gm_smallRNAprecursor_3407

SEQ ID NO: 10575 - DNA, 1057 bp, Glycine max
  Gm_smallRNAprecursor_3408
aatatcaactaccaaatatcaaacggacagataggaagtaagaatgcagtatgataaatgaaaggaaaatataaactggtaaaacagatatcaagggcacaccagagaccggcttacaaatcccaggttttcattaaaaaaaagaaaccgaagcggcggcagagccgcacaggatcggtaaagagagagaagaggaatgaaaaatagaaatttattgaaacttgaaagaagcgcttacaaaatcgtgtttcagagcacctcttcttcagaaacctgaaaaatggctaaatgaaagggtgcctcacaacatacttgaggactccttatatagccaaaaatctaagaccggtagttttgatcgggactatttgactgtttgttacaagacaagtagtttcgaccgggactttaatggctacaggacaggtagtattgtccagcattaattacacattaattacaaacagacggttttgtgaccgaaattaaatttaatctaaacagataccaaaacaatcatcttcgttttggtaaaaggggtcttcttcttcttcttcagcagaacttgtttcttccttctttgaggataaactttcttcttcctgctgtaacatttgcagaacttcctttagatttttagctaagacctcctttgatttcgatcctgctaaaaatgctgccatatgagacttttggttcaaaaacacagaagtttctggatcagcggctttgaggaattctggatgggattggaaccagagttttacttgttctggatccgctttggatgagtcaaattgtgtccaccattttacaaacgcgtgtctttgtagtgatggatattggtttgtcttttcagtcttgctgtaacgatattgccatgagaagatccatgacagtgcaaagcttgaaaagtatttaagatctgctggaattcgtgattcctgcgaattgtattgtctctcaaattgagcaaatccttgttggactgtttctgggaatatctctgggattggtccaaagaagtcccaccattgcaaaaaccaattgggaaaat

SEQ ID NO: 10576 - DNA, 1059 bp, Glycine max
  Gm_smallRNAprecursor_3409
aatatcaactaccaaatatcaaacggacagataggaagtaagaatgcagtatgataaatgaaaggaaaatataaactggtaaaacagatatcaagggcacaccagagaccggcttacaaatcccaggttttcattaaaaaaaagaaaccgaagcggcggcagagccgcacaggatcggtaaagagagagaagaggaatgaaaaatagaaatttattgaaacttgaaagaagcgcttacaaaatcgtgtttcagagcacctcttcttcagaaacctgaaaaatggctaaatgaaagggtgcctcacaacatacttgaggactccttatatagccaaaaatctaagaccggtagttttgatcgggactatttgactgtttgttacaagacaagtagtttcgaccgggactttaatggctacaggacaggtagtattgtccagcattaattacacattaattacaaacagacggttttgtgaccgaaattaaatttaatctaaacagataccaaaacaatcatcttcgttttggtaaaaggggtcttcttcttcttcttcagcagaacttgtttcttccttctttgaggataaactttcttcttcctgctgtaacatttgcagaacttcctttagatttttagctaagacctcctttgatttcgatcctgctaaaaatgctgccatatgagacttttggttcaaaaacacagaagtttctggatcagcggctttgaggaattctggatgggattggaaccagagttttacttgttctggatccgctttggatgagtcaaattgtgtccaccattttacaaacgcgtgtctttgtagtgatggatattggtttgtcttttcagtcttgctgtaacgatattgccatgagaagatccatgacagtgcaaagcttgaaaagtatttaagatctgctggaattcgtgattcctgcgaattgtattgtctctcaaattgagcaaatccttgttggactgtttctgggaatatctctgggattggtccaaagaagtcccaccattgcaaaaaccaattgggaaaattg

SEQ ID NO: 10577 - DNA, 1059 bp, Glycine max; identical to SEQ ID NO: 10576
  Gm_smallRNAprecursor_3410

SEQ ID NO: 10578 - DNA, 1055 bp, Glycine max
  Gm_smallRNAprecursor_3411
atatcaactaccaaatatcaaacggacagataggaagtaagaatgcagtatgataaatgaaaggaaaatataaactggtaaaacagatatcaagggcacaccagagaccggcttacaaatcccaggttttcattaaaaaaaagaaaccgaagcggcggcagagccgcacaggatcggtaaagagagagaagaggaatgaaaaatagaaatttattgaaacttgaaagaagcgcttacaaaatcgtgtttcagagcacctcttcttcagaaacctgaaaaatggctaaatgaaagggtgcctcacaacatacttgaggactccttatatagccaaaaatctaagaccggtagttttgatcgggactatttgactgtttgttacaagacaagtagtttcgaccgggactttaatggctacaggacaggtagtattgtccagcattaattacacattaattacaaacagacggttttgtgaccgaaattaaatttaatctaaacagataccaaaacaatcatcttcgttttggtaaaaggggtcttcttcttcttcttcagcagaacttgtttcttccttctttgaggataaactttcttcttcctgctgtaacatttgcagaacttcctttagatttttagctaagacctcctttgatttcgatcctgctaaaaatgctgccatatgagacttttggttcaaaaacacagaagtttctggatcagcggctttgaggaattctggatgggattggaaccagagttttacttgttctggatccgctttggatgagtcaaattgtgtccaccattttacaaacgcgtgtctttgtagtgatggatattggtttgtcttttcagtcttgctgtaacgatattgccatgagaagatccatgacagtgcaaagcttgaaaagtatttaagatctgctggaattcgtgattcctgcgaattgtattgtctctcaaattgagcaaatccttgttggactgtttctgggaatatctctgggattggtccaaagaagtcccaccattgcaaaaaccaattgggaaaa

SEQ ID NO: 10579 - DNA, 1058 bp, Glycine max
  Gm_smallRNAprecursor_3412
atatcaactaccaaatatcaaacggacagataggaagtaagaatgcagtatgataaatgaaaggaaaatataaactggtaaaacagatatcaagggcacaccagagaccggcttacaaatcccaggttttcattaaaaaaaagaaaccgaagcggcggcagagccgcacaggatcggtaaagagagagaagaggaatgaaaaatagaaatttattgaaacttgaaagaagcgcttacaaaatcgtgtttcagagcacctcttcttcagaaacctgaaaaatggctaaatgaaagggtgcctcacaacatacttgaggactccttatatagccaaaaatctaagaccggtagttttgatcgggactatttgactgtttgttacaagacaagtagtttcgaccgggactttaatggctacaggacaggtagtattgtccagcattaattacacattaattacaaacagacggttttgtgaccgaaattaaatttaatctaaacagataccaaaacaatcatcttcgttttggtaaaaggggtcttcttcttcttcttcagcagaacttgtttcttccttctttgaggataaactttcttcttcctgctgtaacatttgcagaacttcctttagatttttagctaagacctcctttgatttcgatcctgctaaaaatgctgccatatgagacttttggttcaaaaacacagaagtttctggatcagcggctttgaggaattctggatgggattggaaccagagttttacttgttctggatccgctttggatgagtcaaattgtgtccaccattttacaaacgcgtgtctttgtagtgatggatattggtttgtcttttcagtcttgctgtaacgatattgccatgagaagatccatgacagtgcaaagcttgaaaagtatttaagatctgctggaattcgtgattcctgcgaattgtattgtctctcaaattgagcaaatccttgttggactgtttctgggaatatctctgggattggtccaaagaagtcccaccattgcaaaaaccaattgggaaaattg

SEQ ID NO: 10580 - DNA, 1058 bp, Glycine max; identical to SEQ ID NO: 10579
  Gm_smallRNAprecursor_3413

SEQ ID NO: 10581 - DNA, 1130 bp, Glycine max
  Gm_smallRNAprecursor_3414
cctcttcttcagaaacctgaaaaatggctaaatgaaagggtgcctcacaacatacttgaggactccttatatagccaaaaatctaagaccggtagttttgatcgggactatttgactgtttgttacaagacaagtagtttcgaccgggactttaatggctacaggacaggtagtattgtccagcattaattacacattaattacaaacagacggttttgtgaccgaaattaaatttaatctaaacagataccaaaacaatcatcttcgttttggtaaaaggggtcttcttcttcttcttcagcagaacttgtttcttccttctttgaggataaactttcttcttcctgctgtaacatttgcagaacttcctttagatttttagctaagacctcctttgatttcgatcctgctaaaaatgctgccatatgagacttttggttcaaaaacacagaagtttctggatcagcggctttgaggaattctggatgggattggaaccagagttttacttgttctggatccgctttggatgagtcaaattgtgtccaccattttacaaacgcgtgtctttgtagtgatggatattggtttgtcttttcagtcttgctgtaacgatattgccatgagaagatccatgacagtgcaaagcttgaaaagtatttaagatctgctggaattcgtgattcctgcgaattgtattgtctctcaaattgagcaaatccttgttggactgtttctgggaatatctctgggattggtccaaagaagtcccaccattgcaaaaaccaattgggaaaattgtaaattgtattggtcttgaaatatatcagccatgaatgcttgaagcgggtattttggtgccaaaacaccttagtccaagcatcaacataatcccaataggtataacctaccggatcaaatggaactgaaaatctctttcctttgttcaagtccgaaccaaagtgtcttggttgaagaacttttagtatttggattgtcgagtgggtgtttaatgtttggtcttttgggtctttgaaatgtttgatagatactgagtttgaatctaccaaaatcaattcataaaaagttcttgtcttcaggatggttgttggtttgtagtgaaatcctg

SEQ ID NO: 10582 - DNA, 1131 bp, Glycine max
  Gm_smallRNAprecursor_3415
acaagtagtttcgaccgggactttaatggctacaggacaggtagtattgtccagcattaattacacattaattacaaacagacggttttgtgaccgaaattaaatttaatctaaacagataccaaaacaatcatcttcgttttggtaaaaggggtcttcttcttcttcttcagcagaacttgtttcttccttctttgaggataaactttcttcttcctgctgtaacatttgcagaacttcctttagatttttagctaagacctcctttgatttcgatcctgctaaaaatgctgccatatgagacttttggttcaaaaacacagaagtttctggatcagcggctttgaggaattctggatgggattggaaccagagttttacttgttctggatccgctttggatgagtcaaattgtgtccaccattttacaaacgcgtgtctttgtagtgatggatattggtttgtcttttcagtcttgctgtaacgatattgccatgagaagatccatgacagtgcaaagcttgaaaagtatttaagatctgctggaattcgtgattcctgcgaattgtattgtctctcaaattgagcaaatccttgttggactgtttctgggaatatctctgggattggtccaaagaagtcccaccattgcaaaaaccaattgggaaaattgtaaattgtattggtcttgaaatatatcagccatgaatgcttgaagcgggtattttggtgccaaaacaccttagtccaagcatcaacataatcccaataggtataacctaccggatcaaatggaactgaaaatctctttcctttgttcaagtccgaaccaaagtgtcttggttgaagaacttttagtatttggattgtcgagtgggtgtttaatgtttggtcttttgggtctttgaaatgtttgatagatactgagtttgaatctaccaaaatcaattcataaaaagttcttgtcttcaggatggttgttggtttgtagtgaaatcctggtgggaaagccttggccgtcgccttgaagggatttttgtcccaaaattcaggttccatctgcaaaacagttgtaaatttatttttataaatataattgttagtttgtttggtaggtggtgtttgagcttt

SEQ ID NO: 10583 - DNA, 1145 bp, Glycine max
  Gm_smallRNAprecursor_3416
gctacaggacaggtagtattgtccagcattaattacacattaattacaaacagacggttttgtgaccgaaattaaatttaatctaaacagataccaaaacaatcatcttcgttttggtaaaaggggtcttcttcttcttcttcagcagaacttgtttcttccttctttgaggataaactttcttcttcctgctgtaacatttgcagaacttcctttagatttttagctaagacctcctttgatttcgatcctgctaaaaatgctgccatatgagacttttggttcaaaaacacagaagtttctggatcagcggctttgaggaattctggatgggattggaaccagagttttacttgttctggatccgctttggatgagtcaaattgtgtccaccattttacaaacgcgtgtctttgtagtgatggatattggtttgtcttttcagtcttgctgtaacgatattgccatgagaagatccatgacagtgcaaagcttgaaaagtatttaagatctgctggaattcgtgattcctgcgaattgtattgtctctcaaattgagcaaatccttgttggactgtttctgggaatatctctgggattggtccaaagaagtcccaccattgcaaaaaccaattgggaaaattgtaaattgtattggtcttgaaatatatcagccatgaatgcttgaagcgggtattttggtgccaaaacaccttagtccaagcatcaacataatcccaataggtataacctaccggatcaaatggaactgaaaatctctttcctttgttcaagtccgaaccaaagtgtcttggttgaagaacttttagtatttggattgtcgagtgggtgtttaatgtttggtcttttgggtctttgaaatgtttgatagatactgagtttgaatctaccaaaatcaattcataaaaagttcttgtcttcaggatggttgttggtttgtagtgaaatcctggtgggaaagccttggccgtcgccttgaagggatttttgtcccaaaattcaggttccatctgcaaaacagttgtaaatttatttttataaatataattgttagtttgtttggtaggtggtgtttgagctttggctaaaggtagtttcccattaggattggtggttgttttggt

SEQ ID NO: 10584 - DNA, 1146 bp, Glycine max
  Gm_smallRNAprecursor_3417
gctacaggacaggtagtattgtccagcattaattacacattaattacaaacagacggttttgtgaccgaaattaaatttaatctaaacagataccaaaacaatcatcttcgttttggtaaaaggggtcttcttcttcttcttcagcagaacttgtttcttccttctttgaggataaactttcttcttcctgctgtaacatttgcagaacttcctttagatttttagctaagacctcctttgatttcgatcctgctaaaaatgctgccatatgagacttttggttcaaaaacacagaagtttctggatcagcggctttgaggaattctggatgggattggaaccagagttttacttgttctggatccgctttggatgagtcaaattgtgtccaccattttacaaacgcgtgtctttgtagtgatggatattggtttgtcttttcagtcttgctgtaacgatattgccatgagaagatccatgacagtgcaaagcttgaaaagtatttaagatctgctggaattcgtgattcctgcgaattgtattgtctctcaaattgagcaaatccttgttggactgtttctgggaatatctctgggattggtccaaagaagtcccaccattgcaaaaaccaattgggaaaattgtaaattgtattggtcttgaaatatatcagccatgaatgcttgaagcgggtattttggtgccaaaacaccttagtccaagcatcaacataatcccaataggtataacctaccggatcaaatggaactgaaaatctctttcctttgttcaagtccgaaccaaagtgtcttggttgaagaacttttagtatttggattgtcgagtgggtgtttaatgtttggtcttttgggtctttgaaatgtttgatagatactgagtttgaatctaccaaaatcaattcataaaaagttcttgtcttcaggatggttgttggtttgtagtgaaatcctggtgggaaagccttggccgtcgccttgaagggatttttgtcccaaaattcaggttccatctgcaaaacagttgtaaatttatttttataaatataattgttagtttgtttggtaggtggtgtttgagctttggctaaaggtagtttcccattaggattggtggttgttttggtc

SEQ ID NO: 10585 - DNA, 1100 bp, Glycine max
  Gm_smallRNAprecursor_3418
gcagaacttgtttcttccttctttgaggataaactttcttcttcctgctgtaacatttgcagaacttcctttagatttttagctaagacctcctttgatttcgatcctgctaaaaatgctgccatatgagacttttggttcaaaaacacagaagtttctggatcagcggctttgaggaattctggatgggattggaaccagagttttacttgttctggatccgctttggatgagtcaaattgtgtccaccattttacaaacgcgtgtctttgtagtgatggatattggtttgtcttttcagtcttgctgtaacgatattgccatgagaagatccatgacagtgcaaagcttgaaaagtatttaagatctgctggaattcgtgattcctgcgaattgtattgtctctcaaattgagcaaatccttgttggactgtttctgggaatatctctgggattggtccaaagaagtcccaccattgcaaaaaccaattgggaaaattgtaaattgtattggtcttgaaatatatcagccatgaatgcttgaagcgggtattttggtgccaaaacaccttagtccaagcatcaacataatcccaataggtataacctaccggatcaaatggaactgaaaatctctttcctttgttcaagtccgaaccaaagtgtcttggttgaagaacttttagtatttggattgtcgagtgggtgtttaatgtttggtcttttgggtctttgaaatgtttgatagatactgagtttgaatctaccaaaatcaattcataaaaagttcttgtcttcaggatggttgttggtttgtagtgaaatcctggtgggaaagccttggccgtcgccttgaagggatttttgtcccaaaattcaggttccatctgcaaaacagttgtaaatttatttttataaatataattgttagtttgtttggtaggtggtgtttgagctttggctaaaggtagtttcccattaggattggtggttgttttggtcattgatgcattttggatcattgtttgtaaatttgattaagattcatcatcagattctgaggcaatgtctgcccaagattttttgattatttttggaaa

SEQ ID NO: 10586 - DNA, 1170 bp, Glycine max
  Gm_smallRNAprecursor_3419
gcagaacttgtttcttccttctttgaggataaactttcttcttcctgctgtaacatttgcagaacttcctttagatttttagctaagacctcctttgatttcgatcctgctaaaaatgctgccatatgagacttttggttcaaaaacacagaagtttctggatcagcggctttgaggaattctggatgggattggaaccagagttttacttgttctggatccgctttggatgagtcaaattgtgtccaccattttacaaacgcgtgtctttgtagtgatggatattggtttgtcttttcagtcttgctgtaacgatattgccatgagaagatccatgacagtgcaaagcttgaaaagtatttaagatctgctggaattcgtgattcctgcgaattgtattgtctctcaaattgagcaaatccttgttggactgtttctgggaatatctctgggattggtccaaagaagtcccaccattgcaaaaaccaattgggaaaattgtaaattgtattggtcttgaaatatatcagccatgaatgcttgaagcgggtattttggtgccaaaacaccttagtccaagcatcaacataatcccaataggtataacctaccggatcaaatggaactgaaaatctctttcctttgttcaagtccgaaccaaagtgtcttggttgaagaacttttagtatttggattgtcgagtgggtgtttaatgtttggtcttttgggtctttgaaatgtttgatagatactgagtttgaatctaccaaaatcaattcataaaaagttcttgtcttcaggatggttgttggtttgtagtgaaatcctggtgggaaagccttggccgtcgccttgaagggatttttgtcccaaaattcaggttccatctgcaaaacagttgtaaatttatttttataaatataattgttagtttgtttggtaggtggtgtttgagctttggctaaaggtagtttcccattaggattggtggttgttttggtcattgatgcattttggatcattgtttgtaaatttgattaagattcatcatcagattctgaggcaatgtctgcccaagattttttgattatttttggaaatttggttaggcccatgtcttgaagggcctgaagggtttcaattggccatgcatagtcggccgatgtttgt

SEQ ID NO: 10587 - DNA, 1098 bp, Glycine max
  Gm_smallRNAprecursor_3420
agaacttgtttcttccttctttgaggataaactttcttcttcctgctgtaacatttgcagaacttcctttagatttttagctaagacctcctttgatttcgatcctgctaaaaatgctgccatatgagacttttggttcaaaaacacagaagtttctggatcagcggctttgaggaattctggatgggattggaaccagagttttacttgttctggatccgctttggatgagtcaaattgtgtccaccattttacaaacgcgtgtctttgtagtgatggatattggtttgtcttttcagtcttgctgtaacgatattgccatgagaagatccatgacagtgcaaagcttgaaaagtatttaagatctgctggaattcgtgattcctgcgaattgtattgtctctcaaattgagcaaatccttgttggactgtttctgggaatatctctgggattggtccaaagaagtcccaccattgcaaaaaccaattgggaaaattgtaaattgtattggtcttgaaatatatcagccatgaatgcttgaagcgggtattttggtgccaaaacaccttagtccaagcatcaacataatcccaataggtataacctaccggatcaaatggaactgaaaatctctttcctttgttcaagtccgaaccaaagtgtcttggttgaagaacttttagtatttggattgtcgagtgggtgtttaatgtttggtcttttgggtctttgaaatgtttgatagatactgagtttgaatctaccaaaatcaattcataaaaagttcttgtcttcaggatggttgttggtttgtagtgaaatcctggtgggaaagccttggccgtcgccttgaagggatttttgtcccaaaattcaggttccatctgcaaaacagttgtaaatttatttttataaatataattgttagtttgtttggtaggtggtgtttgagctttggctaaaggtagtttcccattaggattggtggttgttttggtcattgatgcattttggatcattgtttgtaaatttgattaagattcatcatcagattctgaggcaatgtctgcccaagattttttgattatttttggaaa

SEQ ID NO: 10588 - DNA, 1107 bp, Glycine max
  Gm_smallRNAprecursor_3421
gcagaacttcctttagatttttagctaagacctcctttgatttcgatcctgctaaaaatgctgccatatgagacttttggttcaaaaacacagaagtttctggatcagcggctttgaggaattctggatgggattggaaccagagttttacttgttctggatccgctttggatgagtcaaattgtgtccaccattttacaaacgcgtgtctttgtagtgatggatattggtttgtcttttcagtcttgctgtaacgatattgccatgagaagatccatgacagtgcaaagcttgaaaagtatttaagatctgctggaattcgtgattcctgcgaattgtattgtctctcaaattgagcaaatccttgttggactgtttctgggaatatctctgggattggtccaaagaagtcccaccattgcaaaaaccaattgggaaaattgtaaattgtattggtcttgaaatatatcagccatgaatgcttgaagcgggtattttggtgccaaaacaccttagtccaagcatcaacataatcccaataggtataacctaccggatcaaatggaactgaaaatctctttcctttgttcaagtccgaaccaaagtgtcttggttgaagaacttttagtatttggattgtcgagtgggtgtttaatgtttggtcttttgggtctttgaaatgtttgatagatactgagtttgaatctaccaaaatcaattcataaaaagttcttgtcttcaggatggttgttggtttgtagtgaaatcctggtgggaaagccttggccgtcgccttgaagggatttttgtcccaaaattcaggttccatctgcaaaacagttgtaaatttatttttataaatataattgttagtttgtttggtaggtggtgtttgagctttggctaaaggtagtttcccattaggattggtggttgttttggtcattgatgcattttggatcattgtttgtaaatttgattaagattcatcatcagattctgaggcaatgtctgcccaagattttttgattatttttggaaatttggttaggcccatgtcttgaagggcctgaagggtttcaattggccatgcatagtcggccgatg

SEQ ID NO: 10589 - DNA, 1107 bp, Glycine max; identical to SEQ ID NO: 10588
  Gm_smallRNAprecursor_3422

SEQ ID NO: 10590 - DNA, 1108 bp, Glycine max
  Gm_smallRNAprecursor_3423
gcagaacttcctttagatttttagctaagacctcctttgatttcgatcctgctaaaaatgctgccatatgagacttttggttcaaaaacacagaagtttctggatcagcggctttgaggaattctggatgggattggaaccagagttttacttgttctggatccgctttggatgagtcaaattgtgtccaccattttacaaacgcgtgtctttgtagtgatggatattggtttgtcttttcagtcttgctgtaacgatattgccatgagaagatccatgacagtgcaaagcttgaaaagtatttaagatctgctggaattcgtgattcctgcgaattgtattgtctctcaaattgagcaaatccttgttggactgtttctgggaatatctctgggattggtccaaagaagtcccaccattgcaaaaaccaattgggaaaattgtaaattgtattggtcttgaaatatatcagccatgaatgcttgaagcgggtattttggtgccaaaacaccttagtccaagcatcaacataatcccaataggtataacctaccggatcaaatggaactgaaaatctctttcctttgttcaagtccgaaccaaagtgtcttggttgaagaacttttagtatttggattgtcgagtgggtgtttaatgtttggtcttttgggtctttgaaatgtttgatagatactgagtttgaatctaccaaaatcaattcataaaaagttcttgtcttcaggatggttgttggtttgtagtgaaatcctggtgggaaagccttggccgtcgccttgaagggatttttgtcccaaaattcaggttccatctgcaaaacagttgtaaatttatttttataaatataattgttagtttgtttggtaggtggtgtttgagctttggctaaaggtagtttcccattaggattggtggttgttttggtcattgatgcattttggatcattgtttgtaaatttgattaagattcatcatcagattctgaggcaatgtctgcccaagattttttgattatttttggaaatttggttaggcccatgtcttgaagggcctgaagggtttcaattggccatgcatagtcggccgatgt

SEQ ID NO: 10591 - DNA, 1101 bp, Glycine max
  Gm_smallRNAprecursor_3424
gaacttcctttagatttttagctaagacctcctttgatttcgatcctgctaaaaatgctgccatatgagacttttggttcaaaaacacagaagtttctggatcagcggctttgaggaattctggatgggattggaaccagagttttacttgttctggatccgctttggatgagtcaaattgtgtccaccattttacaaacgcgtgtctttgtagtgatggatattggtttgtcttttcagtcttgctgtaacgatattgccatgagaagatccatgacagtgcaaagcttgaaaagtatttaagatctgctggaattcgtgattcctgcgaattgtattgtctctcaaattgagcaaatccttgttggactgtttctgggaatatctctgggattggtccaaagaagtcccaccattgcaaaaaccaattgggaaaattgtaaattgtattggtcttgaaatatatcagccatgaatgcttgaagcgggtattttggtgccaaaacaccttagtccaagcatcaacataatcccaataggtataacctaccggatcaaatggaactgaaaatctctttcctttgttcaagtccgaaccaaagtgtcttggttgaagaacttttagtatttggattgtcgagtgggtgtttaatgtttggtcttttgggtctttgaaatgtttgatagatactgagtttgaatctaccaaaatcaattcataaaaagttcttgtcttcaggatggttgttggtttgtagtgaaatcctggtgggaaagccttggccgtcgccttgaagggatttttgtcccaaaattcaggttccatctgcaaaacagttgtaaatttatttttataaatataattgttagtttgtttggtaggtggtgtttgagctttggctaaaggtagtttcccattaggattggtggttgttttggtcattgatgcattttggatcattgtttgtaaatttgattaagattcatcatcagattctgaggcaatgtctgcccaagattttttgattatttttggaaatttggttaggcccatgtcttgaagggcctgaagggtttcaattggccatgcatagtcggccg

SEQ ID NO: 10592 - DNA, 1189 bp, Glycine max
  Gm_smallRNAprecursor_3425
acacagaagtttctggatcagcggctttgaggaattctggatgggattggaaccagagttttacttgttctggatccgctttggatgagtcaaattgtgtccaccattttacaaacgcgtgtctttgtagtgatggatattggtttgtcttttcagtcttgctgtaacgatattgccatgagaagatccatgacagtgcaaagcttgaaaagtatttaagatctgctggaattcgtgattcctgcgaattgtattgtctctcaaattgagcaaatccttgttggactgtttctgggaatatctctgggattggtccaaagaagtcccaccattgcaaaaaccaattgggaaaattgtaaattgtattggtcttgaaatatatcagccatgaatgcttgaagcgggtattttggtgccaaaacaccttagtccaagcatcaacataatcccaataggtataacctaccggatcaaatggaactgaaaatctctttcctttgttcaagtccgaaccaaagtgtcttggttgaagaacttttagtatttggattgtcgagtgggtgtttaatgtttggtcttttgggtctttgaaatgtttgatagatactgagtttgaatctaccaaaatcaattcataaaaagttcttgtcttcaggatggttgttggtttgtagtgaaatcctggtgggaaagccttggccgtcgccttgaagggatttttgtcccaaaattcaggttccatctgcaaaacagttgtaaatttatttttataaatataattgttagtttgtttggtaggtggtgtttgagctttggctaaaggtagtttcccattaggattggtggttgttttggtcattgatgcattttggatcattgtttgtaaatttgattaagattcatcatcagattctgaggcaatgtctgcccaagattttttgattatttttggaaatttggttaggcccatgtcttgaagggcctgaagggtttcaattggccatgcatagtcggccgatgtttgtttggcggttgccggtttgggagattcctgagtggatggctcaggtttgattgaggcaatctgggttgatgacccttctaaattggttttctgggtagatgacccagcctgggttggtgacccagaagaggttgatgatttcttaatggttggctctggaagagc

SEQ ID NO: 10593 - DNA, 1098 bp, Glycine max
  Gm_smallRNAprecursor_3426
gtgtctttgtagtgatggatattggtttgtcttttcagtcttgctgtaacgatattgccatgagaagatccatgacagtgcaaagcttgaaaagtatttaagatctgctggaattcgtgattcctgcgaattgtattgtctctcaaattgagcaaatccttgttggactgtttctgggaatatctctgggattggtccaaagaagtcccaccattgcaaaaaccaattgggaaaattgtaaattgtattggtcttgaaatatatcagccatgaatgcttgaagcgggtattttggtgccaaaacaccttagtccaagcatcaacataatcccaataggtataacctaccggatcaaatggaactgaaaatctctttcctttgttcaagtccgaaccaaagtgtcttggttgaagaacttttagtatttggattgtcgagtgggtgtttaatgtttggtcttttgggtctttgaaatgtttgatagatactgagtttgaatctaccaaaatcaattcataaaaagttcttgtcttcaggatggttgttggtttgtagtgaaatcctggtgggaaagccttggccgtcgccttgaagggatttttgtcccaaaattcaggttccatctgcaaaacagttgtaaatttatttttataaatataattgttagtttgtttggtaggtggtgtttgagctttggctaaaggtagtttcccattaggattggtggttgttttggtcattgatgcattttggatcattgtttgtaaatttgattaagattcatcatcagattctgaggcaatgtctgcccaagattttttgattatttttggaaatttggttaggcccatgtcttgaagggcctgaagggtttcaattggccatgcatagtcggccgatgtttgtttggcggttgccggtttgggagattcctgagtggatggctcaggtttgattgaggcaatctgggttgatgacccttctaaattggttttctgggtagatgacccagcctgggttggtgacccagaagaggttgatgatttcttaatggttggctctggaagagccagtctggctcctttgcctgtacttct

SEQ ID NO: 10594 - DNA, 1207 bp, Glycine max
  Gm_smallRNAprecursor_3427
ggaaatttggttaggcccatgtcttgaagggcctgaagggtttcaattggccatgcatagtcggccgatgtttgtttggcggttgccggtttgggagattcctgagtggatggctcaggtttgattgaggcaatctgggttgatgacccttctaaattggttttctgggtagatgacccagcctgggttggtgacccagaagaggttgatgatttcttaatggttggctctggaagagccagtctggctcctttgcctgtacttcttcctccctttagggagattcccgatgcctaaggaggcattatcacttttctgtaagaattcacgagtaaggtagtcaggtaatgaatttgaggtgcccttgatgtattctatgtcaaaatcaaagacacttagaattgcttgccatcttgcaaaaatttgttttgaagcaaggtttttgacatctttctgtaaaatatctttggctgatttacaattaactctgattaaaaatttttggtttaataaatccgattgaaatttggaaatgcacaaaaaaattgctaaaacttcctttttaacagttgaatattttaattgtgcaggattccaatgttttgatgcatatgcaatgacatgatcttgaccatgtactctttgtttgaggatgccaccataacctatgtctgaagcatcagtttcgacaattttaaatgcatgtggaataggaagatacagacattttatggattggattttgactttgatttctttaactgtttgtgtatggaggtcagaccaaggaggcggatttttcttcagcctatcatgcaatggcttgacaatattgtttaagtaggggacaaattctcctacgtaatttagacaacctagaaatgtttgtaactgggttttgtctaagatttggttgggaaatttgctagcaaactctattgacctttctattggaatgattgtaccttgatatatattgtgaccaaggaatcgaattcgagtttggaaaagattgatttttgatttggagactgccaaaccactctgtttgatgatatggatgaaggtctggagctgtttgaaatgttggtcaatgttttggagaattttctatttgaagaattttcagctatttgaagaaaagattgatttttgatttggagactgccaaaccaatctctatttgaagaattttctaaacaatcta

SEQ ID NO: 10595 - DNA, 1247 bp, Glycine max
  Gm_smallRNAprecursor_3428
tgatgatttcttaatggttggctctggaagagccagtctggctcctttgcctgtacttcttcctccctttagggagattcccgatgcctaaggaggcattatcacttttctgtaagaattcacgagtaaggtagtcaggtaatgaatttgaggtgcccttgatgtattctatgtcaaaatcaaagacacttagaattgcttgccatcttgcaaaaatttgttttgaagcaaggtttttgacatctttctgtaaaatatctttggctgatttacaattaactctgattaaaaatttttggtttaataaatccgattgaaatttggaaatgcacaaaaaaattgctaaaacttcctttttaacagttgaatattttaattgtgcaggattccaatgttttgatgcatatgcaatgacatgatcttgaccatgtactctttgtttgaggatgccaccataacctatgtctgaagcatcagtttcgacaattttaaatgcatgtggaataggaagatacagacattttatggattggattttgactttgatttctttaactgtttgtgtatggaggtcagaccaaggaggcggatttttcttcagcctatcatgcaatggcttgacaatattgtttaagtaggggacaaattctcctacgtaatttagacaacctagaaatgtttgtaactgggttttgtctaagatttggttgggaaatttgctagcaaactctattgacctttctattggaatgattgtaccttgatatatattgtgaccaaggaatcgaattcgagtttggaaaagattgatttttgatttggagactgccaaaccactctgtttgatgatatggatgaaggtctggagctgtttgaaatgttggtcaatgttttggagaattttctatttgaagaattttcagctatttgaagaaaagattgatttttgatttggagactgccaaaccaatctctatttgaagaattttctaaacaatctaaaaagagaggtaaaagaacttcgtcaacaacaagaaattcatcagatcattctttctcagcttgaggaagatagccaacaacagtgaggaaaaccaaccagaaaatttagaagatgatatgtttatgggattaatcaacaagattaaaatccaaaaattatacataaacataaaaataattattaatgatttcgttttagaaacaatggccctatttgacacaggggctgattcaaactgcatttt

SEQ ID NO: 10596 - DNA, 1246 bp, Glycine max
  Gm_smallRNAprecursor_3429
gatgatttcttaatggttggctctggaagagccagtctggctcctttgcctgtacttcttcctccctttagggagattcccgatgcctaaggaggcattatcacttttctgtaagaattcacgagtaaggtagtcaggtaatgaatttgaggtgcccttgatgtattctatgtcaaaatcaaagacacttagaattgcttgccatcttgcaaaaatttgttttgaagcaaggtttttgacatctttctgtaaaatatctttggctgatttacaattaactctgattaaaaatttttggtttaataaatccgattgaaatttggaaatgcacaaaaaaattgctaaaacttcctttttaacagttgaatattttaattgtgcaggattccaatgttttgatgcatatgcaatgacatgatcttgaccatgtactctttgtttgaggatgccaccataacctatgtctgaagcatcagtttcgacaattttaaatgcatgtggaataggaagatacagacattttatggattggattttgactttgatttctttaactgtttgtgtatggaggtcagaccaaggaggcggatttttcttcagcctatcatgcaatggcttgacaatattgtttaagtaggggacaaattctcctacgtaatttagacaacctagaaatgtttgtaactgggttttgtctaagatttggttgggaaatttgctagcaaactctattgacctttctattggaatgattgtaccttgatatatattgtgaccaaggaatcgaattcgagtttggaaaagattgatttttgatttggagactgccaaaccactctgtttgatgatatggatgaaggtctggagctgtttgaaatgttggtcaatgttttggagaattttctatttgaagaattttcagctatttgaagaaaagattgatttttgatttggagactgccaaaccaatctctatttgaagaattttctaaacaatctaaaaagagaggtaaaagaacttcgtcaacaacaagaaattcatcagatcattctttctcagcttgaggaagatagccaacaacagtgaggaaaaccaaccagaaaatttagaagatgatatgtttatgggattaatcaacaagattaaaatccaaaaattatacataaacataaaaataattattaatgatttcgttttagaaacaatggccctatttgacacaggggctgattcaaactgcatttt

SEQ ID NO: 10597 - DNA, 1153 bp, Glycine max
  Gm_smallRNAprecursor_3430
ggaggcattatcacttttctgtaagaattcacgagtaaggtagtcaggtaatgaatttgaggtgcccttgatgtattctatgtcaaaatcaaagacacttagaattgcttgccatcttgcaaaaatttgttttgaagcaaggtttttgacatctttctgtaaaatatctttggctgatttacaattaactctgattaaaaatttttggtttaataaatccgattgaaatttggaaatgcacaaaaaaattgctaaaacttcctttttaacagttgaatattttaattgtgcaggattccaatgttttgatgcatatgcaatgacatgatcttgaccatgtactctttgtttgaggatgccaccataacctatgtctgaagcatcagtttcgacaattttaaatgcatgtggaataggaagatacagacattttatggattggattttgactttgatttctttaactgtttgtgtatggaggtcagaccaaggaggcggatttttcttcagcctatcatgcaatggcttgacaatattgtttaagtaggggacaaattctcctacgtaatttagacaacctagaaatgtttgtaactgggttttgtctaagatttggttgggaaatttgctagcaaactctattgacctttctattggaatgattgtaccttgatatatattgtgaccaaggaatcgaattcgagtttggaaaagattgatttttgatttggagactgccaaaccactctgtttgatgatatggatgaaggtctggagctgtttgaaatgttggtcaatgttttggagaattttctatttgaagaattttcagctatttgaagaaaagattgatttttgatttggagactgccaaaccaatctctatttgaagaattttctaaacaatctaaaaagagaggtaaaagaacttcgtcaacaacaagaaattcatcagatcattctttctcagcttgaggaagatagccaacaacagtgaggaaaaccaaccagaaaatttagaagatgatatgtttatgggattaatcaacaagattaaaatccaaaaattatacataaacataaaaataattattaatgatttcgttttagaaacaatggccctatttgacacaggggctgattcaaactgcat

SEQ ID NO: 10598 - DNA, 1168 bp, Glycine max
  Gm_smallRNAprecursor_3431
ggaggcattatcacttttctgtaagaattcacgagtaaggtagtcaggtaatgaatttgaggtgcccttgatgtattctatgtcaaaatcaaagacacttagaattgcttgccatcttgcaaaaatttgttttgaagcaaggtttttgacatctttctgtaaaatatctttggctgatttacaattaactctgattaaaaatttttggtttaataaatccgattgaaatttggaaatgcacaaaaaaattgctaaaacttcctttttaacagttgaatattttaattgtgcaggattccaatgttttgatgcatatgcaatgacatgatcttgaccatgtactctttgtttgaggatgccaccataacctatgtctgaagcatcagtttcgacaattttaaatgcatgtggaataggaagatacagacattttatggattggattttgactttgatttctttaactgtttgtgtatggaggtcagaccaaggaggcggatttttcttcagcctatcatgcaatggcttgacaatattgtttaagtaggggacaaattctcctacgtaatttagacaacctagaaatgtttgtaactgggttttgtctaagatttggttgggaaatttgctagcaaactctattgacctttctattggaatgattgtaccttgatatatattgtgaccaaggaatcgaattcgagtttggaaaagattgatttttgatttggagactgccaaaccactctgtttgatgatatggatgaaggtctggagctgtttgaaatgttggtcaatgttttggagaattttctatttgaagaattttcagctatttgaagaaaagattgatttttgatttggagactgccaaaccaatctctatttgaagaattttctaaacaatctaaaaagagaggtaaaagaacttcgtcaacaacaagaaattcatcagatcattctttctcagcttgaggaagatagccaacaacagtgaggaaaaccaaccagaaaatttagaagatgatatgtttatgggattaatcaacaagattaaaatccaaaaattatacataaacataaaaataattattaatgatttcgttttagaaacaatggccctatttgacacaggggctgattcaaactgcattttagaaggattaat

SEQ ID NO: 10599 - DNA, 1031 bp, Glycine max
  Gm_smallRNAprecursor_3432
ctttctgtaaaatatctttggctgatttacaattaactctgattaaaaatttttggtttaataaatccgattgaaatttggaaatgcacaaaaaaattgctaaaacttcctttttaacagttgaatattttaattgtgcaggattccaatgttttgatgcatatgcaatgacatgatcttgaccatgtactctttgtttgaggatgccaccataacctatgtctgaagcatcagtttcgacaattttaaatgcatgtggaataggaagatacagacattttatggattggattttgactttgatttctttaactgtttgtgtatggaggtcagaccaaggaggcggatttttcttcagcctatcatgcaatggcttgacaatattgtttaagtaggggacaaattctcctacgtaatttagacaacctagaaatgtttgtaactgggttttgtctaagatttggttgggaaatttgctagcaaactctattgacctttctattggaatgattgtaccttgatatatattgtgaccaaggaatcgaattcgagtttggaaaagattgatttttgatttggagactgccaaaccactctgtttgatgatatggatgaaggtctggagctgtttgaaatgttggtcaatgttttggagaattttctatttgaagaattttcagctatttgaagaaaagattgatttttgatttggagactgccaaaccaatctctatttgaagaattttctaaacaatctaaaaagagaggtaaaagaacttcgtcaacaacaagaaattcatcagatcattctttctcagcttgaggaagatagccaacaacagtgaggaaaaccaaccagaaaatttagaagatgatatgtttatgggattaatcaacaagattaaaatccaaaaattatacataaacataaaaataattattaatgatttcgttttagaaacaatggccctatttgacacaggggctgattcaaactgcattttagaaggattaattcctacaaaattctt

SEQ ID NO: 10600 - DNA, 1232 bp, Glycine max
  Gm_smallRNAprecursor_3433
acagaaagaaacatattgttgatctcccttatgagaaagactttagggaaaaacaaattcccacaaaagtcagaccaattcaaatgaatgaagaacttcttcaatactgccaaaaggaaatcaaggatttgcttgataaaggcctaatccggaaaagcaaaagcccatggtcttgtgcggctttttatgtcaacaaacaatctgagattgagcgtggaacaccccgcttagtcataaattacaaaccactaaatcaagcattacaatggattagatatcctattccaaacaaaaaagatttgcttaacagattaaattctgcaaagatattttcaaaatttgatatgaaatctggattttggcaaatccaaatccaagaatcagataggtacaaaacagcgtttactgtacctttcaggcaatatgaatggaatgtgatgccattcggactgaagaatgccccttcagaatttcaaaaaattatgaatgatatttttaatccctattcaaaatttgtcattgtctacatagatgatgttttaatcttttcccaaaacattgaccaacatttcaaacatctccagaccttcatccatatcatcaaacagaatggtttggcagtctccaaatcaaaaatcaatcttttccaaactcgaattcgattccttggtcacaatatatatcaaggtacaatcattccaatagaaaggtcaatagagtttgctagcaaatttcccaaccaaatcttagacaaaacccagatacaaacatttctaggttgtctaaattacgtaggagaatttgtcccctacttaaacaatattgtcaagccattgcatgataggctgaagaaaaatccgcctccttggtctgacctccatacacaaacagttaaagaaatcaaagtcaaagtccaatccataaaatgtatgtatcttcctattccacatgcatttaaaattgtcgaaactgatgcttcagacataggttatggtggcatcctcaaacaaagagtacatggtcaagatcatgtcattgcatatgcatcaaaacattggaatcctgcacaattaaaatattcaactgttaaaaaggaagttttagcaatttttttgtgcatttccaaatttcaatcggatttattaaaccaaaaatttttaatcagagttgattgtaaatcagccaaagatattttacagaaagatgtcaaaaaccttgcttcaaaacaaatt

SEQ ID NO: 10601 - DNA, 1174 bp, Glycine max
  Gm_smallRNAprecursor_3434
acaaagagtacatggtcaagatcatgtcattgcatatgcatcaaaacattggaatcctgcacaattaaaatattcaactgttaaaaaggaagttttagcaatttttttgtgcatttccaaatttcaatcggatttattaaaccaaaaatttttaatcagagttgattgtaaatcagccaaagatattttacagaaagatgtcaaaaaccttgcttcaaaacaaatttttgcaagatggcaagcaattctaagtgtctttgattttgacatagaatacatcaagggcacctcaaattcattacctgactaccttactcgtgaattcttatagaaaagtgataatgcctcctaaggcatcgggaatctccctaaagggaggaagaagtacaggcaaaggagccagactggctcttccagagccaaccattaagaaatcatcaacctcatctgggtcaccaacccaggctggatcatctacccagaaaaccaatttagaagggtcatcaacccagattgcctcaatcaaacctgagccatccactcaggaatctcccaaaccggcaaccgccaaacaaacatcggccgactatgcatggccaattgaaacccttcaggcccttcaagacatgggcctaaccaaatttccaaaaataatcaaaaaatcttgggcagacattgcctcagaatctgatgatgaatcttaatcaaatttacaaacaatgatccaaaatgcatcaatgaccaaaacaaccaccaatcctaatgggaaactacctttagccaaagctcaaacaccacctaccaaacaaactaacaattatatttataaaaataaatttacaactgttttgcagatggaacctgaattttgggacaaaaatcccttcaaggcgacggccaaggctttcccaccaggatttcactacaaaccaacaaccatcctgaagacaagaactttttatgaattgattttggtagattcaaactcagtatctatcaaacatttcaaagacccaaaagaccaaacattaaacacccactcgacaatccaaatactaaaagttcttcaaccaagacactttggttcggacttgaacaaaggaaagagattttcagttccatttgatccggtaggttatacctattgggattatgttgatgcttggactaaggt

SEQ ID NO: 10602 - DNA, 1173 bp, Glycine max
  Gm_smallRNAprecursor_3435
caaagagtacatggtcaagatcatgtcattgcatatgcatcaaaacattggaatcctgcacaattaaaatattcaactgttaaaaaggaagttttagcaatttttttgtgcatttccaaatttcaatcggatttattaaaccaaaaatttttaatcagagttgattgtaaatcagccaaagatattttacagaaagatgtcaaaaaccttgcttcaaaacaaatttttgcaagatggcaagcaattctaagtgtctttgattttgacatagaatacatcaagggcacctcaaattcattacctgactaccttactcgtgaattcttatagaaaagtgataatgcctcctaaggcatcgggaatctccctaaagggaggaagaagtacaggcaaaggagccagactggctcttccagagccaaccattaagaaatcatcaacctcatctgggtcaccaacccaggctggatcatctacccagaaaaccaatttagaagggtcatcaacccagattgcctcaatcaaacctgagccatccactcaggaatctcccaaaccggcaaccgccaaacaaacatcggccgactatgcatggccaattgaaacccttcaggcccttcaagacatgggcctaaccaaatttccaaaaataatcaaaaaatcttgggcagacattgcctcagaatctgatgatgaatcttaatcaaatttacaaacaatgatccaaaatgcatcaatgaccaaaacaaccaccaatcctaatgggaaactacctttagccaaagctcaaacaccacctaccaaacaaactaacaattatatttataaaaataaatttacaactgttttgcagatggaacctgaattttgggacaaaaatcccttcaaggcgacggccaaggctttcccaccaggatttcactacaaaccaacaaccatcctgaagacaagaactttttatgaattgattttggtagattcaaactcagtatctatcaaacatttcaaagacccaaaagaccaaacattaaacacccactcgacaatccaaatactaaaagttcttcaaccaagacactttggttcggacttgaacaaaggaaagagattttcagttccatttgatccggtaggttatacctattgggattatgttgatgcttggactaaggt

SEQ ID NO: 10603 - DNA, 1173 bp, Glycine max; identical to SEQ ID NO: 10602
  Gm_smallRNAprecursor_3436

SEQ ID NO: 10604 - DNA, 1247 bp, Glycine max
  Gm_smallRNAprecursor_3437
cccttcaagacatgggcctaaccaaatttccaaaaataatcaaaaaatcttgggcagacattgcctcagaatctgatgatgaatcttaatcaaatttacaaacaatgatccaaaatgcatcaatgaccaaaacaaccaccaatcctaatgggaaactacctttagccaaagctcaaacaccacctaccaaacaaactaacaattatatttataaaaataaatttacaactgttttgcagatggaacctgaattttgggacaaaaatcccttcaaggcgacggccaaggctttcccaccaggatttcactacaaaccaacaaccatcctgaagacaagaactttttatgaattgattttggtagattcaaactcagtatctatcaaacatttcaaagacccaaaagaccaaacattaaacacccactcgacaatccaaatactaaaagttcttcaaccaagacactttggttcggacttgaacaaaggaaagagattttcagttccatttgatccggtaggttatacctattgggattatgttgatgcttggactaaggtgttttggcaccaaaatacccgcttcaagcattcatggctgatatatttcaagaccaatacaatttacaattttcccaattggtttttgcaatggtgggacttctttggaccaatcccagagatattcccagaaacagtccaacaaggatttgctcaatttgagagacaatacaattcgcaggaatcacgaattccagcagatcttaaatacttttcaagctttgcactgtcatggatcttctcatggcaatatcgttacagcaagactgaaaagacaaaccaatatccatcactacaaagacacgcgtttgtaaaatggtggacacaatttgactcatccaaagcggatccagaacaagtaaaactctggttccaatcccatccagaattcctcaaagccgctgatccagaaacttctgtgtttttgaaccaaaagtctcatatggcagcatttttagcaggatcgaaatcaaaggaggtcttagctaaaaatctaaaggaagttctacaaatgttacagcaggaagaagaaagtttatcctcaaagaaggaagaaacaagttctgctgaagaagaagaagaagaccccttttaccaaaacgaagatgattgttttggtatctgtttagattaaatttaatttcggtcacaaaaccgtctgtttgtaattaatgtgtaattaatgctg

SEQ ID NO: 10605 - DNA, 1248 bp, Glycine max
  Gm_smallRNAprecursor_3438
cccttcaagacatgggcctaaccaaatttccaaaaataatcaaaaaatcttgggcagacattgcctcagaatctgatgatgaatcttaatcaaatttacaaacaatgatccaaaatgcatcaatgaccaaaacaaccaccaatcctaatgggaaactacctttagccaaagctcaaacaccacctaccaaacaaactaacaattatatttataaaaataaatttacaactgttttgcagatggaacctgaattttgggacaaaaatcccttcaaggcgacggccaaggctttcccaccaggatttcactacaaaccaacaaccatcctgaagacaagaactttttatgaattgattttggtagattcaaactcagtatctatcaaacatttcaaagacccaaaagaccaaacattaaacacccactcgacaatccaaatactaaaagttcttcaaccaagacactttggttcggacttgaacaaaggaaagagattttcagttccatttgatccggtaggttatacctattgggattatgttgatgcttggactaaggtgttttggcaccaaaatacccgcttcaagcattcatggctgatatatttcaagaccaatacaatttacaattttcccaattggtttttgcaatggtgggacttctttggaccaatcccagagatattcccagaaacagtccaacaaggatttgctcaatttgagagacaatacaattcgcaggaatcacgaattccagcagatcttaaatacttttcaagctttgcactgtcatggatcttctcatggcaatatcgttacagcaagactgaaaagacaaaccaatatccatcactacaaagacacgcgtttgtaaaatggtggacacaatttgactcatccaaagcggatccagaacaagtaaaactctggttccaatcccatccagaattcctcaaagccgctgatccagaaacttctgtgtttttgaaccaaaagtctcatatggcagcatttttagcaggatcgaaatcaaaggaggtcttagctaaaaatctaaaggaagttctacaaatgttacagcaggaagaagaaagtttatcctcaaagaaggaagaaacaagttctgctgaagaagaagaagaagaccccttttaccaaaacgaagatgattgttttggtatctgtttagattaaatttaatttcggtcacaaaaccgtctgtttgtaattaatgtgtaattaatgctgg

SEQ ID NO: 10606 - DNA, 1045 bp, Glycine max
  Gm_smallRNAprecursor_3439
tccaaaaataatcaaaaaatcttgggcagacattgcctcagaatctgatgatgaatcttaatcaaatttacaaacaatgatccaaaatgcatcaatgaccaaaacaaccaccaatcctaatgggaaactacctttagccaaagctcaaacaccacctaccaaacaaactaacaattatatttataaaaataaatttacaactgttttgcagatggaacctgaattttgggacaaaaatcccttcaaggcgacggccaaggctttcccaccaggatttcactacaaaccaacaaccatcctgaagacaagaactttttatgaattgattttggtagattcaaactcagtatctatcaaacatttcaaagacccaaaagaccaaacattaaacacccactcgacaatccaaatactaaaagttcttcaaccaagacactttggttcggacttgaacaaaggaaagagattttcagttccatttgatccggtaggttatacctattgggattatgttgatgcttggactaaggtgttttggcaccaaaatacccgcttcaagcattcatggctgatatatttcaagaccaatacaatttacaattttcccaattggtttttgcaatggtgggacttctttggaccaatcccagagatattcccagaaacagtccaacaaggatttgctcaatttgagagacaatacaattcgcaggaatcacgaattccagcagatcttaaatacttttcaagctttgcactgtcatggatcttctcatggcaatatcgttacagcaagactgaaaagacaaaccaatatccatcactacaaagacacgcgtttgtaaaatggtggacacaatttgactcatccaaagcggatccagaacaagtaaaactctggttccaatcccatccagaattcctcaaagccgctgatccagaaacttctgtgtttttgaaccaaaagtctcatatggcagcatttttagcaggatcgaaatcaaaggaggtcttagctaaaaatctaaaggaagttctacaaatg

SEQ ID NO: 10607 - DNA, 1163 bp, Glycine max
  Gm_smallRNAprecursor_3440
aaaaataatcaaaaaatcttgggcagacattgcctcagaatctgatgatgaatcttaatcaaatttacaaacaatgatccaaaatgcatcaatgaccaaaacaaccaccaatcctaatgggaaactacctttagccaaagctcaaacaccacctaccaaacaaactaacaattatatttataaaaataaatttacaactgttttgcagatggaacctgaattttgggacaaaaatcccttcaaggcgacggccaaggctttcccaccaggatttcactacaaaccaacaaccatcctgaagacaagaactttttatgaattgattttggtagattcaaactcagtatctatcaaacatttcaaagacccaaaagaccaaacattaaacacccactcgacaatccaaatactaaaagttcttcaaccaagacactttggttcggacttgaacaaaggaaagagattttcagttccatttgatccggtaggttatacctattgggattatgttgatgcttggactaaggtgttttggcaccaaaatacccgcttcaagcattcatggctgatatatttcaagaccaatacaatttacaattttcccaattggtttttgcaatggtgggacttctttggaccaatcccagagatattcccagaaacagtccaacaaggatttgctcaatttgagagacaatacaattcgcaggaatcacgaattccagcagatcttaaatacttttcaagctttgcactgtcatggatcttctcatggcaatatcgttacagcaagactgaaaagacaaaccaatatccatcactacaaagacacgcgtttgtaaaatggtggacacaatttgactcatccaaagcggatccagaacaagtaaaactctggttccaatcccatccagaattcctcaaagccgctgatccagaaacttctgtgtttttgaaccaaaagtctcatatggcagcatttttagcaggatcgaaatcaaaggaggtcttagctaaaaatctaaaggaagttctacaaatgttacagcaggaagaagaaagtttatcctcaaagaaggaagaaacaagttctgctgaagaagaagaagaagaccccttttaccaaaacgaagatgattgttttggtatctgtttagattaaa

SEQ ID NO: 10608 - DNA, 1060 bp, Glycine max
  Gm_smallRNAprecursor_3441
aattatatttataaaaataaatttacaactgttttgcagatggaacctgaattttgggacaaaaatcccttcaaggcgacggccaaggctttcccaccaggatttcactacaaaccaacaaccatcctgaagacaagaactttttatgaattgattttggtagattcaaactcagtatctatcaaacatttcaaagacccaaaagaccaaacattaaacacccactcgacaatccaaatactaaaagttcttcaaccaagacactttggttcggacttgaacaaaggaaagagattttcagttccatttgatccggtaggttatacctattgggattatgttgatgcttggactaaggtgttttggcaccaaaatacccgcttcaagcattcatggctgatatatttcaagaccaatacaatttacaattttcccaattggtttttgcaatggtgggacttctttggaccaatcccagagatattcccagaaacagtccaacaaggatttgctcaatttgagagacaatacaattcgcaggaatcacgaattccagcagatcttaaatacttttcaagctttgcactgtcatggatcttctcatggcaatatcgttacagcaagactgaaaagacaaaccaatatccatcactacaaagacacgcgtttgtaaaatggtggacacaatttgactcatccaaagcggatccagaacaagtaaaactctggttccaatcccatccagaattcctcaaagccgctgatccagaaacttctgtgtttttgaaccaaaagtctcatatggcagcatttttagcaggatcgaaatcaaaggaggtcttagctaaaaatctaaaggaagttctacaaatgttacagcaggaagaagaaagtttatcctcaaagaaggaagaaacaagttctgctgaagaagaagaagaagaccccttttaccaaaacgaagatgattgttttggtatctgtttagattaaatttaatttcggtcacaaaaccgtctgtttgtaattaatgtgtaattaatgctggacaatactacct

SEQ ID NO: 10609 - DNA, 1080 bp, Glycine max
  Gm_smallRNAprecursor_3442
aattatatttataaaaataaatttacaactgttttgcagatggaacctgaattttgggacaaaaatcccttcaaggcgacggccaaggctttcccaccaggatttcactacaaaccaacaaccatcctgaagacaagaactttttatgaattgattttggtagattcaaactcagtatctatcaaacatttcaaagacccaaaagaccaaacattaaacacccactcgacaatccaaatactaaaagttcttcaaccaagacactttggttcggacttgaacaaaggaaagagattttcagttccatttgatccggtaggttatacctattgggattatgttgatgcttggactaaggtgttttggcaccaaaatacccgcttcaagcattcatggctgatatatttcaagaccaatacaatttacaattttcccaattggtttttgcaatggtgggacttctttggaccaatcccagagatattcccagaaacagtccaacaaggatttgctcaatttgagagacaatacaattcgcaggaatcacgaattccagcagatcttaaatacttttcaagctttgcactgtcatggatcttctcatggcaatatcgttacagcaagactgaaaagacaaaccaatatccatcactacaaagacacgcgtttgtaaaatggtggacacaatttgactcatccaaagcggatccagaacaagtaaaactctggttccaatcccatccagaattcctcaaagccgctgatccagaaacttctgtgtttttgaaccaaaagtctcatatggcagcatttttagcaggatcgaaatcaaaggaggtcttagctaaaaatctaaaggaagttctacaaatgttacagcaggaagaagaaagtttatcctcaaagaaggaagaaacaagttctgctgaagaagaagaagaagaccccttttaccaaaacgaagatgattgttttggtatctgtttagattaaatttaatttcggtcacaaaaccgtctgtttgtaattaatgtgtaattaatgctggacaatactacctgtcctgtagccattaaagtc

SEQ ID NO: 10610 - DNA, 1189 bp, Glycine max
  Gm_smallRNAprecursor_3443
gacaatccaaatactaaaagttcttcaaccaagacactttggttcggacttgaacaaaggaaagagattttcagttccatttgatccggtaggttatacctattgggattatgttgatgcttggactaaggtgttttggcaccaaaatacccgcttcaagcattcatggctgatatatttcaagaccaatacaatttacaattttcccaattggtttttgcaatggtgggacttctttggaccaatcccagagatattcccagaaacagtccaacaaggatttgctcaatttgagagacaatacaattcgcaggaatcacgaattccagcagatcttaaatacttttcaagctttgcactgtcatggatcttctcatggcaatatcgttacagcaagactgaaaagacaaaccaatatccatcactacaaagacacgcgtttgtaaaatggtggacacaatttgactcatccaaagcggatccagaacaagtaaaactctggttccaatcccatccagaattcctcaaagccgctgatccagaaacttctgtgtttttgaaccaaaagtctcatatggcagcatttttagcaggatcgaaatcaaaggaggtcttagctaaaaatctaaaggaagttctacaaatgttacagcaggaagaagaaagtttatcctcaaagaaggaagaaacaagttctgctgaagaagaagaagaagaccccttttaccaaaacgaagatgattgttttggtatctgtttagattaaatttaatttcggtcacaaaaccgtctgtttgtaattaatgtgtaattaatgctggacaatactacctgtcctgtagccattaaagtcccggtcgaaactacttgtcttgtaacaaacagtcaaatagtcccgatcaaaactaccggtcttagatttttggctatataaagagtcctcaagtatgttgtgaggcaccctttcatttagccatttttcaggtttctgaagaagaggtgctctgaaacaagattttgtaagcgcttctttcaagtttcaataaatttctatttttcatccctcttctctctctttaccgatcctgtgcggctctgacgccgcttcggtttctttttttttatgaaaacctagaatttgtaaaccggtctccggtgtgcccttgatatctgttttaccagtttatat

SEQ ID NO: 10611 - DNA, 1046 bp, Glycine max
  Gm_smallRNAprecursor_3444
tcaagaccaatacaatttacaattttcccaattggtttttgcaatggtgggacttctttggaccaatcccagagatattcccagaaacagtccaacaaggatttgctcaatttgagagacaatacaattcgcaggaatcacgaattccagcagatcttaaatacttttcaagctttgcactgtcatggatcttctcatggcaatatcgttacagcaagactgaaaagacaaaccaatatccatcactacaaagacacgcgtttgtaaaatggtggacacaatttgactcatccaaagcggatccagaacaagtaaaactctggttccaatcccatccagaattcctcaaagccgctgatccagaaacttctgtgtttttgaaccaaaagtctcatatggcagcatttttagcaggatcgaaatcaaaggaggtcttagctaaaaatctaaaggaagttctacaaatgttacagcaggaagaagaaagtttatcctcaaagaaggaagaaacaagttctgctgaagaagaagaagaagaccccttttaccaaaacgaagatgattgttttggtatctgtttagattaaatttaatttcggtcacaaaaccgtctgtttgtaattaatgtgtaattaatgctggacaatactacctgtcctgtagccattaaagtcccggtcgaaactacttgtcttgtaacaaacagtcaaatagtcccgatcaaaactaccggtcttagatttttggctatataaagagtcctcaagtatgttgtgaggcaccctttcatttagccatttttcaggtttctgaagaagaggtgctctgaaacaagattttgtaagcgcttctttcaagtttcaataaatttctatttttcatccctcttctctctctttaccgatcctgtgcggctctgacgccgcttcggtttctttttttttatgaaaacctagaatttgtaaaccggtctccggtgtgcccttgatatctgttttaccagtttatattttcctttcatttatcatattgcattcttacttcct

SEQ ID NO: 10612 - DNA, 1088 bp, Glycine max
  Gm_smallRNAprecursor_3445
attatgacataataaatatctcggatatcatttatctctccttcccgctcaggcacatcattattctttttagtagtatgagtgtattaacaaccaacaccataaatatttggacaaaaaatcattaaactcttttgtgtcattaataatgagtgtgattaatttagatttatttaaaaataataatatttgttctatttaaatgaattggaaaaaataactatttttccaaaaatagtttatagtgcaaaaaataatgataaattatgttggttttttatatttctttatattcaattgtatgtttattgtatattatataaaaattaatgtttcatattaatttgatttatttatgtttattatgttcctgaaattataaaaaatactatatatatatatatataaacttgaaaaacagatatcaagggcacaccggagaccggcttataaaccccaggttttcataaacaaagaaaccgaagcggcggcagagccgcacaggatcggtgaagggagaagagagaaggatgaaaaatagaaatttattgaatctagaaagaagcgcttacaaaattttgtttcagagcacctctcttcagaaacctgaaaaatggctaaatgaaagggtgcctcacaacatacttgaggactccttatatagccaaaaatctaagaccaatagttgccggtagttttgaccgggattatttgactgcttgttacaagacaagtagttttgatcgggactttaatggctacaagacaggtagtattgtccagcattaattacacattaattacaaacaaacggttttgtgatcgaaattaagtttaatctaaacagataccaaaacaatcatcttcgttttggtaaaaggggtcttcttcagcagaacttgtttcttccttctttgaggatgaaccttcttcttcctgttgtaacatttgcagaacttccttcagatttttagctaagacctcctttgatgtcaatcctgctaagaatgctgccagatgagacttttggttcaaaaacacagaagtttctgtatcagctgctttgaggaattctggatgggattgga

SEQ ID NO: 10613 - DNA, 1119 bp, Glycine max
  Gm_smallRNAprecursor_3446
ttttccaaaaatagtttatagtgcaaaaaataatgataaattatgttggttttttatatttctttatattcaattgtatgtttattgtatattatataaaaattaatgtttcatattaatttgatttatttatgtttattatgttcctgaaattataaaaaatactatatatatatatatataaacttgaaaaacagatatcaagggcacaccggagaccggcttataaaccccaggttttcataaacaaagaaaccgaagcggcggcagagccgcacaggatcggtgaagggagaagagagaaggatgaaaaatagaaatttattgaatctagaaagaagcgcttacaaaattttgtttcagagcacctctcttcagaaacctgaaaaatggctaaatgaaagggtgcctcacaacatacttgaggactccttatatagccaaaaatctaagaccaatagttgccggtagttttgaccgggattatttgactgcttgttacaagacaagtagttttgatcgggactttaatggctacaagacaggtagtattgtccagcattaattacacattaattacaaacaaacggttttgtgatcgaaattaagtttaatctaaacagataccaaaacaatcatcttcgttttggtaaaaggggtcttcttcagcagaacttgtttcttccttctttgaggatgaaccttcttcttcctgttgtaacatttgcagaacttccttcagatttttagctaagacctcctttgatgtcaatcctgctaagaatgctgccagatgagacttttggttcaaaaacacagaagtttctgtatcagctgctttgaggaattctggatgggattggaaccagagttttacttgttctggatctgttttggatgagtcaaattatgtccaccattttacaaatgcgtgtctttgtagtgatggatattggtttgtcttttcagtcttgctgtaacgatattgccatgagaatatccatgacagtgcaaagcttgaaaagtatttaagatctgctggaattcgtgattcctgcgaattgtattgtctctcaaattgagcaaatccttgttggactgtttctggaaatatctctg

SEQ ID NO: 10614 - DNA, 1120 bp, Glycine max
  Gm_smallRNAprecursor_3447
ttttccaaaaatagtttatagtgcaaaaaataatgataaattatgttggttttttatatttctttatattcaattgtatgtttattgtatattatataaaaattaatgtttcatattaatttgatttatttatgtttattatgttcctgaaattataaaaaatactatatatatatatatataaacttgaaaaacagatatcaagggcacaccggagaccggcttataaaccccaggttttcataaacaaagaaaccgaagcggcggcagagccgcacaggatcggtgaagggagaagagagaaggatgaaaaatagaaatttattgaatctagaaagaagcgcttacaaaattttgtttcagagcacctctcttcagaaacctgaaaaatggctaaatgaaagggtgcctcacaacatacttgaggactccttatatagccaaaaatctaagaccaatagttgccggtagttttgaccgggattatttgactgcttgttacaagacaagtagttttgatcgggactttaatggctacaagacaggtagtattgtccagcattaattacacattaattacaaacaaacggttttgtgatcgaaattaagtttaatctaaacagataccaaaacaatcatcttcgttttggtaaaaggggtcttcttcagcagaacttgtttcttccttctttgaggatgaaccttcttcttcctgttgtaacatttgcagaacttccttcagatttttagctaagacctcctttgatgtcaatcctgctaagaatgctgccagatgagacttttggttcaaaaacacagaagtttctgtatcagctgctttgaggaattctggatgggattggaaccagagttttacttgttctggatctgttttggatgagtcaaattatgtccaccattttacaaatgcgtgtctttgtagtgatggatattggtttgtcttttcagtcttgctgtaacgatattgccatgagaatatccatgacagtgcaaagcttgaaaagtatttaagatctgctggaattcgtgattcctgcgaattgtattgtctctcaaattgagcaaatccttgttggactgtttctggaaatatctctgg

SEQ ID NO: 10615 - DNA, 1120 bp, Glycine max; identical to SEQ ID NO: 10614
  Gm_smallRNAprecursor_3448

SEQ ID NO: 10616 - DNA, 1121 bp, Glycine max
  Gm_smallRNAprecursor_3449
ttttccaaaaatagtttatagtgcaaaaaataatgataaattatgttggttttttatatttctttatattcaattgtatgtttattgtatattatataaaaattaatgtttcatattaatttgatttatttatgtttattatgttcctgaaattataaaaaatactatatatatatatatataaacttgaaaaacagatatcaagggcacaccggagaccggcttataaaccccaggttttcataaacaaagaaaccgaagcggcggcagagccgcacaggatcggtgaagggagaagagagaaggatgaaaaatagaaatttattgaatctagaaagaagcgcttacaaaattttgtttcagagcacctctcttcagaaacctgaaaaatggctaaatgaaagggtgcctcacaacatacttgaggactccttatatagccaaaaatctaagaccaatagttgccggtagttttgaccgggattatttgactgcttgttacaagacaagtagttttgatcgggactttaatggctacaagacaggtagtattgtccagcattaattacacattaattacaaacaaacggttttgtgatcgaaattaagtttaatctaaacagataccaaaacaatcatcttcgttttggtaaaaggggtcttcttcagcagaacttgtttcttccttctttgaggatgaaccttcttcttcctgttgtaacatttgcagaacttccttcagatttttagctaagacctcctttgatgtcaatcctgctaagaatgctgccagatgagacttttggttcaaaaacacagaagtttctgtatcagctgctttgaggaattctggatgggattggaaccagagttttacttgttctggatctgttttggatgagtcaaattatgtccaccattttacaaatgcgtgtctttgtagtgatggatattggtttgtcttttcagtcttgctgtaacgatattgccatgagaatatccatgacagtgcaaagcttgaaaagtatttaagatctgctggaattcgtgattcctgcgaattgtattgtctctcaaattgagcaaatccttgttggactgtttctggaaatatctctggg

SEQ ID NO: 10617 - DNA, 1121 bp, Glycine max; identical to SEQ ID NO: 10616
  Gm_smallRNAprecursor_3450

SEQ ID NO: 10618 - DNA, 1052 bp, Glycine max
  Gm_smallRNAprecursor_3451
ttaatttgatttatttatgtttattatgttcctgaaattataaaaaatactatatatatatatatataaacttgaaaaacagatatcaagggcacaccggagaccggcttataaaccccaggttttcataaacaaagaaaccgaagcggcggcagagccgcacaggatcggtgaagggagaagagagaaggatgaaaaatagaaatttattgaatctagaaagaagcgcttacaaaattttgtttcagagcacctctcttcagaaacctgaaaaatggctaaatgaaagggtgcctcacaacatacttgaggactccttatatagccaaaaatctaagaccaatagttgccggtagttttgaccgggattatttgactgcttgttacaagacaagtagttttgatcgggactttaatggctacaagacaggtagtattgtccagcattaattacacattaattacaaacaaacggttttgtgatcgaaattaagtttaatctaaacagataccaaaacaatcatcttcgttttggtaaaaggggtcttcttcagcagaacttgtttcttccttctttgaggatgaaccttcttcttcctgttgtaacatttgcagaacttccttcagatttttagctaagacctcctttgatgtcaatcctgctaagaatgctgccagatgagacttttggttcaaaaacacagaagtttctgtatcagctgctttgaggaattctggatgggattggaaccagagttttacttgttctggatctgttttggatgagtcaaattatgtccaccattttacaaatgcgtgtctttgtagtgatggatattggtttgtcttttcagtcttgctgtaacgatattgccatgagaatatccatgacagtgcaaagcttgaaaagtatttaagatctgctggaattcgtgattcctgcgaattgtattgtctctcaaattgagcaaatccttgttggactgtttctggaaatatctctgggattggtccaaagaagtcccaccattgcaaaaaccaattgggaaaat

SEQ ID NO: 10619 - DNA, 1054 bp, Glycine max
  Gm_smallRNAprecursor_3452
ttaatttgatttatttatgtttattatgttcctgaaattataaaaaatactatatatatatatatataaacttgaaaaacagatatcaagggcacaccggagaccggcttataaaccccaggttttcataaacaaagaaaccgaagcggcggcagagccgcacaggatcggtgaagggagaagagagaaggatgaaaaatagaaatttattgaatctagaaagaagcgcttacaaaattttgtttcagagcacctctcttcagaaacctgaaaaatggctaaatgaaagggtgcctcacaacatacttgaggactccttatatagccaaaaatctaagaccaatagttgccggtagttttgaccgggattatttgactgcttgttacaagacaagtagttttgatcgggactttaatggctacaagacaggtagtattgtccagcattaattacacattaattacaaacaaacggttttgtgatcgaaattaagtttaatctaaacagataccaaaacaatcatcttcgttttggtaaaaggggtcttcttcagcagaacttgtttcttccttctttgaggatgaaccttcttcttcctgttgtaacatttgcagaacttccttcagatttttagctaagacctcctttgatgtcaatcctgctaagaatgctgccagatgagacttttggttcaaaaacacagaagtttctgtatcagctgctttgaggaattctggatgggattggaaccagagttttacttgttctggatctgttttggatgagtcaaattatgtccaccattttacaaatgcgtgtctttgtagtgatggatattggtttgtcttttcagtcttgctgtaacgatattgccatgagaatatccatgacagtgcaaagcttgaaaagtatttaagatctgctggaattcgtgattcctgcgaattgtattgtctctcaaattgagcaaatccttgttggactgtttctggaaatatctctgggattggtccaaagaagtcccaccattgcaaaaaccaattgggaaaattg

SEQ ID NO: 10620 - DNA, 1054 bp, Glycine max; identical to SEQ ID NO: 10619
  Gm_smallRNAprecursor_3453

SEQ ID NO: 10621 - DNA, 1055 bp, Glycine max
  Gm_smallRNAprecursor_3454
ttaatttgatttatttatgtttattatgttcctgaaattataaaaaatactatatatatatatatataaacttgaaaaacagatatcaagggcacaccggagaccggcttataaaccccaggttttcataaacaaagaaaccgaagcggcggcagagccgcacaggatcggtgaagggagaagagagaaggatgaaaaatagaaatttattgaatctagaaagaagcgcttacaaaattttgtttcagagcacctctcttcagaaacctgaaaaatggctaaatgaaagggtgcctcacaacatacttgaggactccttatatagccaaaaatctaagaccaatagttgccggtagttttgaccgggattatttgactgcttgttacaagacaagtagttttgatcgggactttaatggctacaagacaggtagtattgtccagcattaattacacattaattacaaacaaacggttttgtgatcgaaattaagtttaatctaaacagataccaaaacaatcatcttcgttttggtaaaaggggtcttcttcagcagaacttgtttcttccttctttgaggatgaaccttcttcttcctgttgtaacatttgcagaacttccttcagatttttagctaagacctcctttgatgtcaatcctgctaagaatgctgccagatgagacttttggttcaaaaacacagaagtttctgtatcagctgctttgaggaattctggatgggattggaaccagagttttacttgttctggatctgttttggatgagtcaaattatgtccaccattttacaaatgcgtgtctttgtagtgatggatattggtttgtcttttcagtcttgctgtaacgatattgccatgagaatatccatgacagtgcaaagcttgaaaagtatttaagatctgctggaattcgtgattcctgcgaattgtattgtctctcaaattgagcaaatccttgttggactgtttctggaaatatctctgggattggtccaaagaagtcccaccattgcaaaaaccaattgggaaaattgt

SEQ ID NO: 10622 - DNA, 1048 bp, Glycine max
  Gm_smallRNAprecursor_3455
atttgatttatttatgtttattatgttcctgaaattataaaaaatactatatatatatatatataaacttgaaaaacagatatcaagggcacaccggagaccggcttataaaccccaggttttcataaacaaagaaaccgaagcggcggcagagccgcacaggatcggtgaagggagaagagagaaggatgaaaaatagaaatttattgaatctagaaagaagcgcttacaaaattttgtttcagagcacctctcttcagaaacctgaaaaatggctaaatgaaagggtgcctcacaacatacttgaggactccttatatagccaaaaatctaagaccaatagttgccggtagttttgaccgggattatttgactgcttgttacaagacaagtagttttgatcgggactttaatggctacaagacaggtagtattgtccagcattaattacacattaattacaaacaaacggttttgtgatcgaaattaagtttaatctaaacagataccaaaacaatcatcttcgttttggtaaaaggggtcttcttcagcagaacttgtttcttccttctttgaggatgaaccttcttcttcctgttgtaacatttgcagaacttccttcagatttttagctaagacctcctttgatgtcaatcctgctaagaatgctgccagatgagacttttggttcaaaaacacagaagtttctgtatcagctgctttgaggaattctggatgggattggaaccagagttttacttgttctggatctgttttggatgagtcaaattatgtccaccattttacaaatgcgtgtctttgtagtgatggatattggtttgtcttttcagtcttgctgtaacgatattgccatgagaatatccatgacagtgcaaagcttgaaaagtatttaagatctgctggaattcgtgattcctgcgaattgtattgtctctcaaattgagcaaatccttgttggactgtttctggaaatatctctgggattggtccaaagaagtcccaccattgcaaaaaccaattgggaaaa

SEQ ID NO: 10623 - DNA, 1049 bp, Glycine max
  Gm_smallRNAprecursor_3456
atttgatttatttatgtttattatgttcctgaaattataaaaaatactatatatatatatatataaacttgaaaaacagatatcaagggcacaccggagaccggcttataaaccccaggttttcataaacaaagaaaccgaagcggcggcagagccgcacaggatcggtgaagggagaagagagaaggatgaaaaatagaaatttattgaatctagaaagaagcgcttacaaaattttgtttcagagcacctctcttcagaaacctgaaaaatggctaaatgaaagggtgcctcacaacatacttgaggactccttatatagccaaaaatctaagaccaatagttgccggtagttttgaccgggattatttgactgcttgttacaagacaagtagttttgatcgggactttaatggctacaagacaggtagtattgtccagcattaattacacattaattacaaacaaacggttttgtgatcgaaattaagtttaatctaaacagataccaaaacaatcatcttcgttttggtaaaaggggtcttcttcagcagaacttgtttcttccttctttgaggatgaaccttcttcttcctgttgtaacatttgcagaacttccttcagatttttagctaagacctcctttgatgtcaatcctgctaagaatgctgccagatgagacttttggttcaaaaacacagaagtttctgtatcagctgctttgaggaattctggatgggattggaaccagagttttacttgttctggatctgttttggatgagtcaaattatgtccaccattttacaaatgcgtgtctttgtagtgatggatattggtttgtcttttcagtcttgctgtaacgatattgccatgagaatatccatgacagtgcaaagcttgaaaagtatttaagatctgctggaattcgtgattcctgcgaattgtattgtctctcaaattgagcaaatccttgttggactgtttctggaaatatctctgggattggtccaaagaagtcccaccattgcaaaaaccaattgggaaaat

SEQ ID NO: 10624 - DNA, 1047 bp, Glycine max
  Gm_smallRNAprecursor_3457
tttgatttatttatgtttattatgttcctgaaattataaaaaatactatatatatatatatataaacttgaaaaacagatatcaagggcacaccggagaccggcttataaaccccaggttttcataaacaaagaaaccgaagcggcggcagagccgcacaggatcggtgaagggagaagagagaaggatgaaaaatagaaatttattgaatctagaaagaagcgcttacaaaattttgtttcagagcacctctcttcagaaacctgaaaaatggctaaatgaaagggtgcctcacaacatacttgaggactccttatatagccaaaaatctaagaccaatagttgccggtagttttgaccgggattatttgactgcttgttacaagacaagtagttttgatcgggactttaatggctacaagacaggtagtattgtccagcattaattacacattaattacaaacaaacggttttgtgatcgaaattaagtttaatctaaacagataccaaaacaatcatcttcgttttggtaaaaggggtcttcttcagcagaacttgtttcttccttctttgaggatgaaccttcttcttcctgttgtaacatttgcagaacttccttcagatttttagctaagacctcctttgatgtcaatcctgctaagaatgctgccagatgagacttttggttcaaaaacacagaagtttctgtatcagctgctttgaggaattctggatgggattggaaccagagttttacttgttctggatctgttttggatgagtcaaattatgtccaccattttacaaatgcgtgtctttgtagtgatggatattggtttgtcttttcagtcttgctgtaacgatattgccatgagaatatccatgacagtgcaaagcttgaaaagtatttaagatctgctggaattcgtgattcctgcgaattgtattgtctctcaaattgagcaaatccttgttggactgtttctggaaatatctctgggattggtccaaagaagtcccaccattgcaaaaaccaattgggaaaa

SEQ ID NO: 10625 - DNA, 1047 bp, Glycine max; identical to SEQ ID NO: 10624
  Gm_smallRNAprecursor_3458

SEQ ID NO: 10626 - DNA, 1048 bp, Glycine max
  Gm_smallRNAprecursor_3459
tttgatttatttatgtttattatgttcctgaaattataaaaaatactatatatatatatatataaacttgaaaaacagatatcaagggcacaccggagaccggcttataaaccccaggttttcataaacaaagaaaccgaagcggcggcagagccgcacaggatcggtgaagggagaagagagaaggatgaaaaatagaaatttattgaatctagaaagaagcgcttacaaaattttgtttcagagcacctctcttcagaaacctgaaaaatggctaaatgaaagggtgcctcacaacatacttgaggactccttatatagccaaaaatctaagaccaatagttgccggtagttttgaccgggattatttgactgcttgttacaagacaagtagttttgatcgggactttaatggctacaagacaggtagtattgtccagcattaattacacattaattacaaacaaacggttttgtgatcgaaattaagtttaatctaaacagataccaaaacaatcatcttcgttttggtaaaaggggtcttcttcagcagaacttgtttcttccttctttgaggatgaaccttcttcttcctgttgtaacatttgcagaacttccttcagatttttagctaagacctcctttgatgtcaatcctgctaagaatgctgccagatgagacttttggttcaaaaacacagaagtttctgtatcagctgctttgaggaattctggatgggattggaaccagagttttacttgttctggatctgttttggatgagtcaaattatgtccaccattttacaaatgcgtgtctttgtagtgatggatattggtttgtcttttcagtcttgctgtaacgatattgccatgagaatatccatgacagtgcaaagcttgaaaagtatttaagatctgctggaattcgtgattcctgcgaattgtattgtctctcaaattgagcaaatccttgttggactgtttctggaaatatctctgggattggtccaaagaagtcccaccattgcaaaaaccaattgggaaaat

SEQ ID NO: 10627 - DNA, 1050 bp, Glycine max
  Gm_smallRNAprecursor_3460
tttgatttatttatgtttattatgttcctgaaattataaaaaatactatatatatatatatataaacttgaaaaacagatatcaagggcacaccggagaccggcttataaaccccaggttttcataaacaaagaaaccgaagcggcggcagagccgcacaggatcggtgaagggagaagagagaaggatgaaaaatagaaatttattgaatctagaaagaagcgcttacaaaattttgtttcagagcacctctcttcagaaacctgaaaaatggctaaatgaaagggtgcctcacaacatacttgaggactccttatatagccaaaaatctaagaccaatagttgccggtagttttgaccgggattatttgactgcttgttacaagacaagtagttttgatcgggactttaatggctacaagacaggtagtattgtccagcattaattacacattaattacaaacaaacggttttgtgatcgaaattaagtttaatctaaacagataccaaaacaatcatcttcgttttggtaaaaggggtcttcttcagcagaacttgtttcttccttctttgaggatgaaccttcttcttcctgttgtaacatttgcagaacttccttcagatttttagctaagacctcctttgatgtcaatcctgctaagaatgctgccagatgagacttttggttcaaaaacacagaagtttctgtatcagctgctttgaggaattctggatgggattggaaccagagttttacttgttctggatctgttttggatgagtcaaattatgtccaccattttacaaatgcgtgtctttgtagtgatggatattggtttgtcttttcagtcttgctgtaacgatattgccatgagaatatccatgacagtgcaaagcttgaaaagtatttaagatctgctggaattcgtgattcctgcgaattgtattgtctctcaaattgagcaaatccttgttggactgtttctggaaatatctctgggattggtccaaagaagtcccaccattgcaaaaaccaattgggaaaattg

SEQ ID NO: 10628 - DNA, 1050 bp, Glycine max; identical to SEQ ID NO: 10627
  Gm_smallRNAprecursor_3461

SEQ ID NO: 10629 - DNA, 1046 bp, Glycine max
  Gm_smallRNAprecursor_3462
ttgatttatttatgtttattatgttcctgaaattataaaaaatactatatatatatatatataaacttgaaaaacagatatcaagggcacaccggagaccggcttataaaccccaggttttcataaacaaagaaaccgaagcggcggcagagccgcacaggatcggtgaagggagaagagagaaggatgaaaaatagaaatttattgaatctagaaagaagcgcttacaaaattttgtttcagagcacctctcttcagaaacctgaaaaatggctaaatgaaagggtgcctcacaacatacttgaggactccttatatagccaaaaatctaagaccaatagttgccggtagttttgaccgggattatttgactgcttgttacaagacaagtagttttgatcgggactttaatggctacaagacaggtagtattgtccagcattaattacacattaattacaaacaaacggttttgtgatcgaaattaagtttaatctaaacagataccaaaacaatcatcttcgttttggtaaaaggggtcttcttcagcagaacttgtttcttccttctttgaggatgaaccttcttcttcctgttgtaacatttgcagaacttccttcagatttttagctaagacctcctttgatgtcaatcctgctaagaatgctgccagatgagacttttggttcaaaaacacagaagtttctgtatcagctgctttgaggaattctggatgggattggaaccagagttttacttgttctggatctgttttggatgagtcaaattatgtccaccattttacaaatgcgtgtctttgtagtgatggatattggtttgtcttttcagtcttgctgtaacgatattgccatgagaatatccatgacagtgcaaagcttgaaaagtatttaagatctgctggaattcgtgattcctgcgaattgtattgtctctcaaattgagcaaatccttgttggactgtttctggaaatatctctgggattggtccaaagaagtcccaccattgcaaaaaccaattgggaaaa

SEQ ID NO: 10630 - DNA, 1049 bp, Glycine max
  Gm_smallRNAprecursor_3463
ttgatttatttatgtttattatgttcctgaaattataaaaaatactatatatatatatatataaacttgaaaaacagatatcaagggcacaccggagaccggcttataaaccccaggttttcataaacaaagaaaccgaagcggcggcagagccgcacaggatcggtgaagggagaagagagaaggatgaaaaatagaaatttattgaatctagaaagaagcgcttacaaaattttgtttcagagcacctctcttcagaaacctgaaaaatggctaaatgaaagggtgcctcacaacatacttgaggactccttatatagccaaaaatctaagaccaatagttgccggtagttttgaccgggattatttgactgcttgttacaagacaagtagttttgatcgggactttaatggctacaagacaggtagtattgtccagcattaattacacattaattacaaacaaacggttttgtgatcgaaattaagtttaatctaaacagataccaaaacaatcatcttcgttttggtaaaaggggtcttcttcagcagaacttgtttcttccttctttgaggatgaaccttcttcttcctgttgtaacatttgcagaacttccttcagatttttagctaagacctcctttgatgtcaatcctgctaagaatgctgccagatgagacttttggttcaaaaacacagaagtttctgtatcagctgctttgaggaattctggatgggattggaaccagagttttacttgttctggatctgttttggatgagtcaaattatgtccaccattttacaaatgcgtgtctttgtagtgatggatattggtttgtcttttcagtcttgctgtaacgatattgccatgagaatatccatgacagtgcaaagcttgaaaagtatttaagatctgctggaattcgtgattcctgcgaattgtattgtctctcaaattgagcaaatccttgttggactgtttctggaaatatctctgggattggtccaaagaagtcccaccattgcaaaaaccaattgggaaaattg

SEQ ID NO: 10631 - DNA, 1049 bp, Glycine max; identical to SEQ ID NO: 10630
  Gm_smallRNAprecursor_3464

SEQ ID NO: 10632 - DNA, 1078 bp, Glycine max
  Gm_smallRNAprecursor_3465
gaaagaagcgcttacaaaattttgtttcagagcacctctcttcagaaacctgaaaaatggctaaatgaaagggtgcctcacaacatacttgaggactccttatatagccaaaaatctaagaccaatagttgccggtagttttgaccgggattatttgactgcttgttacaagacaagtagttttgatcgggactttaatggctacaagacaggtagtattgtccagcattaattacacattaattacaaacaaacggttttgtgatcgaaattaagtttaatctaaacagataccaaaacaatcatcttcgttttggtaaaaggggtcttcttcagcagaacttgtttcttccttctttgaggatgaaccttcttcttcctgttgtaacatttgcagaacttccttcagatttttagctaagacctcctttgatgtcaatcctgctaagaatgctgccagatgagacttttggttcaaaaacacagaagtttctgtatcagctgctttgaggaattctggatgggattggaaccagagttttacttgttctggatctgttttggatgagtcaaattatgtccaccattttacaaatgcgtgtctttgtagtgatggatattggtttgtcttttcagtcttgctgtaacgatattgccatgagaatatccatgacagtgcaaagcttgaaaagtatttaagatctgctggaattcgtgattcctgcgaattgtattgtctctcaaattgagcaaatccttgttggactgtttctggaaatatctctgggattggtccaaagaagtcccaccattgcaaaaaccaattgggaaaattgtaaattgtattggtcttgaaatatattagccatgaatgcttgaagcgggtattttggttccaaaacaccttagtccaagcatcaacgtaatcccaataggtataacctactggatcaaatggaactgagaatctttttcctttgttcaagtccgaaccaaagtgtcttggttgaagaacttttagtatttggattgtcgagtgggtgtttaatgtttggtcttttgggtctttgaaatgttt

SEQ ID NO: 10633 - DNA, 1164 bp, Glycine max
  Gm_smallRNAprecursor_3466
gaaagaagcgcttacaaaattttgtttcagagcacctctcttcagaaacctgaaaaatggctaaatgaaagggtgcctcacaacatacttgaggactccttatatagccaaaaatctaagaccaatagttgccggtagttttgaccgggattatttgactgcttgttacaagacaagtagttttgatcgggactttaatggctacaagacaggtagtattgtccagcattaattacacattaattacaaacaaacggttttgtgatcgaaattaagtttaatctaaacagataccaaaacaatcatcttcgttttggtaaaaggggtcttcttcagcagaacttgtttcttccttctttgaggatgaaccttcttcttcctgttgtaacatttgcagaacttccttcagatttttagctaagacctcctttgatgtcaatcctgctaagaatgctgccagatgagacttttggttcaaaaacacagaagtttctgtatcagctgctttgaggaattctggatgggattggaaccagagttttacttgttctggatctgttttggatgagtcaaattatgtccaccattttacaaatgcgtgtctttgtagtgatggatattggtttgtcttttcagtcttgctgtaacgatattgccatgagaatatccatgacagtgcaaagcttgaaaagtatttaagatctgctggaattcgtgattcctgcgaattgtattgtctctcaaattgagcaaatccttgttggactgtttctggaaatatctctgggattggtccaaagaagtcccaccattgcaaaaaccaattgggaaaattgtaaattgtattggtcttgaaatatattagccatgaatgcttgaagcgggtattttggttccaaaacaccttagtccaagcatcaacgtaatcccaataggtataacctactggatcaaatggaactgagaatctttttcctttgttcaagtccgaaccaaagtgtcttggttgaagaacttttagtatttggattgtcgagtgggtgtttaatgtttggtcttttgggtctttgaaatgtttgatagatactgagtttgaatctaccaaaatcaattcataaaaagttcttgtctttaggatggtggttggtttgtagtgaaatcctg

SEQ ID NO: 10634 - DNA, 1077 bp, Glycine max
  Gm_smallRNAprecursor_3467
aaagaagcgcttacaaaattttgtttcagagcacctctcttcagaaacctgaaaaatggctaaatgaaagggtgcctcacaacatacttgaggactccttatatagccaaaaatctaagaccaatagttgccggtagttttgaccgggattatttgactgcttgttacaagacaagtagttttgatcgggactttaatggctacaagacaggtagtattgtccagcattaattacacattaattacaaacaaacggttttgtgatcgaaattaagtttaatctaaacagataccaaaacaatcatcttcgttttggtaaaaggggtcttcttcagcagaacttgtttcttccttctttgaggatgaaccttcttcttcctgttgtaacatttgcagaacttccttcagatttttagctaagacctcctttgatgtcaatcctgctaagaatgctgccagatgagacttttggttcaaaaacacagaagtttctgtatcagctgctttgaggaattctggatgggattggaaccagagttttacttgttctggatctgttttggatgagtcaaattatgtccaccattttacaaatgcgtgtctttgtagtgatggatattggtttgtcttttcagtcttgctgtaacgatattgccatgagaatatccatgacagtgcaaagcttgaaaagtatttaagatctgctggaattcgtgattcctgcgaattgtattgtctctcaaattgagcaaatccttgttggactgtttctggaaatatctctgggattggtccaaagaagtcccaccattgcaaaaaccaattgggaaaattgtaaattgtattggtcttgaaatatattagccatgaatgcttgaagcgggtattttggttccaaaacaccttagtccaagcatcaacgtaatcccaataggtataacctactggatcaaatggaactgagaatctttttcctttgttcaagtccgaaccaaagtgtcttggttgaagaacttttagtatttggattgtcgagtgggtgtttaatgtttggtcttttgggtctttgaaatgttt

SEQ ID NO: 10635 - DNA, 1163 bp, Glycine max
  Gm_smallRNAprecursor_3468
aaagaagcgcttacaaaattttgtttcagagcacctctcttcagaaacctgaaaaatggctaaatgaaagggtgcctcacaacatacttgaggactccttatatagccaaaaatctaagaccaatagttgccggtagttttgaccgggattatttgactgcttgttacaagacaagtagttttgatcgggactttaatggctacaagacaggtagtattgtccagcattaattacacattaattacaaacaaacggttttgtgatcgaaattaagtttaatctaaacagataccaaaacaatcatcttcgttttggtaaaaggggtcttcttcagcagaacttgtttcttccttctttgaggatgaaccttcttcttcctgttgtaacatttgcagaacttccttcagatttttagctaagacctcctttgatgtcaatcctgctaagaatgctgccagatgagacttttggttcaaaaacacagaagtttctgtatcagctgctttgaggaattctggatgggattggaaccagagttttacttgttctggatctgttttggatgagtcaaattatgtccaccattttacaaatgcgtgtctttgtagtgatggatattggtttgtcttttcagtcttgctgtaacgatattgccatgagaatatccatgacagtgcaaagcttgaaaagtatttaagatctgctggaattcgtgattcctgcgaattgtattgtctctcaaattgagcaaatccttgttggactgtttctggaaatatctctgggattggtccaaagaagtcccaccattgcaaaaaccaattgggaaaattgtaaattgtattggtcttgaaatatattagccatgaatgcttgaagcgggtattttggttccaaaacaccttagtccaagcatcaacgtaatcccaataggtataacctactggatcaaatggaactgagaatctttttcctttgttcaagtccgaaccaaagtgtcttggttgaagaacttttagtatttggattgtcgagtgggtgtttaatgtttggtcttttgggtctttgaaatgtttgatagatactgagtttgaatctaccaaaatcaattcataaaaagttcttgtctttaggatggtggttggtttgtagtgaaatcctg

SEQ ID NO: 10636 - DNA, 1130 bp, Glycine max
  Gm_smallRNAprecursor_3469
cctctcttcagaaacctgaaaaatggctaaatgaaagggtgcctcacaacatacttgaggactccttatatagccaaaaatctaagaccaatagttgccggtagttttgaccgggattatttgactgcttgttacaagacaagtagttttgatcgggactttaatggctacaagacaggtagtattgtccagcattaattacacattaattacaaacaaacggttttgtgatcgaaattaagtttaatctaaacagataccaaaacaatcatcttcgttttggtaaaaggggtcttcttcagcagaacttgtttcttccttctttgaggatgaaccttcttcttcctgttgtaacatttgcagaacttccttcagatttttagctaagacctcctttgatgtcaatcctgctaagaatgctgccagatgagacttttggttcaaaaacacagaagtttctgtatcagctgctttgaggaattctggatgggattggaaccagagttttacttgttctggatctgttttggatgagtcaaattatgtccaccattttacaaatgcgtgtctttgtagtgatggatattggtttgtcttttcagtcttgctgtaacgatattgccatgagaatatccatgacagtgcaaagcttgaaaagtatttaagatctgctggaattcgtgattcctgcgaattgtattgtctctcaaattgagcaaatccttgttggactgtttctggaaatatctctgggattggtccaaagaagtcccaccattgcaaaaaccaattgggaaaattgtaaattgtattggtcttgaaatatattagccatgaatgcttgaagcgggtattttggttccaaaacaccttagtccaagcatcaacgtaatcccaataggtataacctactggatcaaatggaactgagaatctttttcctttgttcaagtccgaaccaaagtgtcttggttgaagaacttttagtatttggattgtcgagtgggtgtttaatgtttggtcttttgggtctttgaaatgtttgatagatactgagtttgaatctaccaaaatcaattcataaaaagttcttgtctttaggatggtggttggtttgtagtgaaatcctg

SEQ ID NO: 10637 - DNA, 1189 bp, Glycine max
  Gm_smallRNAprecursor_3470
gattatttgactgcttgttacaagacaagtagttttgatcgggactttaatggctacaagacaggtagtattgtccagcattaattacacattaattacaaacaaacggttttgtgatcgaaattaagtttaatctaaacagataccaaaacaatcatcttcgttttggtaaaaggggtcttcttcagcagaacttgtttcttccttctttgaggatgaaccttcttcttcctgttgtaacatttgcagaacttccttcagatttttagctaagacctcctttgatgtcaatcctgctaagaatgctgccagatgagacttttggttcaaaaacacagaagtttctgtatcagctgctttgaggaattctggatgggattggaaccagagttttacttgttctggatctgttttggatgagtcaaattatgtccaccattttacaaatgcgtgtctttgtagtgatggatattggtttgtcttttcagtcttgctgtaacgatattgccatgagaatatccatgacagtgcaaagcttgaaaagtatttaagatctgctggaattcgtgattcctgcgaattgtattgtctctcaaattgagcaaatccttgttggactgtttctggaaatatctctgggattggtccaaagaagtcccaccattgcaaaaaccaattgggaaaattgtaaattgtattggtcttgaaatatattagccatgaatgcttgaagcgggtattttggttccaaaacaccttagtccaagcatcaacgtaatcccaataggtataacctactggatcaaatggaactgagaatctttttcctttgttcaagtccgaaccaaagtgtcttggttgaagaacttttagtatttggattgtcgagtgggtgtttaatgtttggtcttttgggtctttgaaatgtttgatagatactgagtttgaatctaccaaaatcaattcataaaaagttcttgtctttaggatggtggttggtttgtagtgaaatcctggtgggaaagccttggccgtcgccttgaagggatttttgtcccaaaattcaggttccatctgcaaaacagttgtaaatttatttttataaatataattgttagtttgtttggtaggtggtgtttgagccttggctaaaggtagttttcctttagtattggtggctgttttggtc

SEQ ID NO: 10638 - DNA, 1190 bp, Glycine max
  Gm_smallRNAprecursor_3471
gattatttgactgcttgttacaagacaagtagttttgatcgggactttaatggctacaagacaggtagtattgtccagcattaattacacattaattacaaacaaacggttttgtgatcgaaattaagtttaatctaaacagataccaaaacaatcatcttcgttttggtaaaaggggtcttcttcagcagaacttgtttcttccttctttgaggatgaaccttcttcttcctgttgtaacatttgcagaacttccttcagatttttagctaagacctcctttgatgtcaatcctgctaagaatgctgccagatgagacttttggttcaaaaacacagaagtttctgtatcagctgctttgaggaattctggatgggattggaaccagagttttacttgttctggatctgttttggatgagtcaaattatgtccaccattttacaaatgcgtgtctttgtagtgatggatattggtttgtcttttcagtcttgctgtaacgatattgccatgagaatatccatgacagtgcaaagcttgaaaagtatttaagatctgctggaattcgtgattcctgcgaattgtattgtctctcaaattgagcaaatccttgttggactgtttctggaaatatctctgggattggtccaaagaagtcccaccattgcaaaaaccaattgggaaaattgtaaattgtattggtcttgaaatatattagccatgaatgcttgaagcgggtattttggttccaaaacaccttagtccaagcatcaacgtaatcccaataggtataacctactggatcaaatggaactgagaatctttttcctttgttcaagtccgaaccaaagtgtcttggttgaagaacttttagtatttggattgtcgagtgggtgtttaatgtttggtcttttgggtctttgaaatgtttgatagatactgagtttgaatctaccaaaatcaattcataaaaagttcttgtctttaggatggtggttggtttgtagtgaaatcctggtgggaaagccttggccgtcgccttgaagggatttttgtcccaaaattcaggttccatctgcaaaacagttgtaaatttatttttataaatataattgttagtttgtttggtaggtggtgtttgagccttggctaaaggtagttttcctttagtattggtggctgttttggtca

SEQ ID NO: 10639 - DNA, 1131 bp, Glycine max
  Gm_smallRNAprecursor_3472
tgttacaagacaagtagttttgatcgggactttaatggctacaagacaggtagtattgtccagcattaattacacattaattacaaacaaacggttttgtgatcgaaattaagtttaatctaaacagataccaaaacaatcatcttcgttttggtaaaaggggtcttcttcagcagaacttgtttcttccttctttgaggatgaaccttcttcttcctgttgtaacatttgcagaacttccttcagatttttagctaagacctcctttgatgtcaatcctgctaagaatgctgccagatgagacttttggttcaaaaacacagaagtttctgtatcagctgctttgaggaattctggatgggattggaaccagagttttacttgttctggatctgttttggatgagtcaaattatgtccaccattttacaaatgcgtgtctttgtagtgatggatattggtttgtcttttcagtcttgctgtaacgatattgccatgagaatatccatgacagtgcaaagcttgaaaagtatttaagatctgctggaattcgtgattcctgcgaattgtattgtctctcaaattgagcaaatccttgttggactgtttctggaaatatctctgggattggtccaaagaagtcccaccattgcaaaaaccaattgggaaaattgtaaattgtattggtcttgaaatatattagccatgaatgcttgaagcgggtattttggttccaaaacaccttagtccaagcatcaacgtaatcccaataggtataacctactggatcaaatggaactgagaatctttttcctttgttcaagtccgaaccaaagtgtcttggttgaagaacttttagtatttggattgtcgagtgggtgtttaatgtttggtcttttgggtctttgaaatgtttgatagatactgagtttgaatctaccaaaatcaattcataaaaagttcttgtctttaggatggtggttggtttgtagtgaaatcctggtgggaaagccttggccgtcgccttgaagggatttttgtcccaaaattcaggttccatctgcaaaacagttgtaaatttatttttataaatataattgttagtttgtttggtaggtggtgtttgagcctt

SEQ ID NO: 10640 - DNA, 1145 bp, Glycine max
  Gm_smallRNAprecursor_3473
actttaatggctacaagacaggtagtattgtccagcattaattacacattaattacaaacaaacggttttgtgatcgaaattaagtttaatctaaacagataccaaaacaatcatcttcgttttggtaaaaggggtcttcttcagcagaacttgtttcttccttctttgaggatgaaccttcttcttcctgttgtaacatttgcagaacttccttcagatttttagctaagacctcctttgatgtcaatcctgctaagaatgctgccagatgagacttttggttcaaaaacacagaagtttctgtatcagctgctttgaggaattctggatgggattggaaccagagttttacttgttctggatctgttttggatgagtcaaattatgtccaccattttacaaatgcgtgtctttgtagtgatggatattggtttgtcttttcagtcttgctgtaacgatattgccatgagaatatccatgacagtgcaaagcttgaaaagtatttaagatctgctggaattcgtgattcctgcgaattgtattgtctctcaaattgagcaaatccttgttggactgtttctggaaatatctctgggattggtccaaagaagtcccaccattgcaaaaaccaattgggaaaattgtaaattgtattggtcttgaaatatattagccatgaatgcttgaagcgggtattttggttccaaaacaccttagtccaagcatcaacgtaatcccaataggtataacctactggatcaaatggaactgagaatctttttcctttgttcaagtccgaaccaaagtgtcttggttgaagaacttttagtatttggattgtcgagtgggtgtttaatgtttggtcttttgggtctttgaaatgtttgatagatactgagtttgaatctaccaaaatcaattcataaaaagttcttgtctttaggatggtggttggtttgtagtgaaatcctggtgggaaagccttggccgtcgccttgaagggatttttgtcccaaaattcaggttccatctgcaaaacagttgtaaatttatttttataaatataattgttagtttgtttggtaggtggtgtttgagccttggctaaaggtagttttcctttagtattggtggctgttttggt

SEQ ID NO: 10641 - DNA, 1146 bp, Glycine max
  Gm_smallRNAprecursor_3474
actttaatggctacaagacaggtagtattgtccagcattaattacacattaattacaaacaaacggttttgtgatcgaaattaagtttaatctaaacagataccaaaacaatcatcttcgttttggtaaaaggggtcttcttcagcagaacttgtttcttccttctttgaggatgaaccttcttcttcctgttgtaacatttgcagaacttccttcagatttttagctaagacctcctttgatgtcaatcctgctaagaatgctgccagatgagacttttggttcaaaaacacagaagtttctgtatcagctgctttgaggaattctggatgggattggaaccagagttttacttgttctggatctgttttggatgagtcaaattatgtccaccattttacaaatgcgtgtctttgtagtgatggatattggtttgtcttttcagtcttgctgtaacgatattgccatgagaatatccatgacagtgcaaagcttgaaaagtatttaagatctgctggaattcgtgattcctgcgaattgtattgtctctcaaattgagcaaatccttgttggactgtttctggaaatatctctgggattggtccaaagaagtcccaccattgcaaaaaccaattgggaaaattgtaaattgtattggtcttgaaatatattagccatgaatgcttgaagcgggtattttggttccaaaacaccttagtccaagcatcaacgtaatcccaataggtataacctactggatcaaatggaactgagaatctttttcctttgttcaagtccgaaccaaagtgtcttggttgaagaacttttagtatttggattgtcgagtgggtgtttaatgtttggtcttttgggtctttgaaatgtttgatagatactgagtttgaatctaccaaaatcaattcataaaaagttcttgtctttaggatggtggttggtttgtagtgaaatcctggtgggaaagccttggccgtcgccttgaagggatttttgtcccaaaattcaggttccatctgcaaaacagttgtaaatttatttttataaatataattgttagtttgtttggtaggtggtgtttgagccttggctaaaggtagttttcctttagtattggtggctgttttggtc

SEQ ID NO: 10642 - DNA, 1170 bp, Glycine max
  Gm_smallRNAprecursor_3475
gcagaacttgtttcttccttctttgaggatgaaccttcttcttcctgttgtaacatttgcagaacttccttcagatttttagctaagacctcctttgatgtcaatcctgctaagaatgctgccagatgagacttttggttcaaaaacacagaagtttctgtatcagctgctttgaggaattctggatgggattggaaccagagttttacttgttctggatctgttttggatgagtcaaattatgtccaccattttacaaatgcgtgtctttgtagtgatggatattggtttgtcttttcagtcttgctgtaacgatattgccatgagaatatccatgacagtgcaaagcttgaaaagtatttaagatctgctggaattcgtgattcctgcgaattgtattgtctctcaaattgagcaaatccttgttggactgtttctggaaatatctctgggattggtccaaagaagtcccaccattgcaaaaaccaattgggaaaattgtaaattgtattggtcttgaaatatattagccatgaatgcttgaagcgggtattttggttccaaaacaccttagtccaagcatcaacgtaatcccaataggtataacctactggatcaaatggaactgagaatctttttcctttgttcaagtccgaaccaaagtgtcttggttgaagaacttttagtatttggattgtcgagtgggtgtttaatgtttggtcttttgggtctttgaaatgtttgatagatactgagtttgaatctaccaaaatcaattcataaaaagttcttgtctttaggatggtggttggtttgtagtgaaatcctggtgggaaagccttggccgtcgccttgaagggatttttgtcccaaaattcaggttccatctgcaaaacagttgtaaatttatttttataaatataattgttagtttgtttggtaggtggtgtttgagccttggctaaaggtagttttcctttagtattggtggctgttttggtcattgaggcattttggatcattgtttgtaaatttgattcagattcatcatcagattctgaggcaatgtctgcccaagattttttgattatttttggaaatttggttagacccatgtcttgaagggcctgaagggtttcaattggccatgcatagttggccgatgtttgt

SEQ ID NO: 10643 - DNA, 1101 bp, Glycine max
  Gm_smallRNAprecursor_3476
gaacttccttcagatttttagctaagacctcctttgatgtcaatcctgctaagaatgctgccagatgagacttttggttcaaaaacacagaagtttctgtatcagctgctttgaggaattctggatgggattggaaccagagttttacttgttctggatctgttttggatgagtcaaattatgtccaccattttacaaatgcgtgtctttgtagtgatggatattggtttgtcttttcagtcttgctgtaacgatattgccatgagaatatccatgacagtgcaaagcttgaaaagtatttaagatctgctggaattcgtgattcctgcgaattgtattgtctctcaaattgagcaaatccttgttggactgtttctggaaatatctctgggattggtccaaagaagtcccaccattgcaaaaaccaattgggaaaattgtaaattgtattggtcttgaaatatattagccatgaatgcttgaagcgggtattttggttccaaaacaccttagtccaagcatcaacgtaatcccaataggtataacctactggatcaaatggaactgagaatctttttcctttgttcaagtccgaaccaaagtgtcttggttgaagaacttttagtatttggattgtcgagtgggtgtttaatgtttggtcttttgggtctttgaaatgtttgatagatactgagtttgaatctaccaaaatcaattcataaaaagttcttgtctttaggatggtggttggtttgtagtgaaatcctggtgggaaagccttggccgtcgccttgaagggatttttgtcccaaaattcaggttccatctgcaaaacagttgtaaatttatttttataaatataattgttagtttgtttggtaggtggtgtttgagccttggctaaaggtagttttcctttagtattggtggctgttttggtcattgaggcattttggatcattgtttgtaaatttgattcagattcatcatcagattctgaggcaatgtctgcccaagattttttgattatttttggaaatttggttagacccatgtcttgaagggcctgaagggtttcaattggccatgcatagttggccg

SEQ ID NO: 10644 - DNA, 1189 bp, Glycine max
  Gm_smallRNAprecursor_3477
acacagaagtttctgtatcagctgctttgaggaattctggatgggattggaaccagagttttacttgttctggatctgttttggatgagtcaaattatgtccaccattttacaaatgcgtgtctttgtagtgatggatattggtttgtcttttcagtcttgctgtaacgatattgccatgagaatatccatgacagtgcaaagcttgaaaagtatttaagatctgctggaattcgtgattcctgcgaattgtattgtctctcaaattgagcaaatccttgttggactgtttctggaaatatctctgggattggtccaaagaagtcccaccattgcaaaaaccaattgggaaaattgtaaattgtattggtcttgaaatatattagccatgaatgcttgaagcgggtattttggttccaaaacaccttagtccaagcatcaacgtaatcccaataggtataacctactggatcaaatggaactgagaatctttttcctttgttcaagtccgaaccaaagtgtcttggttgaagaacttttagtatttggattgtcgagtgggtgtttaatgtttggtcttttgggtctttgaaatgtttgatagatactgagtttgaatctaccaaaatcaattcataaaaagttcttgtctttaggatggtggttggtttgtagtgaaatcctggtgggaaagccttggccgtcgccttgaagggatttttgtcccaaaattcaggttccatctgcaaaacagttgtaaatttatttttataaatataattgttagtttgtttggtaggtggtgtttgagccttggctaaaggtagttttcctttagtattggtggctgttttggtcattgaggcattttggatcattgtttgtaaatttgattcagattcatcatcagattctgaggcaatgtctgcccaagattttttgattatttttggaaatttggttagacccatgtcttgaagggcctgaagggtttcaattggccatgcatagttggccgatgtttgtttgacgattgccggtttgggagattcctgaatggatggctcaggtttgattgaggcaatctgggttgatgacccttctaaattggttttctgggtagatgacccagcctgggttggtgacccagaaaaggttgatgatttcttgatggttggctctagaagagc

SEQ ID NO: 10645 - DNA, 1098 bp, Glycine max
  Gm_smallRNAprecursor_3478
gtgtctttgtagtgatggatattggtttgtcttttcagtcttgctgtaacgatattgccatgagaatatccatgacagtgcaaagcttgaaaagtatttaagatctgctggaattcgtgattcctgcgaattgtattgtctctcaaattgagcaaatccttgttggactgtttctggaaatatctctgggattggtccaaagaagtcccaccattgcaaaaaccaattgggaaaattgtaaattgtattggtcttgaaatatattagccatgaatgcttgaagcgggtattttggttccaaaacaccttagtccaagcatcaacgtaatcccaataggtataacctactggatcaaatggaactgagaatctttttcctttgttcaagtccgaaccaaagtgtcttggttgaagaacttttagtatttggattgtcgagtgggtgtttaatgtttggtcttttgggtctttgaaatgtttgatagatactgagtttgaatctaccaaaatcaattcataaaaagttcttgtctttaggatggtggttggtttgtagtgaaatcctggtgggaaagccttggccgtcgccttgaagggatttttgtcccaaaattcaggttccatctgcaaaacagttgtaaatttatttttataaatataattgttagtttgtttggtaggtggtgtttgagccttggctaaaggtagttttcctttagtattggtggctgttttggtcattgaggcattttggatcattgtttgtaaatttgattcagattcatcatcagattctgaggcaatgtctgcccaagattttttgattatttttggaaatttggttagacccatgtcttgaagggcctgaagggtttcaattggccatgcatagttggccgatgtttgtttgacgattgccggtttgggagattcctgaatggatggctcaggtttgattgaggcaatctgggttgatgacccttctaaattggttttctgggtagatgacccagcctgggttggtgacccagaaaaggttgatgatttcttgatggttggctctagaagagccagtctggctcctttgcctgtactcct

SEQ ID NO: 10646 - DNA, 1113 bp, Glycine max
  Gm_smallRNAprecursor_3479
ggaaatttggttagacccatgtcttgaagggcctgaagggtttcaattggccatgcatagttggccgatgtttgtttgacgattgccggtttgggagattcctgaatggatggctcaggtttgattgaggcaatctgggttgatgacccttctaaattggttttctgggtagatgacccagcctgggttggtgacccagaaaaggttgatgatttcttgatggttggctctagaagagccagtctggctcctttgcctgtactccttcctccccttagggagattcccgatgccttaggaggcattaccacttttctgtaagaattcacgggtaaggtagtcaggtaatgaatttgaggtgccctcgacgtattctatgtcaaaatcaaagacacttagaattgcttgtcatcttgcaaaaatttgttttgaggcaaggtttttaacatctttttgtagaatatctttggttgatttacaatcaaccctgattaaaaatttttggtttaataaatccgattgaaatttggaaatgcacaaaacaattgctaaaacatcctttttaacagttgaatattttaattgtgcaggattccaatgttttgatgtatatgcaatgacatgatcttggccatggactctttgtttgaggatgccaccataacctatgtctgaagcatcagtttcgacaattttaaatgtctgtggaataggaagatacagacattttatggattggactttgactttgatttctttaactgtttgtgtatggaggtcagaccaaggaggcggatttttcttcagcctatcatgcaatggcttgacaatattgtttaagtaggggacaaattctcctacgtaatttagacaacctagaaatctttgtaattgggttttgtctaagatttggttgggaaatttgctagcaaactctattgacctttctataggaatgattgtaccttgatatatattgtgaccaaggaatcggattcgagtttggaaaagattgatttttgatttggagactgccaaaccattttgtttgatgatatggatgaaggtttggagatgtttgaaatgttggtcaatgttttgggaaaagattaa

SEQ ID NO: 10647 - DNA, 1113 bp, Glycine max; identical to SEQ ID NO: 10646
  Gm_smallRNAprecursor_3480

SEQ ID NO: 10648 - DNA, 1114 bp, Glycine max
  Gm_smallRNAprecursor_3481
ggaaatttggttagacccatgtcttgaagggcctgaagggtttcaattggccatgcatagttggccgatgtttgtttgacgattgccggtttgggagattcctgaatggatggctcaggtttgattgaggcaatctgggttgatgacccttctaaattggttttctgggtagatgacccagcctgggttggtgacccagaaaaggttgatgatttcttgatggttggctctagaagagccagtctggctcctttgcctgtactccttcctccccttagggagattcccgatgccttaggaggcattaccacttttctgtaagaattcacgggtaaggtagtcaggtaatgaatttgaggtgccctcgacgtattctatgtcaaaatcaaagacacttagaattgcttgtcatcttgcaaaaatttgttttgaggcaaggtttttaacatctttttgtagaatatctttggttgatttacaatcaaccctgattaaaaatttttggtttaataaatccgattgaaatttggaaatgcacaaaacaattgctaaaacatcctttttaacagttgaatattttaattgtgcaggattccaatgttttgatgtatatgcaatgacatgatcttggccatggactctttgtttgaggatgccaccataacctatgtctgaagcatcagtttcgacaattttaaatgtctgtggaataggaagatacagacattttatggattggactttgactttgatttctttaactgtttgtgtatggaggtcagaccaaggaggcggatttttcttcagcctatcatgcaatggcttgacaatattgtttaagtaggggacaaattctcctacgtaatttagacaacctagaaatctttgtaattgggttttgtctaagatttggttgggaaatttgctagcaaactctattgacctttctataggaatgattgtaccttgatatatattgtgaccaaggaatcggattcgagtttggaaaagattgatttttgatttggagactgccaaaccattttgtttgatgatatggatgaaggtttggagatgtttgaaatgttggtcaatgttttgggaaaagattaaa

SEQ ID NO: 10649 - DNA, 1207 bp, Glycine max
  Gm_smallRNAprecursor_3482
ggaaatttggttagacccatgtcttgaagggcctgaagggtttcaattggccatgcatagttggccgatgtttgtttgacgattgccggtttgggagattcctgaatggatggctcaggtttgattgaggcaatctgggttgatgacccttctaaattggttttctgggtagatgacccagcctgggttggtgacccagaaaaggttgatgatttcttgatggttggctctagaagagccagtctggctcctttgcctgtactccttcctccccttagggagattcccgatgccttaggaggcattaccacttttctgtaagaattcacgggtaaggtagtcaggtaatgaatttgaggtgccctcgacgtattctatgtcaaaatcaaagacacttagaattgcttgtcatcttgcaaaaatttgttttgaggcaaggtttttaacatctttttgtagaatatctttggttgatttacaatcaaccctgattaaaaatttttggtttaataaatccgattgaaatttggaaatgcacaaaacaattgctaaaacatcctttttaacagttgaatattttaattgtgcaggattccaatgttttgatgtatatgcaatgacatgatcttggccatggactctttgtttgaggatgccaccataacctatgtctgaagcatcagtttcgacaattttaaatgtctgtggaataggaagatacagacattttatggattggactttgactttgatttctttaactgtttgtgtatggaggtcagaccaaggaggcggatttttcttcagcctatcatgcaatggcttgacaatattgtttaagtaggggacaaattctcctacgtaatttagacaacctagaaatctttgtaattgggttttgtctaagatttggttgggaaatttgctagcaaactctattgacctttctataggaatgattgtaccttgatatatattgtgaccaaggaatcggattcgagtttggaaaagattgatttttgatttggagactgccaaaccattttgtttgatgatatggatgaaggtttggagatgtttgaaatgttggtcaatgttttgggaaaagattaaagcatcatctatgtagacaatgacaaattttgaatagggattaaaaatatcattcataattttttgaaattctgaaggggcattcttcagtccg

SEQ ID NO: 10650 - DNA, 1035 bp, Glycine max
  Gm_smallRNAprecursor_3483
acgattgccggtttgggagattcctgaatggatggctcaggtttgattgaggcaatctgggttgatgacccttctaaattggttttctgggtagatgacccagcctgggttggtgacccagaaaaggttgatgatttcttgatggttggctctagaagagccagtctggctcctttgcctgtactccttcctccccttagggagattcccgatgccttaggaggcattaccacttttctgtaagaattcacgggtaaggtagtcaggtaatgaatttgaggtgccctcgacgtattctatgtcaaaatcaaagacacttagaattgcttgtcatcttgcaaaaatttgttttgaggcaaggtttttaacatctttttgtagaatatctttggttgatttacaatcaaccctgattaaaaatttttggtttaataaatccgattgaaatttggaaatgcacaaaacaattgctaaaacatcctttttaacagttgaatattttaattgtgcaggattccaatgttttgatgtatatgcaatgacatgatcttggccatggactctttgtttgaggatgccaccataacctatgtctgaagcatcagtttcgacaattttaaatgtctgtggaataggaagatacagacattttatggattggactttgactttgatttctttaactgtttgtgtatggaggtcagaccaaggaggcggatttttcttcagcctatcatgcaatggcttgacaatattgtttaagtaggggacaaattctcctacgtaatttagacaacctagaaatctttgtaattgggttttgtctaagatttggttgggaaatttgctagcaaactctattgacctttctataggaatgattgtaccttgatatatattgtgaccaaggaatcggattcgagtttggaaaagattgatttttgatttggagactgccaaaccattttgtttgatgatatggatgaaggtttggagatgtttgaaatgttggtcaatgttttgggaaaagattaa

SEQ ID NO: 10651 - DNA, 1247 bp, Glycine max
  Gm_smallRNAprecursor_3484
tgatgatttcttgatggttggctctagaagagccagtctggctcctttgcctgtactccttcctccccttagggagattcccgatgccttaggaggcattaccacttttctgtaagaattcacgggtaaggtagtcaggtaatgaatttgaggtgccctcgacgtattctatgtcaaaatcaaagacacttagaattgcttgtcatcttgcaaaaatttgttttgaggcaaggtttttaacatctttttgtagaatatctttggttgatttacaatcaaccctgattaaaaatttttggtttaataaatccgattgaaatttggaaatgcacaaaacaattgctaaaacatcctttttaacagttgaatattttaattgtgcaggattccaatgttttgatgtatatgcaatgacatgatcttggccatggactctttgtttgaggatgccaccataacctatgtctgaagcatcagtttcgacaattttaaatgtctgtggaataggaagatacagacattttatggattggactttgactttgatttctttaactgtttgtgtatggaggtcagaccaaggaggcggatttttcttcagcctatcatgcaatggcttgacaatattgtttaagtaggggacaaattctcctacgtaatttagacaacctagaaatctttgtaattgggttttgtctaagatttggttgggaaatttgctagcaaactctattgacctttctataggaatgattgtaccttgatatatattgtgaccaaggaatcggattcgagtttggaaaagattgatttttgatttggagactgccaaaccattttgtttgatgatatggatgaaggtttggagatgtttgaaatgttggtcaatgttttgggaaaagattaaagcatcatctatgtagacaatgacaaattttgaatagggattaaaaatatcattcataattttttgaaattctgaaggggcattcttcagtccgaatggcatcacgttccattcatattgcccgaaaggtacagtaaaggttgttttgtacctatctgattcttggatttggatttgccaaaatccagatttcatatcaaattttgaaaatatctttgcagaatttaatctgttaagcaaatcttttttgtttggaataggatatctaatccattgtaatgcttgatttagtggtttgtaatttatgactaagcggggtgttccacgctcaatctcagat

SEQ ID NO: 10652 - DNA, 1246 bp, Glycine max
  Gm_smallRNAprecursor_3485
gatgatttcttgatggttggctctagaagagccagtctggctcctttgcctgtactccttcctccccttagggagattcccgatgccttaggaggcattaccacttttctgtaagaattcacgggtaaggtagtcaggtaatgaatttgaggtgccctcgacgtattctatgtcaaaatcaaagacacttagaattgcttgtcatcttgcaaaaatttgttttgaggcaaggtttttaacatctttttgtagaatatctttggttgatttacaatcaaccctgattaaaaatttttggtttaataaatccgattgaaatttggaaatgcacaaaacaattgctaaaacatcctttttaacagttgaatattttaattgtgcaggattccaatgttttgatgtatatgcaatgacatgatcttggccatggactctttgtttgaggatgccaccataacctatgtctgaagcatcagtttcgacaattttaaatgtctgtggaataggaagatacagacattttatggattggactttgactttgatttctttaactgtttgtgtatggaggtcagaccaaggaggcggatttttcttcagcctatcatgcaatggcttgacaatattgtttaagtaggggacaaattctcctacgtaatttagacaacctagaaatctttgtaattgggttttgtctaagatttggttgggaaatttgctagcaaactctattgacctttctataggaatgattgtaccttgatatatattgtgaccaaggaatcggattcgagtttggaaaagattgatttttgatttggagactgccaaaccattttgtttgatgatatggatgaaggtttggagatgtttgaaatgttggtcaatgttttgggaaaagattaaagcatcatctatgtagacaatgacaaattttgaatagggattaaaaatatcattcataattttttgaaattctgaaggggcattcttcagtccgaatggcatcacgttccattcatattgcccgaaaggtacagtaaaggttgttttgtacctatctgattcttggatttggatttgccaaaatccagatttcatatcaaattttgaaaatatctttgcagaatttaatctgttaagcaaatcttttttgtttggaataggatatctaatccattgtaatgcttgatttagtggtttgtaatttatgactaagcggggtgttccacgctcaatctcagat

SEQ ID NO: 10653 - DNA, 1168 bp, Glycine max
  Gm_smallRNAprecursor_3486
ggaggcattaccacttttctgtaagaattcacgggtaaggtagtcaggtaatgaatttgaggtgccctcgacgtattctatgtcaaaatcaaagacacttagaattgcttgtcatcttgcaaaaatttgttttgaggcaaggtttttaacatctttttgtagaatatctttggttgatttacaatcaaccctgattaaaaatttttggtttaataaatccgattgaaatttggaaatgcacaaaacaattgctaaaacatcctttttaacagttgaatattttaattgtgcaggattccaatgttttgatgtatatgcaatgacatgatcttggccatggactctttgtttgaggatgccaccataacctatgtctgaagcatcagtttcgacaattttaaatgtctgtggaataggaagatacagacattttatggattggactttgactttgatttctttaactgtttgtgtatggaggtcagaccaaggaggcggatttttcttcagcctatcatgcaatggcttgacaatattgtttaagtaggggacaaattctcctacgtaatttagacaacctagaaatctttgtaattgggttttgtctaagatttggttgggaaatttgctagcaaactctattgacctttctataggaatgattgtaccttgatatatattgtgaccaaggaatcggattcgagtttggaaaagattgatttttgatttggagactgccaaaccattttgtttgatgatatggatgaaggtttggagatgtttgaaatgttggtcaatgttttgggaaaagattaaagcatcatctatgtagacaatgacaaattttgaatagggattaaaaatatcattcataattttttgaaattctgaaggggcattcttcagtccgaatggcatcacgttccattcatattgcccgaaaggtacagtaaaggttgttttgtacctatctgattcttggatttggatttgccaaaatccagatttcatatcaaattttgaaaatatctttgcagaatttaatctgttaagcaaatcttttttgtttggaataggatatctaatccattgtaatgcttgatttagtggtttgtaatttatgactaagcggggtgttccacgctcaatctcagattgtttgttgaca

SEQ ID NO: 10654 - DNA, 1159 bp, Glycine max
  Gm_smallRNAprecursor_3487
aacccatctttcgggaagagttacttcatcccattttatttttctcgggagagaaacgttagcctttgtcatatcagtgataaacaaagttgtttctccttttgaggttttaacaagactctagatgcacaagtattcatgaccttgtactggatcctataaattaaggctgatgggattgatccttctttcatgtcaagaccatgaaagtggatgtttaagaacagagaatcaataatgtttctgtccatcagactcactgttttgtttggataacaattaaaatatattggaccttgtcctaggctggtttcgactgttccaattagggagtcttcaaattgattatgcctaatatctcttagacacattaaaactgctgcatctatgcccatatcaattaagggcttgatggctacttgtacacaaccgatgtgtagatatttatacttacggctatgttcataaattgaattttttgaaagtaaatgaaattcttcccctatatcttgtcctagaggaatattgttttctactgttttgattatgtaatcaaagttgtgtttgtccttaattgtttcaggaacgtatagttgatcctgagggatttctggaatgttccagtcatccatgttttgattgatatcttcgaatctgacttcctcatcgaagagattgtgtttgggggcgacctcttgggtctggttatcttgatcgtttaataaattggagtttcttgaagaagattatgaggaggaatttgatcgaaaagagatacgggaaaaagatcgcaatagtctagacacgattataacattctctaatatctttgcttcacttggtttcatagaaatatttccataaggctatatgttacagaacttcttggatctgaataaatgaaaaagattttttttttcaacagacaatatagtttgaacactactcctatagccaccagtatattatgtctcaatattttatttgaacaatacaccttagccttactgccctttctcaaccacgggacttactgctacagtatctttcaactaaaatatcagactgctgtgcttccagaaaatactgttcaaacacatactgtttaaattaaaattattgtacatggttcagatccataagttcagttaacatatgc

SEQ ID NO: 10655 - DNA, 1051 bp, Glycine max
  Gm_smallRNAprecursor_3488
ttatagaatttaattattattttttatattatttaatttatttaagatatttttggttgaatatttgttttaaaatctgaattttgtataataatatatttattttagaaaaaaatttaaatattaaatttaattattttactaaatataattagtttgtttatctcattagatttaattaaaaatgataaaactaaagctatagaagaatattatactacattatcaataaatatttaaacaatgagatttggctaaagaaaaatttaagatcaagatatattaggacaattgtttttgctttgactatgttgctagcaaagtccacattttcttctacttgctcgttcattttcgtcttcatctatcttagtaggaatgcgagttgaaacgggatgaccatttgtagtcctctttctccttggatcagaaccccactgatctcattcatattcttgccacattgattcgtgtggcaataaaccaaaggagttgtcgtagatgtgcaaaatgtgttgtaaagtgaataacatcggcacataggtcatgggatcaacattgacagatttacaggcagccatgacgtgagaacatggttaatgtttagcctgatattcaccacaatcacacttttgggattgtaacattactctaaaccttccaggtggtctgggtgtttcaagtgaggattgagtctctgttataataaaagtgtgattgtgtctgtcgaatcatttacaatgtgtgtattagattcttgttgactgctattcattgcatcaaagatgaattcagaatattgtgagccagagttgatcattgcctgagtttgtcgacctctattagcaaagagttgtgtggtcttgaaatacgtctcctcaaccaacgatgacaccgacaaatgtcttgtgtttttgagcatggaattaatagactctgacaaattggtagtcatatgtccccaatgtttcccctcatcaaagcattgtacccatttttgtttgggtaattgatcaagccatttagttgcacttggcttattcgcacgaat

SEQ ID NO: 10656 - DNA, 1190 bp, Glycine max
  Gm_smallRNAprecursor_3489
gctcaacctctaatcttgaggacttatcagatgaatatgagacttgttgggtcaaaaaccatgatagtgatactgtctcctcttccaggcccgaaggaagtaacctgtctccatcccacgaacctatattcaaacggaattggtaatctgcggattcatgtctaggttatttcttctttgagattttcatgtaatgtcttatgtccgtcttcaattatcactttacgtattgaaataatttttcctttaaattgaaattagcaatttttagtttacccacttttactgcagtagttgacatggtaacataactgtcaaaattcacaatactttgccatttacactacaatgtttctaaaaattaaatgtcgcatcgacaaaactgacatgaaatggacaactcataatgtctttgttcactctgaaaataattatggatgtttgctgctttaattacaagggaaaaatcacagtccaaattgacaatactctgcaatttgcacacgtctctaaaaattaaatgtctcacctgcaaaactgacatgaaatggatagttcataatctctttgtttactctgaaaatcatcatgaacgtatgctgctttaattacatgggaaaaatcacagtccaaattgacaacactctgcattatgagctgtccatttcatatcagttttgcaggtgagacatttaatttttagagacgtgtgcaaaactgacatgagatggacaactcataatctctttgttcactctgaaattataatggacgtttgctacatcacttactagggagaaagaaacattggattcctatacacatcaacgtggcagaatactcatacaactataaataacattacacatacacaatacaaacacacaatctcacacaacataatttcacaaataaaattcaatcttattactatgtcatttttgggagaaacaagcagtcagaccattgctaactccatattagctttctacaattgaaaaatgatgatgatgtttacacaatgttaatatacagtgagcaatactcgtgtgttggtcctatagaattattatgtaccattattagaacaccagatgctatactcaacctgcttcaatcaaccatcactcctactcatgatgtattacaacgggaagtggaacataccacatcaaggtgagtttttgggt

SEQ ID NO: 10657 - DNA, 1125 bp, Glycine max
  Gm_smallRNAprecursor_3490
gccaatatcacctcaagtttaaaagaaaagctggtgcctcttcttagagaatttaaagactgttttgcttgggattaccacgaaatgcctgggttaagcagagaaatggtcgaaatgaaattaccgattaaggaaggaaaaagaccagtaaaacaactaccaagaagattcgcaccagaaatcatgtccaagattaaggaagagatcgaaaggctgctgaggtgtaaattcatcagggctgccaggtatgtcgaatggttagcaaatatagtccctgttattaagaagaatggaactcttagagtatgcatagattttagggatttaaataatgctacacctaaagatgagtatgctatgccagtagcggaaatgttggtagattcggcagctggcttcgaatttttaagcatgttagatggttattctggttataaccaaatatttattgctgaaagtgatgtgtcgaaaacagcatttcgatgccctggtactttaggcacttatgaatgggtggttatgccctttgggttgaaaaatgctggggccacttatcaaagggccatgaattccatgtttcatgattttattgacacatttatgcaagtttatattgatgatataatcatcaaatcctcttcagaagatagccatttggattaccttaggcaatctttcgaacgaatgaggaaacatggattaaaaatgaatccattaaaatgtgctttttgcgtgcgtgcaggagacttccttggttttgtggtgcataagaaaggcattgagataaatcaaaacaagacaaaggctattcttgagacgaagcctccttcgaccaaaaaacagcttcagtctttgctaggaaaaatcaacttcttgaggcgattcatttcgaatctaagtggcaaagttcaaattttttcgccattacttcgactcaagaaagatgaaccgttcaaatggaatgaagagcatcaaaaggctttcgatgaaattaaagaatatctgatcaagcctcccgtgttaatgcctcctagtcgaaacaagtctatgaagttgtatattgctgcgtctgataagaccattggtagcatgttggctcaggaagatgatgatggcatagaacat

SEQ ID NO: 10658 - DNA, 1130 bp, Glycine max
  Gm_smallRNAprecursor_3491
tttacaagattggtgcttaccactttggttccgactttgcaatggctcaaaggaaaacccattctcctagtaagaaacttttatcatactattttttttatgtattagtgttataattcaaaattctaagttatgctcttggttggtaattggtattgcagcatattggtggcgaatgtttgggtcacaaactccaaatttgcagaagctagctattaaaattttgagtttgacttgcagtgcttcaggatgtgaaagaaattggagtgtgtttgagcaagtaattgtgacaaaactctaactatactttttaattttatttaattttgatgatcaagttttatttggagtatatttgagattgaaatcaacatttatttgttatgttgtagattcattccaaaaaaagaaataggcttgagcacaagaggttgcatgatttggtgtttgtcaaatacaaccaacaattgaagcaaagatataatgcaagagatgaattgatccaatttctcttaatgatattgatgtatgcaatgaatggctcgtgggagagatggatcaagatgatgataatgatgctggaaatgatttggtatttgaagatgatgatgctctaaattgggcaactgtgtatcaggcttcgggggttggagagtgtaggatgtatactaggcggaaaaagcaaaaaacaagtgttgctgctgcccaaacttctaaaaaataggcaatggttgttggatcttcatcaaggaagcaaaaagcagtccaagaaaatgatgaggatctagatgttgaggagaatattgatgttgaatctgaagaagaagaaatcatggtcaattttgaggcgtctgatggggaagagggagagggagatgctccattaccatatgataacaacgaagatgattatgttgggattggagaagatgattagagcctcaaccttcactttgcactttgcattatgtttttatcattttcttattttgaaatttgaactcttcaatgagtttatttggtgttggtacttgattattgtatgaactcatgaaacttttttagtttatttgaatgcaatcctttgtttttttcaatttcaatgagtttatatatatgttttttttttg

SEQ ID NO: 10659 - DNA, 1039 bp, Glycine max
  Gm_smallRNAprecursor_3492
ggagtggattcatggagttggggctgtgccatctacccttcaccagaaactcattatctggagggaggatgggattgttgaaaatatagaggcggatcaaagcttctataagtcagaggtcgatagtgttactgcacaaacctttgacaaaaagttggctaacatagcaccttgtggtgacaaggaggctgttgtcgaatcaagtgacaatgttatccactctgtcaaactccatcctacctatgggtttatatgggagagggaggaaattgatgctgttccctctgaagatggagtcattccaccaactgggtggaatatatatgaagattaatatgactgaggccactgcatgggccagaattacggcttatatggccgaaaatagactaaatacggcctttgaggctgagtctcaacaaaatatggcagttgaagccaagatcgaagatcatgaaaacaaagaaacaaaggatcgaagactggattgcatttatgacgatgagccgctgggttttgagaaaaatcccataagtgaggtgccaaagatgcaggctcaagatcctttggaggagatcgacattggagatggctcgataaaaaggccaacgtatatcagtgccaacatcaccttaagtctaaaagaaaagctggtgcctcttcttagggaatttaaagactgttttgcttgggattaccacgaaatgcctgggttaagcagagaaatggtcgaaatgaaattaccaattaaggagggaaaaagaccagtaaaacaactaccaagaagattcgcaccagaaatcatgtccaaaatcaaggaagagatcgaaaggctgctgaggtgtaaattcatcagatctgccaggtatgtcgaatggttagcaaatatagtccctgtcattaaaaagaatggaactcttagagtatgcatagattttagggatttaaataatgctacacctaaagatgaatatgctatgccagtagcggaaatgttggtagattcggcagctggcttcgaatttttaagcatgttaga

SEQ ID NO: 10660 - DNA, 1046 bp, Glycine max
  Gm_smallRNAprecursor_3493
gaatgttgagcttttggcaaaggcaaataaggagaagatacttgaggaaaagatgttgcagctgatagagaatcatgaccaccaaagtcaggagatgcgacaacaaatgcaagaacaaaatgagcaaatttgtcaacaacatgagcaaatgcaacgtatattacaacacttgcatattctgtctatcatgttagctcttagtccatcgactaccatagcagatggaactgagcaccatgttaatgatgctcatgttgatcatcctcatgacatgtgaaaggaccattgactcctggttattgtttattttactttgattatgtcatgttagttatgaatttgaactttatgaaactttcacattgcattttattaaacgagtgaataggcaatttagtccctgaaattgtacctattttgcatattagtccctaacttaatattaaattcaaaatagtccctatctttgcataagtgttgcaaaatagtccttccgttaaattttaaagtaacgccgttagtgaggtcaattttagtgccacgtggactatccacgtggcactaaaggatgatgtggcatgacacgtggacgtgcctgatgccacgtcatttgatgataacaaaacgagtaaataagcaatttagtccctgactttgtacccctgttgcatattagtccctaacttaatgaaaaattcaaaatagtccctatcttttacataagtattgcaaaatagtccttccattaaattttaaagtaatgttgttagtaaggtcaattttagtgtcacgtcatttgatgatgatagaatgagtgacttcttcaaatttaatggttttgaaccaattgaggcatatatacgaaaaagaactcacacacacttgcacaaataaaaagaaccaaaaatccacaacaacaaccttatctctgtagctgtcaacaccaatgggcgaggtctgcataaccattctcttttcttctttttttttttcttcaattaccatcaatgtatcattttgggttctgatttttgtgtgtgttttga

SEQ ID NO: 10661 - DNA, 1045 bp, Glycine max
  Gm_smallRNAprecursor_3494
aatgttgagcttttggcaaaggcaaataaggagaagatacttgaggaaaagatgttgcagctgatagagaatcatgaccaccaaagtcaggagatgcgacaacaaatgcaagaacaaaatgagcaaatttgtcaacaacatgagcaaatgcaacgtatattacaacacttgcatattctgtctatcatgttagctcttagtccatcgactaccatagcagatggaactgagcaccatgttaatgatgctcatgttgatcatcctcatgacatgtgaaaggaccattgactcctggttattgtttattttactttgattatgtcatgttagttatgaatttgaactttatgaaactttcacattgcattttattaaacgagtgaataggcaatttagtccctgaaattgtacctattttgcatattagtccctaacttaatattaaattcaaaatagtccctatctttgcataagtgttgcaaaatagtccttccgttaaattttaaagtaacgccgttagtgaggtcaattttagtgccacgtggactatccacgtggcactaaaggatgatgtggcatgacacgtggacgtgcctgatgccacgtcatttgatgataacaaaacgagtaaataagcaatttagtccctgactttgtacccctgttgcatattagtccctaacttaatgaaaaattcaaaatagtccctatcttttacataagtattgcaaaatagtccttccattaaattttaaagtaatgttgttagtaaggtcaattttagtgtcacgtcatttgatgatgatagaatgagtgacttcttcaaatttaatggttttgaaccaattgaggcatatatacgaaaaagaactcacacacacttgcacaaataaaaagaaccaaaaatccacaacaacaaccttatctctgtagctgtcaacaccaatgggcgaggtctgcataaccattctcttttcttctttttttttttcttcaattaccatcaatgtatcattttgggttctgatttttgtgtgtgttttga

SEQ ID NO: 10662 - DNA, 1157 bp, Glycine max
  Gm_smallRNAprecursor_3495
ggcaacaatgatataacggttgatgcgtaaggctcccacacaaactgcatataacaacatagttgtgaacaatgtagtaaaataagacatataattttttattttacaaatacaatagcatggttcttacctcatgacgtttcataatatctaacttgcgacgaaaaactttcacatcatcattgccgatatgttggtttccacgtcgcagccacctacaaagaataaaatttaatataccctaaaaccatttattctattgaaatgaaagacgctgttgaaaaagactgacctgtgccccagtggtgtattttctacttgggaaggagtcctctttggagccaaggttggacatcgttcccatgcccacaattgtagtaagatgcacatacctccgattgatttagttttataatcggtggcactgcacatctctctgtatagaaaaccaagtacggcagctccccatgcatatctgccacattcttcaaagtcacgtaaaaattgaaggtaccttagcgaaactctattactggttttgtcaacgaacaagacacctccaatgaatctcagtatccatgcacgggcaaaccttcgtacttgttcttcgtcgtcgtcattatttatttgtgcaaaatggtgagccagccaacttaatttaaccacactacctttaatttcatcttcttgtggtctgactcccaataattcctcacataaatcagcccaatcaagatttgttggaccgattaatggtaaaccatccacacttatacctaacaatacaaagacgtcttgtagagtaatagtacactctctgcatctcatgtggaacgtatgtgtttccggcctccatctttctatcagagcactaattaatgagacatttatttttaagtatctcatcttgataatccagccgaaaccagattgttgaagaaaaggaaaaatttgctctggaatttgttcttccccttgatacgtggggacaactcgtctgatatgtaatttcctttcttcttccccattccaaacatgttctgaaacaacatgcttaggttgcatccataatacatcagtatcgatggggccagacttaatgttgatatgtgattaacatgatgatgaagatgccattgctactacaaaataaaata

SEQ ID NO: 10663 - DNA, 1158 bp, Glycine max
  Gm_smallRNAprecursor_3496
ggcaacaatgatataacggttgatgcgtaaggctcccacacaaactgcatataacaacatagttgtgaacaatgtagtaaaataagacatataattttttattttacaaatacaatagcatggttcttacctcatgacgtttcataatatctaacttgcgacgaaaaactttcacatcatcattgccgatatgttggtttccacgtcgcagccacctacaaagaataaaatttaatataccctaaaaccatttattctattgaaatgaaagacgctgttgaaaaagactgacctgtgccccagtggtgtattttctacttgggaaggagtcctctttggagccaaggttggacatcgttcccatgcccacaattgtagtaagatgcacatacctccgattgatttagttttataatcggtggcactgcacatctctctgtatagaaaaccaagtacggcagctccccatgcatatctgccacattcttcaaagtcacgtaaaaattgaaggtaccttagcgaaactctattactggttttgtcaacgaacaagacacctccaatgaatctcagtatccatgcacgggcaaaccttcgtacttgttcttcgtcgtcgtcattatttatttgtgcaaaatggtgagccagccaacttaatttaaccacactacctttaatttcatcttcttgtggtctgactcccaataattcctcacataaatcagcccaatcaagatttgttggaccgattaatggtaaaccatccacacttatacctaacaatacaaagacgtcttgtagagtaatagtacactctctgcatctcatgtggaacgtatgtgtttccggcctccatctttctatcagagcactaattaatgagacatttatttttaagtatctcatcttgataatccagccgaaaccagattgttgaagaaaaggaaaaatttgctctggaatttgttcttccccttgatacgtggggacaactcgtctgatatgtaatttcctttcttcttccccattccaaacatgttctgaaacaacatgcttaggttgcatccataatacatcagtatcgatggggccagacttaatgttgatatgtgattaacatgatgatgaagatgccattgctactacaaaataaaatat

SEQ ID NO: 10664 - DNA, 1155 bp, Glycine max
  Gm_smallRNAprecursor_3497
caacaatgatataacggttgatgcgtaaggctcccacacaaactgcatataacaacatagttgtgaacaatgtagtaaaataagacatataattttttattttacaaatacaatagcatggttcttacctcatgacgtttcataatatctaacttgcgacgaaaaactttcacatcatcattgccgatatgttggtttccacgtcgcagccacctacaaagaataaaatttaatataccctaaaaccatttattctattgaaatgaaagacgctgttgaaaaagactgacctgtgccccagtggtgtattttctacttgggaaggagtcctctttggagccaaggttggacatcgttcccatgcccacaattgtagtaagatgcacatacctccgattgatttagttttataatcggtggcactgcacatctctctgtatagaaaaccaagtacggcagctccccatgcatatctgccacattcttcaaagtcacgtaaaaattgaaggtaccttagcgaaactctattactggttttgtcaacgaacaagacacctccaatgaatctcagtatccatgcacgggcaaaccttcgtacttgttcttcgtcgtcgtcattatttatttgtgcaaaatggtgagccagccaacttaatttaaccacactacctttaatttcatcttcttgtggtctgactcccaataattcctcacataaatcagcccaatcaagatttgttggaccgattaatggtaaaccatccacacttatacctaacaatacaaagacgtcttgtagagtaatagtacactctctgcatctcatgtggaacgtatgtgtttccggcctccatctttctatcagagcactaattaatgagacatttatttttaagtatctcatcttgataatccagccgaaaccagattgttgaagaaaaggaaaaatttgctctggaatttgttcttccccttgatacgtggggacaactcgtctgatatgtaatttcctttcttcttccccattccaaacatgttctgaaacaacatgcttaggttgcatccataatacatcagtatcgatggggccagacttaatgttgatatgtgattaacatgatgatgaagatgccattgctactacaaaataaaata

SEQ ID NO: 10665 - DNA, 1036 bp, Glycine max
  Gm_smallRNAprecursor_3498
ggttcttacctcatgacgtttcataatatctaacttgcgacgaaaaactttcacatcatcattgccgatatgttggtttccacgtcgcagccacctacaaagaataaaatttaatataccctaaaaccatttattctattgaaatgaaagacgctgttgaaaaagactgacctgtgccccagtggtgtattttctacttgggaaggagtcctctttggagccaaggttggacatcgttcccatgcccacaattgtagtaagatgcacatacctccgattgatttagttttataatcggtggcactgcacatctctctgtatagaaaaccaagtacggcagctccccatgcatatctgccacattcttcaaagtcacgtaaaaattgaaggtaccttagcgaaactctattactggttttgtcaacgaacaagacacctccaatgaatctcagtatccatgcacgggcaaaccttcgtacttgttcttcgtcgtcgtcattatttatttgtgcaaaatggtgagccagccaacttaatttaaccacactacctttaatttcatcttcttgtggtctgactcccaataattcctcacataaatcagcccaatcaagatttgttggaccgattaatggtaaaccatccacacttatacctaacaatacaaagacgtcttgtagagtaatagtacactctctgcatctcatgtggaacgtatgtgtttccggcctccatctttctatcagagcactaattaatgagacatttatttttaagtatctcatcttgataatccagccgaaaccagattgttgaagaaaaggaaaaatttgctctggaatttgttcttccccttgatacgtggggacaactcgtctgatatgtaatttcctttcttcttccccattccaaacatgttctgaaacaacatgcttaggttgcatccataatacatcagtatcgatggggccagacttaatgttgatatgtgattaacatgatgatgaagatgccattgctactacaaaataaaata

SEQ ID NO: 10666 - DNA, 1037 bp, Glycine max
  Gm_smallRNAprecursor_3499
ggttcttacctcatgacgtttcataatatctaacttgcgacgaaaaactttcacatcatcattgccgatatgttggtttccacgtcgcagccacctacaaagaataaaatttaatataccctaaaaccatttattctattgaaatgaaagacgctgttgaaaaagactgacctgtgccccagtggtgtattttctacttgggaaggagtcctctttggagccaaggttggacatcgttcccatgcccacaattgtagtaagatgcacatacctccgattgatttagttttataatcggtggcactgcacatctctctgtatagaaaaccaagtacggcagctccccatgcatatctgccacattcttcaaagtcacgtaaaaattgaaggtaccttagcgaaactctattactggttttgtcaacgaacaagacacctccaatgaatctcagtatccatgcacgggcaaaccttcgtacttgttcttcgtcgtcgtcattatttatttgtgcaaaatggtgagccagccaacttaatttaaccacactacctttaatttcatcttcttgtggtctgactcccaataattcctcacataaatcagcccaatcaagatttgttggaccgattaatggtaaaccatccacacttatacctaacaatacaaagacgtcttgtagagtaatagtacactctctgcatctcatgtggaacgtatgtgtttccggcctccatctttctatcagagcactaattaatgagacatttatttttaagtatctcatcttgataatccagccgaaaccagattgttgaagaaaaggaaaaatttgctctggaatttgttcttccccttgatacgtggggacaactcgtctgatatgtaatttcctttcttcttccccattccaaacatgttctgaaacaacatgcttaggttgcatccataatacatcagtatcgatggggccagacttaatgttgatatgtgattaacatgatgatgaagatgccattgctactacaaaataaaatat

SEQ ID NO: 10667 - DNA, 1146 bp, Glycine max
  Gm_smallRNAprecursor_3500
gcaaagtgatgaccaaaccgatgacgagggtgttggcaggccaacgtcacccccgtcacctccgttgcaatatcagcaacctaggtgtccagtagacttgaactttgaccacctaccacactatattgatcgacaccattttgttcatcagcaacacaatgtacaaccaccagtcggtgtactcaaggttggcatgacctttgatgacaaagcacaatgtattcgagcaatcaaagaatacaacatcagaaatcattttgattacagaacaatttactctgaccaaagaaggctaaactttttttgcaagttacataaaaatggttgtacatggagcttgggcgcatgcaattcaaagaggcataacaaatggattatcaagagtatcagaggtcatcacacttgtctcgtgccgatgctcagacaagatcatcgccaactcgacaaacacgtcatagtacagatcatccaaccaattgtcaaaacaaacccaaccgtctccatcaagacgttgattgcagagatcaaaacgttcatgaattataccccgtcctacaagaagacaaggttagcaaagcaaaaaacattggggatgattcatggaaactgggaagaatcatatgccaaactgccaaaacttttcggagctttgcaatcttgtgttcccgggacagtggtcgctgctcaaacagaatccttgtatgaggggggagaaatagtaccgggcaaaagattgattaaatgtgtcttttggtcatttggtccatgcattaatggttttgcatatttcaaacccattgtacaagtagatggtacatggctttatggaaagtatattggcacactgttgatagctaccatacaagatggagctaactatatcttcctgattgcctatgccattgtagaaggtgagacaacttcagcttggggttttttctaaagaatttgagaaaacatgttactccgcaaattaacatttctcttatttcagactgacacccctcaattataagttcctacaacaacccaagtaacttatgggtccaggacagatcccatttcttttgcctgcgccacattgcaaaaaaatttcttcgtggtaactcaaactacaaacatttaaagaaaccacttatgttggct

SEQ ID NO: 10668 - DNA, 1066 bp, Glycine max
  Gm_smallRNAprecursor_3501
gcaacacaatgtacaaccaccagtcggtgtactcaaggttggcatgacctttgatgacaaagcacaatgtattcgagcaatcaaagaatacaacatcagaaatcattttgattacagaacaatttactctgaccaaagaaggctaaactttttttgcaagttacataaaaatggttgtacatggagcttgggcgcatgcaattcaaagaggcataacaaatggattatcaagagtatcagaggtcatcacacttgtctcgtgccgatgctcagacaagatcatcgccaactcgacaaacacgtcatagtacagatcatccaaccaattgtcaaaacaaacccaaccgtctccatcaagacgttgattgcagagatcaaaacgttcatgaattataccccgtcctacaagaagacaaggttagcaaagcaaaaaacattggggatgattcatggaaactgggaagaatcatatgccaaactgccaaaacttttcggagctttgcaatcttgtgttcccgggacagtggtcgctgctcaaacagaatccttgtatgaggggggagaaatagtaccgggcaaaagattgattaaatgtgtcttttggtcatttggtccatgcattaatggttttgcatatttcaaacccattgtacaagtagatggtacatggctttatggaaagtatattggcacactgttgatagctaccatacaagatggagctaactatatcttcctgattgcctatgccattgtagaaggtgagacaacttcagcttggggttttttctaaagaatttgagaaaacatgttactccgcaaattaacatttctcttatttcagactgacacccctcaattataagttcctacaacaacccaagtaacttatgggtccaggacagatcccatttcttttgcctgcgccacattgcaaaaaaatttcttcgtggtaactcaaactacaaacatttaaagaaaccacttatgttggctggtgagaatctattttatttattcgttataattttctttcaatcaaattttataacataatacgttgatt

SEQ ID NO: 10669 - DNA, 1190 bp, Glycine max
  Gm_smallRNAprecursor_3502
tcaattgtaaagattgaaaaaaatattgttgacctgcatctatgaatggttgtcgatagtagatttcatccagtaattgatcgttggttaattgaagggtgttgtgcattctacgcttgagtgtatcaaaagaacagttgttaggaactcgcattggtgttggagtgagactttgaaaataaacaccaatttggttgtgagtgattgatccatttggaaaaatgaaagttaatatggagttagcaatggtctgactgcttgtttctcccaaaaatgacatagtaataagattgaatttggtttgtgaaattatgttctgtgagattgtgtgtttgtattgtgtatgtgttgtgttatttatagttgtatgagtattctgccacgttgatgtgtattggaatccaatgtttctttttccctagtaagtgatgtagaaaacgtccattataatttcatagtgaacaaagagattatgagttgttcatctcatgtcagttttgcacacgtctctaaaaattaaatgtctcacctgcaaaactgacatgaaatgaacaattcataatgcagagtgttgtcaatttggattgtaatttttctcatgtaattaaagtagcagacgttcatgatgattttcaaagtgaacaaagagattataagttgtccatttcatgttagttttgcaggtgagacatttaatttttagagacgtgtgaaaattggagagtattgtcaatttggactgtgatttttcccttgtaattaaagcagcaaacatccataattattttcaaagtgaacaaagagattatgagttgtccatttcatgtcagttttatcgatgagacatttaatttttagatacagtgtagtgtaaatggcaaagtattgtgaattttggcagttatgttaccatgtcaactactgcagtaaaagtggtaaactgaaaattgcaaaactgaaaattgcaaatttaaatttaaaggaaaaattatttcaatacgtaaagtgataactgaagacggacataagacattacatgaaaatgtcaaagaagaaataacttagacatgaatgatctgtagattaccaatcccgtttgaatataggttcgtgggatggagacaggttacttccttcgggcccgaaagaggagtcagtactatcatggtttttgacccaacaagtctcgt

SEQ ID NO: 10670 - DNA, 1073 bp, Glycine max
  Gm_smallRNAprecursor_3503
gagcctcgcgtcgccctcccgccgaagggtaggttgcgaaactacacaatttaattttctctcatgtgtatcactctttccctcacgtgtatcactcctctttttcctattcgtctttggtgtttcactcttttctttctctcgttctctcttttttctcattctgatttggtcatcacacacttctctaggagataaaggtttaagaataattttctagtcatggtgctggaaagaaatcttgttggtgaagccatcatgcactgttttggtgtcatattgccatggccttcctaatagtatatgagtcacctccattggaaccatatcacacaacaccctatcattgtatcttccaatggtgagacacacctcaacctactgagtcacttttaaacgtgcaagacaaaaattaattgcaataatataaatgagataagggaatagagaattgcaaactcgatttatactgatttggccacttcccatgccaatgtccaatcctcaaacaacccacttgagatttccactatccttgtaaaactcttctacaacttctgaaccacctagggattcctctcccttgtgttcaggattcttacaattcaagagacaaacaatctctttatcatcacaattctttttcaagaattacatatatttttctctcttttagagaagatgatacaagttgaagttcttagaagaatactcaaatgatttgcaagtgtttggccaaagatttgtttttgagagaataaggcaatgaggttctaaaaaactctgaagattttcatagacaagtcacatatttataggctcttggtgacttttcaaaatcttatgaagggatgtaacttttcaaagtaatttttgaaatttcctcattggtaatcgattacagatctttggtgatcgattacacagttatttaatgaggggtcatgtcttttcaatttgaatttctggagttccgttactggtaatcgattacatacatgtggtaatcaattacaacttttaaaattcaaatttcaaactttttgaaagctttttaaaactaattgtgcttc

SEQ ID NO: 10671 - DNA, 1153 bp, Glycine max
  Gm_smallRNAprecursor_3504
ggaggcatcaatatttttctgtaaaaattcacgtgtgaggcagtcaggtagagaatttgaggtgcccttgatgtattctatttcaaaataaaaaacactcaagattgcttgccatctggcaaaaatttgttttgatgcaagatttttaacatctttttgaagaatatctttggctgacttgcaatcaacccttattaaaagattttggtttagtaaatcagattgaaatttggaaatgcacaaaacaattgctaaaacttcctttttaacagttgaatattttagttgtgcaggattccagtgttttgatgtatatgcaatgacatgatcttgaccatgtactctttgtttgaggatgccaccataacctatgtctgatgcatcggtttcgacaattttaaatgcctgaggaataggaagatacaaacattttatagattggactttgagtttgatttctttaactgtttgggtatggagatcagaccaaggaggcagatttttcttcagcctatcatgcaatggcttgacaatattatttaaataggggacaaattctcctacataatttagacaatctagaaatctttgtaactgggttttgtctaagatttggttgggaaatttgctagcaaactctattgacctttctattggaatgattgtaccttgatatatgtgatgaccaaggaatcgaattagagtttggaaaagattgatttttgatttggagactgccaacccattctgtttgatgatatggataaaagtcaggagatgtttgaagtgttggtcaatgttttgggaaaagattaaaacatcatctatgtagacaatgacatattttgaatagggattaaaaatatcattcataattttttgaaattctgaaggggcattcttcagtccgaatggcattacattccattcatattgcccaaaaggtatagtaaacgctgttttgtacctatctgattcttggatttggatttgccaaaatccagatttcatatcaaattttgaaaatatttttgcagaatttaatctgttaagtaaatcttttttgtttggaataggatacctaatccattgtaatgcttgattcagtggtttgtaatttatgactaagcggggtgttcctcgctcaagctca

SEQ ID NO: 10672 - DNA, 1128 bp, Glycine max
  Gm_smallRNAprecursor_3505
tctttgtaactgggttttgtctaagatttggttgggaaatttgctagcaaactctattgacctttctattggaatgattgtaccttgatatatgtgatgaccaaggaatcgaattagagtttggaaaagattgatttttgatttggagactgccaacccattctgtttgatgatatggataaaagtcaggagatgtttgaagtgttggtcaatgttttgggaaaagattaaaacatcatctatgtagacaatgacatattttgaatagggattaaaaatatcattcataattttttgaaattctgaaggggcattcttcagtccgaatggcattacattccattcatattgcccaaaaggtatagtaaacgctgttttgtacctatctgattcttggatttggatttgccaaaatccagatttcatatcaaattttgaaaatatttttgcagaatttaatctgttaagtaaatcttttttgtttggaataggatacctaatccattgtaatgcttgattcagtggtttgtaatttatgactaagcggggtgttcctcgctcaagctcagattgtttattgacataaaaagccgcacaagaccatgggcttttgcttttccggattaggcctttatcaagcaaatccttgatttccttttggcagtattgaaagagttcttcgttcatttgaattggtctagcttttgtgggaatttgtttttccctaaagtctttttcataagggagatcaacaatatgtttctttctatcccaaaatgcatgtggcaaatcagaacagacaatcaattcgatatgacttaataaagattgaattttttcttttacttggggttttcctagttgtatctgaatattattaaaaaatacttcttcttttaagaagttaatttggttaatcttattttctatgagatttatatttttggagattggtttggtagagaaattaaatataatttttcttcccaaataatttgtaattattccttcattagatatttgaatgggaaataaggctctaataaagggggttcctaggataacttcgttcttaaggttttttaccagaagaaagtttgtattaatcctaagaccttgattttcaat

SEQ ID NO: 10673 - DNA, 1084 bp, Glycine max
  Gm_smallRNAprecursor_3506
caagttgcaggtttcatatatgtccaccaaagatcttactcgtcttggagtagactctggtgatgatagttcttgatcttgttgttgtggtggaggcgaaggtggttcacctgggttttcttcctcagcttcttcttgaggtagttgagcgggtataagaacgttcttctccactttttcttcatcccaattccaagaagcgtactcatcaacttcaacatctcgactaatgacgagtttcttagtttgcaagttgtagacacggtagcccttagagatattgctatacccaaggaagatacctcgtatagtcttgtcttcaagcttatgcctcttcacgtctggaatatgaatgtagcatatagatccaaagatcctaaggtgctttgctgatggtttcttcccattccaaccttcaattggagtcttgtcttttacagacttagttggacatctgttgagtatgtaaacagcaatgtagactgcttcagccctgaatgtgttaggtagtcccttctccttgagcatcgatctagccatttccataactgtgcgattctttctcttggacactccattttgttgaggagaatatgcgactgtaagttgtcgctcaatgccttcatcctcacaaaatctttcaaactcgcaagaggtgtactctttgccgcgatcacttcttagtacttttatccattttccactttgattttcagcaagggccttgaactttttgaatactccaaagacttctgatttttattttagaaaatatacccatgtcattctagataagtcatcaatgaagagtatgaagtacctgttgttctcatgtgatggcgtcctcattggtccacagacgttcgtaagtatcagctcctatagatctttcgctctccatgctccgcttgttgagaaaggaaatcggtgttgcttaccaaggagacatccttcacacacttcattgttctcctttatgcttggaagatctctcatcatgttcttctcatgtaacaacttcaaggcatgtgtgttgaagtggccaaatctttgataccatagccatgaatcatcaacttgtacc

SEQ ID NO: 10674 - DNA, 1146 bp, Glycine max
  Gm_smallRNAprecursor_3507
ggatagcgatgaccaaagcgatgacgagggtgttggcagaccaacgacacctctgtcacctccattgcagtatctccaacctaggtgtccagtagacttgaacattgaccacctaccacattacattgatcgacaccattttgttcagcaacaacataatgtacaaccaccaataggtgcactcgaggttggcatgacctttgatgaaaaagcacaatgtattcgaacagtcaaagaatacaacatcagaaatcattttgactgcagaacaatttactctgaccagagaaggctaaacttcgtgtgtaaattacatgaaaatggttgtacatagagcttaggcgcatgcaattcaaagaggcataacaaatggattatcaagagtatcagaggtcatcacatttgtctcgtgccaatgctcgaacaagatcattggcaactcgacaaacacatcatagcacaaatcatccaaccaattgtcaaaacaaacccaaccgtctccatcaagacgttgattgcagagatcaaaatattcatgaattataccccatcctacaagaagacatggttagtaaagcaaagagcattggagatgattcatggaaactgggaagaatcacatgccaaactaccaaaacttttgggagctttgcaatcttgtgttctcgggactgtggtcgctgctcaaacagaatctgtgtatgagggaggagaaattatatcgggcaaaagaacgttatacgagagggtcaatccttttgaattgttagacttgagagtttaaactgattgggctgcttccattcaatgatcaataacaatttacatttgagtaagttccaaacagctgatttgatttagattacgatatttaaataatacctcactatgagaggaatgcatttggacattccttcctgaaaacgtgaatatctactttagtcaacataggaaaatctctgcttctgatatatggcacaacattactggtttaacatgaggaaatttagttttaaatttaatgagcattggagatgattcatggaaactgggaagaatcacatgccaaactgccaaaacttttgggagctttgcaatcttgtgttctcgggactgtggtcgctgctcaaacagaatttgtgtatg

SEQ ID NO: 10675 - DNA, 1149 bp, Glycine max
  Gm_smallRNAprecursor_3508
aattatatatgttaaattaaatattaggtttttgtatttaagttttcattttgggttgtgtttttacctttcaagaaattttggagtgtccagcgtgcctgttagcctaggatagattaattgttaagcaagtgataatatgggaaaaagtcgcaccaacacttggaacccttttatgaactacaaacttaagcaaatttactcttactctctttagtttgcatttgaattttctctaaaatgtcttcttttatgagattagctttctgtgaaacttcttttcaaagaatcacttttacaaaattcaattttctaaaaatatgcacattgctaccttgtaagaattcaatttcctaggacaaggtccagtatattttaattttccccatcagagcctgatggggaagtaggaatattatccgtaaggacgtatgttaacaaattttatggatctgacaccttgtatagtatgagtcatattttattttaatttgtacagtagatgtttgaacagtacttcctggaagtacaacagtctaatattttagttgaatggtactgtagtagtaagacccgtggtggataaagggcagtaaggctaaggtgtactgtttaaccaaaatatcaagacataatatactggtggctataggatttccgttcaaactatttttcaaaaaaaaaagagtttttcttaaaaataattcagatccgaaaaattttgttacatatttacttacggagatatttctatggaaccaatgagggcaaagatattagagaatgttataatcatgtctagactattgcgatctttttcccgtatctcttttcgatcaaattcctcctcatcatcttcttcaagaaactccaatttattaaacgatcaagataaccagacccaagaggtcgcccccaaacacaatatctttgatgaggaagtccgattcgaagatatcaatcaaaacatggatgactggaacatcccagaaatccctcaagatcaactgtacgttcctgaaacaattaaagataaacacaattttgactacataatcaaaacagtagaaaaaaatattcctctagggcaagacataggggaagaattccatttactttcaaaaaattcaatttatgaacatagtcgaa

SEQ ID NO: 10676 - DNA, 1162 bp, Glycine max
  Gm_smallRNAprecursor_3509
ttatcaatgattttgttctagaaacaatggccctattcgacacaggggctgactcaaactgtattttagaaggattaattcctacaaaattctttgagaaaacttctgagaaacttagtacagcaaacgactcaaaattaaaaattaactttaagttatcaaatgcaattattgaaaaccaaggtcttaggattaacacaaactttcttctagtaaaaaaccttaagaacgaagtaatcctaggaactcccttcataagagccctgtttcccatccaaatatctaatgaaggaataacaacaagttatttaggaagaaaaattatatttaatttttctactaaaccaatctccagaaatataaattttatagaaaataaaattaatcaaattaacttcttaaaagaagaagtatcgtttaataatatccaaatacaactaggaaaacctcaaataaaggagaaaatccaatctttattaagtcatatagaatcaacagtttgttctgaattgccacatgcattttgggacagaaagaaacatattgttgatcttccttatgagaaagattttagggaaaaacaaattcccacaaaagctagaccaatccaaatgaatgaagaactccttcaatattgccagaaagaaattaaagatttacttgataaaggtttaattcggaaaagtaaaagtccatggtcttgtgcggctttttacgtcaacaaacaatccgagattgagcgaggaacaccctgcttagtcataaattacaaaccattaaatcaagcattacaatggatcaggtatcctattccaaataaaaaagacctacttaacagattaaattctgcaaaggtattttcaaatttgacatgaaatccggattctggcaaatccaaatccaagaatcagataggtacaaaacagagtttactgtacctttcgggcaatatgagtggaatgtaatgccattcggactgaagaatgcccctacagaatttcaaaaaatcatgaatgatattttcagtccttattcaaaattcatcattgtttacattgatgatgttttaatcttctcccaagatattgatcaatattttaaacacctccagactttcatccatatcattaaacaaaatggtttggcagtctccaaatcaaag

SEQ ID NO: 10677 - DNA, 1108 bp, Glycine max
  Gm_smallRNAprecursor_3510
ggcaattttcagcgtatttgattttaacatagaatatatcaagggctcttcaaactctctacttgactacctcacccgtgaatttttacagaaaattcccgatgcctcctaaggtgtctagctcctccggcagaggaggaagatccgatactaaaggaaaagatgttatattggctctaccatagccaataaccaagaaggcaactacatcatcttctgggtcacctactcagactgggtcatcaacccagaaaggaaagcttgaagggtcattgacccagataaaacctgagtcatcaactcaagaatccctaaaaccaacaacaacaaaacagactgtggttgactatgcctggtcaatacaaactctcctggccttagaagacataggcctcaccagagtaccaaaattggccaaaaagacctgggcagaaatggcctcagaatcagacgatgattctgaaacagacctacaaaaacaaatccaaaaggccaaacagaccaaaactgtctgtaaccaaaaaccaagccaaccgttgactcaacaagaatcaacaccacaacccagcaatagctatatttcaaaaaacaaattcttcaatgttttacaaatggaaccagaatactgggacaagaatcctttcaaggcaaccgccaaagtattccccccaggattccattataggccaacagccacaaataaaaccagaaaattctacgaattcatcctaatagatacaaactcagtatctattaaacacttcaaagaccccaaagatccaaatgtaaatacccattccacaatccaaatcctaaaggttatgcagccacgacattatagctcaaacttaaaccaacccaaaacattttctgcaccttttgatcctgcaggatataattattgggactacatcgacgcctggaccaatgtgttctggcatcaaaatagtaaatttaagcattcatggctaatttacttcaagaataacactgtgtataattttccaaattggctcctccaatggtggaactacttcggactaattccgcagatatttccagaagaagtccaacagggattccaacaattcaccaagctcttcaatag

SEQ ID NO: 10678 - DNA, 1033 bp, Glycine max
  Gm_smallRNAprecursor_3511
ttcaaggcaaccgccaaagtattccccccaggattccattataggccaacagccacaaataaaaccagaaaattctacgaattcatcctaatagatacaaactcagtatctattaaacacttcaaagaccccaaagatccaaatgtaaatacccattccacaatccaaatcctaaaggttatgcagccacgacattatagctcaaacttaaaccaacccaaaacattttctgcaccttttgatcctgcaggatataattattgggactacatcgacgcctggaccaatgtgttctggcatcaaaatagtaaatttaagcattcatggctaatttacttcaagaataacactgtgtataattttccaaattggctcctccaatggtggaactacttcggactaattccgcagatatttccagaagaagtccaacagggattccaacaattcaccaagctcttcaatagcaaggaatcgagaattccggcagatttaaagtacttttccagttttgccttgtcatggattttttcatggcaatacagatatggaaaaaccgaaaacatcaaacaatatccaccattgcagagacatgcctttgtaaagtggtggtcacaatttgatacctcaaaggctgctccagaacaagtcaagaactggtttcaaagcaaccctgagtttctcaagcctactgatccagagacatcattgtttctaaatcaaaagtctcaacttgcagcattcttagcaagctcaaaatctaaagagagtcttgcccagaatcttaaggaagttctccagctacttcaacaggaagaagaagaagaaccccccaagaaggaagccgaatcatccgaaaaaaatgatgaccaagaagatgatccattctaccagaatgaggatgactgttttggtatatcgttagacgatgattagttgtagtaatcatgaattattgtaactaattattcggttcccgataataatgtaatttgaaaaagtttttgtaacagttccggtaaacattaccgat

SEQ ID NO: 10679 - DNA, 1137 bp, Glycine max
  Gm_smallRNAprecursor_3512
caaggcaaccgccaaagtattccccccaggattccattataggccaacagccacaaataaaaccagaaaattctacgaattcatcctaatagatacaaactcagtatctattaaacacttcaaagaccccaaagatccaaatgtaaatacccattccacaatccaaatcctaaaggttatgcagccacgacattatagctcaaacttaaaccaacccaaaacattttctgcaccttttgatcctgcaggatataattattgggactacatcgacgcctggaccaatgtgttctggcatcaaaatagtaaatttaagcattcatggctaatttacttcaagaataacactgtgtataattttccaaattggctcctccaatggtggaactacttcggactaattccgcagatatttccagaagaagtccaacagggattccaacaattcaccaagctcttcaatagcaaggaatcgagaattccggcagatttaaagtacttttccagttttgccttgtcatggattttttcatggcaatacagatatggaaaaaccgaaaacatcaaacaatatccaccattgcagagacatgcctttgtaaagtggtggtcacaatttgatacctcaaaggctgctccagaacaagtcaagaactggtttcaaagcaaccctgagtttctcaagcctactgatccagagacatcattgtttctaaatcaaaagtctcaacttgcagcattcttagcaagctcaaaatctaaagagagtcttgcccagaatcttaaggaagttctccagctacttcaacaggaagaagaagaagaaccccccaagaaggaagccgaatcatccgaaaaaaatgatgaccaagaagatgatccattctaccagaatgaggatgactgttttggtatatcgttagacgatgattagttgtagtaatcatgaattattgtaactaattattcggttcccgataataatgtaatttgaaaaagtttttgtaacagttccggtaaacattaccgatactgttgaaacagtaaaacattgggtctatttaaaggagtcctcgttccctttgtgaggcaccttttcaaatagtctcaaaaccaggtcttagagagagaagccct

SEQ ID NO: 10680 - DNA, 1136 bp, Glycine max
  Gm_smallRNAprecursor_3513
aaggcaaccgccaaagtattccccccaggattccattataggccaacagccacaaataaaaccagaaaattctacgaattcatcctaatagatacaaactcagtatctattaaacacttcaaagaccccaaagatccaaatgtaaatacccattccacaatccaaatcctaaaggttatgcagccacgacattatagctcaaacttaaaccaacccaaaacattttctgcaccttttgatcctgcaggatataattattgggactacatcgacgcctggaccaatgtgttctggcatcaaaatagtaaatttaagcattcatggctaatttacttcaagaataacactgtgtataattttccaaattggctcctccaatggtggaactacttcggactaattccgcagatatttccagaagaagtccaacagggattccaacaattcaccaagctcttcaatagcaaggaatcgagaattccggcagatttaaagtacttttccagttttgccttgtcatggattttttcatggcaatacagatatggaaaaaccgaaaacatcaaacaatatccaccattgcagagacatgcctttgtaaagtggtggtcacaatttgatacctcaaaggctgctccagaacaagtcaagaactggtttcaaagcaaccctgagtttctcaagcctactgatccagagacatcattgtttctaaatcaaaagtctcaacttgcagcattcttagcaagctcaaaatctaaagagagtcttgcccagaatcttaaggaagttctccagctacttcaacaggaagaagaagaagaaccccccaagaaggaagccgaatcatccgaaaaaaatgatgaccaagaagatgatccattctaccagaatgaggatgactgttttggtatatcgttagacgatgattagttgtagtaatcatgaattattgtaactaattattcggttcccgataataatgtaatttgaaaaagtttttgtaacagttccggtaaacattaccgatactgttgaaacagtaaaacattgggtctatttaaaggagtcctcgttccctttgtgaggcaccttttcaaatagtctcaaaaccaggtcttagagagagaagccct

SEQ ID NO: 10681 - DNA, 1157 bp, Glycine max
  Gm_smallRNAprecursor_3514
gatccaaatgtaaatacccattccacaatccaaatcctaaaggttatgcagccacgacattatagctcaaacttaaaccaacccaaaacattttctgcaccttttgatcctgcaggatataattattgggactacatcgacgcctggaccaatgtgttctggcatcaaaatagtaaatttaagcattcatggctaatttacttcaagaataacactgtgtataattttccaaattggctcctccaatggtggaactacttcggactaattccgcagatatttccagaagaagtccaacagggattccaacaattcaccaagctcttcaatagcaaggaatcgagaattccggcagatttaaagtacttttccagttttgccttgtcatggattttttcatggcaatacagatatggaaaaaccgaaaacatcaaacaatatccaccattgcagagacatgcctttgtaaagtggtggtcacaatttgatacctcaaaggctgctccagaacaagtcaagaactggtttcaaagcaaccctgagtttctcaagcctactgatccagagacatcattgtttctaaatcaaaagtctcaacttgcagcattcttagcaagctcaaaatctaaagagagtcttgcccagaatcttaaggaagttctccagctacttcaacaggaagaagaagaagaaccccccaagaaggaagccgaatcatccgaaaaaaatgatgaccaagaagatgatccattctaccagaatgaggatgactgttttggtatatcgttagacgatgattagttgtagtaatcatgaattattgtaactaattattcggttcccgataataatgtaatttgaaaaagtttttgtaacagttccggtaaacattaccgatactgttgaaacagtaaaacattgggtctatttaaaggagtcctcgttccctttgtgaggcaccttttcaaatagtctcaaaaccaggtcttagagagagaagccctgcctagggaaaacctctttgtaagcttttctttcgatttcaataaattcaaagttttatttttcacatctcccctctcccttcaccgatcctgtgcggctctgccgccgcttcggtttctttgttttcaaaaacctgggtttgtaagccggat

SEQ ID NO: 10682 - DNA, 1079 bp, Glycine max
  Gm_smallRNAprecursor_3515
taaagaaattcctagaaccttctcttcttttggaagtttctccataatttttctttcctccattttctttgttttggggctgaaatttaaactttgactggaaggcattttcaattgtatcttctttatgcctatacagtctttgctcaaatgcttcaagagagcccacaagttctatctctgatagagtggacagatctttggtttcctcaatcattgtcacgattgggtcaaacttttggggcatagtaattagaattttctcaacaattttctagtcaataatattttccccaaaagctctcatttgattaactattcctttaactttagaatagtaatctttaactgtctcagactctttcatcttcaatagttcaaaatcacttcttagagattgaagtttaacggcacgtaccttaacacttccttgaaactcctcctgcaatgtgttccatgcttctttggcagtcttagctcccataattcttgggaaaattggatcagtcaccgcttgttgcaaggtgaacaacgcctttgaatttttctgtttatttttcttcaactctttttcttgggatgcattaagagctgaagtatccgcgggaatggtgaagccttcttctactatgtcccataaatcttgagatgaaaaatatgtttccattttaacacgccagaaatcataatttttaccattgaagatagggacagaaatagttgacgattgagtaatgttatccatagcttagaaaaaaaatattattagagtgggttaatagtacaaaggaaatttttgaagtagttgggaggattttggaatggtaggtaggtaagataaatacgcccaatgtataaccgaacgtagctctaatgtcactgttggtagttgattagatgatagttgatagttggtaattttagagaattgttttagaaagaaggctatgtcattgatttcttggattgtcaattacaacataccaattgtctatttataggctcaagtcaccaacctctcaatggtggtgaatgtttctacattactttaggtctttctagagttttcatgatagatt

SEQ ID NO: 10683 - DNA, 1110 bp, Glycine max
  Gm_smallRNAprecursor_3516
ctaggacaaaggcctttcttgtgacaagttttgttgggggaaaaaacaccatttgggtggtgacttctctctttaaaagaacccccttttatacatcttgcattctaatcttgacgatgtctagggtgcgaaagttaaacaactttcgcaccgtgcgaaatgaaaagtatttgcaaagtaatcaacgtgaaccgtccgattagcgaaaagaaaatctaacggtccttatttattccttgctaccggtagtaaatgaatgcctcgttttctccgtctggtttcccccacgcgcgattgaagagccaaagcgttcctcgactacttttctgctttcctcaaaaggttttttcaaaagcaaaggaaacaatcagcccccttttggagaacgacgggtgggtttgtcttcttcgtgcgctaattccatcgtggaagattcgatttttgaagcaaagcagttgggtgctcatcatttggtatcagagctcagttttgttgcagaactacattcaagttccattatgttggtccaaaaatgataataacttgttttgttgcagaactacattcaagttccattaaactaccacatcaattggtatcccaaatacccaacttatgtggtcctcaatgttaacggcgacgagttttttttgtcagagttcgaagctatcaaaacaaaatatattttgcagatgggatcaaagaattcagaagcgccatgaaggtttatgaaaatatggtgatcagcgccgcagacaaaaatactacttttcatgtctccttcacaactcctgcctatagacaactattggcaagccgcaacagccgagggttaatatagtattactcctatatcggattttgatttcagtttcacaacattaaccactgttatcattctaatgtaggtgctgccaccggaggctttgaaatatgtctttaataaaaataaatataaacgatacatgaaggtggaacgcagtagtcgtaggcgttgcctatggaagattaacgtgcaaaacggcgtccctactcttgctgacccatggtaccagtacttagcggacaatgatttaatgtccggagatgaggtggtattttactacgcgt

SEQ ID NO: 10684 - DNA, 1110 bp, Glycine max; identical to SEQ ID NO: 10683
  Gm_smallRNAprecursor_3517

SEQ ID NO: 10685 - DNA, 1106 bp, Glycine max
  Gm_smallRNAprecursor_3518
aggacaaaggcctttcttgtgacaagttttgttgggggaaaaaacaccatttgggtggtgacttctctctttaaaagaacccccttttatacatcttgcattctaatcttgacgatgtctagggtgcgaaagttaaacaactttcgcaccgtgcgaaatgaaaagtatttgcaaagtaatcaacgtgaaccgtccgattagcgaaaagaaaatctaacggtccttatttattccttgctaccggtagtaaatgaatgcctcgttttctccgtctggtttcccccacgcgcgattgaagagccaaagcgttcctcgactacttttctgctttcctcaaaaggttttttcaaaagcaaaggaaacaatcagcccccttttggagaacgacgggtgggtttgtcttcttcgtgcgctaattccatcgtggaagattcgatttttgaagcaaagcagttgggtgctcatcatttggtatcagagctcagttttgttgcagaactacattcaagttccattatgttggtccaaaaatgataataacttgttttgttgcagaactacattcaagttccattaaactaccacatcaattggtatcccaaatacccaacttatgtggtcctcaatgttaacggcgacgagttttttttgtcagagttcgaagctatcaaaacaaaatatattttgcagatgggatcaaagaattcagaagcgccatgaaggtttatgaaaatatggtgatcagcgccgcagacaaaaatactacttttcatgtctccttcacaactcctgcctatagacaactattggcaagccgcaacagccgagggttaatatagtattactcctatatcggattttgatttcagtttcacaacattaaccactgttatcattctaatgtaggtgctgccaccggaggctttgaaatatgtctttaataaaaataaatataaacgatacatgaaggtggaacgcagtagtcgtaggcgttgcctatggaagattaacgtgcaaaacggcgtccctactcttgctgacccatggtaccagtacttagcggacaatgatttaatgtccggagatgaggtggtattttactacgc

SEQ ID NO: 10686 - DNA, 1037 bp, Glycine max
  Gm_smallRNAprecursor_3519
tttaaaagaacccccttttatacatcttgcattctaatcttgacgatgtctagggtgcgaaagttaaacaactttcgcaccgtgcgaaatgaaaagtatttgcaaagtaatcaacgtgaaccgtccgattagcgaaaagaaaatctaacggtccttatttattccttgctaccggtagtaaatgaatgcctcgttttctccgtctggtttcccccacgcgcgattgaagagccaaagcgttcctcgactacttttctgctttcctcaaaaggttttttcaaaagcaaaggaaacaatcagcccccttttggagaacgacgggtgggtttgtcttcttcgtgcgctaattccatcgtggaagattcgatttttgaagcaaagcagttgggtgctcatcatttggtatcagagctcagttttgttgcagaactacattcaagttccattatgttggtccaaaaatgataataacttgttttgttgcagaactacattcaagttccattaaactaccacatcaattggtatcccaaatacccaacttatgtggtcctcaatgttaacggcgacgagttttttttgtcagagttcgaagctatcaaaacaaaatatattttgcagatgggatcaaagaattcagaagcgccatgaaggtttatgaaaatatggtgatcagcgccgcagacaaaaatactacttttcatgtctccttcacaactcctgcctatagacaactattggcaagccgcaacagccgagggttaatatagtattactcctatatcggattttgatttcagtttcacaacattaaccactgttatcattctaatgtaggtgctgccaccggaggctttgaaatatgtctttaataaaaataaatataaacgatacatgaaggtggaacgcagtagtcgtaggcgttgcctatggaagattaacgtgcaaaacggcgtccctactcttgctgacccatggtaccagtacttagcggacaatgatttaatgtccggagatgaggtggtattttactacgc

SEQ ID NO: 10687 - DNA, 1039 bp, Glycine max
  Gm_smallRNAprecursor_3520
tttaaaagaacccccttttatacatcttgcattctaatcttgacgatgtctagggtgcgaaagttaaacaactttcgcaccgtgcgaaatgaaaagtatttgcaaagtaatcaacgtgaaccgtccgattagcgaaaagaaaatctaacggtccttatttattccttgctaccggtagtaaatgaatgcctcgttttctccgtctggtttcccccacgcgcgattgaagagccaaagcgttcctcgactacttttctgctttcctcaaaaggttttttcaaaagcaaaggaaacaatcagcccccttttggagaacgacgggtgggtttgtcttcttcgtgcgctaattccatcgtggaagattcgatttttgaagcaaagcagttgggtgctcatcatttggtatcagagctcagttttgttgcagaactacattcaagttccattatgttggtccaaaaatgataataacttgttttgttgcagaactacattcaagttccattaaactaccacatcaattggtatcccaaatacccaacttatgtggtcctcaatgttaacggcgacgagttttttttgtcagagttcgaagctatcaaaacaaaatatattttgcagatgggatcaaagaattcagaagcgccatgaaggtttatgaaaatatggtgatcagcgccgcagacaaaaatactacttttcatgtctccttcacaactcctgcctatagacaactattggcaagccgcaacagccgagggttaatatagtattactcctatatcggattttgatttcagtttcacaacattaaccactgttatcattctaatgtaggtgctgccaccggaggctttgaaatatgtctttaataaaaataaatataaacgatacatgaaggtggaacgcagtagtcgtaggcgttgcctatggaagattaacgtgcaaaacggcgtccctactcttgctgacccatggtaccagtacttagcggacaatgatttaatgtccggagatgaggtggtattttactacgcgt

SEQ ID NO: 10688 - DNA, 1039 bp, Glycine max; identical to SEQ ID NO: 10687
  Gm_smallRNAprecursor_3521

SEQ ID NO: 10689 - DNA, 1052 bp, Glycine max
  Gm_smallRNAprecursor_3522
catggtgctcagttccatctgctatggtaggcgatagcaaggttatcaaactcgagagtttatgcagacccgtgagagtttcatagactcgactcatagactcaactcgtagactcgtaagagtctacttcatataaaaataataacaaaatatctataaataacatactaattaaacatttgaacaatataataaaacaaaatagtaaatcataaagttcagaatatttaaataaccaagtctagtaataatacatcactaatagacaataacttgtaaaggttatagtagtggtaaatcattctcatcgagggtttgatgttattagagaataagagttgaatattattaaaggtgagaattttgtatttgagaataacacgctaaatgaagatatgttgaatgttaaacacacagaaaacaataaaaaataacttatattttggtctaatttttttaacttgctaactcgttgactcggtggtaaactcgagagtctaccgagtttacttagagtttatagagtttactcagagtctactaaaaaaagagtttactcaagagtcaactcgcagagaacaagtggactcgtaaactcgtaagagttagcgagttaactcgagagtttgataaccctgggcgatagactaggagctgacatgatagactgaatatgcaagtgttgtagtatacgttgcatttgctcattttgttgacgaatttgctcattttgtcacatatcttaactttggtggtcatgattctccatcagctacaacatcttttcctcaagtattttctccttatttgcctttgctaaaagctcaacattcaatttattaattgtctcacgcattttctctatttggtcttccacgggtgcaatagaagtagatggagctgattttgagcaactaaaccttttgctcaaagtacctagctcgtacacattccccttgtaatttggacctccatcagcattcaaatatatttcattatcattaacaaaagtagcagtgttaggggaatcacgtgtagatgtgccttcctt

SEQ ID NO: 10690 - DNA, 1062 bp, Glycine max
  Gm_smallRNAprecursor_3523
aagaaaaaaaaaaggtgaccaaataaaagtaagcagaaggaactataagcccatttctgctaagaatgaacgaaactagagaagagctttaaccactcctaaaaaaaatgattttttacgatagttaaaaaggatttttaatgacaattttgaaccgtggttgtagataacgtcattaaaacgatattattttttgcaacggttattataataatcatctttaaaagttggtatattcaaagacgattatttgctactaaccgtctttaaatgtgatgtctgacaaactttcaaagatggttatttgttattaatcgtctttaaatgtcatgttgacaaatcttttaaggatggttattcattattaactgtctttaaatgtgatgtctgataaactttcaaaaacggttatttgctaataacgatttgatgtctgacaaactttcaaagacggttatttgctattaaccgtctttgaatgtgatgtctgacatactttcaaagacgattatttgttattaaccatctttaaatgtgatgtctgacaaactttcaaagacggttatttactactaatcgtctttgaatgtgatgtctaacaaactttcaaagacggttatttgttattaaccgtctttaaacgcattatttctaagacagtttttaaggaataaccgtcttagaaagggatttatattattaatccttgcttttttcgtttatgttatatgctcttaaatatccaaaaaataatataagtaagaaatattggattggatattctattcatgttacaaaatgaccttaaagcatgtttacaaaatacaataaatgcatgtataaattgggaaaaattatgaataagatcttctatccttttctgtggacctagctagtaatataaactggtaaaaattatgaaaaggaataacatataacctaaatttaatattggcaaagggttcaatgagcatcatcatcagccttgttctctgctagaactgcattaacatttcaatttgaaaattttgaatagatagggatcattcatatcatatacct

SEQ ID NO: 10691 - DNA, 1117 bp, Glycine max
  Gm_smallRNAprecursor_3524
tgtggagactttacagtatatgatgtcaccacaagggaggaacacatggacagttgatgatctcgtgccttacgtggataagttagcgattatatcagaagagcaagagagaatcactgagccagtgtcacatggtcgagcatcagagcgtgaattcccagcacaagagtttcacattcttcagtcaagtgttgaaactcggggcataggcagacgaaaggagcctgttgaagcggaacaatattcccaacaaatgatggagcatggtcatgggatgtattacacgccagcaatattttccgaatatccttcacagatgtaacagtatccttttgaaggtcatcacactgatacttctgcgagcgagcattcgttcggtggtgttgcggaaacacaacctcatttttcatggcccactatgactccttcacagcagcacgatgcccccatggcaacacctaacgccccatttgctctgcaatggaatgtacccggagcaatacctgatatgggtgacttattaggtgttgatttgcgtcaggagttttctgctgaggctaagcaagcagaagcagggagacaacgcgacagaagaaatcctgatcgtcaagcgcgaagatgggatcgaccatgtgacacatcctcacgacatcacagacaccataatgactgatttttatgtctctgtgtaaatttgttgttgtttgtaagacatttgattttcacagttaatctatcgcatctcatttattatgtcatactaatgtatagagtttatgtggcgcatcaaactataataataaacaaagtttaaaaataaaactaaagtagacaaacaaaaaataagtagttttagtagctacagtcgaacaccaacgccatatgtgcaaatactccacattgactaagaccatagttcatcattgtagatagttctcctttagtatcaatttgaatacccttaactacaacattggacttcccactttcactgaacctaggtttagggttgacgtgttattctgtagggttcatcgttttaggttttgagggatagggtttaaggcattgggttagggtttggggtttatggtgttcagtttgggttcaatgttta

SEQ ID NO: 10692 - DNA, 1035 bp, Glycine max
  Gm_smallRNAprecursor_3525
tttcgtcatgtttcccctttaatgttatgccatgaatgtttaggggttgtgaaggagactctggaactggttgctgcatcccgaattataggccttcttgtcggggataagcgtcgaccctaaatgcatgtcgattattccactgttgaatcattggggcgaataattgcccccaattttcgtcatgtttcccctttaatgttatgccatgaatgtttaggggttgtgaaggagactctggaactggttgctgcatcccgaattgtctcaagactctgtctggttggtgccactcaataacttggaaacaaattagtggcaccaccgcgtaccacgcgatacttccgactaaacaaacgggaggcaacaatgatataacggttgatgggtaaggctcccacacaaactgcatataacaacatagttgtgaacattgtagtaaaataagacataattttttattttacaaatacaatagcatgcttcttacctcatgacgtttcataatatccaacttgcgacgaaaaactttcacatcatcattgccgatatgttggtttccacgtcgcagccacctacaaagaataaaatttaatataccctaaaaccatttattctattgaaatgaaagacgctgttaaaaattactcacctgtgccctagtggtgtattttctatttgggaaggagtcctctttggagccaaggttggacatcgttcccatgcccacaattgtagtaagatgcacatacctccgattgatttagttttataatcggtggcactgcacatctctctatatagaaaaccaagtacggcagctccccatgcatatctgccacattcttcaaagtcacgtaaaaattgaaggtaccttaccgaaactctgttactggttttgtcaatgaacaagacacctccaataaatctcagtatccatgcacgggcaaaccttcgtacttgttcttcgtcgtcatcattatttatttgatcaaaatggtgagccaaccaacttaatttaaccacactaccttt

SEQ ID NO: 10693 - DNA, 1040 bp, Glycine max
  Gm_smallRNAprecursor_3526
attcgcacgaatatcccaaatatgtcgccaatgcattttctctgtgtatgcgtaacctgtaaatattcaatcaatgtattatgttataaaatttgattgaaagaaaattataacgaataaataaaatagattctcaccagccaacatgagtggtttctttaaatgtttgcagtttgagttaccgcgaagaaatttttgtgcaatgtggcacaggcaaaagaaatgggatgtgtcctggacccataagttacttgggttgttgtaggcacttataattgaggggtgtcggtctgaaataagagaaatgttaatttgcggagtaacatgtcttctcaaattcttaagaaaaaaacaccaagctgaagttgtctccccttctacaatggcataggcaatcgggaagatatggttaggtctatcttgtgtggtagctatcaacagtgtgccagtatacttctcgtaaagccatgtaccatttacttgttctatgggtttgcaatatgcaaaaccattaatgcatggaccaaatgaccaaaagacacgtttaaacaatcttttgcccgatactatttctcccccctcatacaaggattttgtttaagcagcgaccacagtcccgggaacacaagattgcaaagctacgaaaagttttggcaatttgacatatgattcttcccagtttccatgaatcatctccaacgctctttgctttgctaaccatgtcttcttgtaggatggggtataattcatgaacattttgatctctgcaatcaacgtcttgatggagacggttgggtttgttttgacaattggttggatgatctgtgctatgacatgtttgtcgagttggcgatgatcttgtctgagcatcggcacgagacaagtgtgatgacctctggtactcttgataatccatttgttatgcctctttgaattgcatgcgcccaagctccatgtacaaccattttcatgtaacttgtagacgaagtttagccttctctcgtcagagtaaattgttctgcaatcaaaatgatttttga

SEQ ID NO: 10694 - DNA, 1190 bp, Glycine max
  Gm_smallRNAprecursor_3527
caacctctaatcttgaggacttatcagatgaatacgagacttgttggatcaaaaatcatgatagtgatactgactcctcttccgggcccgaaggaagtaacctgtctccatcccacgaacctatattcaaacgagattggtaatctacggatcattcatgtctaagttatttcttctttgaaattttcatgtaatgtcttatgtccgtcttcagttatcactttacgtattgaaataatttttcctttaaatttaaattagcaattttcagtttacccacttttactgcagtagttgacatggtaacataactgtcaaaattcacaatactttgccatttacactacactgtttctaaaaattaaatgtctcattgacaaaactgacatgaaatggacaactcataatctctttgttcactctaaaaataattatggacgtttgttgctttaattacaagggaaaaatcacagtccaaattgacaatactctgcaattttcacacgtctctaaaaattaaatgtctcacctgcaaaactgacatgaaatagatagctcataatctctttgttcactctgaaaatcatcatgaacgtctgctgctttaattacatgggaaaaatcacagttcaaattgacaacattctgcattatgagctgtctatttcatgtcagttttgcaagtgagacatttaatttttagagacgtgtgcaaaactaacatgagatggacaactcataatctctttgttcactctgaaattataatggacgttagctccatcacttactaggggaaaaaacattggattccaatacacatcaacgtggcagaatactcatacaactataaataacacaacgcatacataatacaaacacacaatctcacacaacatagtttcacaacccaaatacaatcttattactatgtcatttttgggagaaacaagcagtcagaccattgctaactccagattagctttcatttttccaaattgatcaatcattcacaaccaaactggtgtttattttcaaagtctcactccaacaccaatgggagttcctaacaattgttcttttgatacactcaagcgtagaatgcacaacacccttcaactaaccaacgatcaattactggatgaaatctactaccaacaaccattcatagatgcaggtcaataatattt

SEQ ID NO: 10695 - DNA, 1189 bp, Glycine max
  Gm_smallRNAprecursor_3528
atggaggccggaaacacatacgtttcacatgagatgcggagagtgtactattactctccaagacgtctctgtattgttaggtatgagtgtgaatggtttaccattaatcggtccaactaatcttgattgggctgatttatgtgaggaattattgggagtcagaccacaagaaggtgaaattaaaggtagtgtggttaaattaagttggctggctcaccattttgcacaaataaataacgacgatgatgaagaacaagtataaaggtttgcccgtgcatggatactgagattcattggaggtgtctttttcgttgaaaaaaacagtaacaaagtttcgctaaggtatcttcaatttttacgtgactttgaagattgtggcacatatgcatggggagctgccgtacttggttttctatacagagagatgtgcagtgccaccgattataaaactaaatcaatcggaggtatgtgcatcttactacaaatgtgggcatgggaacgatgtccaaccttggctccaaagaggactccttcccaggtagaaaataaaccactggggcacagattagtcatttttaacagcgtcttttatttcaatagaataaatggttttagggtatattaaattttaatctttgtaggtggctgcgacgtggaaaccaacatatcggcaatgatgatgtgagagtttttcgtcgcaagttggatattatgaaacgtcatgaggtaagaacatggtattgtatttgtaaaataaaaaattatatatgttattttactaaaatgttcacaactatgttgttatatgcaatttgtgtgggagccgtacccatcaaccgttatatcattgttgcctcccgtttgtttagtcggaagtctcacgtggtacgcggtggtgccactaatttgtttccaagttattgagtggcaccaaccggacagagtattgagacaatttgggatgcaacaaccaattccagagtctccttcgtaacccttaaacattcatggcataacattaaaagggaaacatgacgaaaattaggggcaattgttcgccccaatgattcatcagtggaataatcgccatgcatttagggtcgacgcttatccccgacaagaaggcctattgagctttaactcggattacatggtctggtataggcgaaagacaaagatgtttgttgac

SEQ ID NO: 10696 - DNA, 1044 bp, Glycine max
  Gm_smallRNAprecursor_3529
caaccggacagagtattgagacaatttgggatgcaacaaccaattccagagtctccttcgtaacccttaaacattcatggcataacattaaaagggaaacatgacgaaaattaggggcaattgttcgccccaatgattcatcagtggaataatcgccatgcatttagggtcgacgcttatccccgacaagaaggcctattgagctttaactcggattacatggtctggtataggcgaaagacaaagatgtttgttgacccacaaaatgcaaacacgactacataggtattttttaatttttttgaatatttaacttgaacatttttttaatgatggccattaattttctgaccctaataattgcaggctgaagttgcggagacattacaatacatggtgtctcctcaagggaggaatacatggacagttgatgatctcgtgccttatgtggaaaaaattacaattttatccgaagagcaagagagagtcaccgagccagtgtcacatggtcctgcatcagagcgtcaatttcccgcacaacagtttcacatgcttcagtcaagtgttgaaactcagggcatagacaaacgaagggaggctgttgaagcggaagaatattcccaacaaatggcggagcgtggccatggaatgtattacacgccacaaacatttgctcagtatccggcacagatgtatcaatatccttctcagggtcatcacactgatacttctgcaagtcagcattcggtcggtggtgttgcgaaaatacaagctcatttttcatggcccactatgaccccttcacagcaacatcatggcccaattccaacacctaatgccccattaggaacacaatgaaatgtaccgggacaaatacctaatacgggtgacttattcggtgttgatttgcgtcacgcattttctgcggaggctgacgaagaagaagcggggaggcatcggggcagaagaaatcttgatcccaagcacgaagatgggatcgaccatgtggcacatcctcacggcatcacagacaccaaaatgaat

SEQ ID NO: 10697 - DNA, 1146 bp, Glycine max
  Gm_smallRNAprecursor_3530
ccaaagcgatgaccaaagtgatgacgaaggtgttggcagaccaacgacacctctgtcacctccgttgcaatatcaccaacctaggtgtctagtagacttgaactttgatcacctgccacactacattgatcgacatcattttgttcagcagcaacataatgtacaaccaccaaccggtgcacttgaggttggcatgaccttcgatgaaaaagcacaatgtattcgaacagtcaaagaatacaacatcagaaatcattttgattgcagaacaatttactctgaccagagaaggctaaacttcgtgtgtaaattacatgaaaatggttgtacatggagcttgggtgcatgcaattcaaagaggcataacaaatggattatcaagagtatcagaggtctgcacacttgtcttgcgccaatgctcaaacaagatcatcgacaacccgacaaacacgtcatagcacagatcatccaaccaattgtcaaaacaaacccaaccgtctccatcaagacgttgattgcagagatcaaaatgttcatgaattatacctcatcctacaagaagacatggttagcaaagcaaagagcgttggagatgattcatggaaactgagaagaatcatatgccaaactgccaaaaattttgggagctttgcaatcttgtgttcccgggactgtggtcactactcaaacagaatccgtgtatgagggaggagaaattgtaccgggcaaaagaatgtttaagcgtgtcttttagtcatttagtccatgcattaatggctttgcatattgcaaacccatagtacaagtagatggtacttggctttatgggaagtatactggcgcacactgttgatagctatcgcacaagatggagctaaccatatcttctcgattgcctacgccattgtagaaggggagacaacttcagcagcctggggtttttttctaacgaatttgagaacatatgttattccgcaaattaacatttctctcatttcaaacagacacatcttaattataagtgcctacaacaacccaagtaacttatgggtttaggacacatcccatttcttttgcctgcatcacattgcacaaaactttcttcacgataactcaaactgcaaacatttaaagaaaccactgatg

SEQ ID NO: 10698 - DNA, 1159 bp, Glycine max
  Gm_smallRNAprecursor_3531
gccagaaggtctttttcggttagaacccgttcaattccagtaggactaactagatccgagtcacacaatcagttccctattgtaaacctccaaggattagatactacttctagtatacctagaacaatgtacaaccaagaacaggaggacgaccaaaagtcgatccaatcctcaacttattcttctatggaaccttatgatgttatctgacaactttagcattgataaggaaacccgtaggaaagacttttattctccagagaatgaacttcaaaggagatggtttttccaacattacaagggtacaaacagaaaatagatccaagacaagttctacgaatttgtcgaaagagtcaaaattaatgtccttttctttgattggtttcatgcttataccatcagaaaggatatagattaccctaggaaacaagatatcataggtgatccaacaacaaatgtcataacaaattggaaacaagatatcatagatgaaattcttcccctatatcttgtcctagaggaatactattttctagtattttgattatatagtcaaaattatgtttgtcttcaattgtttcaggaatgtacaacttatcctgagggatttctggaatgttccaatcatccatattttgatttatgtcttcgaatcggacttcctcatcgaagagattgtattttggtacgacctcgtggatctggttatcttgttcattgagtaacttattggttgaattcattgaagaagaggatgaagatgagtttgatctaaaagaaatgcgagagaaagaacgtaaaaggtgagacatattggattcatcctctagtatctttgtcgtcatatggttccatagaaatgtttccataaggttatatgttactgaacttcttggatctgaaaaataaagaagatttttttttccggacaatatagtttgaacactactcctatagccaccagtatattatgtcttaatattttatttgaacaatacacctttgccttactgccctttctcatccacgaaacttactgctacagtatcattcaactaaaatatcagactgttgtgcttctagaaaatattgttcaaacatatattgtttaaaataaaattattgtacatagttcagatccatgaattcagttaacata

SEQ ID NO: 10699 - DNA, 1139 bp, Glycine max
  Gm_smallRNAprecursor_3532
tgttgtgcttctagaaaatattgttcaaacatatattgtttaaaataaaattattgtacatagttcagatccatgaattcagttaacatatgcccctacggacattattcctacttccccatcgagctttgataccagagatcagcggagaagaacctaacggacaaataggaagtaagaatgcagtatgataaacggagattgaaatgtaaacttttcaaaacaggtatcaagggcacaccgaagaccggcttacaaatcccaggttttcataaataaagaaatcgaagcggcggcatagccgcacaagatcggtacaagagggagaggggagacgtatgagaaatagaaatttattaacacttgaaagaagcggttacaaaagtttttctttcagagcaactcctctcagaaacctgaaaaatggccaaatgaaaaggtgtctcacaatatggttgaggactccttatatagccaaaattctttgaccggtagttttgaccggaactatttgactgtttcttacagaacaattagttttgaccgggacttatttgctacaggacaggtagtattgtccgaaattaccaattaattaacaacaaccgaaactaattaatcatcttctaatgagatgccaaaacaatcatcctcattctggtagaaaggatcatcatcttggtcatcaatgtcttctaaagattcggcatgcttcttttaaaattcctctttttcttcttgttgaagtagctggagaacttccttaaggttctgggaaaggctttctttggattttgaactggccaagaacgccgcaagctaagatttctgattcagaaataatgatgtttctggatcagtaggtttgagaaattcggggtgactctggaaccagttcttgacttggctcggagcggcctttgaggtatcaaattgtctccaccattttacaaaagcatgtctctgcaaaggttgatattgcttcttgttttcagttttcccatacttgtattgccatgaaaagatccatgacaaagcaaagctggaaaaatacattagatcggctggaattcttgattcctggttgttgaacaatctattgaactgttgaaatccttgttggacttcttctggaaaga

SEQ ID NO: 10700 - DNA, 1162 bp, Glycine max
  Gm_smallRNAprecursor_3533
ttattaattattttgttctagaaacaatggccctattcgacacaggggctgactcaaactgtattttagaaggattaattcctacaaaattctttgagaaaacctcggagaaacttagtacaacaaacggctcaaaattaaaaattaattttaaattatcaaatgcaattattgaaaaccaaggtcttaggattaacacaaactttcttctggtaaaaaaccttaaaaacgaaataatcctaggaactcccttcataaaagctttatttcccatccaaatatctaatgaaggaataactacaagttatttaggaaggaaaattatatttaatttttctactaaaccaatctccagaaatataaatcttatagaaaataatattaaccaaattaacttcttaaaagaagaagtatcgtttaataatatccaagtacaactaggaaaaccccaaataaaggagaaaatccaatctttattaagtcatatagaatcaactttttgttctgaattgccacatgcattttgggacagaaagaaacatattgttgatcttccttatgagaaaggttttagggaaaaacaaattcccacaaaagctagaccaatccaaatgaatgaagaactccttcaatattgccaaaaggaaattaaagatttacttgataaaggtttaattcggaaaagtagaagtccatggtcttgtgcggctttttaggtcaacaaacaatccgagattgagcgaggaacaccccgcttagtcataaattacaaaccgttaaatcaagcattacaatggatcaggtatcctattccaaataaaaaagacatacttaacagattaaattctgcaaaggtattttcaaaatttgacatgaaatccggattctggcaaatccaaatccaagaatcagataggtacaaaacggcgtttactgtacctttcgggcaatatgagtggaatgtaatgccattcggactgaagaatgccccttcagaatttcaaaaaatcatgaatgatattttcaatccttattcaaaattcgtcattgtttacatttatgatgttttaatcttctcccaagatattgatcaacatttcaaaaacctctagactttcatccatatcattaaacagaatggtttggcagtctccaaatcaaa

SEQ ID NO: 10701 - DNA, 1139 bp, Glycine max
  Gm_smallRNAprecursor_3534
aagctagaccaatccaaatgaatgaagaactccttcaatattgccaaaaggaaattaaagatttacttgataaaggtttaattcggaaaagtagaagtccatggtcttgtgcggctttttaggtcaacaaacaatccgagattgagcgaggaacaccccgcttagtcataaattacaaaccgttaaatcaagcattacaatggatcaggtatcctattccaaataaaaaagacatacttaacagattaaattctgcaaaggtattttcaaaatttgacatgaaatccggattctggcaaatccaaatccaagaatcagataggtacaaaacggcgtttactgtacctttcgggcaatatgagtggaatgtaatgccattcggactgaagaatgccccttcagaatttcaaaaaatcatgaatgatattttcaatccttattcaaaattcgtcattgtttacatttatgatgttttaatcttctcccaagatattgatcaacatttcaaaaacctctagactttcatccatatcattaaacagaatggtttggcagtctccaaatcaaagatcaatcttttccagacacggatacgattccttggacacaatatataccaaggtacaatcatcccaatagaaagatcaatagagtttgctagcaaattccctaaccaaatcttggataagacccagttacaacgatttctggggtgcctaaattatgtaggagaatatgtcccctatctaaacaatattgtcaaaccattacatgataggctgaaaaagaatctgcctccttggtctgacctccatactcaaacagttaaagaaatcaaagtcaaagtccaatctataaaatgtttgcatcttaccattccacgggcattcaaaattgtcgaaactgatgcatcagacatcggttatggtggcatcctcaaacaacaagtacatggtcaagaacatgtcattgcatatacttcaaaacattggaatcctgcacaattaaaatattcaactgttaaaaaagaatttttagcaattgttttaagcatttccaaatttcaatctgatttattgaatcaaaaaattttagtaagggttgactgcaaatcagccaaagacattttacaaaaggat

SEQ ID NO: 10702 - DNA, 1032 bp, Glycine max
  Gm_smallRNAprecursor_3535
gccccttcagaatttcaaaaaatcatgaatgatattttcaatccttattcaaaattcgtcattgtttacatttatgatgttttaatcttctcccaagatattgatcaacatttcaaaaacctctagactttcatccatatcattaaacagaatggtttggcagtctccaaatcaaagatcaatcttttccagacacggatacgattccttggacacaatatataccaaggtacaatcatcccaatagaaagatcaatagagtttgctagcaaattccctaaccaaatcttggataagacccagttacaacgatttctggggtgcctaaattatgtaggagaatatgtcccctatctaaacaatattgtcaaaccattacatgataggctgaaaaagaatctgcctccttggtctgacctccatactcaaacagttaaagaaatcaaagtcaaagtccaatctataaaatgtttgcatcttaccattccacgggcattcaaaattgtcgaaactgatgcatcagacatcggttatggtggcatcctcaaacaacaagtacatggtcaagaacatgtcattgcatatacttcaaaacattggaatcctgcacaattaaaatattcaactgttaaaaaagaatttttagcaattgttttaagcatttccaaatttcaatctgatttattgaatcaaaaaattttagtaagggttgactgcaaatcagccaaagacattttacaaaaggatgtcaaaaaccttgcctcaaaacaaatttttgcaagatggcaagcaattttaagcgtctttgattttaacatagaatatatcaagggctcttcaaactctctacctgactacctcacccgtgaatttttacagaaaattctcgatgcctcctaaggtgtctagctcctccggaagaggaggaagatccagtactaaaggaaaagatgttctattggctctaccagagccaataaccaagaaggcaactgtgtcatcttctgggtcacctacccagactgggtcatc

SEQ ID NO: 10703 - DNA, 1067 bp, Glycine max
  Gm_smallRNAprecursor_3536
caggaatccccaaaaccaacaacaacaaaacagaccgtggctgactatgcctggtcaatacaaactctcctggccttagaagacataggcctcaccagagtaccaacattggccaaaaagacctgggcagaaatggcctcagaatcagacgatgattctgaaacagacctgcaaaaacaaattcaaaaagccaaacagaccaaaactgtctgtaaccaaaaaccaagccaaccgttgactcaacgagaatcaacaccacaacccagcaacagctatatttcaaaaaacaaattcttcaatgtcttacaaatggaaccagaatattgggacaagaatcctttcaaggcaaccgccaaagtattccccccgggatttcattataggccaacagccacaaacaaaaccagaaaattctatgaattcattctaatagatacaaacttcgtatctattaaacatttcaaggaccccaaagatccaaatctaaacacccactccacaatccagatcctaaaggtgatgcagccacgacattatggctcaaacttaaaccaacccaaaaaattttctgcaccttttgaccctgcaggatataattattgggattacattgacgcctggaccaatgtgttctggcatcaaaatagtaaattcaagcattcatggctaatttacttcaaaaataacaccgtgtataattttccaaattggttcctccaatggtggaactacttcggaccaattccacagatatttccagaagaagtccaacagggattccaacaattcagcaagctcttcaacagcaaggaatcaagaattccgacagacttaaaatacttttccagttttgccatgtcatggattttttcatggcaatacagatatggaaaaaccgaaaatagcaagcagtatccaccgttgcagagacacgcctttgtaaaatggtggtcacaattcgatacctcaaatgctgctccagaacaagtcaagaactggtttcagagcaaccctgagtttctcaaacctgctgatccagagacatctttgtttctgaatcagaagtc

SEQ ID NO: 10704 - DNA, 1063 bp, Glycine max
  Gm_smallRNAprecursor_3537
ggaatccccaaaaccaacaacaacaaaacagaccgtggctgactatgcctggtcaatacaaactctcctggccttagaagacataggcctcaccagagtaccaacattggccaaaaagacctgggcagaaatggcctcagaatcagacgatgattctgaaacagacctgcaaaaacaaattcaaaaagccaaacagaccaaaactgtctgtaaccaaaaaccaagccaaccgttgactcaacgagaatcaacaccacaacccagcaacagctatatttcaaaaaacaaattcttcaatgtcttacaaatggaaccagaatattgggacaagaatcctttcaaggcaaccgccaaagtattccccccgggatttcattataggccaacagccacaaacaaaaccagaaaattctatgaattcattctaatagatacaaacttcgtatctattaaacatttcaaggaccccaaagatccaaatctaaacacccactccacaatccagatcctaaaggtgatgcagccacgacattatggctcaaacttaaaccaacccaaaaaattttctgcaccttttgaccctgcaggatataattattgggattacattgacgcctggaccaatgtgttctggcatcaaaatagtaaattcaagcattcatggctaatttacttcaaaaataacaccgtgtataattttccaaattggttcctccaatggtggaactacttcggaccaattccacagatatttccagaagaagtccaacagggattccaacaattcagcaagctcttcaacagcaaggaatcaagaattccgacagacttaaaatacttttccagttttgccatgtcatggattttttcatggcaatacagatatggaaaaaccgaaaatagcaagcagtatccaccgttgcagagacacgcctttgtaaaatggtggtcacaattcgatacctcaaatgctgctccagaacaagtcaagaactggtttcagagcaaccctgagtttctcaaacctgctgatccagagacatctttgtttctgaatcagaag

SEQ ID NO: 10705 - DNA, 1122 bp, Glycine max
  Gm_smallRNAprecursor_3538
agacataggcctcaccagagtaccaacattggccaaaaagacctgggcagaaatggcctcagaatcagacgatgattctgaaacagacctgcaaaaacaaattcaaaaagccaaacagaccaaaactgtctgtaaccaaaaaccaagccaaccgttgactcaacgagaatcaacaccacaacccagcaacagctatatttcaaaaaacaaattcttcaatgtcttacaaatggaaccagaatattgggacaagaatcctttcaaggcaaccgccaaagtattccccccgggatttcattataggccaacagccacaaacaaaaccagaaaattctatgaattcattctaatagatacaaacttcgtatctattaaacatttcaaggaccccaaagatccaaatctaaacacccactccacaatccagatcctaaaggtgatgcagccacgacattatggctcaaacttaaaccaacccaaaaaattttctgcaccttttgaccctgcaggatataattattgggattacattgacgcctggaccaatgtgttctggcatcaaaatagtaaattcaagcattcatggctaatttacttcaaaaataacaccgtgtataattttccaaattggttcctccaatggtggaactacttcggaccaattccacagatatttccagaagaagtccaacagggattccaacaattcagcaagctcttcaacagcaaggaatcaagaattccgacagacttaaaatacttttccagttttgccatgtcatggattttttcatggcaatacagatatggaaaaaccgaaaatagcaagcagtatccaccgttgcagagacacgcctttgtaaaatggtggtcacaattcgatacctcaaatgctgctccagaacaagtcaagaactggtttcagagcaaccctgagtttctcaaacctgctgatccagagacatctttgtttctgaatcagaagtctcaacttgcagcattcttggcaagctcaaaatctaaagaaagtcttgctcagaatcttaaggaagttctccaactacttcaacaggaagaagaagaagaaccccccaagaaggaagccgaatcatccgaaaataa

SEQ ID NO: 10706 - DNA, 1071 bp, Glycine max
  Gm_smallRNAprecursor_3539
caaacagaccaaaactgtctgtaaccaaaaaccaagccaaccgttgactcaacgagaatcaacaccacaacccagcaacagctatatttcaaaaaacaaattcttcaatgtcttacaaatggaaccagaatattgggacaagaatcctttcaaggcaaccgccaaagtattccccccgggatttcattataggccaacagccacaaacaaaaccagaaaattctatgaattcattctaatagatacaaacttcgtatctattaaacatttcaaggaccccaaagatccaaatctaaacacccactccacaatccagatcctaaaggtgatgcagccacgacattatggctcaaacttaaaccaacccaaaaaattttctgcaccttttgaccctgcaggatataattattgggattacattgacgcctggaccaatgtgttctggcatcaaaatagtaaattcaagcattcatggctaatttacttcaaaaataacaccgtgtataattttccaaattggttcctccaatggtggaactacttcggaccaattccacagatatttccagaagaagtccaacagggattccaacaattcagcaagctcttcaacagcaaggaatcaagaattccgacagacttaaaatacttttccagttttgccatgtcatggattttttcatggcaatacagatatggaaaaaccgaaaatagcaagcagtatccaccgttgcagagacacgcctttgtaaaatggtggtcacaattcgatacctcaaatgctgctccagaacaagtcaagaactggtttcagagcaaccctgagtttctcaaacctgctgatccagagacatctttgtttctgaatcagaagtctcaacttgcagcattcttggcaagctcaaaatctaaagaaagtcttgctcagaatcttaaggaagttctccaactacttcaacaggaagaagaagaagaaccccccaagaaggaagccgaatcatccgaaaataatgatgaccaagaagatgatccattctaccagaatgaggatgactgttttggtatatcgtt

SEQ ID NO: 10707 - DNA, 1069 bp, Glycine max
  Gm_smallRNAprecursor_3540
atttcaaaaaacaaattcttcaatgtcttacaaatggaaccagaatattgggacaagaatcctttcaaggcaaccgccaaagtattccccccgggatttcattataggccaacagccacaaacaaaaccagaaaattctatgaattcattctaatagatacaaacttcgtatctattaaacatttcaaggaccccaaagatccaaatctaaacacccactccacaatccagatcctaaaggtgatgcagccacgacattatggctcaaacttaaaccaacccaaaaaattttctgcaccttttgaccctgcaggatataattattgggattacattgacgcctggaccaatgtgttctggcatcaaaatagtaaattcaagcattcatggctaatttacttcaaaaataacaccgtgtataattttccaaattggttcctccaatggtggaactacttcggaccaattccacagatatttccagaagaagtccaacagggattccaacaattcagcaagctcttcaacagcaaggaatcaagaattccgacagacttaaaatacttttccagttttgccatgtcatggattttttcatggcaatacagatatggaaaaaccgaaaatagcaagcagtatccaccgttgcagagacacgcctttgtaaaatggtggtcacaattcgatacctcaaatgctgctccagaacaagtcaagaactggtttcagagcaaccctgagtttctcaaacctgctgatccagagacatctttgtttctgaatcagaagtctcaacttgcagcattcttggcaagctcaaaatctaaagaaagtcttgctcagaatcttaaggaagttctccaactacttcaacaggaagaagaagaagaaccccccaagaaggaagccgaatcatccgaaaataatgatgaccaagaagatgatccattctaccagaatgaggatgactgttttggtatatcgttagacgatgattagttagttgtagtaataatgaattattgtaactaattactcggtacctgataataatgtaatgtgtaaaaag

SEQ ID NO: 10708 - DNA, 1136 bp, Glycine max
  Gm_smallRNAprecursor_3541
aaggcaaccgccaaagtattccccccgggatttcattataggccaacagccacaaacaaaaccagaaaattctatgaattcattctaatagatacaaacttcgtatctattaaacatttcaaggaccccaaagatccaaatctaaacacccactccacaatccagatcctaaaggtgatgcagccacgacattatggctcaaacttaaaccaacccaaaaaattttctgcaccttttgaccctgcaggatataattattgggattacattgacgcctggaccaatgtgttctggcatcaaaatagtaaattcaagcattcatggctaatttacttcaaaaataacaccgtgtataattttccaaattggttcctccaatggtggaactacttcggaccaattccacagatatttccagaagaagtccaacagggattccaacaattcagcaagctcttcaacagcaaggaatcaagaattccgacagacttaaaatacttttccagttttgccatgtcatggattttttcatggcaatacagatatggaaaaaccgaaaatagcaagcagtatccaccgttgcagagacacgcctttgtaaaatggtggtcacaattcgatacctcaaatgctgctccagaacaagtcaagaactggtttcagagcaaccctgagtttctcaaacctgctgatccagagacatctttgtttctgaatcagaagtctcaacttgcagcattcttggcaagctcaaaatctaaagaaagtcttgctcagaatcttaaggaagttctccaactacttcaacaggaagaagaagaagaaccccccaagaaggaagccgaatcatccgaaaataatgatgaccaagaagatgatccattctaccagaatgaggatgactgttttggtatatcgttagacgatgattagttagttgtagtaataatgaattattgtaactaattactcggtacctgataataatgtaatgtgtaaaaagtttttgtaacagttccggtaaacattaccgacactatagatacagtaaaatcttgggaagaatgaaagatatcaatcaaaacatagatgactggaacatcccagaaaacatggatgacccaagaggtcgcccc

SEQ ID NO: 10709 - DNA, 1201 bp, Glycine max
  Gm_smallRNAprecursor_3542
ggcaaccgccaaagtattccccccgggatttcattataggccaacagccacaaacaaaaccagaaaattctatgaattcattctaatagatacaaacttcgtatctattaaacatttcaaggaccccaaagatccaaatctaaacacccactccacaatccagatcctaaaggtgatgcagccacgacattatggctcaaacttaaaccaacccaaaaaattttctgcaccttttgaccctgcaggatataattattgggattacattgacgcctggaccaatgtgttctggcatcaaaatagtaaattcaagcattcatggctaatttacttcaaaaataacaccgtgtataattttccaaattggttcctccaatggtggaactacttcggaccaattccacagatatttccagaagaagtccaacagggattccaacaattcagcaagctcttcaacagcaaggaatcaagaattccgacagacttaaaatacttttccagttttgccatgtcatggattttttcatggcaatacagatatggaaaaaccgaaaatagcaagcagtatccaccgttgcagagacacgcctttgtaaaatggtggtcacaattcgatacctcaaatgctgctccagaacaagtcaagaactggtttcagagcaaccctgagtttctcaaacctgctgatccagagacatctttgtttctgaatcagaagtctcaacttgcagcattcttggcaagctcaaaatctaaagaaagtcttgctcagaatcttaaggaagttctccaactacttcaacaggaagaagaagaagaaccccccaagaaggaagccgaatcatccgaaaataatgatgaccaagaagatgatccattctaccagaatgaggatgactgttttggtatatcgttagacgatgattagttagttgtagtaataatgaattattgtaactaattactcggtacctgataataatgtaatgtgtaaaaagtttttgtaacagttccggtaaacattaccgacactatagatacagtaaaatcttgggaagaatgaaagatatcaatcaaaacatagatgactggaacatcccagaaaacatggatgacccaagaggtcgcccctaaacacaatctcttcgatgaggaagtccgattcgaagatatcaatcaaaacatggatgactggaac

SEQ ID NO: 10710 - DNA, 1053 bp, Glycine max
  Gm_smallRNAprecursor_3543
atgaattcattctaatagatacaaacttcgtatctattaaacatttcaaggaccccaaagatccaaatctaaacacccactccacaatccagatcctaaaggtgatgcagccacgacattatggctcaaacttaaaccaacccaaaaaattttctgcaccttttgaccctgcaggatataattattgggattacattgacgcctggaccaatgtgttctggcatcaaaatagtaaattcaagcattcatggctaatttacttcaaaaataacaccgtgtataattttccaaattggttcctccaatggtggaactacttcggaccaattccacagatatttccagaagaagtccaacagggattccaacaattcagcaagctcttcaacagcaaggaatcaagaattccgacagacttaaaatacttttccagttttgccatgtcatggattttttcatggcaatacagatatggaaaaaccgaaaatagcaagcagtatccaccgttgcagagacacgcctttgtaaaatggtggtcacaattcgatacctcaaatgctgctccagaacaagtcaagaactggtttcagagcaaccctgagtttctcaaacctgctgatccagagacatctttgtttctgaatcagaagtctcaacttgcagcattcttggcaagctcaaaatctaaagaaagtcttgctcagaatcttaaggaagttctccaactacttcaacaggaagaagaagaagaaccccccaagaaggaagccgaatcatccgaaaataatgatgaccaagaagatgatccattctaccagaatgaggatgactgttttggtatatcgttagacgatgattagttagttgtagtaataatgaattattgtaactaattactcggtacctgataataatgtaatgtgtaaaaagtttttgtaacagttccggtaaacattaccgacactatagatacagtaaaatcttgggaagaatgaaagatatcaatcaaaacatagatgactggaacatcccagaaaacatggatgacccaag

SEQ ID NO: 10711 - DNA, 1063 bp, Glycine max
  Gm_smallRNAprecursor_3544
atgaattcattctaatagatacaaacttcgtatctattaaacatttcaaggaccccaaagatccaaatctaaacacccactccacaatccagatcctaaaggtgatgcagccacgacattatggctcaaacttaaaccaacccaaaaaattttctgcaccttttgaccctgcaggatataattattgggattacattgacgcctggaccaatgtgttctggcatcaaaatagtaaattcaagcattcatggctaatttacttcaaaaataacaccgtgtataattttccaaattggttcctccaatggtggaactacttcggaccaattccacagatatttccagaagaagtccaacagggattccaacaattcagcaagctcttcaacagcaaggaatcaagaattccgacagacttaaaatacttttccagttttgccatgtcatggattttttcatggcaatacagatatggaaaaaccgaaaatagcaagcagtatccaccgttgcagagacacgcctttgtaaaatggtggtcacaattcgatacctcaaatgctgctccagaacaagtcaagaactggtttcagagcaaccctgagtttctcaaacctgctgatccagagacatctttgtttctgaatcagaagtctcaacttgcagcattcttggcaagctcaaaatctaaagaaagtcttgctcagaatcttaaggaagttctccaactacttcaacaggaagaagaagaagaaccccccaagaaggaagccgaatcatccgaaaataatgatgaccaagaagatgatccattctaccagaatgaggatgactgttttggtatatcgttagacgatgattagttagttgtagtaataatgaattattgtaactaattactcggtacctgataataatgtaatgtgtaaaaagtttttgtaacagttccggtaaacattaccgacactatagatacagtaaaatcttgggaagaatgaaagatatcaatcaaaacatagatgactggaacatcccagaaaacatggatgacccaagaggtcgcccc

SEQ ID NO: 10712 - DNA, 1051 bp, Glycine max
  Gm_smallRNAprecursor_3545
gaattcattctaatagatacaaacttcgtatctattaaacatttcaaggaccccaaagatccaaatctaaacacccactccacaatccagatcctaaaggtgatgcagccacgacattatggctcaaacttaaaccaacccaaaaaattttctgcaccttttgaccctgcaggatataattattgggattacattgacgcctggaccaatgtgttctggcatcaaaatagtaaattcaagcattcatggctaatttacttcaaaaataacaccgtgtataattttccaaattggttcctccaatggtggaactacttcggaccaattccacagatatttccagaagaagtccaacagggattccaacaattcagcaagctcttcaacagcaaggaatcaagaattccgacagacttaaaatacttttccagttttgccatgtcatggattttttcatggcaatacagatatggaaaaaccgaaaatagcaagcagtatccaccgttgcagagacacgcctttgtaaaatggtggtcacaattcgatacctcaaatgctgctccagaacaagtcaagaactggtttcagagcaaccctgagtttctcaaacctgctgatccagagacatctttgtttctgaatcagaagtctcaacttgcagcattcttggcaagctcaaaatctaaagaaagtcttgctcagaatcttaaggaagttctccaactacttcaacaggaagaagaagaagaaccccccaagaaggaagccgaatcatccgaaaataatgatgaccaagaagatgatccattctaccagaatgaggatgactgttttggtatatcgttagacgatgattagttagttgtagtaataatgaattattgtaactaattactcggtacctgataataatgtaatgtgtaaaaagtttttgtaacagttccggtaaacattaccgacactatagatacagtaaaatcttgggaagaatgaaagatatcaatcaaaacatagatgactggaacatcccagaaaacatggatgacccaag

SEQ ID NO: 10713 - DNA, 1157 bp, Glycine max
  Gm_smallRNAprecursor_3546
gatccaaatctaaacacccactccacaatccagatcctaaaggtgatgcagccacgacattatggctcaaacttaaaccaacccaaaaaattttctgcaccttttgaccctgcaggatataattattgggattacattgacgcctggaccaatgtgttctggcatcaaaatagtaaattcaagcattcatggctaatttacttcaaaaataacaccgtgtataattttccaaattggttcctccaatggtggaactacttcggaccaattccacagatatttccagaagaagtccaacagggattccaacaattcagcaagctcttcaacagcaaggaatcaagaattccgacagacttaaaatacttttccagttttgccatgtcatggattttttcatggcaatacagatatggaaaaaccgaaaatagcaagcagtatccaccgttgcagagacacgcctttgtaaaatggtggtcacaattcgatacctcaaatgctgctccagaacaagtcaagaactggtttcagagcaaccctgagtttctcaaacctgctgatccagagacatctttgtttctgaatcagaagtctcaacttgcagcattcttggcaagctcaaaatctaaagaaagtcttgctcagaatcttaaggaagttctccaactacttcaacaggaagaagaagaagaaccccccaagaaggaagccgaatcatccgaaaataatgatgaccaagaagatgatccattctaccagaatgaggatgactgttttggtatatcgttagacgatgattagttagttgtagtaataatgaattattgtaactaattactcggtacctgataataatgtaatgtgtaaaaagtttttgtaacagttccggtaaacattaccgacactatagatacagtaaaatcttgggaagaatgaaagatatcaatcaaaacatagatgactggaacatcccagaaaacatggatgacccaagaggtcgcccctaaacacaatctcttcgatgaggaagtccgattcgaagatatcaatcaaaacatggatgactggaacatcccaaaaatccctcaggatgaactatacgttcctgaaacaatgaaagataaacacaactttgattacataatcaaaacagtaga

SEQ ID NO: 10714 - DNA, 1173 bp, Glycine max
  Gm_smallRNAprecursor_3547
ttggttcctccaatggtggaactacttcggaccaattccacagatatttccagaagaagtccaacagggattccaacaattcagcaagctcttcaacagcaaggaatcaagaattccgacagacttaaaatacttttccagttttgccatgtcatggattttttcatggcaatacagatatggaaaaaccgaaaatagcaagcagtatccaccgttgcagagacacgcctttgtaaaatggtggtcacaattcgatacctcaaatgctgctccagaacaagtcaagaactggtttcagagcaaccctgagtttctcaaacctgctgatccagagacatctttgtttctgaatcagaagtctcaacttgcagcattcttggcaagctcaaaatctaaagaaagtcttgctcagaatcttaaggaagttctccaactacttcaacaggaagaagaagaagaaccccccaagaaggaagccgaatcatccgaaaataatgatgaccaagaagatgatccattctaccagaatgaggatgactgttttggtatatcgttagacgatgattagttagttgtagtaataatgaattattgtaactaattactcggtacctgataataatgtaatgtgtaaaaagtttttgtaacagttccggtaaacattaccgacactatagatacagtaaaatcttgggaagaatgaaagatatcaatcaaaacatagatgactggaacatcccagaaaacatggatgacccaagaggtcgcccctaaacacaatctcttcgatgaggaagtccgattcgaagatatcaatcaaaacatggatgactggaacatcccaaaaatccctcaggatgaactatacgttcctgaaacaatgaaagataaacacaactttgattacataatcaaaacagtagaaaacaatactcctctagggcaagacataggggaagaattccatttactttcaaaaaattcaatttatgaacatagttgaaagtataaatatttacacatcggctatgtacaagtagccatcaagcccttaatagacattggcttttgtcatatccgtaataaacaaggttgtttctcccttttgtggttgcaacaggactctagaggcacaagtgttcatgaccttgtactggatcctatagattaaag

SEQ ID NO: 10715 - DNA, 1167 bp, Glycine max
  Gm_smallRNAprecursor_3548
atctactgtacaaattaaaatataatattactcatactatacaaggtttcagtttcagatccataaaatttgttaacatacgtccttacggacagtattcctacttccccatcaggctctgataccagagatcagtagaataagatcaaacggatagataggaagtaagaatgcagtatgataaatgaaaggaaaatataaacttgtaaaacagatatcaagggcacaccggaatccggcttacaaatcccaggttttcgaaaacaaagaaaccgaagtggcggcagagccacacaggatcggtgtaggttttcgaaaaccaagaaaccgaaacggcggcagagccgcacaggatcggtgaagggagaagggagatgtgaaaaatagaactttgaatttatttcaatcaaaagaaaagcttacaaagagtttttccctaggcagagcttctctctctaaaacctggttatgagactatttgaaagggtgcctcacaaagggaacgaggactcctttaaatagacccaagattttactgtatctaccgtgtcggtaatgtttaccagaactgttacaaaaactttttacaaattacattattatcgggtaccgagtaattagttacaataattcatgattactacaactaactaatcatcgtctaacgatataccaaaacagtcatcctcattctggtagaatggatcatcttcttggtcatcattattttcggatgattcggcttccttcttggggggttcttcttcttcttcctattgaagtagttggagaacttccttaagattctgagtaagactttctttagattttgagcttgccaaaaatgctacaagttgagacttctgattcagaaacaaagatgtctctggatcagcaggtttgagaaactcagggttgctctgaaaccagttcttgacttgttctggagcagcctttgaggtatcgaattgtgaccaccactttacaaaggtgtgtctctgcaatggtggatactgcttgctattttcggtttttccatatctgtattgccatgaaaaaatccatgacaaggaaaaactggaaaagtattttaagtctgtcggaattcttgattccttgttgttgaagagcttgctgaattgttggaatccctgttggacttcttct

SEQ ID NO: 10716 - DNA, 1187 bp, Glycine max
  Gm_smallRNAprecursor_3549
ggaaaatataaacttgtaaaacagatatcaagggcacaccggaatccggcttacaaatcccaggttttcgaaaacaaagaaaccgaagtggcggcagagccacacaggatcggtgtaggttttcgaaaaccaagaaaccgaaacggcggcagagccgcacaggatcggtgaagggagaagggagatgtgaaaaatagaactttgaatttatttcaatcaaaagaaaagcttacaaagagtttttccctaggcagagcttctctctctaaaacctggttatgagactatttgaaagggtgcctcacaaagggaacgaggactcctttaaatagacccaagattttactgtatctaccgtgtcggtaatgtttaccagaactgttacaaaaactttttacaaattacattattatcgggtaccgagtaattagttacaataattcatgattactacaactaactaatcatcgtctaacgatataccaaaacagtcatcctcattctggtagaatggatcatcttcttggtcatcattattttcggatgattcggcttccttcttggggggttcttcttcttcttcctattgaagtagttggagaacttccttaagattctgagtaagactttctttagattttgagcttgccaaaaatgctacaagttgagacttctgattcagaaacaaagatgtctctggatcagcaggtttgagaaactcagggttgctctgaaaccagttcttgacttgttctggagcagcctttgaggtatcgaattgtgaccaccactttacaaaggtgtgtctctgcaatggtggatactgcttgctattttcggtttttccatatctgtattgccatgaaaaaatccatgacaaggaaaaactggaaaagtattttaagtctgtcggaattcttgattccttgttgttgaagagcttgctgaattgttggaatccctgttggacttcttctggaaatatctgtggaattggtccgaagtagttccaccattggaggaaccaatttggaaaattatacacggtgttatttttgaagtaaattagccatgaatgcttgaatttactattttgatgccagaacacattggtccaggcgtcaatgtaatcccaataattatatcctgcagggtcaaaaggtgcagaaaattttttgggttggttt

SEQ ID NO: 10717 - DNA, 1184 bp, Glycine max
  Gm_smallRNAprecursor_3550
caactaactaatcatcgtctaacgatataccaaaacagtcatcctcattctggtagaatggatcatcttcttggtcatcattattttcggatgattcggcttccttcttggggggttcttcttcttcttcctattgaagtagttggagaacttccttaagattctgagtaagactttctttagattttgagcttgccaaaaatgctacaagttgagacttctgattcagaaacaaagatgtctctggatcagcaggtttgagaaactcagggttgctctgaaaccagttcttgacttgttctggagcagcctttgaggtatcgaattgtgaccaccactttacaaaggtgtgtctctgcaatggtggatactgcttgctattttcggtttttccatatctgtattgccatgaaaaaatccatgacaaggaaaaactggaaaagtattttaagtctgtcggaattcttgattccttgttgttgaagagcttgctgaattgttggaatccctgttggacttcttctggaaatatctgtggaattggtccgaagtagttccaccattggaggaaccaatttggaaaattatacacggtgttatttttgaagtaaattagccatgaatgcttgaatttactattttgatgccagaacacattggtccaggcgtcaatgtaatcccaataattatatcctgcagggtcaaaaggtgcagaaaattttttgggttggtttaagtttgagccataatgtcgtggctgcatcacctttaggatctggattgtggagtgggtgtttagatttggatctttggggtccttgaaatgtttaatagatacgaagtttgtatctattagaatgaattcatagaattttctggttttgtttgtggctgttggcctataatgaaatcccggggggaatactttggcggttgccttgaaaggattcttgtcccaatattctggttccatttgtaagacattgaagaatttgttttttgaaatatagctgttgctgggttgtggtgttgattctcgttgagtcaacggttggcttggtttttggttacagacagttttggtctgtttggctttttgaatttgtttttgcaggtctatttcagaatcatcgtctaattctgaggccatttctgcccaggtctttttggccaatgttggtact

SEQ ID NO: 10718 - DNA, 1075 bp, Glycine max
  Gm_smallRNAprecursor_3551
ggggattcctgagttgatgactcaggtttaatggtagttatctgggtcaatgacccttcaagctttcctttctgggttgatgacccagtctgggtaggtgacccagaagatgacgcagttgccttcttggttattggctctggtagagccaatagaacatcttttcctttagtactggatcttcctcctctgccggaggagctaaacaccttaggaggcatcgggaattttctataaaaattcacgggtgaggtagtcaggtagagagtttgaagagcccttgatatattctatgttaaaatcaaagacgcttaaaattgcttgccatcttgcaaaaatttgttttgaggcaaggtttttgacatccttttgtaaaatgtctttggctgatttgcagtcaacccttactaaaaaattttgattcaataaatcatattgaaatttggaaatgcacaaaacaattgctaaaacttctttttttaacagttaaatattttaattgtgcaggattccaatgttttgaagtatatgcaatgacatgttcttcaccatgtacttgctgtttgaggatgccaccataaccgatatctgatgcatcagtttcgacaattttgaatgcctgtggaatgggaagatacacacattttatggattggactttgactttgatttctttaactgtttgagtatggaggtcagaccaaggaggcggattctttttcaacctatcatgtaatggtttgacaatattgtttagataggggacaaattctcctacataatttaggcaccccagaaatcgttgtaactgggtcttatccaagatttggttagggaatttgctagcaaactctattgatctttctattgggatgattgtaccttggtatatattgtgtccaaggaatcgtatccgtgtctggaaaagattgatctttgatttggagactgccaaaccattctgtttaatgatatggatgaaagtctggaggtgtttgaaatgttgatcaatatctggggagaagattaaaacatcatcaatgtaaacaatgacgaattttgaataagaattgaa

SEQ ID NO: 10719 - DNA, 1144 bp, Glycine max
  Gm_smallRNAprecursor_3552
ctttgatttctttaactgtttgagtatggaggtcagaccaaggaggcggattctttttcaacctatcatgtaatggtttgacaatattgtttagataggggacaaattctcctacataatttaggcaccccagaaatcgttgtaactgggtcttatccaagatttggttagggaatttgctagcaaactctattgatctttctattgggatgattgtaccttggtatatattgtgtccaaggaatcgtatccgtgtctggaaaagattgatctttgatttggagactgccaaaccattctgtttaatgatatggatgaaagtctggaggtgtttgaaatgttgatcaatatctggggagaagattaaaacatcatcaatgtaaacaatgacgaattttgaataagaattgaaaatatcattcatgattttttgaaattctgaaggggcattcttcagtccgaatggcattacattccactcatattgcccgaaaggtacagtaaacgccgttttgtacctatctgattcttggatttggatttgccagcatccggatttcatgtcaaattttgaaaatacctttgcagaatttaatctgttaagtaggtcttttttatttggaataggatacctgatccattgtaatgcttgatttaacggtttgtaatttatgactaagcgtggtgttcctcgctcaatctcggattgtttgttgacataaaaagccgcacaagaccatggacttttacttttccgaattaaacctttatcaagtaaatctttaatttacttttggcaatattgaaggagttcttcattcatttggattggtctagcttttgtgggaattttttttccctaaaatatttctgataaggaagatcaacaatatgtttctttctgtcccaaaatgcatgtggcaattcagaacaaacagttgattctatatgacttaataaagattggattttctcctttatttggggttttcctagttgtacttggatattattaaacgatacttcttcttttaagaagttaatttggttaatcttattttctataagatttatatttctggagattggtttagtagaaaaattaaatataattttccttcctaaataacttgtagttattcct

SEQ ID NO: 10720 - DNA, 1080 bp, Glycine max
  Gm_smallRNAprecursor_3553
ggggtcagggatggaattaattgcttcaaacaagagatcttgttctcttgttagagtattaatttgcttatcatcatcatccgttgatgataattggtcatcttgttgaattaagtttagattttcgtcggaaaatacggaggatgaagtttcagtttcagtttcttcctctgaagtttctatgagtaaattgtttatttgttcttcgattgtgggttctaggttaaggttccttaatttttttctttagtctacaatacttactaatgtggccttgttttccacaattgtagcatgttatttttgattttattttttgcttaggattttctatttccttactagttgagggtttttgagagtatcttctttttgaaaatcttcttctattggctggtttatgatcctggatttctttcctagaggtttgtttcttcttttgttttgggcaggctggtaagccaaattattcacagaaggaacctaaatccttctttgtttgagctttttctttggctaattgcctctgaattttgtcatcctggcagatttttaaggctaccttttggacataggaaattaattggccatagcttaagttttcatatggaatgtctccattggcagattgactaagaaaacaattttaagagttttagtgcaaacaacatctatgaatggaacatagatgcacaaacggagtataatatcatgaatacactccaacatatgaccatggtagctacggcttaccaatcctcccatgaatgttcagaagaaaccattatagacatcttagtggcagagttttctggacaactgaaaggatggtgggataattatctcactaatgaggagaaataaaaaatttacagcgcagtcaaaacggatctcaacggaaaattcattactaatgatgatgataaagagaatcctgacgctgtcaataccttaatttttacaatagcacaaaattttattggagacccatccttatggaaagataggtctgcagaattattatcaaaccttaagtgtagaaccttagcagattttaggtggtacagagatactttccta

SEQ ID NO: 10721 - DNA, 1136 bp, Glycine max
  Gm_smallRNAprecursor_3554
ccaaaattcagataacacaactgagataggatcagtgtcagaaaagaatataaatccaattaattccaaacactggaaaacaccctccaaattatattatcaacgtccaactgcccttgaccttctattagaagaaagaggtgaaaacaattttaaaagttttagtgcaaataacatctatgaatggaacatagatgcacaaacggagtataacatcatgaatacactccaacatatgaccatggtagccacggcttaccaaacctcccatgaatgttcagaagaaacaattatagatatcttagtggcaggattttctggacaactaaaaggatggtgggataattatctcactaatgaggagaaataaaaaatttacagcgcagttaagacggatctcaatggaaaagtcattactaatgacgatgataaagagattcctgacgctgttaacacattaatttttacaatagcccaacatttcattggagacccatccttgtggaaagataggtctacaaaaatattatcaaatcttaagtgtagaaccttagcggatattaggttgtatagagatattttcctaactagggtttacacaagagaagatagtcaacaacctttttggaaagaaaaatttctagccggtcttcccagatcattaggagacaaggttagagataaaatccgtagtcaatctgccaatggagacattccatatgaaaacataagctatggtcaattaatttcctatgtccaaaaggtagccttaaaaatctgccaggacgacaaaattcagaggcaattagccaaagaaaaagctcaaacaaagagggatttaggttccttctgtgaacaatttggcttaccagcctgtccaaaacaaaagaaaaaacagacctctaggaaagaagcccaggatcataagccagccaatagaagaagattttcaaaacaaagatactctcaaaaacccgcaaccagtagagaaatggaaaatcctaaacaaaaaataaaataaaaaataacgtgctacaattgtggaaaacaaggccacattagcaaatattgtagactaaaaaagaagttaagaaaccttaacctagaacccgcaattgaagagcaaataaacaatt

SEQ ID NO: 10722 - DNA, 1080 bp, Glycine max
  Gm_smallRNAprecursor_3555
aatgatttcgttttagaaacaattgccctatttgacacaggggctgattcaaactgcattttagaaggatttattcctacaaaattctttgagaaaacctcagaaaaattaagtacggcaaacggctcaaaattaaaaattaattttaagctatcaaatgcaatcattgaaaaccaaggtcttaggattaacacaaactttcttctggtaaaaaccttaagaatgaagtaatcttaggaacgcccttcattagagccctgtttcccatccaaatatctaatgaaggaataaccacaaattatttaggaagaaaaattatatttaatttttctactaaaccaatttccagaaatataaatcttatagaaaataagattaatcaaattaacttcttaaaagaagaagtatcttttaataatattcagatacaactgggaaaaccccaagtaaaagaaagaattcaatctttattaaatcatattgaatcgaccgtttgttctgaattgccacatgcattttgggacagaaagaaagatattgtcgatctcccttatgagaaagactttagggaaaaacaaattcccacaaaagccagaccaatccaaaagaatgaagaacttcttcaatactgtcaaaaggaaatcaaggatttgcttgataaaggcctaatccggaaaagcaagagcccatggtcttgtgcggctttttatgtcaacaaacaatctgagattgagcgtggaacaccccgcttagtcataaattgcaaaccactaaatcaagcattacaatggattagatatcctattccaaacaaaaaagatttgcttaacaaattaaattctgcaaagatattttcaaaatttgatatgaaatctggattttggcaaatccaaatccaagaaccagataggtacaaaacagcgtttactgtacctttcgggcaatatgaatggaacgtaatgccattcggactgaagaatgccccttcagaatttcaaaaaattatgaatgatatttttaatccctattcaaaatttgtcattgtctacatagatgatgttttaatcttttcccaaaaca

SEQ ID NO: 10723 - DNA, 1198 bp, Glycine max
  Gm_smallRNAprecursor_3556
acagaaagaaagatattgtcgatctcccttatgagaaagactttagggaaaaacaaattcccacaaaagccagaccaatccaaaagaatgaagaacttcttcaatactgtcaaaaggaaatcaaggatttgcttgataaaggcctaatccggaaaagcaagagcccatggtcttgtgcggctttttatgtcaacaaacaatctgagattgagcgtggaacaccccgcttagtcataaattgcaaaccactaaatcaagcattacaatggattagatatcctattccaaacaaaaaagatttgcttaacaaattaaattctgcaaagatattttcaaaatttgatatgaaatctggattttggcaaatccaaatccaagaaccagataggtacaaaacagcgtttactgtacctttcgggcaatatgaatggaacgtaatgccattcggactgaagaatgccccttcagaatttcaaaaaattatgaatgatatttttaatccctattcaaaatttgtcattgtctacatagatgatgttttaatcttttcccaaaacattgaccaacatttcaaacatctccaaaccttcatccatatcatcaaacaaaatggtttggcagtctccaaatcaaaaatcaatcttttccaaacacgaattcgattccttggtcacaatatatatcaaggtacaatcattccaatcgaaaggtcaatagagtttgctagcaaattccccaaccaaatcttagacaaaacccagttacaaagatttctaggttgtctaaattacgtaggtgaatttgtcccctacttaaataatattgtcaagccattacatgatagactgaagaaaaatccgcctccttggtctgacctccatacacaaacagttaaagaaatcaaagtcaaagtccaatccattaaatgtctgtatcttcctattccacaggcattcaaaattgtcgaaactgatgcttcagacataggttatggtggcatcctcaaacaaagagtccatggccaagatcatgtcattgcatatacatcaaaacattggaatcctgcacaattaaaatattcaactgttaaaaaagaggttttagcaattgttttgtgcatttccaaatttcaatcggatttattaaaccaaaaatttttaatcagggttgattgtaaatcagccaaagatattttaca

SEQ ID NO: 10724 - DNA, 1234 bp, Glycine max
  Gm_smallRNAprecursor_3557
acagaaagaaagatattgtcgatctcccttatgagaaagactttagggaaaaacaaattcccacaaaagccagaccaatccaaaagaatgaagaacttcttcaatactgtcaaaaggaaatcaaggatttgcttgataaaggcctaatccggaaaagcaagagcccatggtcttgtgcggctttttatgtcaacaaacaatctgagattgagcgtggaacaccccgcttagtcataaattgcaaaccactaaatcaagcattacaatggattagatatcctattccaaacaaaaaagatttgcttaacaaattaaattctgcaaagatattttcaaaatttgatatgaaatctggattttggcaaatccaaatccaagaaccagataggtacaaaacagcgtttactgtacctttcgggcaatatgaatggaacgtaatgccattcggactgaagaatgccccttcagaatttcaaaaaattatgaatgatatttttaatccctattcaaaatttgtcattgtctacatagatgatgttttaatcttttcccaaaacattgaccaacatttcaaacatctccaaaccttcatccatatcatcaaacaaaatggtttggcagtctccaaatcaaaaatcaatcttttccaaacacgaattcgattccttggtcacaatatatatcaaggtacaatcattccaatcgaaaggtcaatagagtttgctagcaaattccccaaccaaatcttagacaaaacccagttacaaagatttctaggttgtctaaattacgtaggtgaatttgtcccctacttaaataatattgtcaagccattacatgatagactgaagaaaaatccgcctccttggtctgacctccatacacaaacagttaaagaaatcaaagtcaaagtccaatccattaaatgtctgtatcttcctattccacaggcattcaaaattgtcgaaactgatgcttcagacataggttatggtggcatcctcaaacaaagagtccatggccaagatcatgtcattgcatatacatcaaaacattggaatcctgcacaattaaaatattcaactgttaaaaaagaggttttagcaattgttttgtgcatttccaaatttcaatcggatttattaaaccaaaaatttttaatcagggttgattgtaaatcagccaaagatattttacagaaagatgttaaaaaccttgcctcaaaacaaatttt

SEQ ID NO: 10725 - DNA, 1128 bp, Glycine max
  Gm_smallRNAprecursor_3558
ttgtgcggctttttatgtcaacaaacaatctgagattgagcgtggaacaccccgcttagtcataaattgcaaaccactaaatcaagcattacaatggattagatatcctattccaaacaaaaaagatttgcttaacaaattaaattctgcaaagatattttcaaaatttgatatgaaatctggattttggcaaatccaaatccaagaaccagataggtacaaaacagcgtttactgtacctttcgggcaatatgaatggaacgtaatgccattcggactgaagaatgccccttcagaatttcaaaaaattatgaatgatatttttaatccctattcaaaatttgtcattgtctacatagatgatgttttaatcttttcccaaaacattgaccaacatttcaaacatctccaaaccttcatccatatcatcaaacaaaatggtttggcagtctccaaatcaaaaatcaatcttttccaaacacgaattcgattccttggtcacaatatatatcaaggtacaatcattccaatcgaaaggtcaatagagtttgctagcaaattccccaaccaaatcttagacaaaacccagttacaaagatttctaggttgtctaaattacgtaggtgaatttgtcccctacttaaataatattgtcaagccattacatgatagactgaagaaaaatccgcctccttggtctgacctccatacacaaacagttaaagaaatcaaagtcaaagtccaatccattaaatgtctgtatcttcctattccacaggcattcaaaattgtcgaaactgatgcttcagacataggttatggtggcatcctcaaacaaagagtccatggccaagatcatgtcattgcatatacatcaaaacattggaatcctgcacaattaaaatattcaactgttaaaaaagaggttttagcaattgttttgtgcatttccaaatttcaatcggatttattaaaccaaaaatttttaatcagggttgattgtaaatcagccaaagatattttacagaaagatgttaaaaaccttgcctcaaaacaaatttttgcacgatggcaagcaattttaagtgtctttgattttgacatagaatacatcaagggcacctcaaa

SEQ ID NO: 10726 - DNA, 1073 bp, Glycine max
  Gm_smallRNAprecursor_3559
tgtacctttcgggcaatatgaatggaacgtaatgccattcggactgaagaatgccccttcagaatttcaaaaaattatgaatgatatttttaatccctattcaaaatttgtcattgtctacatagatgatgttttaatcttttcccaaaacattgaccaacatttcaaacatctccaaaccttcatccatatcatcaaacaaaatggtttggcagtctccaaatcaaaaatcaatcttttccaaacacgaattcgattccttggtcacaatatatatcaaggtacaatcattccaatcgaaaggtcaatagagtttgctagcaaattccccaaccaaatcttagacaaaacccagttacaaagatttctaggttgtctaaattacgtaggtgaatttgtcccctacttaaataatattgtcaagccattacatgatagactgaagaaaaatccgcctccttggtctgacctccatacacaaacagttaaagaaatcaaagtcaaagtccaatccattaaatgtctgtatcttcctattccacaggcattcaaaattgtcgaaactgatgcttcagacataggttatggtggcatcctcaaacaaagagtccatggccaagatcatgtcattgcatatacatcaaaacattggaatcctgcacaattaaaatattcaactgttaaaaaagaggttttagcaattgttttgtgcatttccaaatttcaatcggatttattaaaccaaaaatttttaatcagggttgattgtaaatcagccaaagatattttacagaaagatgttaaaaaccttgcctcaaaacaaatttttgcacgatggcaagcaattttaagtgtctttgattttgacatagaatacatcaagggcacctcaaattcactacctgactaccttacccgtgaattcttacagaaaagtggtaatgcctcctaaggcatcgggaatctccctacggggaggaaggagtacaggcaaaggagccaggctggctcttccagagccaaccatcaagaaatcatctacctcatctgggtcaccaacccaggctgggtca

SEQ ID NO: 10727 - DNA, 1038 bp, Glycine max
  Gm_smallRNAprecursor_3560
tacctttcgggcaatatgaatggaacgtaatgccattcggactgaagaatgccccttcagaatttcaaaaaattatgaatgatatttttaatccctattcaaaatttgtcattgtctacatagatgatgttttaatcttttcccaaaacattgaccaacatttcaaacatctccaaaccttcatccatatcatcaaacaaaatggtttggcagtctccaaatcaaaaatcaatcttttccaaacacgaattcgattccttggtcacaatatatatcaaggtacaatcattccaatcgaaaggtcaatagagtttgctagcaaattccccaaccaaatcttagacaaaacccagttacaaagatttctaggttgtctaaattacgtaggtgaatttgtcccctacttaaataatattgtcaagccattacatgatagactgaagaaaaatccgcctccttggtctgacctccatacacaaacagttaaagaaatcaaagtcaaagtccaatccattaaatgtctgtatcttcctattccacaggcattcaaaattgtcgaaactgatgcttcagacataggttatggtggcatcctcaaacaaagagtccatggccaagatcatgtcattgcatatacatcaaaacattggaatcctgcacaattaaaatattcaactgttaaaaaagaggttttagcaattgttttgtgcatttccaaatttcaatcggatttattaaaccaaaaatttttaatcagggttgattgtaaatcagccaaagatattttacagaaagatgttaaaaaccttgcctcaaaacaaatttttgcacgatggcaagcaattttaagtgtctttgattttgacatagaatacatcaagggcacctcaaattcactacctgactaccttacccgtgaattcttacagaaaagtggtaatgcctcctaaggcatcgggaatctccctacggggaggaaggagtacaggcaaaggagccaggctggctcttccagagccaaccatcaagaaatcatct

SEQ ID NO: 10728 - DNA, 1071 bp, Glycine max
  Gm_smallRNAprecursor_3561
tacctttcgggcaatatgaatggaacgtaatgccattcggactgaagaatgccccttcagaatttcaaaaaattatgaatgatatttttaatccctattcaaaatttgtcattgtctacatagatgatgttttaatcttttcccaaaacattgaccaacatttcaaacatctccaaaccttcatccatatcatcaaacaaaatggtttggcagtctccaaatcaaaaatcaatcttttccaaacacgaattcgattccttggtcacaatatatatcaaggtacaatcattccaatcgaaaggtcaatagagtttgctagcaaattccccaaccaaatcttagacaaaacccagttacaaagatttctaggttgtctaaattacgtaggtgaatttgtcccctacttaaataatattgtcaagccattacatgatagactgaagaaaaatccgcctccttggtctgacctccatacacaaacagttaaagaaatcaaagtcaaagtccaatccattaaatgtctgtatcttcctattccacaggcattcaaaattgtcgaaactgatgcttcagacataggttatggtggcatcctcaaacaaagagtccatggccaagatcatgtcattgcatatacatcaaaacattggaatcctgcacaattaaaatattcaactgttaaaaaagaggttttagcaattgttttgtgcatttccaaatttcaatcggatttattaaaccaaaaatttttaatcagggttgattgtaaatcagccaaagatattttacagaaagatgttaaaaaccttgcctcaaaacaaatttttgcacgatggcaagcaattttaagtgtctttgattttgacatagaatacatcaagggcacctcaaattcactacctgactaccttacccgtgaattcttacagaaaagtggtaatgcctcctaaggcatcgggaatctccctacggggaggaaggagtacaggcaaaggagccaggctggctcttccagagccaaccatcaagaaatcatctacctcatctgggtcaccaacccaggctgggtca

SEQ ID NO: 10729 - DNA, 1036 bp, Glycine max
  Gm_smallRNAprecursor_3562
cctttcgggcaatatgaatggaacgtaatgccattcggactgaagaatgccccttcagaatttcaaaaaattatgaatgatatttttaatccctattcaaaatttgtcattgtctacatagatgatgttttaatcttttcccaaaacattgaccaacatttcaaacatctccaaaccttcatccatatcatcaaacaaaatggtttggcagtctccaaatcaaaaatcaatcttttccaaacacgaattcgattccttggtcacaatatatatcaaggtacaatcattccaatcgaaaggtcaatagagtttgctagcaaattccccaaccaaatcttagacaaaacccagttacaaagatttctaggttgtctaaattacgtaggtgaatttgtcccctacttaaataatattgtcaagccattacatgatagactgaagaaaaatccgcctccttggtctgacctccatacacaaacagttaaagaaatcaaagtcaaagtccaatccattaaatgtctgtatcttcctattccacaggcattcaaaattgtcgaaactgatgcttcagacataggttatggtggcatcctcaaacaaagagtccatggccaagatcatgtcattgcatatacatcaaaacattggaatcctgcacaattaaaatattcaactgttaaaaaagaggttttagcaattgttttgtgcatttccaaatttcaatcggatttattaaaccaaaaatttttaatcagggttgattgtaaatcagccaaagatattttacagaaagatgttaaaaaccttgcctcaaaacaaatttttgcacgatggcaagcaattttaagtgtctttgattttgacatagaatacatcaagggcacctcaaattcactacctgactaccttacccgtgaattcttacagaaaagtggtaatgcctcctaaggcatcgggaatctccctacggggaggaaggagtacaggcaaaggagccaggctggctcttccagagccaaccatcaagaaatcatct

SEQ ID NO: 10730 - DNA, 1044 bp, Glycine max
  Gm_smallRNAprecursor_3563
cctttcgggcaatatgaatggaacgtaatgccattcggactgaagaatgccccttcagaatttcaaaaaattatgaatgatatttttaatccctattcaaaatttgtcattgtctacatagatgatgttttaatcttttcccaaaacattgaccaacatttcaaacatctccaaaccttcatccatatcatcaaacaaaatggtttggcagtctccaaatcaaaaatcaatcttttccaaacacgaattcgattccttggtcacaatatatatcaaggtacaatcattccaatcgaaaggtcaatagagtttgctagcaaattccccaaccaaatcttagacaaaacccagttacaaagatttctaggttgtctaaattacgtaggtgaatttgtcccctacttaaataatattgtcaagccattacatgatagactgaagaaaaatccgcctccttggtctgacctccatacacaaacagttaaagaaatcaaagtcaaagtccaatccattaaatgtctgtatcttcctattccacaggcattcaaaattgtcgaaactgatgcttcagacataggttatggtggcatcctcaaacaaagagtccatggccaagatcatgtcattgcatatacatcaaaacattggaatcctgcacaattaaaatattcaactgttaaaaaagaggttttagcaattgttttgtgcatttccaaatttcaatcggatttattaaaccaaaaatttttaatcagggttgattgtaaatcagccaaagatattttacagaaagatgttaaaaaccttgcctcaaaacaaatttttgcacgatggcaagcaattttaagtgtctttgattttgacatagaatacatcaagggcacctcaaattcactacctgactaccttacccgtgaattcttacagaaaagtggtaatgcctcctaaggcatcgggaatctccctacggggaggaaggagtacaggcaaaggagccaggctggctcttccagagccaaccatcaagaaatcatctacctcatc

SEQ ID NO: 10731 - DNA, 1121 bp, Glycine max
  Gm_smallRNAprecursor_3564
gtaatgccattcggactgaagaatgccccttcagaatttcaaaaaattatgaatgatatttttaatccctattcaaaatttgtcattgtctacatagatgatgttttaatcttttcccaaaacattgaccaacatttcaaacatctccaaaccttcatccatatcatcaaacaaaatggtttggcagtctccaaatcaaaaatcaatcttttccaaacacgaattcgattccttggtcacaatatatatcaaggtacaatcattccaatcgaaaggtcaatagagtttgctagcaaattccccaaccaaatcttagacaaaacccagttacaaagatttctaggttgtctaaattacgtaggtgaatttgtcccctacttaaataatattgtcaagccattacatgatagactgaagaaaaatccgcctccttggtctgacctccatacacaaacagttaaagaaatcaaagtcaaagtccaatccattaaatgtctgtatcttcctattccacaggcattcaaaattgtcgaaactgatgcttcagacataggttatggtggcatcctcaaacaaagagtccatggccaagatcatgtcattgcatatacatcaaaacattggaatcctgcacaattaaaatattcaactgttaaaaaagaggttttagcaattgttttgtgcatttccaaatttcaatcggatttattaaaccaaaaatttttaatcagggttgattgtaaatcagccaaagatattttacagaaagatgttaaaaaccttgcctcaaaacaaatttttgcacgatggcaagcaattttaagtgtctttgattttgacatagaatacatcaagggcacctcaaattcactacctgactaccttacccgtgaattcttacagaaaagtggtaatgcctcctaaggcatcgggaatctccctacggggaggaaggagtacaggcaaaggagccaggctggctcttccagagccaaccatcaagaaatcatctacctcatctgggtcaccaacccaggctgggtcatctacccagaaaaccaatttagaagggtcatcaacccagattgcctcaatcaaacctgagccatccactcaggaat

SEQ ID NO: 10732 - DNA, 1122 bp, Glycine max
  Gm_smallRNAprecursor_3565
gtaatgccattcggactgaagaatgccccttcagaatttcaaaaaattatgaatgatatttttaatccctattcaaaatttgtcattgtctacatagatgatgttttaatcttttcccaaaacattgaccaacatttcaaacatctccaaaccttcatccatatcatcaaacaaaatggtttggcagtctccaaatcaaaaatcaatcttttccaaacacgaattcgattccttggtcacaatatatatcaaggtacaatcattccaatcgaaaggtcaatagagtttgctagcaaattccccaaccaaatcttagacaaaacccagttacaaagatttctaggttgtctaaattacgtaggtgaatttgtcccctacttaaataatattgtcaagccattacatgatagactgaagaaaaatccgcctccttggtctgacctccatacacaaacagttaaagaaatcaaagtcaaagtccaatccattaaatgtctgtatcttcctattccacaggcattcaaaattgtcgaaactgatgcttcagacataggttatggtggcatcctcaaacaaagagtccatggccaagatcatgtcattgcatatacatcaaaacattggaatcctgcacaattaaaatattcaactgttaaaaaagaggttttagcaattgttttgtgcatttccaaatttcaatcggatttattaaaccaaaaatttttaatcagggttgattgtaaatcagccaaagatattttacagaaagatgttaaaaaccttgcctcaaaacaaatttttgcacgatggcaagcaattttaagtgtctttgattttgacatagaatacatcaagggcacctcaaattcactacctgactaccttacccgtgaattcttacagaaaagtggtaatgcctcctaaggcatcgggaatctccctacggggaggaaggagtacaggcaaaggagccaggctggctcttccagagccaaccatcaagaaatcatctacctcatctgggtcaccaacccaggctgggtcatctacccagaaaaccaatttagaagggtcatcaacccagattgcctcaatcaaacctgagccatccactcaggaatc

SEQ ID NO: 10733 - DNA, 1115 bp, Glycine max
  Gm_smallRNAprecursor_3566
tcaatagagtttgctagcaaattccccaaccaaatcttagacaaaacccagttacaaagatttctaggttgtctaaattacgtaggtgaatttgtcccctacttaaataatattgtcaagccattacatgatagactgaagaaaaatccgcctccttggtctgacctccatacacaaacagttaaagaaatcaaagtcaaagtccaatccattaaatgtctgtatcttcctattccacaggcattcaaaattgtcgaaactgatgcttcagacataggttatggtggcatcctcaaacaaagagtccatggccaagatcatgtcattgcatatacatcaaaacattggaatcctgcacaattaaaatattcaactgttaaaaaagaggttttagcaattgttttgtgcatttccaaatttcaatcggatttattaaaccaaaaatttttaatcagggttgattgtaaatcagccaaagatattttacagaaagatgttaaaaaccttgcctcaaaacaaatttttgcacgatggcaagcaattttaagtgtctttgattttgacatagaatacatcaagggcacctcaaattcactacctgactaccttacccgtgaattcttacagaaaagtggtaatgcctcctaaggcatcgggaatctccctacggggaggaaggagtacaggcaaaggagccaggctggctcttccagagccaaccatcaagaaatcatctacctcatctgggtcaccaacccaggctgggtcatctacccagaaaaccaatttagaagggtcatcaacccagattgcctcaatcaaacctgagccatccactcaggaatctcccaaaccggcaaccgccaaacaaacatcggccgactatgcatggccaattgaaacccttcaggcccttcaagacatgggtctgaccaaatttccaaaaataatcaaaaaatcttgggcagacattgcctcagaatctgatgatgaatctgaatcaaatttacaaacaatgatccaaaatgcgtcaatgaccaaaacaaccaccaatactaaaggaaaactacctttagccaaagctcaaacaccacctaccaaacaaactaacaatt

SEQ ID NO: 10734 - DNA, 1174 bp, Glycine max
  Gm_smallRNAprecursor_3567
acaaagagtccatggccaagatcatgtcattgcatatacatcaaaacattggaatcctgcacaattaaaatattcaactgttaaaaaagaggttttagcaattgttttgtgcatttccaaatttcaatcggatttattaaaccaaaaatttttaatcagggttgattgtaaatcagccaaagatattttacagaaagatgttaaaaaccttgcctcaaaacaaatttttgcacgatggcaagcaattttaagtgtctttgattttgacatagaatacatcaagggcacctcaaattcactacctgactaccttacccgtgaattcttacagaaaagtggtaatgcctcctaaggcatcgggaatctccctacggggaggaaggagtacaggcaaaggagccaggctggctcttccagagccaaccatcaagaaatcatctacctcatctgggtcaccaacccaggctgggtcatctacccagaaaaccaatttagaagggtcatcaacccagattgcctcaatcaaacctgagccatccactcaggaatctcccaaaccggcaaccgccaaacaaacatcggccgactatgcatggccaattgaaacccttcaggcccttcaagacatgggtctgaccaaatttccaaaaataatcaaaaaatcttgggcagacattgcctcagaatctgatgatgaatctgaatcaaatttacaaacaatgatccaaaatgcgtcaatgaccaaaacaaccaccaatactaaaggaaaactacctttagccaaagctcaaacaccacctaccaaacaaactaacaattatatttataaaaataaattgttaactgttttgcagatggaacctgaattttgggacaaaaatcccttcaaggcgacggccaaggctttcccaccaggatttcactacaaaccaaccactatcctgaagacaagaactttttatgaattgattttggtagattcgaactcagtatctatcaaacatttcaaagatccaaaagaccaaaccttaaacacccactcaaccatccaaatactaaaagttcttcaaccaagacactttggttcggacttgaacaaaggaaagagattttcagttccatttgatccagtaggttatacctattgggattacgttgatgcttggactaaggt

SEQ ID NO: 10735 - DNA, 1173 bp, Glycine max
  Gm_smallRNAprecursor_3568
caaagagtccatggccaagatcatgtcattgcatatacatcaaaacattggaatcctgcacaattaaaatattcaactgttaaaaaagaggttttagcaattgttttgtgcatttccaaatttcaatcggatttattaaaccaaaaatttttaatcagggttgattgtaaatcagccaaagatattttacagaaagatgttaaaaaccttgcctcaaaacaaatttttgcacgatggcaagcaattttaagtgtctttgattttgacatagaatacatcaagggcacctcaaattcactacctgactaccttacccgtgaattcttacagaaaagtggtaatgcctcctaaggcatcgggaatctccctacggggaggaaggagtacaggcaaaggagccaggctggctcttccagagccaaccatcaagaaatcatctacctcatctgggtcaccaacccaggctgggtcatctacccagaaaaccaatttagaagggtcatcaacccagattgcctcaatcaaacctgagccatccactcaggaatctcccaaaccggcaaccgccaaacaaacatcggccgactatgcatggccaattgaaacccttcaggcccttcaagacatgggtctgaccaaatttccaaaaataatcaaaaaatcttgggcagacattgcctcagaatctgatgatgaatctgaatcaaatttacaaacaatgatccaaaatgcgtcaatgaccaaaacaaccaccaatactaaaggaaaactacctttagccaaagctcaaacaccacctaccaaacaaactaacaattatatttataaaaataaattgttaactgttttgcagatggaacctgaattttgggacaaaaatcccttcaaggcgacggccaaggctttcccaccaggatttcactacaaaccaaccactatcctgaagacaagaactttttatgaattgattttggtagattcgaactcagtatctatcaaacatttcaaagatccaaaagaccaaaccttaaacacccactcaaccatccaaatactaaaagttcttcaaccaagacactttggttcggacttgaacaaaggaaagagattttcagttccatttgatccagtaggttatacctattgggattacgttgatgcttggactaaggt

SEQ ID NO: 10736 - DNA, 1173 bp, Glycine max; identical to SEQ ID NO: 10735
  Gm_smallRNAprecursor_3569

SEQ ID NO: 10737 - DNA, 1050 bp, Glycine max
  Gm_smallRNAprecursor_3570
aggctgggtcatctacccagaaaaccaatttagaagggtcatcaacccagattgcctcaatcaaacctgagccatccactcaggaatctcccaaaccggcaaccgccaaacaaacatcggccgactatgcatggccaattgaaacccttcaggcccttcaagacatgggtctgaccaaatttccaaaaataatcaaaaaatcttgggcagacattgcctcagaatctgatgatgaatctgaatcaaatttacaaacaatgatccaaaatgcgtcaatgaccaaaacaaccaccaatactaaaggaaaactacctttagccaaagctcaaacaccacctaccaaacaaactaacaattatatttataaaaataaattgttaactgttttgcagatggaacctgaattttgggacaaaaatcccttcaaggcgacggccaaggctttcccaccaggatttcactacaaaccaaccactatcctgaagacaagaactttttatgaattgattttggtagattcgaactcagtatctatcaaacatttcaaagatccaaaagaccaaaccttaaacacccactcaaccatccaaatactaaaagttcttcaaccaagacactttggttcggacttgaacaaaggaaagagattttcagttccatttgatccagtaggttatacctattgggattacgttgatgcttggactaaggtgttttggcaccaaaatacccgcttcaaacattcatggctgatatatttcaagaccaacacaatttacaattttcccaattggtttttgcaatggtgggacttctttggaccaatcccagagatattcccagaaacggtccaacaaggattttcccaatttaagaaacaatacaattcgcaggaatcacgaattccagcagatcttaaatacttttcaagctttgcactgtcatggatattctcatggcaatatcgttacagcaagactgagaagacaaaccaatatccatcactacaaaggcacgcatttgtaaaatggtggacacaatttgactcat

SEQ ID NO: 10738 - DNA, 1076 bp, Glycine max
  Gm_smallRNAprecursor_3571
tctacccagaaaaccaatttagaagggtcatcaacccagattgcctcaatcaaacctgagccatccactcaggaatctcccaaaccggcaaccgccaaacaaacatcggccgactatgcatggccaattgaaacccttcaggcccttcaagacatgggtctgaccaaatttccaaaaataatcaaaaaatcttgggcagacattgcctcagaatctgatgatgaatctgaatcaaatttacaaacaatgatccaaaatgcgtcaatgaccaaaacaaccaccaatactaaaggaaaactacctttagccaaagctcaaacaccacctaccaaacaaactaacaattatatttataaaaataaattgttaactgttttgcagatggaacctgaattttgggacaaaaatcccttcaaggcgacggccaaggctttcccaccaggatttcactacaaaccaaccactatcctgaagacaagaactttttatgaattgattttggtagattcgaactcagtatctatcaaacatttcaaagatccaaaagaccaaaccttaaacacccactcaaccatccaaatactaaaagttcttcaaccaagacactttggttcggacttgaacaaaggaaagagattttcagttccatttgatccagtaggttatacctattgggattacgttgatgcttggactaaggtgttttggcaccaaaatacccgcttcaaacattcatggctgatatatttcaagaccaacacaatttacaattttcccaattggtttttgcaatggtgggacttctttggaccaatcccagagatattcccagaaacggtccaacaaggattttcccaatttaagaaacaatacaattcgcaggaatcacgaattccagcagatcttaaatacttttcaagctttgcactgtcatggatattctcatggcaatatcgttacagcaagactgagaagacaaaccaatatccatcactacaaaggcacgcatttgtaaaatggtggacacaatttgactcatccaaagcggatgcagaacaagtaaaactatggttcca

SEQ ID NO: 10739 - DNA, 1130 bp, Glycine max
  Gm_smallRNAprecursor_3572
caaacctgagccatccactcaggaatctcccaaaccggcaaccgccaaacaaacatcggccgactatgcatggccaattgaaacccttcaggcccttcaagacatgggtctgaccaaatttccaaaaataatcaaaaaatcttgggcagacattgcctcagaatctgatgatgaatctgaatcaaatttacaaacaatgatccaaaatgcgtcaatgaccaaaacaaccaccaatactaaaggaaaactacctttagccaaagctcaaacaccacctaccaaacaaactaacaattatatttataaaaataaattgttaactgttttgcagatggaacctgaattttgggacaaaaatcccttcaaggcgacggccaaggctttcccaccaggatttcactacaaaccaaccactatcctgaagacaagaactttttatgaattgattttggtagattcgaactcagtatctatcaaacatttcaaagatccaaaagaccaaaccttaaacacccactcaaccatccaaatactaaaagttcttcaaccaagacactttggttcggacttgaacaaaggaaagagattttcagttccatttgatccagtaggttatacctattgggattacgttgatgcttggactaaggtgttttggcaccaaaatacccgcttcaaacattcatggctgatatatttcaagaccaacacaatttacaattttcccaattggtttttgcaatggtgggacttctttggaccaatcccagagatattcccagaaacggtccaacaaggattttcccaatttaagaaacaatacaattcgcaggaatcacgaattccagcagatcttaaatacttttcaagctttgcactgtcatggatattctcatggcaatatcgttacagcaagactgagaagacaaaccaatatccatcactacaaaggcacgcatttgtaaaatggtggacacaatttgactcatccaaagcggatgcagaacaagtaaaactatggttccaatcccatccagaattcctcaaagcagctgatccagagacttctgtgtttttgaaccaaaagtctcatctggcagcatttttagcaggatcgacatcaaaggagg

SEQ ID NO: 10740 - DNA, 1124 bp, Glycine max
  Gm_smallRNAprecursor_3573
tgagccatccactcaggaatctcccaaaccggcaaccgccaaacaaacatcggccgactatgcatggccaattgaaacccttcaggcccttcaagacatgggtctgaccaaatttccaaaaataatcaaaaaatcttgggcagacattgcctcagaatctgatgatgaatctgaatcaaatttacaaacaatgatccaaaatgcgtcaatgaccaaaacaaccaccaatactaaaggaaaactacctttagccaaagctcaaacaccacctaccaaacaaactaacaattatatttataaaaataaattgttaactgttttgcagatggaacctgaattttgggacaaaaatcccttcaaggcgacggccaaggctttcccaccaggatttcactacaaaccaaccactatcctgaagacaagaactttttatgaattgattttggtagattcgaactcagtatctatcaaacatttcaaagatccaaaagaccaaaccttaaacacccactcaaccatccaaatactaaaagttcttcaaccaagacactttggttcggacttgaacaaaggaaagagattttcagttccatttgatccagtaggttatacctattgggattacgttgatgcttggactaaggtgttttggcaccaaaatacccgcttcaaacattcatggctgatatatttcaagaccaacacaatttacaattttcccaattggtttttgcaatggtgggacttctttggaccaatcccagagatattcccagaaacggtccaacaaggattttcccaatttaagaaacaatacaattcgcaggaatcacgaattccagcagatcttaaatacttttcaagctttgcactgtcatggatattctcatggcaatatcgttacagcaagactgagaagacaaaccaatatccatcactacaaaggcacgcatttgtaaaatggtggacacaatttgactcatccaaagcggatgcagaacaagtaaaactatggttccaatcccatccagaattcctcaaagcagctgatccagagacttctgtgtttttgaaccaaaagtctcatctggcagcatttttagcaggatcgacatcaaaggagg

SEQ ID NO: 10741 - DNA, 1157 bp, Glycine max
  Gm_smallRNAprecursor_3574
cactcaggaatctcccaaaccggcaaccgccaaacaaacatcggccgactatgcatggccaattgaaacccttcaggcccttcaagacatgggtctgaccaaatttccaaaaataatcaaaaaatcttgggcagacattgcctcagaatctgatgatgaatctgaatcaaatttacaaacaatgatccaaaatgcgtcaatgaccaaaacaaccaccaatactaaaggaaaactacctttagccaaagctcaaacaccacctaccaaacaaactaacaattatatttataaaaataaattgttaactgttttgcagatggaacctgaattttgggacaaaaatcccttcaaggcgacggccaaggctttcccaccaggatttcactacaaaccaaccactatcctgaagacaagaactttttatgaattgattttggtagattcgaactcagtatctatcaaacatttcaaagatccaaaagaccaaaccttaaacacccactcaaccatccaaatactaaaagttcttcaaccaagacactttggttcggacttgaacaaaggaaagagattttcagttccatttgatccagtaggttatacctattgggattacgttgatgcttggactaaggtgttttggcaccaaaatacccgcttcaaacattcatggctgatatatttcaagaccaacacaatttacaattttcccaattggtttttgcaatggtgggacttctttggaccaatcccagagatattcccagaaacggtccaacaaggattttcccaatttaagaaacaatacaattcgcaggaatcacgaattccagcagatcttaaatacttttcaagctttgcactgtcatggatattctcatggcaatatcgttacagcaagactgagaagacaaaccaatatccatcactacaaaggcacgcatttgtaaaatggtggacacaatttgactcatccaaagcggatgcagaacaagtaaaactatggttccaatcccatccagaattcctcaaagcagctgatccagagacttctgtgtttttgaaccaaaagtctcatctggcagcatttttagcaggatcgacatcaaaggaggtcttagctaaaaatctgaaggaagttctacaaatgttacaac

SEQ ID NO: 10742 - DNA, 1138 bp, Glycine max
  Gm_smallRNAprecursor_3575
acatgggtctgaccaaatttccaaaaataatcaaaaaatcttgggcagacattgcctcagaatctgatgatgaatctgaatcaaatttacaaacaatgatccaaaatgcgtcaatgaccaaaacaaccaccaatactaaaggaaaactacctttagccaaagctcaaacaccacctaccaaacaaactaacaattatatttataaaaataaattgttaactgttttgcagatggaacctgaattttgggacaaaaatcccttcaaggcgacggccaaggctttcccaccaggatttcactacaaaccaaccactatcctgaagacaagaactttttatgaattgattttggtagattcgaactcagtatctatcaaacatttcaaagatccaaaagaccaaaccttaaacacccactcaaccatccaaatactaaaagttcttcaaccaagacactttggttcggacttgaacaaaggaaagagattttcagttccatttgatccagtaggttatacctattgggattacgttgatgcttggactaaggtgttttggcaccaaaatacccgcttcaaacattcatggctgatatatttcaagaccaacacaatttacaattttcccaattggtttttgcaatggtgggacttctttggaccaatcccagagatattcccagaaacggtccaacaaggattttcccaatttaagaaacaatacaattcgcaggaatcacgaattccagcagatcttaaatacttttcaagctttgcactgtcatggatattctcatggcaatatcgttacagcaagactgagaagacaaaccaatatccatcactacaaaggcacgcatttgtaaaatggtggacacaatttgactcatccaaagcggatgcagaacaagtaaaactatggttccaatcccatccagaattcctcaaagcagctgatccagagacttctgtgtttttgaaccaaaagtctcatctggcagcatttttagcaggatcgacatcaaaggaggtcttagctaaaaatctgaaggaagttctacaaatgttacaacaggaagaagaagcttcatcctcaaagaaggaagaaacaagttctgctgaagaagacgaagaagatcc

SEQ ID NO: 10743 - DNA, 1146 bp, Glycine max
  Gm_smallRNAprecursor_3576
acaatgatccaaaatgcgtcaatgaccaaaacaaccaccaatactaaaggaaaactacctttagccaaagctcaaacaccacctaccaaacaaactaacaattatatttataaaaataaattgttaactgttttgcagatggaacctgaattttgggacaaaaatcccttcaaggcgacggccaaggctttcccaccaggatttcactacaaaccaaccactatcctgaagacaagaactttttatgaattgattttggtagattcgaactcagtatctatcaaacatttcaaagatccaaaagaccaaaccttaaacacccactcaaccatccaaatactaaaagttcttcaaccaagacactttggttcggacttgaacaaaggaaagagattttcagttccatttgatccagtaggttatacctattgggattacgttgatgcttggactaaggtgttttggcaccaaaatacccgcttcaaacattcatggctgatatatttcaagaccaacacaatttacaattttcccaattggtttttgcaatggtgggacttctttggaccaatcccagagatattcccagaaacggtccaacaaggattttcccaatttaagaaacaatacaattcgcaggaatcacgaattccagcagatcttaaatacttttcaagctttgcactgtcatggatattctcatggcaatatcgttacagcaagactgagaagacaaaccaatatccatcactacaaaggcacgcatttgtaaaatggtggacacaatttgactcatccaaagcggatgcagaacaagtaaaactatggttccaatcccatccagaattcctcaaagcagctgatccagagacttctgtgtttttgaaccaaaagtctcatctggcagcatttttagcaggatcgacatcaaaggaggtcttagctaaaaatctgaaggaagttctacaaatgttacaacaggaagaagaagcttcatcctcaaagaaggaagaaacaagttctgctgaagaagacgaagaagatcccttttaccaaaacgaagatgattgttttggtatctgtttagattaaatttaatttcggtcacaaaaccgtctgtttgtaattaatgtgtaattaatgctg

SEQ ID NO: 10744 - DNA, 1146 bp, Glycine max; identical to SEQ ID NO: 10743
  Gm_smallRNAprecursor_3577

SEQ ID NO: 10745 - DNA, 1147 bp, Glycine max
  Gm_smallRNAprecursor_3578
acaatgatccaaaatgcgtcaatgaccaaaacaaccaccaatactaaaggaaaactacctttagccaaagctcaaacaccacctaccaaacaaactaacaattatatttataaaaataaattgttaactgttttgcagatggaacctgaattttgggacaaaaatcccttcaaggcgacggccaaggctttcccaccaggatttcactacaaaccaaccactatcctgaagacaagaactttttatgaattgattttggtagattcgaactcagtatctatcaaacatttcaaagatccaaaagaccaaaccttaaacacccactcaaccatccaaatactaaaagttcttcaaccaagacactttggttcggacttgaacaaaggaaagagattttcagttccatttgatccagtaggttatacctattgggattacgttgatgcttggactaaggtgttttggcaccaaaatacccgcttcaaacattcatggctgatatatttcaagaccaacacaatttacaattttcccaattggtttttgcaatggtgggacttctttggaccaatcccagagatattcccagaaacggtccaacaaggattttcccaatttaagaaacaatacaattcgcaggaatcacgaattccagcagatcttaaatacttttcaagctttgcactgtcatggatattctcatggcaatatcgttacagcaagactgagaagacaaaccaatatccatcactacaaaggcacgcatttgtaaaatggtggacacaatttgactcatccaaagcggatgcagaacaagtaaaactatggttccaatcccatccagaattcctcaaagcagctgatccagagacttctgtgtttttgaaccaaaagtctcatctggcagcatttttagcaggatcgacatcaaaggaggtcttagctaaaaatctgaaggaagttctacaaatgttacaacaggaagaagaagcttcatcctcaaagaaggaagaaacaagttctgctgaagaagacgaagaagatcccttttaccaaaacgaagatgattgttttggtatctgtttagattaaatttaatttcggtcacaaaaccgtctgtttgtaattaatgtgtaattaatgctgg

SEQ ID NO: 10746 - DNA, 1158 bp, Glycine max
  Gm_smallRNAprecursor_3579
caagacactttggttcggacttgaacaaaggaaagagattttcagttccatttgatccagtaggttatacctattgggattacgttgatgcttggactaaggtgttttggcaccaaaatacccgcttcaaacattcatggctgatatatttcaagaccaacacaatttacaattttcccaattggtttttgcaatggtgggacttctttggaccaatcccagagatattcccagaaacggtccaacaaggattttcccaatttaagaaacaatacaattcgcaggaatcacgaattccagcagatcttaaatacttttcaagctttgcactgtcatggatattctcatggcaatatcgttacagcaagactgagaagacaaaccaatatccatcactacaaaggcacgcatttgtaaaatggtggacacaatttgactcatccaaagcggatgcagaacaagtaaaactatggttccaatcccatccagaattcctcaaagcagctgatccagagacttctgtgtttttgaaccaaaagtctcatctggcagcatttttagcaggatcgacatcaaaggaggtcttagctaaaaatctgaaggaagttctacaaatgttacaacaggaagaagaagcttcatcctcaaagaaggaagaaacaagttctgctgaagaagacgaagaagatcccttttaccaaaacgaagatgattgttttggtatctgtttagattaaatttaatttcggtcacaaaaccgtctgtttgtaattaatgtgtaattaatgctggacaatactacctgtcctgtagccattaaagtcccggtcaaaactacttgtcttgtaacaaacagtcaaatagtcccggtcaaaactaccggcaactaccggtcttagatttttggctatataaggagtcctcaagcatgttgtgaggcaccctttcatttagccatttttccaggtttcggaagagaggtgctctgaaacaagatttttgtaagcgcttctttctagattcaataaatttctatttttcatccttctctcttctcccttcaccgatcctgtgcggctctgccgccgcttcggtttctttgtttatgaaaacctgggttttgtaagccggtctccggtgtgaccttgatatctgttt

SEQ ID NO: 10747 - DNA, 1172 bp, Glycine max
  Gm_smallRNAprecursor_3580
caagacactttggttcggacttgaacaaaggaaagagattttcagttccatttgatccagtaggttatacctattgggattacgttgatgcttggactaaggtgttttggcaccaaaatacccgcttcaaacattcatggctgatatatttcaagaccaacacaatttacaattttcccaattggtttttgcaatggtgggacttctttggaccaatcccagagatattcccagaaacggtccaacaaggattttcccaatttaagaaacaatacaattcgcaggaatcacgaattccagcagatcttaaatacttttcaagctttgcactgtcatggatattctcatggcaatatcgttacagcaagactgagaagacaaaccaatatccatcactacaaaggcacgcatttgtaaaatggtggacacaatttgactcatccaaagcggatgcagaacaagtaaaactatggttccaatcccatccagaattcctcaaagcagctgatccagagacttctgtgtttttgaaccaaaagtctcatctggcagcatttttagcaggatcgacatcaaaggaggtcttagctaaaaatctgaaggaagttctacaaatgttacaacaggaagaagaagcttcatcctcaaagaaggaagaaacaagttctgctgaagaagacgaagaagatcccttttaccaaaacgaagatgattgttttggtatctgtttagattaaatttaatttcggtcacaaaaccgtctgtttgtaattaatgtgtaattaatgctggacaatactacctgtcctgtagccattaaagtcccggtcaaaactacttgtcttgtaacaaacagtcaaatagtcccggtcaaaactaccggcaactaccggtcttagatttttggctatataaggagtcctcaagcatgttgtgaggcaccctttcatttagccatttttccaggtttcggaagagaggtgctctgaaacaagatttttgtaagcgcttctttctagattcaataaatttctatttttcatccttctctcttctcccttcaccgatcctgtgcggctctgccgccgcttcggtttctttgtttatgaaaacctgggttttgtaagccggtctccggtgtgaccttgatatctgttttcaaagtttatatt

SEQ ID NO: 10748 - DNA, 1046 bp, Glycine max
  Gm_smallRNAprecursor_3581
tcaagaccaacacaatttacaattttcccaattggtttttgcaatggtgggacttctttggaccaatcccagagatattcccagaaacggtccaacaaggattttcccaatttaagaaacaatacaattcgcaggaatcacgaattccagcagatcttaaatacttttcaagctttgcactgtcatggatattctcatggcaatatcgttacagcaagactgagaagacaaaccaatatccatcactacaaaggcacgcatttgtaaaatggtggacacaatttgactcatccaaagcggatgcagaacaagtaaaactatggttccaatcccatccagaattcctcaaagcagctgatccagagacttctgtgtttttgaaccaaaagtctcatctggcagcatttttagcaggatcgacatcaaaggaggtcttagctaaaaatctgaaggaagttctacaaatgttacaacaggaagaagaagcttcatcctcaaagaaggaagaaacaagttctgctgaagaagacgaagaagatcccttttaccaaaacgaagatgattgttttggtatctgtttagattaaatttaatttcggtcacaaaaccgtctgtttgtaattaatgtgtaattaatgctggacaatactacctgtcctgtagccattaaagtcccggtcaaaactacttgtcttgtaacaaacagtcaaatagtcccggtcaaaactaccggcaactaccggtcttagatttttggctatataaggagtcctcaagcatgttgtgaggcaccctttcatttagccatttttccaggtttcggaagagaggtgctctgaaacaagatttttgtaagcgcttctttctagattcaataaatttctatttttcatccttctctcttctcccttcaccgatcctgtgcggctctgccgccgcttcggtttctttgtttatgaaaacctgggttttgtaagccggtctccggtgtgaccttgatatctgttttcaaagtttatattttcatcaaatatactgcattctta

SEQ ID NO: 10749 - DNA, 1213 bp, Glycine max
  Gm_smallRNAprecursor_3582
caacacaatttacaattttcccaattggtttttgcaatggtgggacttctttggaccaatcccagagatattcccagaaacggtccaacaaggattttcccaatttaagaaacaatacaattcgcaggaatcacgaattccagcagatcttaaatacttttcaagctttgcactgtcatggatattctcatggcaatatcgttacagcaagactgagaagacaaaccaatatccatcactacaaaggcacgcatttgtaaaatggtggacacaatttgactcatccaaagcggatgcagaacaagtaaaactatggttccaatcccatccagaattcctcaaagcagctgatccagagacttctgtgtttttgaaccaaaagtctcatctggcagcatttttagcaggatcgacatcaaaggaggtcttagctaaaaatctgaaggaagttctacaaatgttacaacaggaagaagaagcttcatcctcaaagaaggaagaaacaagttctgctgaagaagacgaagaagatcccttttaccaaaacgaagatgattgttttggtatctgtttagattaaatttaatttcggtcacaaaaccgtctgtttgtaattaatgtgtaattaatgctggacaatactacctgtcctgtagccattaaagtcccggtcaaaactacttgtcttgtaacaaacagtcaaatagtcccggtcaaaactaccggcaactaccggtcttagatttttggctatataaggagtcctcaagcatgttgtgaggcaccctttcatttagccatttttccaggtttcggaagagaggtgctctgaaacaagatttttgtaagcgcttctttctagattcaataaatttctatttttcatccttctctcttctcccttcaccgatcctgtgcggctctgccgccgcttcggtttctttgtttatgaaaacctgggttttgtaagccggtctccggtgtgaccttgatatctgttttcaaagtttatattttcatcaaatatactgcattcttacttcctatctgtccgttgatcttactccgctgacctctggtatcagagcctgatggggaagtaggaatagtgtccgtaagggcatatgttaactgaacttatggatctgaagcatgtacagtaattttaatttaaacagtatgtgtttgaacagtattttctggaagcacagca

SEQ ID NO: 10750 - DNA, 1064 bp, Glycine max
  Gm_smallRNAprecursor_3583
tttgtaattaatgtgtaattaatgctggacaatactacctgtcctgtagccattaaagtcccggtcaaaactacttgtcttgtaacaaacagtcaaatagtcccggtcaaaactaccggcaactaccggtcttagatttttggctatataaggagtcctcaagcatgttgtgaggcaccctttcatttagccatttttccaggtttcggaagagaggtgctctgaaacaagatttttgtaagcgcttctttctagattcaataaatttctatttttcatccttctctcttctcccttcaccgatcctgtgcggctctgccgccgcttcggtttctttgtttatgaaaacctgggttttgtaagccggtctccggtgtgaccttgatatctgttttcaaagtttatattttcatcaaatatactgcattcttacttcctatctgtccgttgatcttactccgctgacctctggtatcagagcctgatggggaagtaggaatagtgtccgtaagggcatatgttaactgaacttatggatctgaagcatgtacagtaattttaatttaaacagtatgtgtttgaacagtattttctggaagcacagcagtctgatattttagttgaatgatattgtagcagtaagtcccgtggatgagaaagcgcagtaaggctaaggtgtattgttcaaataaaatatggagacataatatactggtggctataggagtaatgttcaaactatattgtctgtgaaaaaaaaaaatcttctttttcatttattcagatccaagaagttctgtaacatatagccttatggaaagattcctatggaaccaaatgaaggcaaagatattagagaatgttttaattatgtctagattattgcgatccttttcccgtatctcttttcgctcaaattcctcctcttcatcttcttcaagaaacaccaatctcttaaatgatcaagataaccagacccaagaggtcgccccaaaacacaatctcttcgatgaggaagtccgattcgaagatattaatcaaaacatggatgactggaacattcc

SEQ ID NO: 10751 - DNA, 1079 bp, Glycine max
  Gm_smallRNAprecursor_3584
tttgtaattaatgtgtaattaatgctggacaatactacctgtcctgtagccattaaagtcccggtcaaaactacttgtcttgtaacaaacagtcaaatagtcccggtcaaaactaccggcaactaccggtcttagatttttggctatataaggagtcctcaagcatgttgtgaggcaccctttcatttagccatttttccaggtttcggaagagaggtgctctgaaacaagatttttgtaagcgcttctttctagattcaataaatttctatttttcatccttctctcttctcccttcaccgatcctgtgcggctctgccgccgcttcggtttctttgtttatgaaaacctgggttttgtaagccggtctccggtgtgaccttgatatctgttttcaaagtttatattttcatcaaatatactgcattcttacttcctatctgtccgttgatcttactccgctgacctctggtatcagagcctgatggggaagtaggaatagtgtccgtaagggcatatgttaactgaacttatggatctgaagcatgtacagtaattttaatttaaacagtatgtgtttgaacagtattttctggaagcacagcagtctgatattttagttgaatgatattgtagcagtaagtcccgtggatgagaaagcgcagtaaggctaaggtgtattgttcaaataaaatatggagacataatatactggtggctataggagtaatgttcaaactatattgtctgtgaaaaaaaaaaatcttctttttcatttattcagatccaagaagttctgtaacatatagccttatggaaagattcctatggaaccaaatgaaggcaaagatattagagaatgttttaattatgtctagattattgcgatccttttcccgtatctcttttcgctcaaattcctcctcttcatcttcttcaagaaacaccaatctcttaaatgatcaagataaccagacccaagaggtcgccccaaaacacaatctcttcgatgaggaagtccgattcgaagatattaatcaaaacatggatgactggaacattccagaaatccctcagga

SEQ ID NO: 10752 - DNA, 1080 bp, Glycine max
  Gm_smallRNAprecursor_3585
tttgtaattaatgtgtaattaatgctggacaatactacctgtcctgtagccattaaagtcccggtcaaaactacttgtcttgtaacaaacagtcaaatagtcccggtcaaaactaccggcaactaccggtcttagatttttggctatataaggagtcctcaagcatgttgtgaggcaccctttcatttagccatttttccaggtttcggaagagaggtgctctgaaacaagatttttgtaagcgcttctttctagattcaataaatttctatttttcatccttctctcttctcccttcaccgatcctgtgcggctctgccgccgcttcggtttctttgtttatgaaaacctgggttttgtaagccggtctccggtgtgaccttgatatctgttttcaaagtttatattttcatcaaatatactgcattcttacttcctatctgtccgttgatcttactccgctgacctctggtatcagagcctgatggggaagtaggaatagtgtccgtaagggcatatgttaactgaacttatggatctgaagcatgtacagtaattttaatttaaacagtatgtgtttgaacagtattttctggaagcacagcagtctgatattttagttgaatgatattgtagcagtaagtcccgtggatgagaaagcgcagtaaggctaaggtgtattgttcaaataaaatatggagacataatatactggtggctataggagtaatgttcaaactatattgtctgtgaaaaaaaaaaatcttctttttcatttattcagatccaagaagttctgtaacatatagccttatggaaagattcctatggaaccaaatgaaggcaaagatattagagaatgttttaattatgtctagattattgcgatccttttcccgtatctcttttcgctcaaattcctcctcttcatcttcttcaagaaacaccaatctcttaaatgatcaagataaccagacccaagaggtcgccccaaaacacaatctcttcgatgaggaagtccgattcgaagatattaatcaaaacatggatgactggaacattccagaaatccctcaggat

SEQ ID NO: 10753 - DNA, 1051 bp, Glycine max
  Gm_smallRNAprecursor_3586
tgtaattaatgctggacaatactacctgtcctgtagccattaaagtcccggtcaaaactacttgtcttgtaacaaacagtcaaatagtcccggtcaaaactaccggcaactaccggtcttagatttttggctatataaggagtcctcaagcatgttgtgaggcaccctttcatttagccatttttccaggtttcggaagagaggtgctctgaaacaagatttttgtaagcgcttctttctagattcaataaatttctatttttcatccttctctcttctcccttcaccgatcctgtgcggctctgccgccgcttcggtttctttgtttatgaaaacctgggttttgtaagccggtctccggtgtgaccttgatatctgttttcaaagtttatattttcatcaaatatactgcattcttacttcctatctgtccgttgatcttactccgctgacctctggtatcagagcctgatggggaagtaggaatagtgtccgtaagggcatatgttaactgaacttatggatctgaagcatgtacagtaattttaatttaaacagtatgtgtttgaacagtattttctggaagcacagcagtctgatattttagttgaatgatattgtagcagtaagtcccgtggatgagaaagcgcagtaaggctaaggtgtattgttcaaataaaatatggagacataatatactggtggctataggagtaatgttcaaactatattgtctgtgaaaaaaaaaaatcttctttttcatttattcagatccaagaagttctgtaacatatagccttatggaaagattcctatggaaccaaatgaaggcaaagatattagagaatgttttaattatgtctagattattgcgatccttttcccgtatctcttttcgctcaaattcctcctcttcatcttcttcaagaaacaccaatctcttaaatgatcaagataaccagacccaagaggtcgccccaaaacacaatctcttcgatgaggaagtccgattcgaagatattaatcaaaacatggatgactggaacattcc

SEQ ID NO: 10754 - DNA, 1097 bp, Glycine max
  Gm_smallRNAprecursor_3587
tgtaattaatgctggacaatactacctgtcctgtagccattaaagtcccggtcaaaactacttgtcttgtaacaaacagtcaaatagtcccggtcaaaactaccggcaactaccggtcttagatttttggctatataaggagtcctcaagcatgttgtgaggcaccctttcatttagccatttttccaggtttcggaagagaggtgctctgaaacaagatttttgtaagcgcttctttctagattcaataaatttctatttttcatccttctctcttctcccttcaccgatcctgtgcggctctgccgccgcttcggtttctttgtttatgaaaacctgggttttgtaagccggtctccggtgtgaccttgatatctgttttcaaagtttatattttcatcaaatatactgcattcttacttcctatctgtccgttgatcttactccgctgacctctggtatcagagcctgatggggaagtaggaatagtgtccgtaagggcatatgttaactgaacttatggatctgaagcatgtacagtaattttaatttaaacagtatgtgtttgaacagtattttctggaagcacagcagtctgatattttagttgaatgatattgtagcagtaagtcccgtggatgagaaagcgcagtaaggctaaggtgtattgttcaaataaaatatggagacataatatactggtggctataggagtaatgttcaaactatattgtctgtgaaaaaaaaaaatcttctttttcatttattcagatccaagaagttctgtaacatatagccttatggaaagattcctatggaaccaaatgaaggcaaagatattagagaatgttttaattatgtctagattattgcgatccttttcccgtatctcttttcgctcaaattcctcctcttcatcttcttcaagaaacaccaatctcttaaatgatcaagataaccagacccaagaggtcgccccaaaacacaatctcttcgatgaggaagtccgattcgaagatattaatcaaaacatggatgactggaacattccagaaatccctcaggatcaactatacgttcctgaaacaattaaagac

SEQ ID NO: 10755 - DNA, 1043 bp, Glycine max
  Gm_smallRNAprecursor_3588
aaactacttgtcttgtaacaaacagtcaaatagtcccggtcaaaactaccggcaactaccggtcttagatttttggctatataaggagtcctcaagcatgttgtgaggcaccctttcatttagccatttttccaggtttcggaagagaggtgctctgaaacaagatttttgtaagcgcttctttctagattcaataaatttctatttttcatccttctctcttctcccttcaccgatcctgtgcggctctgccgccgcttcggtttctttgtttatgaaaacctgggttttgtaagccggtctccggtgtgaccttgatatctgttttcaaagtttatattttcatcaaatatactgcattcttacttcctatctgtccgttgatcttactccgctgacctctggtatcagagcctgatggggaagtaggaatagtgtccgtaagggcatatgttaactgaacttatggatctgaagcatgtacagtaattttaatttaaacagtatgtgtttgaacagtattttctggaagcacagcagtctgatattttagttgaatgatattgtagcagtaagtcccgtggatgagaaagcgcagtaaggctaaggtgtattgttcaaataaaatatggagacataatatactggtggctataggagtaatgttcaaactatattgtctgtgaaaaaaaaaaatcttctttttcatttattcagatccaagaagttctgtaacatatagccttatggaaagattcctatggaaccaaatgaaggcaaagatattagagaatgttttaattatgtctagattattgcgatccttttcccgtatctcttttcgctcaaattcctcctcttcatcttcttcaagaaacaccaatctcttaaatgatcaagataaccagacccaagaggtcgccccaaaacacaatctcttcgatgaggaagtccgattcgaagatattaatcaaaacatggatgactggaacattccagaaatccctcaggatcaactatacgttcctgaaacaattaaagac

SEQ ID NO: 10756 - DNA, 1157 bp, Glycine max
  Gm_smallRNAprecursor_3589
gaatagtgtccgtaagggcatatgttaactgaacttatggatctgaagcatgtacagtaattttaatttaaacagtatgtgtttgaacagtattttctggaagcacagcagtctgatattttagttgaatgatattgtagcagtaagtcccgtggatgagaaagcgcagtaaggctaaggtgtattgttcaaataaaatatggagacataatatactggtggctataggagtaatgttcaaactatattgtctgtgaaaaaaaaaaatcttctttttcatttattcagatccaagaagttctgtaacatatagccttatggaaagattcctatggaaccaaatgaaggcaaagatattagagaatgttttaattatgtctagattattgcgatccttttcccgtatctcttttcgctcaaattcctcctcttcatcttcttcaagaaacaccaatctcttaaatgatcaagataaccagacccaagaggtcgccccaaaacacaatctcttcgatgaggaagtccgattcgaagatattaatcaaaacatggatgactggaacattccagaaatccctcaggatcaactatacgttcctgaaacaattaaagacaaacacaactttgattacataatcaaaacagtagaaaacaatattcctctaggacaagatataggggaagaatttcatctactttcaaaaaattcaatttatgaacatagccgtaaggatacaccttagccttactgccctttctcatccacgggacttactgctacagtatcattcaactaaaatatcagactactgtgcttccagaaaatactgttcaaacacatactgtttaaattaaaattactgtacatgcttcagatccataagttcagttaacatatgcccttacggacactattcctacttccgctgacctctggaagtaagaatgcagtatatttgatgaaaatataaactttgaaaacagatatcaaggtcacaccggagaccggcttacaaaacccaggttttcataaacaaagaaaccgaagcggcggcagagccgcacaggatcggtgaagggagaagagagaaggatgaaaaatagaaatttattgaatctagaaagaagcgcttacaaaaatcttgtttcagagcacc

SEQ ID NO: 10757 - DNA, 1056 bp, Glycine max
  Gm_smallRNAprecursor_3590
ttattgcgatccttttcccgtatctcttttcgctcaaattcctcctcttcatcttcttcaagaaacaccaatctcttaaatgatcaagataaccagacccaagaggtcgccccaaaacacaatctcttcgatgaggaagtccgattcgaagatattaatcaaaacatggatgactggaacattccagaaatccctcaggatcaactatacgttcctgaaacaattaaagacaaacacaactttgattacataatcaaaacagtagaaaacaatattcctctaggacaagatataggggaagaatttcatctactttcaaaaaattcaatttatgaacatagccgtaaggatacaccttagccttactgccctttctcatccacgggacttactgctacagtatcattcaactaaaatatcagactactgtgcttccagaaaatactgttcaaacacatactgtttaaattaaaattactgtacatgcttcagatccataagttcagttaacatatgcccttacggacactattcctacttccgctgacctctggaagtaagaatgcagtatatttgatgaaaatataaactttgaaaacagatatcaaggtcacaccggagaccggcttacaaaacccaggttttcataaacaaagaaaccgaagcggcggcagagccgcacaggatcggtgaagggagaagagagaaggatgaaaaatagaaatttattgaatctagaaagaagcgcttacaaaaatcttgtttcagagcacctctcttccgaaacctggaaaaatggctaaatgaaagggtgcctcacaacatgcttgaggactccttatatagccaaaaatctaagaccggtagttgccggtagttttgaccgggactatttgactgtttgttacaagacaagtagttttgaccgggactttaatggctacaggacaggtagtattgtccagcattaattacacattaattacaaacagacggttttgtgaccgaaattaaatttaatctaaacagataccaaaacaatcatcttcgttttgg

SEQ ID NO: 10758 - DNA, 1056 bp, Glycine max; identical to SEQ ID NO: 10757
  Gm_smallRNAprecursor_3591

SEQ ID NO: 10759 - DNA, 1057 bp, Glycine max
  Gm_smallRNAprecursor_3592
ttattgcgatccttttcccgtatctcttttcgctcaaattcctcctcttcatcttcttcaagaaacaccaatctcttaaatgatcaagataaccagacccaagaggtcgccccaaaacacaatctcttcgatgaggaagtccgattcgaagatattaatcaaaacatggatgactggaacattccagaaatccctcaggatcaactatacgttcctgaaacaattaaagacaaacacaactttgattacataatcaaaacagtagaaaacaatattcctctaggacaagatataggggaagaatttcatctactttcaaaaaattcaatttatgaacatagccgtaaggatacaccttagccttactgccctttctcatccacgggacttactgctacagtatcattcaactaaaatatcagactactgtgcttccagaaaatactgttcaaacacatactgtttaaattaaaattactgtacatgcttcagatccataagttcagttaacatatgcccttacggacactattcctacttccgctgacctctggaagtaagaatgcagtatatttgatgaaaatataaactttgaaaacagatatcaaggtcacaccggagaccggcttacaaaacccaggttttcataaacaaagaaaccgaagcggcggcagagccgcacaggatcggtgaagggagaagagagaaggatgaaaaatagaaatttattgaatctagaaagaagcgcttacaaaaatcttgtttcagagcacctctcttccgaaacctggaaaaatggctaaatgaaagggtgcctcacaacatgcttgaggactccttatatagccaaaaatctaagaccggtagttgccggtagttttgaccgggactatttgactgtttgttacaagacaagtagttttgaccgggactttaatggctacaggacaggtagtattgtccagcattaattacacattaattacaaacagacggttttgtgaccgaaattaaatttaatctaaacagataccaaaacaatcatcttcgttttggt

SEQ ID NO: 10760 - DNA, 1054 bp, Glycine max
  Gm_smallRNAprecursor_3593
attgcgatccttttcccgtatctcttttcgctcaaattcctcctcttcatcttcttcaagaaacaccaatctcttaaatgatcaagataaccagacccaagaggtcgccccaaaacacaatctcttcgatgaggaagtccgattcgaagatattaatcaaaacatggatgactggaacattccagaaatccctcaggatcaactatacgttcctgaaacaattaaagacaaacacaactttgattacataatcaaaacagtagaaaacaatattcctctaggacaagatataggggaagaatttcatctactttcaaaaaattcaatttatgaacatagccgtaaggatacaccttagccttactgccctttctcatccacgggacttactgctacagtatcattcaactaaaatatcagactactgtgcttccagaaaatactgttcaaacacatactgtttaaattaaaattactgtacatgcttcagatccataagttcagttaacatatgcccttacggacactattcctacttccgctgacctctggaagtaagaatgcagtatatttgatgaaaatataaactttgaaaacagatatcaaggtcacaccggagaccggcttacaaaacccaggttttcataaacaaagaaaccgaagcggcggcagagccgcacaggatcggtgaagggagaagagagaaggatgaaaaatagaaatttattgaatctagaaagaagcgcttacaaaaatcttgtttcagagcacctctcttccgaaacctggaaaaatggctaaatgaaagggtgcctcacaacatgcttgaggactccttatatagccaaaaatctaagaccggtagttgccggtagttttgaccgggactatttgactgtttgttacaagacaagtagttttgaccgggactttaatggctacaggacaggtagtattgtccagcattaattacacattaattacaaacagacggttttgtgaccgaaattaaatttaatctaaacagataccaaaacaatcatcttcgttttgg

SEQ ID NO: 10761 - DNA, 1199 bp, Glycine max
  Gm_smallRNAprecursor_3594
agaatttcatctactttcaaaaaattcaatttatgaacatagccgtaaggatacaccttagccttactgccctttctcatccacgggacttactgctacagtatcattcaactaaaatatcagactactgtgcttccagaaaatactgttcaaacacatactgtttaaattaaaattactgtacatgcttcagatccataagttcagttaacatatgcccttacggacactattcctacttccgctgacctctggaagtaagaatgcagtatatttgatgaaaatataaactttgaaaacagatatcaaggtcacaccggagaccggcttacaaaacccaggttttcataaacaaagaaaccgaagcggcggcagagccgcacaggatcggtgaagggagaagagagaaggatgaaaaatagaaatttattgaatctagaaagaagcgcttacaaaaatcttgtttcagagcacctctcttccgaaacctggaaaaatggctaaatgaaagggtgcctcacaacatgcttgaggactccttatatagccaaaaatctaagaccggtagttgccggtagttttgaccgggactatttgactgtttgttacaagacaagtagttttgaccgggactttaatggctacaggacaggtagtattgtccagcattaattacacattaattacaaacagacggttttgtgaccgaaattaaatttaatctaaacagataccaaaacaatcatcttcgttttggtaaaagggatcttcttcgtcttcttcagcagaacttgtttcttccttctttgaggatgaagcttcttcttcctgttgtaacatttgtagaacttccttcagatttttagctaagacctcctttgatgtcgatcctgctaaaaatgctgccagatgagacttttggttcaaaaacacagaagtctctggatcagctgctttgaggaattctggatgggattggaaccatagttttacttgttctgcatccgctttggatgagtcaaattgtgtccaccattttacaaatgcgtgcctttgtagtgatggatattggtttgtcttctcagtcttgctgtaacgatattgccatgagaatatccatgacagtgcaaagcttgaaaagtatttaagatctgctggaattcgtgattcctgcgaattgtattgtttcttaaattggg

SEQ ID NO: 10762 - DNA, 1141 bp, Glycine max
  Gm_smallRNAprecursor_3595
acgggacttactgctacagtatcattcaactaaaatatcagactactgtgcttccagaaaatactgttcaaacacatactgtttaaattaaaattactgtacatgcttcagatccataagttcagttaacatatgcccttacggacactattcctacttccgctgacctctggaagtaagaatgcagtatatttgatgaaaatataaactttgaaaacagatatcaaggtcacaccggagaccggcttacaaaacccaggttttcataaacaaagaaaccgaagcggcggcagagccgcacaggatcggtgaagggagaagagagaaggatgaaaaatagaaatttattgaatctagaaagaagcgcttacaaaaatcttgtttcagagcacctctcttccgaaacctggaaaaatggctaaatgaaagggtgcctcacaacatgcttgaggactccttatatagccaaaaatctaagaccggtagttgccggtagttttgaccgggactatttgactgtttgttacaagacaagtagttttgaccgggactttaatggctacaggacaggtagtattgtccagcattaattacacattaattacaaacagacggttttgtgaccgaaattaaatttaatctaaacagataccaaaacaatcatcttcgttttggtaaaagggatcttcttcgtcttcttcagcagaacttgtttcttccttctttgaggatgaagcttcttcttcctgttgtaacatttgtagaacttccttcagatttttagctaagacctcctttgatgtcgatcctgctaaaaatgctgccagatgagacttttggttcaaaaacacagaagtctctggatcagctgctttgaggaattctggatgggattggaaccatagttttacttgttctgcatccgctttggatgagtcaaattgtgtccaccattttacaaatgcgtgcctttgtagtgatggatattggtttgtcttctcagtcttgctgtaacgatattgccatgagaatatccatgacagtgcaaagcttgaaaagtatttaagatctgctggaattcgtgattcctgcgaattgtattgtttcttaaattgggaaaatccttgttggaccgtttctg

SEQ ID NO: 10763 - DNA, 1154 bp, Glycine max
  Gm_smallRNAprecursor_3596
acgggacttactgctacagtatcattcaactaaaatatcagactactgtgcttccagaaaatactgttcaaacacatactgtttaaattaaaattactgtacatgcttcagatccataagttcagttaacatatgcccttacggacactattcctacttccgctgacctctggaagtaagaatgcagtatatttgatgaaaatataaactttgaaaacagatatcaaggtcacaccggagaccggcttacaaaacccaggttttcataaacaaagaaaccgaagcggcggcagagccgcacaggatcggtgaagggagaagagagaaggatgaaaaatagaaatttattgaatctagaaagaagcgcttacaaaaatcttgtttcagagcacctctcttccgaaacctggaaaaatggctaaatgaaagggtgcctcacaacatgcttgaggactccttatatagccaaaaatctaagaccggtagttgccggtagttttgaccgggactatttgactgtttgttacaagacaagtagttttgaccgggactttaatggctacaggacaggtagtattgtccagcattaattacacattaattacaaacagacggttttgtgaccgaaattaaatttaatctaaacagataccaaaacaatcatcttcgttttggtaaaagggatcttcttcgtcttcttcagcagaacttgtttcttccttctttgaggatgaagcttcttcttcctgttgtaacatttgtagaacttccttcagatttttagctaagacctcctttgatgtcgatcctgctaaaaatgctgccagatgagacttttggttcaaaaacacagaagtctctggatcagctgctttgaggaattctggatgggattggaaccatagttttacttgttctgcatccgctttggatgagtcaaattgtgtccaccattttacaaatgcgtgcctttgtagtgatggatattggtttgtcttctcagtcttgctgtaacgatattgccatgagaatatccatgacagtgcaaagcttgaaaagtatttaagatctgctggaattcgtgattcctgcgaattgtattgtttcttaaattgggaaaatccttgttggaccgtttctgggaatatctttgg

SEQ ID NO: 10764 - DNA, 1061 bp, Glycine max
  Gm_smallRNAprecursor_3597
acggacactattcctacttccgctgacctctggaagtaagaatgcagtatatttgatgaaaatataaactttgaaaacagatatcaaggtcacaccggagaccggcttacaaaacccaggttttcataaacaaagaaaccgaagcggcggcagagccgcacaggatcggtgaagggagaagagagaaggatgaaaaatagaaatttattgaatctagaaagaagcgcttacaaaaatcttgtttcagagcacctctcttccgaaacctggaaaaatggctaaatgaaagggtgcctcacaacatgcttgaggactccttatatagccaaaaatctaagaccggtagttgccggtagttttgaccgggactatttgactgtttgttacaagacaagtagttttgaccgggactttaatggctacaggacaggtagtattgtccagcattaattacacattaattacaaacagacggttttgtgaccgaaattaaatttaatctaaacagataccaaaacaatcatcttcgttttggtaaaagggatcttcttcgtcttcttcagcagaacttgtttcttccttctttgaggatgaagcttcttcttcctgttgtaacatttgtagaacttccttcagatttttagctaagacctcctttgatgtcgatcctgctaaaaatgctgccagatgagacttttggttcaaaaacacagaagtctctggatcagctgctttgaggaattctggatgggattggaaccatagttttacttgttctgcatccgctttggatgagtcaaattgtgtccaccattttacaaatgcgtgcctttgtagtgatggatattggtttgtcttctcagtcttgctgtaacgatattgccatgagaatatccatgacagtgcaaagcttgaaaagtatttaagatctgctggaattcgtgattcctgcgaattgtattgtttcttaaattgggaaaatccttgttggaccgtttctgggaatatctttgggattggtccaaagaagtcccaccattgcaaaaaccaattgggaaaat

SEQ ID NO: 10765 - DNA, 1063 bp, Glycine max
  Gm_smallRNAprecursor_3598
acggacactattcctacttccgctgacctctggaagtaagaatgcagtatatttgatgaaaatataaactttgaaaacagatatcaaggtcacaccggagaccggcttacaaaacccaggttttcataaacaaagaaaccgaagcggcggcagagccgcacaggatcggtgaagggagaagagagaaggatgaaaaatagaaatttattgaatctagaaagaagcgcttacaaaaatcttgtttcagagcacctctcttccgaaacctggaaaaatggctaaatgaaagggtgcctcacaacatgcttgaggactccttatatagccaaaaatctaagaccggtagttgccggtagttttgaccgggactatttgactgtttgttacaagacaagtagttttgaccgggactttaatggctacaggacaggtagtattgtccagcattaattacacattaattacaaacagacggttttgtgaccgaaattaaatttaatctaaacagataccaaaacaatcatcttcgttttggtaaaagggatcttcttcgtcttcttcagcagaacttgtttcttccttctttgaggatgaagcttcttcttcctgttgtaacatttgtagaacttccttcagatttttagctaagacctcctttgatgtcgatcctgctaaaaatgctgccagatgagacttttggttcaaaaacacagaagtctctggatcagctgctttgaggaattctggatgggattggaaccatagttttacttgttctgcatccgctttggatgagtcaaattgtgtccaccattttacaaatgcgtgcctttgtagtgatggatattggtttgtcttctcagtcttgctgtaacgatattgccatgagaatatccatgacagtgcaaagcttgaaaagtatttaagatctgctggaattcgtgattcctgcgaattgtattgtttcttaaattgggaaaatccttgttggaccgtttctgggaatatctttgggattggtccaaagaagtcccaccattgcaaaaaccaattgggaaaattg

SEQ ID NO: 10766 - DNA, 1063 bp, Glycine max; identical to SEQ ID NO: 10765
  Gm_smallRNAprecursor_3599

SEQ ID NO: 10767 - DNA, 1064 bp, Glycine max
  Gm_smallRNAprecursor_3600
acggacactattcctacttccgctgacctctggaagtaagaatgcagtatatttgatgaaaatataaactttgaaaacagatatcaaggtcacaccggagaccggcttacaaaacccaggttttcataaacaaagaaaccgaagcggcggcagagccgcacaggatcggtgaagggagaagagagaaggatgaaaaatagaaatttattgaatctagaaagaagcgcttacaaaaatcttgtttcagagcacctctcttccgaaacctggaaaaatggctaaatgaaagggtgcctcacaacatgcttgaggactccttatatagccaaaaatctaagaccggtagttgccggtagttttgaccgggactatttgactgtttgttacaagacaagtagttttgaccgggactttaatggctacaggacaggtagtattgtccagcattaattacacattaattacaaacagacggttttgtgaccgaaattaaatttaatctaaacagataccaaaacaatcatcttcgttttggtaaaagggatcttcttcgtcttcttcagcagaacttgtttcttccttctttgaggatgaagcttcttcttcctgttgtaacatttgtagaacttccttcagatttttagctaagacctcctttgatgtcgatcctgctaaaaatgctgccagatgagacttttggttcaaaaacacagaagtctctggatcagctgctttgaggaattctggatgggattggaaccatagttttacttgttctgcatccgctttggatgagtcaaattgtgtccaccattttacaaatgcgtgcctttgtagtgatggatattggtttgtcttctcagtcttgctgtaacgatattgccatgagaatatccatgacagtgcaaagcttgaaaagtatttaagatctgctggaattcgtgattcctgcgaattgtattgtttcttaaattgggaaaatccttgttggaccgtttctgggaatatctttgggattggtccaaagaagtcccaccattgcaaaaaccaattgggaaaattgt

SEQ ID NO: 10768 - DNA, 1209 bp, Glycine max
  Gm_smallRNAprecursor_3601
acggacactattcctacttccgctgacctctggaagtaagaatgcagtatatttgatgaaaatataaactttgaaaacagatatcaaggtcacaccggagaccggcttacaaaacccaggttttcataaacaaagaaaccgaagcggcggcagagccgcacaggatcggtgaagggagaagagagaaggatgaaaaatagaaatttattgaatctagaaagaagcgcttacaaaaatcttgtttcagagcacctctcttccgaaacctggaaaaatggctaaatgaaagggtgcctcacaacatgcttgaggactccttatatagccaaaaatctaagaccggtagttgccggtagttttgaccgggactatttgactgtttgttacaagacaagtagttttgaccgggactttaatggctacaggacaggtagtattgtccagcattaattacacattaattacaaacagacggttttgtgaccgaaattaaatttaatctaaacagataccaaaacaatcatcttcgttttggtaaaagggatcttcttcgtcttcttcagcagaacttgtttcttccttctttgaggatgaagcttcttcttcctgttgtaacatttgtagaacttccttcagatttttagctaagacctcctttgatgtcgatcctgctaaaaatgctgccagatgagacttttggttcaaaaacacagaagtctctggatcagctgctttgaggaattctggatgggattggaaccatagttttacttgttctgcatccgctttggatgagtcaaattgtgtccaccattttacaaatgcgtgcctttgtagtgatggatattggtttgtcttctcagtcttgctgtaacgatattgccatgagaatatccatgacagtgcaaagcttgaaaagtatttaagatctgctggaattcgtgattcctgcgaattgtattgtttcttaaattgggaaaatccttgttggaccgtttctgggaatatctttgggattggtccaaagaagtcccaccattgcaaaaaccaattgggaaaattgtaaattgtgttggtcttgaaatatatcagccatgaatgtttgaagcgggtattttggtgccaaaacaccttagtccaagcatcaacgtaatcccaataggtataacctactggatcaaatggaactgaaaatctctttcctttgtt

SEQ ID NO: 10769 - DNA, 1057 bp, Glycine max
  Gm_smallRNAprecursor_3602
gacactattcctacttccgctgacctctggaagtaagaatgcagtatatttgatgaaaatataaactttgaaaacagatatcaaggtcacaccggagaccggcttacaaaacccaggttttcataaacaaagaaaccgaagcggcggcagagccgcacaggatcggtgaagggagaagagagaaggatgaaaaatagaaatttattgaatctagaaagaagcgcttacaaaaatcttgtttcagagcacctctcttccgaaacctggaaaaatggctaaatgaaagggtgcctcacaacatgcttgaggactccttatatagccaaaaatctaagaccggtagttgccggtagttttgaccgggactatttgactgtttgttacaagacaagtagttttgaccgggactttaatggctacaggacaggtagtattgtccagcattaattacacattaattacaaacagacggttttgtgaccgaaattaaatttaatctaaacagataccaaaacaatcatcttcgttttggtaaaagggatcttcttcgtcttcttcagcagaacttgtttcttccttctttgaggatgaagcttcttcttcctgttgtaacatttgtagaacttccttcagatttttagctaagacctcctttgatgtcgatcctgctaaaaatgctgccagatgagacttttggttcaaaaacacagaagtctctggatcagctgctttgaggaattctggatgggattggaaccatagttttacttgttctgcatccgctttggatgagtcaaattgtgtccaccattttacaaatgcgtgcctttgtagtgatggatattggtttgtcttctcagtcttgctgtaacgatattgccatgagaatatccatgacagtgcaaagcttgaaaagtatttaagatctgctggaattcgtgattcctgcgaattgtattgtttcttaaattgggaaaatccttgttggaccgtttctgggaatatctttgggattggtccaaagaagtcccaccattgcaaaaaccaattgggaaaa

SEQ ID NO: 10770 - DNA, 1058 bp, Glycine max
  Gm_smallRNAprecursor_3603
gacactattcctacttccgctgacctctggaagtaagaatgcagtatatttgatgaaaatataaactttgaaaacagatatcaaggtcacaccggagaccggcttacaaaacccaggttttcataaacaaagaaaccgaagcggcggcagagccgcacaggatcggtgaagggagaagagagaaggatgaaaaatagaaatttattgaatctagaaagaagcgcttacaaaaatcttgtttcagagcacctctcttccgaaacctggaaaaatggctaaatgaaagggtgcctcacaacatgcttgaggactccttatatagccaaaaatctaagaccggtagttgccggtagttttgaccgggactatttgactgtttgttacaagacaagtagttttgaccgggactttaatggctacaggacaggtagtattgtccagcattaattacacattaattacaaacagacggttttgtgaccgaaattaaatttaatctaaacagataccaaaacaatcatcttcgttttggtaaaagggatcttcttcgtcttcttcagcagaacttgtttcttccttctttgaggatgaagcttcttcttcctgttgtaacatttgtagaacttccttcagatttttagctaagacctcctttgatgtcgatcctgctaaaaatgctgccagatgagacttttggttcaaaaacacagaagtctctggatcagctgctttgaggaattctggatgggattggaaccatagttttacttgttctgcatccgctttggatgagtcaaattgtgtccaccattttacaaatgcgtgcctttgtagtgatggatattggtttgtcttctcagtcttgctgtaacgatattgccatgagaatatccatgacagtgcaaagcttgaaaagtatttaagatctgctggaattcgtgattcctgcgaattgtattgtttcttaaattgggaaaatccttgttggaccgtttctgggaatatctttgggattggtccaaagaagtcccaccattgcaaaaaccaattgggaaaat

SEQ ID NO: 10771 - DNA, 1083 bp, Glycine max
  Gm_smallRNAprecursor_3604
gacactattcctacttccgctgacctctggaagtaagaatgcagtatatttgatgaaaatataaactttgaaaacagatatcaaggtcacaccggagaccggcttacaaaacccaggttttcataaacaaagaaaccgaagcggcggcagagccgcacaggatcggtgaagggagaagagagaaggatgaaaaatagaaatttattgaatctagaaagaagcgcttacaaaaatcttgtttcagagcacctctcttccgaaacctggaaaaatggctaaatgaaagggtgcctcacaacatgcttgaggactccttatatagccaaaaatctaagaccggtagttgccggtagttttgaccgggactatttgactgtttgttacaagacaagtagttttgaccgggactttaatggctacaggacaggtagtattgtccagcattaattacacattaattacaaacagacggttttgtgaccgaaattaaatttaatctaaacagataccaaaacaatcatcttcgttttggtaaaagggatcttcttcgtcttcttcagcagaacttgtttcttccttctttgaggatgaagcttcttcttcctgttgtaacatttgtagaacttccttcagatttttagctaagacctcctttgatgtcgatcctgctaaaaatgctgccagatgagacttttggttcaaaaacacagaagtctctggatcagctgctttgaggaattctggatgggattggaaccatagttttacttgttctgcatccgctttggatgagtcaaattgtgtccaccattttacaaatgcgtgcctttgtagtgatggatattggtttgtcttctcagtcttgctgtaacgatattgccatgagaatatccatgacagtgcaaagcttgaaaagtatttaagatctgctggaattcgtgattcctgcgaattgtattgtttcttaaattgggaaaatccttgttggaccgtttctgggaatatctttgggattggtccaaagaagtcccaccattgcaaaaaccaattgggaaaattgtaaattgtgttggtcttgaaata

SEQ ID NO: 10772 - DNA, 1056 bp, Glycine max
  Gm_smallRNAprecursor_3605
acactattcctacttccgctgacctctggaagtaagaatgcagtatatttgatgaaaatataaactttgaaaacagatatcaaggtcacaccggagaccggcttacaaaacccaggttttcataaacaaagaaaccgaagcggcggcagagccgcacaggatcggtgaagggagaagagagaaggatgaaaaatagaaatttattgaatctagaaagaagcgcttacaaaaatcttgtttcagagcacctctcttccgaaacctggaaaaatggctaaatgaaagggtgcctcacaacatgcttgaggactccttatatagccaaaaatctaagaccggtagttgccggtagttttgaccgggactatttgactgtttgttacaagacaagtagttttgaccgggactttaatggctacaggacaggtagtattgtccagcattaattacacattaattacaaacagacggttttgtgaccgaaattaaatttaatctaaacagataccaaaacaatcatcttcgttttggtaaaagggatcttcttcgtcttcttcagcagaacttgtttcttccttctttgaggatgaagcttcttcttcctgttgtaacatttgtagaacttccttcagatttttagctaagacctcctttgatgtcgatcctgctaaaaatgctgccagatgagacttttggttcaaaaacacagaagtctctggatcagctgctttgaggaattctggatgggattggaaccatagttttacttgttctgcatccgctttggatgagtcaaattgtgtccaccattttacaaatgcgtgcctttgtagtgatggatattggtttgtcttctcagtcttgctgtaacgatattgccatgagaatatccatgacagtgcaaagcttgaaaagtatttaagatctgctggaattcgtgattcctgcgaattgtattgtttcttaaattgggaaaatccttgttggaccgtttctgggaatatctttgggattggtccaaagaagtcccaccattgcaaaaaccaattgggaaaa

SEQ ID NO: 10773 - DNA, 1056 bp, Glycine max; identical to SEQ ID NO: 10772
  Gm_smallRNAprecursor_3606

SEQ ID NO: 10774 - DNA, 1057 bp, Glycine max
  Gm_smallRNAprecursor_3607
acactattcctacttccgctgacctctggaagtaagaatgcagtatatttgatgaaaatataaactttgaaaacagatatcaaggtcacaccggagaccggcttacaaaacccaggttttcataaacaaagaaaccgaagcggcggcagagccgcacaggatcggtgaagggagaagagagaaggatgaaaaatagaaatttattgaatctagaaagaagcgcttacaaaaatcttgtttcagagcacctctcttccgaaacctggaaaaatggctaaatgaaagggtgcctcacaacatgcttgaggactccttatatagccaaaaatctaagaccggtagttgccggtagttttgaccgggactatttgactgtttgttacaagacaagtagttttgaccgggactttaatggctacaggacaggtagtattgtccagcattaattacacattaattacaaacagacggttttgtgaccgaaattaaatttaatctaaacagataccaaaacaatcatcttcgttttggtaaaagggatcttcttcgtcttcttcagcagaacttgtttcttccttctttgaggatgaagcttcttcttcctgttgtaacatttgtagaacttccttcagatttttagctaagacctcctttgatgtcgatcctgctaaaaatgctgccagatgagacttttggttcaaaaacacagaagtctctggatcagctgctttgaggaattctggatgggattggaaccatagttttacttgttctgcatccgctttggatgagtcaaattgtgtccaccattttacaaatgcgtgcctttgtagtgatggatattggtttgtcttctcagtcttgctgtaacgatattgccatgagaatatccatgacagtgcaaagcttgaaaagtatttaagatctgctggaattcgtgattcctgcgaattgtattgtttcttaaattgggaaaatccttgttggaccgtttctgggaatatctttgggattggtccaaagaagtcccaccattgcaaaaaccaattgggaaaat

SEQ ID NO: 10775 - DNA, 1059 bp, Glycine max
  Gm_smallRNAprecursor_3608
acactattcctacttccgctgacctctggaagtaagaatgcagtatatttgatgaaaatataaactttgaaaacagatatcaaggtcacaccggagaccggcttacaaaacccaggttttcataaacaaagaaaccgaagcggcggcagagccgcacaggatcggtgaagggagaagagagaaggatgaaaaatagaaatttattgaatctagaaagaagcgcttacaaaaatcttgtttcagagcacctctcttccgaaacctggaaaaatggctaaatgaaagggtgcctcacaacatgcttgaggactccttatatagccaaaaatctaagaccggtagttgccggtagttttgaccgggactatttgactgtttgttacaagacaagtagttttgaccgggactttaatggctacaggacaggtagtattgtccagcattaattacacattaattacaaacagacggttttgtgaccgaaattaaatttaatctaaacagataccaaaacaatcatcttcgttttggtaaaagggatcttcttcgtcttcttcagcagaacttgtttcttccttctttgaggatgaagcttcttcttcctgttgtaacatttgtagaacttccttcagatttttagctaagacctcctttgatgtcgatcctgctaaaaatgctgccagatgagacttttggttcaaaaacacagaagtctctggatcagctgctttgaggaattctggatgggattggaaccatagttttacttgttctgcatccgctttggatgagtcaaattgtgtccaccattttacaaatgcgtgcctttgtagtgatggatattggtttgtcttctcagtcttgctgtaacgatattgccatgagaatatccatgacagtgcaaagcttgaaaagtatttaagatctgctggaattcgtgattcctgcgaattgtattgtttcttaaattgggaaaatccttgttggaccgtttctgggaatatctttgggattggtccaaagaagtcccaccattgcaaaaaccaattgggaaaattg

SEQ ID NO: 10776 - DNA, 1059 bp, Glycine max; identical to SEQ ID NO: 10775
  Gm_smallRNAprecursor_3609

SEQ ID NO: 10777 - DNA, 1082 bp, Glycine max
  Gm_smallRNAprecursor_3610
acactattcctacttccgctgacctctggaagtaagaatgcagtatatttgatgaaaatataaactttgaaaacagatatcaaggtcacaccggagaccggcttacaaaacccaggttttcataaacaaagaaaccgaagcggcggcagagccgcacaggatcggtgaagggagaagagagaaggatgaaaaatagaaatttattgaatctagaaagaagcgcttacaaaaatcttgtttcagagcacctctcttccgaaacctggaaaaatggctaaatgaaagggtgcctcacaacatgcttgaggactccttatatagccaaaaatctaagaccggtagttgccggtagttttgaccgggactatttgactgtttgttacaagacaagtagttttgaccgggactttaatggctacaggacaggtagtattgtccagcattaattacacattaattacaaacagacggttttgtgaccgaaattaaatttaatctaaacagataccaaaacaatcatcttcgttttggtaaaagggatcttcttcgtcttcttcagcagaacttgtttcttccttctttgaggatgaagcttcttcttcctgttgtaacatttgtagaacttccttcagatttttagctaagacctcctttgatgtcgatcctgctaaaaatgctgccagatgagacttttggttcaaaaacacagaagtctctggatcagctgctttgaggaattctggatgggattggaaccatagttttacttgttctgcatccgctttggatgagtcaaattgtgtccaccattttacaaatgcgtgcctttgtagtgatggatattggtttgtcttctcagtcttgctgtaacgatattgccatgagaatatccatgacagtgcaaagcttgaaaagtatttaagatctgctggaattcgtgattcctgcgaattgtattgtttcttaaattgggaaaatccttgttggaccgtttctgggaatatctttgggattggtccaaagaagtcccaccattgcaaaaaccaattgggaaaattgtaaattgtgttggtcttgaaata

SEQ ID NO: 10778 - DNA, 1055 bp, Glycine max
  Gm_smallRNAprecursor_3611
cactattcctacttccgctgacctctggaagtaagaatgcagtatatttgatgaaaatataaactttgaaaacagatatcaaggtcacaccggagaccggcttacaaaacccaggttttcataaacaaagaaaccgaagcggcggcagagccgcacaggatcggtgaagggagaagagagaaggatgaaaaatagaaatttattgaatctagaaagaagcgcttacaaaaatcttgtttcagagcacctctcttccgaaacctggaaaaatggctaaatgaaagggtgcctcacaacatgcttgaggactccttatatagccaaaaatctaagaccggtagttgccggtagttttgaccgggactatttgactgtttgttacaagacaagtagttttgaccgggactttaatggctacaggacaggtagtattgtccagcattaattacacattaattacaaacagacggttttgtgaccgaaattaaatttaatctaaacagataccaaaacaatcatcttcgttttggtaaaagggatcttcttcgtcttcttcagcagaacttgtttcttccttctttgaggatgaagcttcttcttcctgttgtaacatttgtagaacttccttcagatttttagctaagacctcctttgatgtcgatcctgctaaaaatgctgccagatgagacttttggttcaaaaacacagaagtctctggatcagctgctttgaggaattctggatgggattggaaccatagttttacttgttctgcatccgctttggatgagtcaaattgtgtccaccattttacaaatgcgtgcctttgtagtgatggatattggtttgtcttctcagtcttgctgtaacgatattgccatgagaatatccatgacagtgcaaagcttgaaaagtatttaagatctgctggaattcgtgattcctgcgaattgtattgtttcttaaattgggaaaatccttgttggaccgtttctgggaatatctttgggattggtccaaagaagtcccaccattgcaaaaaccaattgggaaaa

SEQ ID NO: 10779 - DNA, 1058 bp, Glycine max
  Gm_smallRNAprecursor_3612
cactattcctacttccgctgacctctggaagtaagaatgcagtatatttgatgaaaatataaactttgaaaacagatatcaaggtcacaccggagaccggcttacaaaacccaggttttcataaacaaagaaaccgaagcggcggcagagccgcacaggatcggtgaagggagaagagagaaggatgaaaaatagaaatttattgaatctagaaagaagcgcttacaaaaatcttgtttcagagcacctctcttccgaaacctggaaaaatggctaaatgaaagggtgcctcacaacatgcttgaggactccttatatagccaaaaatctaagaccggtagttgccggtagttttgaccgggactatttgactgtttgttacaagacaagtagttttgaccgggactttaatggctacaggacaggtagtattgtccagcattaattacacattaattacaaacagacggttttgtgaccgaaattaaatttaatctaaacagataccaaaacaatcatcttcgttttggtaaaagggatcttcttcgtcttcttcagcagaacttgtttcttccttctttgaggatgaagcttcttcttcctgttgtaacatttgtagaacttccttcagatttttagctaagacctcctttgatgtcgatcctgctaaaaatgctgccagatgagacttttggttcaaaaacacagaagtctctggatcagctgctttgaggaattctggatgggattggaaccatagttttacttgttctgcatccgctttggatgagtcaaattgtgtccaccattttacaaatgcgtgcctttgtagtgatggatattggtttgtcttctcagtcttgctgtaacgatattgccatgagaatatccatgacagtgcaaagcttgaaaagtatttaagatctgctggaattcgtgattcctgcgaattgtattgtttcttaaattgggaaaatccttgttggaccgtttctgggaatatctttgggattggtccaaagaagtcccaccattgcaaaaaccaattgggaaaattg

SEQ ID NO: 10780 - DNA, 1058 bp, Glycine max; identical to SEQ ID NO: 10779
  Gm_smallRNAprecursor_3613

SEQ ID NO: 10781 - DNA, 1081 bp, Glycine max
  Gm_smallRNAprecursor_3614
cactattcctacttccgctgacctctggaagtaagaatgcagtatatttgatgaaaatataaactttgaaaacagatatcaaggtcacaccggagaccggcttacaaaacccaggttttcataaacaaagaaaccgaagcggcggcagagccgcacaggatcggtgaagggagaagagagaaggatgaaaaatagaaatttattgaatctagaaagaagcgcttacaaaaatcttgtttcagagcacctctcttccgaaacctggaaaaatggctaaatgaaagggtgcctcacaacatgcttgaggactccttatatagccaaaaatctaagaccggtagttgccggtagttttgaccgggactatttgactgtttgttacaagacaagtagttttgaccgggactttaatggctacaggacaggtagtattgtccagcattaattacacattaattacaaacagacggttttgtgaccgaaattaaatttaatctaaacagataccaaaacaatcatcttcgttttggtaaaagggatcttcttcgtcttcttcagcagaacttgtttcttccttctttgaggatgaagcttcttcttcctgttgtaacatttgtagaacttccttcagatttttagctaagacctcctttgatgtcgatcctgctaaaaatgctgccagatgagacttttggttcaaaaacacagaagtctctggatcagctgctttgaggaattctggatgggattggaaccatagttttacttgttctgcatccgctttggatgagtcaaattgtgtccaccattttacaaatgcgtgcctttgtagtgatggatattggtttgtcttctcagtcttgctgtaacgatattgccatgagaatatccatgacagtgcaaagcttgaaaagtatttaagatctgctggaattcgtgattcctgcgaattgtattgtttcttaaattgggaaaatccttgttggaccgtttctgggaatatctttgggattggtccaaagaagtcccaccattgcaaaaaccaattgggaaaattgtaaattgtgttggtcttgaaata

SEQ ID NO: 10782 - DNA, 1188 bp, Glycine max
  Gm_smallRNAprecursor_3615
ctacttccgctgacctctggaagtaagaatgcagtatatttgatgaaaatataaactttgaaaacagatatcaaggtcacaccggagaccggcttacaaaacccaggttttcataaacaaagaaaccgaagcggcggcagagccgcacaggatcggtgaagggagaagagagaaggatgaaaaatagaaatttattgaatctagaaagaagcgcttacaaaaatcttgtttcagagcacctctcttccgaaacctggaaaaatggctaaatgaaagggtgcctcacaacatgcttgaggactccttatatagccaaaaatctaagaccggtagttgccggtagttttgaccgggactatttgactgtttgttacaagacaagtagttttgaccgggactttaatggctacaggacaggtagtattgtccagcattaattacacattaattacaaacagacggttttgtgaccgaaattaaatttaatctaaacagataccaaaacaatcatcttcgttttggtaaaagggatcttcttcgtcttcttcagcagaacttgtttcttccttctttgaggatgaagcttcttcttcctgttgtaacatttgtagaacttccttcagatttttagctaagacctcctttgatgtcgatcctgctaaaaatgctgccagatgagacttttggttcaaaaacacagaagtctctggatcagctgctttgaggaattctggatgggattggaaccatagttttacttgttctgcatccgctttggatgagtcaaattgtgtccaccattttacaaatgcgtgcctttgtagtgatggatattggtttgtcttctcagtcttgctgtaacgatattgccatgagaatatccatgacagtgcaaagcttgaaaagtatttaagatctgctggaattcgtgattcctgcgaattgtattgtttcttaaattgggaaaatccttgttggaccgtttctgggaatatctttgggattggtccaaagaagtcccaccattgcaaaaaccaattgggaaaattgtaaattgtgttggtcttgaaatatatcagccatgaatgtttgaagcgggtattttggtgccaaaacaccttagtccaagcatcaacgtaatcccaataggtataacctactggatcaaatggaactgaaaatctcttt

SEQ ID NO: 10783 - DNA, 1142 bp, Glycine max
  Gm_smallRNAprecursor_3616
aaatataaactttgaaaacagatatcaaggtcacaccggagaccggcttacaaaacccaggttttcataaacaaagaaaccgaagcggcggcagagccgcacaggatcggtgaagggagaagagagaaggatgaaaaatagaaatttattgaatctagaaagaagcgcttacaaaaatcttgtttcagagcacctctcttccgaaacctggaaaaatggctaaatgaaagggtgcctcacaacatgcttgaggactccttatatagccaaaaatctaagaccggtagttgccggtagttttgaccgggactatttgactgtttgttacaagacaagtagttttgaccgggactttaatggctacaggacaggtagtattgtccagcattaattacacattaattacaaacagacggttttgtgaccgaaattaaatttaatctaaacagataccaaaacaatcatcttcgttttggtaaaagggatcttcttcgtcttcttcagcagaacttgtttcttccttctttgaggatgaagcttcttcttcctgttgtaacatttgtagaacttccttcagatttttagctaagacctcctttgatgtcgatcctgctaaaaatgctgccagatgagacttttggttcaaaaacacagaagtctctggatcagctgctttgaggaattctggatgggattggaaccatagttttacttgttctgcatccgctttggatgagtcaaattgtgtccaccattttacaaatgcgtgcctttgtagtgatggatattggtttgtcttctcagtcttgctgtaacgatattgccatgagaatatccatgacagtgcaaagcttgaaaagtatttaagatctgctggaattcgtgattcctgcgaattgtattgtttcttaaattgggaaaatccttgttggaccgtttctgggaatatctttgggattggtccaaagaagtcccaccattgcaaaaaccaattgggaaaattgtaaattgtgttggtcttgaaatatatcagccatgaatgtttgaagcgggtattttggtgccaaaacaccttagtccaagcatcaacgtaatcccaataggtataacctactggatcaaatggaactgaaaatctcttt

SEQ ID NO: 10784 - DNA, 1141 bp, Glycine max
  Gm_smallRNAprecursor_3617
aatataaactttgaaaacagatatcaaggtcacaccggagaccggcttacaaaacccaggttttcataaacaaagaaaccgaagcggcggcagagccgcacaggatcggtgaagggagaagagagaaggatgaaaaatagaaatttattgaatctagaaagaagcgcttacaaaaatcttgtttcagagcacctctcttccgaaacctggaaaaatggctaaatgaaagggtgcctcacaacatgcttgaggactccttatatagccaaaaatctaagaccggtagttgccggtagttttgaccgggactatttgactgtttgttacaagacaagtagttttgaccgggactttaatggctacaggacaggtagtattgtccagcattaattacacattaattacaaacagacggttttgtgaccgaaattaaatttaatctaaacagataccaaaacaatcatcttcgttttggtaaaagggatcttcttcgtcttcttcagcagaacttgtttcttccttctttgaggatgaagcttcttcttcctgttgtaacatttgtagaacttccttcagatttttagctaagacctcctttgatgtcgatcctgctaaaaatgctgccagatgagacttttggttcaaaaacacagaagtctctggatcagctgctttgaggaattctggatgggattggaaccatagttttacttgttctgcatccgctttggatgagtcaaattgtgtccaccattttacaaatgcgtgcctttgtagtgatggatattggtttgtcttctcagtcttgctgtaacgatattgccatgagaatatccatgacagtgcaaagcttgaaaagtatttaagatctgctggaattcgtgattcctgcgaattgtattgtttcttaaattgggaaaatccttgttggaccgtttctgggaatatctttgggattggtccaaagaagtcccaccattgcaaaaaccaattgggaaaattgtaaattgtgttggtcttgaaatatatcagccatgaatgtttgaagcgggtattttggtgccaaaacaccttagtccaagcatcaacgtaatcccaataggtataacctactggatcaaatggaactgaaaatctcttt

SEQ ID NO: 10785 - DNA, 1054 bp, Glycine max
  Gm_smallRNAprecursor_3618
atcggtgaagggagaagagagaaggatgaaaaatagaaatttattgaatctagaaagaagcgcttacaaaaatcttgtttcagagcacctctcttccgaaacctggaaaaatggctaaatgaaagggtgcctcacaacatgcttgaggactccttatatagccaaaaatctaagaccggtagttgccggtagttttgaccgggactatttgactgtttgttacaagacaagtagttttgaccgggactttaatggctacaggacaggtagtattgtccagcattaattacacattaattacaaacagacggttttgtgaccgaaattaaatttaatctaaacagataccaaaacaatcatcttcgttttggtaaaagggatcttcttcgtcttcttcagcagaacttgtttcttccttctttgaggatgaagcttcttcttcctgttgtaacatttgtagaacttccttcagatttttagctaagacctcctttgatgtcgatcctgctaaaaatgctgccagatgagacttttggttcaaaaacacagaagtctctggatcagctgctttgaggaattctggatgggattggaaccatagttttacttgttctgcatccgctttggatgagtcaaattgtgtccaccattttacaaatgcgtgcctttgtagtgatggatattggtttgtcttctcagtcttgctgtaacgatattgccatgagaatatccatgacagtgcaaagcttgaaaagtatttaagatctgctggaattcgtgattcctgcgaattgtattgtttcttaaattgggaaaatccttgttggaccgtttctgggaatatctttgggattggtccaaagaagtcccaccattgcaaaaaccaattgggaaaattgtaaattgtgttggtcttgaaatatatcagccatgaatgtttgaagcgggtattttggtgccaaaacaccttagtccaagcatcaacgtaatcccaataggtataacctactggatcaaatggaactgaaaatctctttcctttgttcaagtccga

SEQ ID NO: 10786 - DNA, 1055 bp, Glycine max
  Gm_smallRNAprecursor_3619
atcggtgaagggagaagagagaaggatgaaaaatagaaatttattgaatctagaaagaagcgcttacaaaaatcttgtttcagagcacctctcttccgaaacctggaaaaatggctaaatgaaagggtgcctcacaacatgcttgaggactccttatatagccaaaaatctaagaccggtagttgccggtagttttgaccgggactatttgactgtttgttacaagacaagtagttttgaccgggactttaatggctacaggacaggtagtattgtccagcattaattacacattaattacaaacagacggttttgtgaccgaaattaaatttaatctaaacagataccaaaacaatcatcttcgttttggtaaaagggatcttcttcgtcttcttcagcagaacttgtttcttccttctttgaggatgaagcttcttcttcctgttgtaacatttgtagaacttccttcagatttttagctaagacctcctttgatgtcgatcctgctaaaaatgctgccagatgagacttttggttcaaaaacacagaagtctctggatcagctgctttgaggaattctggatgggattggaaccatagttttacttgttctgcatccgctttggatgagtcaaattgtgtccaccattttacaaatgcgtgcctttgtagtgatggatattggtttgtcttctcagtcttgctgtaacgatattgccatgagaatatccatgacagtgcaaagcttgaaaagtatttaagatctgctggaattcgtgattcctgcgaattgtattgtttcttaaattgggaaaatccttgttggaccgtttctgggaatatctttgggattggtccaaagaagtcccaccattgcaaaaaccaattgggaaaattgtaaattgtgttggtcttgaaatatatcagccatgaatgtttgaagcgggtattttggtgccaaaacaccttagtccaagcatcaacgtaatcccaataggtataacctactggatcaaatggaactgaaaatctctttcctttgttcaagtccgaa

SEQ ID NO: 10787 - DNA, 1053 bp, Glycine max
  Gm_smallRNAprecursor_3620
tcggtgaagggagaagagagaaggatgaaaaatagaaatttattgaatctagaaagaagcgcttacaaaaatcttgtttcagagcacctctcttccgaaacctggaaaaatggctaaatgaaagggtgcctcacaacatgcttgaggactccttatatagccaaaaatctaagaccggtagttgccggtagttttgaccgggactatttgactgtttgttacaagacaagtagttttgaccgggactttaatggctacaggacaggtagtattgtccagcattaattacacattaattacaaacagacggttttgtgaccgaaattaaatttaatctaaacagataccaaaacaatcatcttcgttttggtaaaagggatcttcttcgtcttcttcagcagaacttgtttcttccttctttgaggatgaagcttcttcttcctgttgtaacatttgtagaacttccttcagatttttagctaagacctcctttgatgtcgatcctgctaaaaatgctgccagatgagacttttggttcaaaaacacagaagtctctggatcagctgctttgaggaattctggatgggattggaaccatagttttacttgttctgcatccgctttggatgagtcaaattgtgtccaccattttacaaatgcgtgcctttgtagtgatggatattggtttgtcttctcagtcttgctgtaacgatattgccatgagaatatccatgacagtgcaaagcttgaaaagtatttaagatctgctggaattcgtgattcctgcgaattgtattgtttcttaaattgggaaaatccttgttggaccgtttctgggaatatctttgggattggtccaaagaagtcccaccattgcaaaaaccaattgggaaaattgtaaattgtgttggtcttgaaatatatcagccatgaatgtttgaagcgggtattttggtgccaaaacaccttagtccaagcatcaacgtaatcccaataggtataacctactggatcaaatggaactgaaaatctctttcctttgttcaagtccga

SEQ ID NO: 10788 - DNA, 1042 bp, Glycine max
  Gm_smallRNAprecursor_3621
agggagaagagagaaggatgaaaaatagaaatttattgaatctagaaagaagcgcttacaaaaatcttgtttcagagcacctctcttccgaaacctggaaaaatggctaaatgaaagggtgcctcacaacatgcttgaggactccttatatagccaaaaatctaagaccggtagttgccggtagttttgaccgggactatttgactgtttgttacaagacaagtagttttgaccgggactttaatggctacaggacaggtagtattgtccagcattaattacacattaattacaaacagacggttttgtgaccgaaattaaatttaatctaaacagataccaaaacaatcatcttcgttttggtaaaagggatcttcttcgtcttcttcagcagaacttgtttcttccttctttgaggatgaagcttcttcttcctgttgtaacatttgtagaacttccttcagatttttagctaagacctcctttgatgtcgatcctgctaaaaatgctgccagatgagacttttggttcaaaaacacagaagtctctggatcagctgctttgaggaattctggatgggattggaaccatagttttacttgttctgcatccgctttggatgagtcaaattgtgtccaccattttacaaatgcgtgcctttgtagtgatggatattggtttgtcttctcagtcttgctgtaacgatattgccatgagaatatccatgacagtgcaaagcttgaaaagtatttaagatctgctggaattcgtgattcctgcgaattgtattgtttcttaaattgggaaaatccttgttggaccgtttctgggaatatctttgggattggtccaaagaagtcccaccattgcaaaaaccaattgggaaaattgtaaattgtgttggtcttgaaatatatcagccatgaatgtttgaagcgggtattttggtgccaaaacaccttagtccaagcatcaacgtaatcccaataggtataacctactggatcaaatggaactgaaaatctctttcctttgttcaagt

SEQ ID NO: 10789 - DNA, 1032 bp, Glycine max
  Gm_smallRNAprecursor_3622
gaagagagaaggatgaaaaatagaaatttattgaatctagaaagaagcgcttacaaaaatcttgtttcagagcacctctcttccgaaacctggaaaaatggctaaatgaaagggtgcctcacaacatgcttgaggactccttatatagccaaaaatctaagaccggtagttgccggtagttttgaccgggactatttgactgtttgttacaagacaagtagttttgaccgggactttaatggctacaggacaggtagtattgtccagcattaattacacattaattacaaacagacggttttgtgaccgaaattaaatttaatctaaacagataccaaaacaatcatcttcgttttggtaaaagggatcttcttcgtcttcttcagcagaacttgtttcttccttctttgaggatgaagcttcttcttcctgttgtaacatttgtagaacttccttcagatttttagctaagacctcctttgatgtcgatcctgctaaaaatgctgccagatgagacttttggttcaaaaacacagaagtctctggatcagctgctttgaggaattctggatgggattggaaccatagttttacttgttctgcatccgctttggatgagtcaaattgtgtccaccattttacaaatgcgtgcctttgtagtgatggatattggtttgtcttctcagtcttgctgtaacgatattgccatgagaatatccatgacagtgcaaagcttgaaaagtatttaagatctgctggaattcgtgattcctgcgaattgtattgtttcttaaattgggaaaatccttgttggaccgtttctgggaatatctttgggattggtccaaagaagtcccaccattgcaaaaaccaattgggaaaattgtaaattgtgttggtcttgaaatatatcagccatgaatgtttgaagcgggtattttggtgccaaaacaccttagtccaagcatcaacgtaatcccaataggtataacctactggatcaaatggaactgaaaatctctttcctttgtt

SEQ ID NO: 10790 - DNA, 1058 bp, Glycine max
  Gm_smallRNAprecursor_3623
aaatttattgaatctagaaagaagcgcttacaaaaatcttgtttcagagcacctctcttccgaaacctggaaaaatggctaaatgaaagggtgcctcacaacatgcttgaggactccttatatagccaaaaatctaagaccggtagttgccggtagttttgaccgggactatttgactgtttgttacaagacaagtagttttgaccgggactttaatggctacaggacaggtagtattgtccagcattaattacacattaattacaaacagacggttttgtgaccgaaattaaatttaatctaaacagataccaaaacaatcatcttcgttttggtaaaagggatcttcttcgtcttcttcagcagaacttgtttcttccttctttgaggatgaagcttcttcttcctgttgtaacatttgtagaacttccttcagatttttagctaagacctcctttgatgtcgatcctgctaaaaatgctgccagatgagacttttggttcaaaaacacagaagtctctggatcagctgctttgaggaattctggatgggattggaaccatagttttacttgttctgcatccgctttggatgagtcaaattgtgtccaccattttacaaatgcgtgcctttgtagtgatggatattggtttgtcttctcagtcttgctgtaacgatattgccatgagaatatccatgacagtgcaaagcttgaaaagtatttaagatctgctggaattcgtgattcctgcgaattgtattgtttcttaaattgggaaaatccttgttggaccgtttctgggaatatctttgggattggtccaaagaagtcccaccattgcaaaaaccaattgggaaaattgtaaattgtgttggtcttgaaatatatcagccatgaatgtttgaagcgggtattttggtgccaaaacaccttagtccaagcatcaacgtaatcccaataggtataacctactggatcaaatggaactgaaaatctctttcctttgttcaagtccgaaccaaagtgtcttggttgaagaacttttagtatttggatg

SEQ ID NO: 10791 - DNA, 1173 bp, Glycine max
  Gm_smallRNAprecursor_3624
aagaagcgcttacaaaaatcttgtttcagagcacctctcttccgaaacctggaaaaatggctaaatgaaagggtgcctcacaacatgcttgaggactccttatatagccaaaaatctaagaccggtagttgccggtagttttgaccgggactatttgactgtttgttacaagacaagtagttttgaccgggactttaatggctacaggacaggtagtattgtccagcattaattacacattaattacaaacagacggttttgtgaccgaaattaaatttaatctaaacagataccaaaacaatcatcttcgttttggtaaaagggatcttcttcgtcttcttcagcagaacttgtttcttccttctttgaggatgaagcttcttcttcctgttgtaacatttgtagaacttccttcagatttttagctaagacctcctttgatgtcgatcctgctaaaaatgctgccagatgagacttttggttcaaaaacacagaagtctctggatcagctgctttgaggaattctggatgggattggaaccatagttttacttgttctgcatccgctttggatgagtcaaattgtgtccaccattttacaaatgcgtgcctttgtagtgatggatattggtttgtcttctcagtcttgctgtaacgatattgccatgagaatatccatgacagtgcaaagcttgaaaagtatttaagatctgctggaattcgtgattcctgcgaattgtattgtttcttaaattgggaaaatccttgttggaccgtttctgggaatatctttgggattggtccaaagaagtcccaccattgcaaaaaccaattgggaaaattgtaaattgtgttggtcttgaaatatatcagccatgaatgtttgaagcgggtattttggtgccaaaacaccttagtccaagcatcaacgtaatcccaataggtataacctactggatcaaatggaactgaaaatctctttcctttgttcaagtccgaaccaaagtgtcttggttgaagaacttttagtatttggatggttgagtgggtgtttaaggtttggtcttttggatctttgaaatgtttgatagatactgagttcgaatctaccaaaatcaattcataaaaagttcttgtcttcaggatagtggttggtttgtagtgaaatcctg

SEQ ID NO: 10792 - DNA, 1078 bp, Glycine max
  Gm_smallRNAprecursor_3625
ttacaaaaatcttgtttcagagcacctctcttccgaaacctggaaaaatggctaaatgaaagggtgcctcacaacatgcttgaggactccttatatagccaaaaatctaagaccggtagttgccggtagttttgaccgggactatttgactgtttgttacaagacaagtagttttgaccgggactttaatggctacaggacaggtagtattgtccagcattaattacacattaattacaaacagacggttttgtgaccgaaattaaatttaatctaaacagataccaaaacaatcatcttcgttttggtaaaagggatcttcttcgtcttcttcagcagaacttgtttcttccttctttgaggatgaagcttcttcttcctgttgtaacatttgtagaacttccttcagatttttagctaagacctcctttgatgtcgatcctgctaaaaatgctgccagatgagacttttggttcaaaaacacagaagtctctggatcagctgctttgaggaattctggatgggattggaaccatagttttacttgttctgcatccgctttggatgagtcaaattgtgtccaccattttacaaatgcgtgcctttgtagtgatggatattggtttgtcttctcagtcttgctgtaacgatattgccatgagaatatccatgacagtgcaaagcttgaaaagtatttaagatctgctggaattcgtgattcctgcgaattgtattgtttcttaaattgggaaaatccttgttggaccgtttctgggaatatctttgggattggtccaaagaagtcccaccattgcaaaaaccaattgggaaaattgtaaattgtgttggtcttgaaatatatcagccatgaatgtttgaagcgggtattttggtgccaaaacaccttagtccaagcatcaacgtaatcccaataggtataacctactggatcaaatggaactgaaaatctctttcctttgttcaagtccgaaccaaagtgtcttggttgaagaacttttagtatttggatggttgagtgggtgtttaaggtttggtcttttggatctttgaaatgttt

SEQ ID NO: 10793 - DNA, 1164 bp, Glycine max
  Gm_smallRNAprecursor_3626
ttacaaaaatcttgtttcagagcacctctcttccgaaacctggaaaaatggctaaatgaaagggtgcctcacaacatgcttgaggactccttatatagccaaaaatctaagaccggtagttgccggtagttttgaccgggactatttgactgtttgttacaagacaagtagttttgaccgggactttaatggctacaggacaggtagtattgtccagcattaattacacattaattacaaacagacggttttgtgaccgaaattaaatttaatctaaacagataccaaaacaatcatcttcgttttggtaaaagggatcttcttcgtcttcttcagcagaacttgtttcttccttctttgaggatgaagcttcttcttcctgttgtaacatttgtagaacttccttcagatttttagctaagacctcctttgatgtcgatcctgctaaaaatgctgccagatgagacttttggttcaaaaacacagaagtctctggatcagctgctttgaggaattctggatgggattggaaccatagttttacttgttctgcatccgctttggatgagtcaaattgtgtccaccattttacaaatgcgtgcctttgtagtgatggatattggtttgtcttctcagtcttgctgtaacgatattgccatgagaatatccatgacagtgcaaagcttgaaaagtatttaagatctgctggaattcgtgattcctgcgaattgtattgtttcttaaattgggaaaatccttgttggaccgtttctgggaatatctttgggattggtccaaagaagtcccaccattgcaaaaaccaattgggaaaattgtaaattgtgttggtcttgaaatatatcagccatgaatgtttgaagcgggtattttggtgccaaaacaccttagtccaagcatcaacgtaatcccaataggtataacctactggatcaaatggaactgaaaatctctttcctttgttcaagtccgaaccaaagtgtcttggttgaagaacttttagtatttggatggttgagtgggtgtttaaggtttggtcttttggatctttgaaatgtttgatagatactgagttcgaatctaccaaaatcaattcataaaaagttcttgtcttcaggatagtggttggtttgtagtgaaatcctg

SEQ ID NO: 10794 - DNA, 1077 bp, Glycine max
  Gm_smallRNAprecursor_3627
tacaaaaatcttgtttcagagcacctctcttccgaaacctggaaaaatggctaaatgaaagggtgcctcacaacatgcttgaggactccttatatagccaaaaatctaagaccggtagttgccggtagttttgaccgggactatttgactgtttgttacaagacaagtagttttgaccgggactttaatggctacaggacaggtagtattgtccagcattaattacacattaattacaaacagacggttttgtgaccgaaattaaatttaatctaaacagataccaaaacaatcatcttcgttttggtaaaagggatcttcttcgtcttcttcagcagaacttgtttcttccttctttgaggatgaagcttcttcttcctgttgtaacatttgtagaacttccttcagatttttagctaagacctcctttgatgtcgatcctgctaaaaatgctgccagatgagacttttggttcaaaaacacagaagtctctggatcagctgctttgaggaattctggatgggattggaaccatagttttacttgttctgcatccgctttggatgagtcaaattgtgtccaccattttacaaatgcgtgcctttgtagtgatggatattggtttgtcttctcagtcttgctgtaacgatattgccatgagaatatccatgacagtgcaaagcttgaaaagtatttaagatctgctggaattcgtgattcctgcgaattgtattgtttcttaaattgggaaaatccttgttggaccgtttctgggaatatctttgggattggtccaaagaagtcccaccattgcaaaaaccaattgggaaaattgtaaattgtgttggtcttgaaatatatcagccatgaatgtttgaagcgggtattttggtgccaaaacaccttagtccaagcatcaacgtaatcccaataggtataacctactggatcaaatggaactgaaaatctctttcctttgttcaagtccgaaccaaagtgtcttggttgaagaacttttagtatttggatggttgagtgggtgtttaaggtttggtcttttggatctttgaaatgttt

SEQ ID NO: 10795 - DNA, 1163 bp, Glycine max
  Gm_smallRNAprecursor_3628
tacaaaaatcttgtttcagagcacctctcttccgaaacctggaaaaatggctaaatgaaagggtgcctcacaacatgcttgaggactccttatatagccaaaaatctaagaccggtagttgccggtagttttgaccgggactatttgactgtttgttacaagacaagtagttttgaccgggactttaatggctacaggacaggtagtattgtccagcattaattacacattaattacaaacagacggttttgtgaccgaaattaaatttaatctaaacagataccaaaacaatcatcttcgttttggtaaaagggatcttcttcgtcttcttcagcagaacttgtttcttccttctttgaggatgaagcttcttcttcctgttgtaacatttgtagaacttccttcagatttttagctaagacctcctttgatgtcgatcctgctaaaaatgctgccagatgagacttttggttcaaaaacacagaagtctctggatcagctgctttgaggaattctggatgggattggaaccatagttttacttgttctgcatccgctttggatgagtcaaattgtgtccaccattttacaaatgcgtgcctttgtagtgatggatattggtttgtcttctcagtcttgctgtaacgatattgccatgagaatatccatgacagtgcaaagcttgaaaagtatttaagatctgctggaattcgtgattcctgcgaattgtattgtttcttaaattgggaaaatccttgttggaccgtttctgggaatatctttgggattggtccaaagaagtcccaccattgcaaaaaccaattgggaaaattgtaaattgtgttggtcttgaaatatatcagccatgaatgtttgaagcgggtattttggtgccaaaacaccttagtccaagcatcaacgtaatcccaataggtataacctactggatcaaatggaactgaaaatctctttcctttgttcaagtccgaaccaaagtgtcttggttgaagaacttttagtatttggatggttgagtgggtgtttaaggtttggtcttttggatctttgaaatgtttgatagatactgagttcgaatctaccaaaatcaattcataaaaagttcttgtcttcaggatagtggttggtttgtagtgaaatcctg

SEQ ID NO: 10796 - DNA, 1131 bp, Glycine max
  Gm_smallRNAprecursor_3629
acaagtagttttgaccgggactttaatggctacaggacaggtagtattgtccagcattaattacacattaattacaaacagacggttttgtgaccgaaattaaatttaatctaaacagataccaaaacaatcatcttcgttttggtaaaagggatcttcttcgtcttcttcagcagaacttgtttcttccttctttgaggatgaagcttcttcttcctgttgtaacatttgtagaacttccttcagatttttagctaagacctcctttgatgtcgatcctgctaaaaatgctgccagatgagacttttggttcaaaaacacagaagtctctggatcagctgctttgaggaattctggatgggattggaaccatagttttacttgttctgcatccgctttggatgagtcaaattgtgtccaccattttacaaatgcgtgcctttgtagtgatggatattggtttgtcttctcagtcttgctgtaacgatattgccatgagaatatccatgacagtgcaaagcttgaaaagtatttaagatctgctggaattcgtgattcctgcgaattgtattgtttcttaaattgggaaaatccttgttggaccgtttctgggaatatctttgggattggtccaaagaagtcccaccattgcaaaaaccaattgggaaaattgtaaattgtgttggtcttgaaatatatcagccatgaatgtttgaagcgggtattttggtgccaaaacaccttagtccaagcatcaacgtaatcccaataggtataacctactggatcaaatggaactgaaaatctctttcctttgttcaagtccgaaccaaagtgtcttggttgaagaacttttagtatttggatggttgagtgggtgtttaaggtttggtcttttggatctttgaaatgtttgatagatactgagttcgaatctaccaaaatcaattcataaaaagttcttgtcttcaggatagtggttggtttgtagtgaaatcctggtgggaaagccttggccgtcgccttgaagggatttttgtcccaaaattcaggttccatctgcaaaacagttaacaatttatttttataaatataattgttagtttgtttggtaggtggtgtttgagcttt

SEQ ID NO: 10797 - DNA, 1146 bp, Glycine max
  Gm_smallRNAprecursor_3630
gctacaggacaggtagtattgtccagcattaattacacattaattacaaacagacggttttgtgaccgaaattaaatttaatctaaacagataccaaaacaatcatcttcgttttggtaaaagggatcttcttcgtcttcttcagcagaacttgtttcttccttctttgaggatgaagcttcttcttcctgttgtaacatttgtagaacttccttcagatttttagctaagacctcctttgatgtcgatcctgctaaaaatgctgccagatgagacttttggttcaaaaacacagaagtctctggatcagctgctttgaggaattctggatgggattggaaccatagttttacttgttctgcatccgctttggatgagtcaaattgtgtccaccattttacaaatgcgtgcctttgtagtgatggatattggtttgtcttctcagtcttgctgtaacgatattgccatgagaatatccatgacagtgcaaagcttgaaaagtatttaagatctgctggaattcgtgattcctgcgaattgtattgtttcttaaattgggaaaatccttgttggaccgtttctgggaatatctttgggattggtccaaagaagtcccaccattgcaaaaaccaattgggaaaattgtaaattgtgttggtcttgaaatatatcagccatgaatgtttgaagcgggtattttggtgccaaaacaccttagtccaagcatcaacgtaatcccaataggtataacctactggatcaaatggaactgaaaatctctttcctttgttcaagtccgaaccaaagtgtcttggttgaagaacttttagtatttggatggttgagtgggtgtttaaggtttggtcttttggatctttgaaatgtttgatagatactgagttcgaatctaccaaaatcaattcataaaaagttcttgtcttcaggatagtggttggtttgtagtgaaatcctggtgggaaagccttggccgtcgccttgaagggatttttgtcccaaaattcaggttccatctgcaaaacagttaacaatttatttttataaatataattgttagtttgtttggtaggtggtgtttgagctttggctaaaggtagttttcctttagtattggtggctgttttggtc

SEQ ID NO: 10798 - DNA, 1031 bp, Glycine max
  Gm_smallRNAprecursor_3631
taaatttaatctaaacagataccaaaacaatcatcttcgttttggtaaaagggatcttcttcgtcttcttcagcagaacttgtttcttccttctttgaggatgaagcttcttcttcctgttgtaacatttgtagaacttccttcagatttttagctaagacctcctttgatgtcgatcctgctaaaaatgctgccagatgagacttttggttcaaaaacacagaagtctctggatcagctgctttgaggaattctggatgggattggaaccatagttttacttgttctgcatccgctttggatgagtcaaattgtgtccaccattttacaaatgcgtgcctttgtagtgatggatattggtttgtcttctcagtcttgctgtaacgatattgccatgagaatatccatgacagtgcaaagcttgaaaagtatttaagatctgctggaattcgtgattcctgcgaattgtattgtttcttaaattgggaaaatccttgttggaccgtttctgggaatatctttgggattggtccaaagaagtcccaccattgcaaaaaccaattgggaaaattgtaaattgtgttggtcttgaaatatatcagccatgaatgtttgaagcgggtattttggtgccaaaacaccttagtccaagcatcaacgtaatcccaataggtataacctactggatcaaatggaactgaaaatctctttcctttgttcaagtccgaaccaaagtgtcttggttgaagaacttttagtatttggatggttgagtgggtgtttaaggtttggtcttttggatctttgaaatgtttgatagatactgagttcgaatctaccaaaatcaattcataaaaagttcttgtcttcaggatagtggttggtttgtagtgaaatcctggtgggaaagccttggccgtcgccttgaagggatttttgtcccaaaattcaggttccatctgcaaaacagttaacaatttatttttataaatataattgttagtttgtttggtaggtggtgtttgagcttt

SEQ ID NO: 10799 - DNA, 1134 bp, Glycine max
  Gm_smallRNAprecursor_3632
taaatttaatctaaacagataccaaaacaatcatcttcgttttggtaaaagggatcttcttcgtcttcttcagcagaacttgtttcttccttctttgaggatgaagcttcttcttcctgttgtaacatttgtagaacttccttcagatttttagctaagacctcctttgatgtcgatcctgctaaaaatgctgccagatgagacttttggttcaaaaacacagaagtctctggatcagctgctttgaggaattctggatgggattggaaccatagttttacttgttctgcatccgctttggatgagtcaaattgtgtccaccattttacaaatgcgtgcctttgtagtgatggatattggtttgtcttctcagtcttgctgtaacgatattgccatgagaatatccatgacagtgcaaagcttgaaaagtatttaagatctgctggaattcgtgattcctgcgaattgtattgtttcttaaattgggaaaatccttgttggaccgtttctgggaatatctttgggattggtccaaagaagtcccaccattgcaaaaaccaattgggaaaattgtaaattgtgttggtcttgaaatatatcagccatgaatgtttgaagcgggtattttggtgccaaaacaccttagtccaagcatcaacgtaatcccaataggtataacctactggatcaaatggaactgaaaatctctttcctttgttcaagtccgaaccaaagtgtcttggttgaagaacttttagtatttggatggttgagtgggtgtttaaggtttggtcttttggatctttgaaatgtttgatagatactgagttcgaatctaccaaaatcaattcataaaaagttcttgtcttcaggatagtggttggtttgtagtgaaatcctggtgggaaagccttggccgtcgccttgaagggatttttgtcccaaaattcaggttccatctgcaaaacagttaacaatttatttttataaatataattgttagtttgtttggtaggtggtgtttgagctttggctaaaggtagttttcctttagtattggtggctgttttggtcattgacgcattttggatcattgtttgtaaatttgattcagattcatcatcagattctgag

SEQ ID NO: 10800 - DNA, 1080 bp, Glycine max
  Gm_smallRNAprecursor_3633
ttcagcagaacttgtttcttccttctttgaggatgaagcttcttcttcctgttgtaacatttgtagaacttccttcagatttttagctaagacctcctttgatgtcgatcctgctaaaaatgctgccagatgagacttttggttcaaaaacacagaagtctctggatcagctgctttgaggaattctggatgggattggaaccatagttttacttgttctgcatccgctttggatgagtcaaattgtgtccaccattttacaaatgcgtgcctttgtagtgatggatattggtttgtcttctcagtcttgctgtaacgatattgccatgagaatatccatgacagtgcaaagcttgaaaagtatttaagatctgctggaattcgtgattcctgcgaattgtattgtttcttaaattgggaaaatccttgttggaccgtttctgggaatatctttgggattggtccaaagaagtcccaccattgcaaaaaccaattgggaaaattgtaaattgtgttggtcttgaaatatatcagccatgaatgtttgaagcgggtattttggtgccaaaacaccttagtccaagcatcaacgtaatcccaataggtataacctactggatcaaatggaactgaaaatctctttcctttgttcaagtccgaaccaaagtgtcttggttgaagaacttttagtatttggatggttgagtgggtgtttaaggtttggtcttttggatctttgaaatgtttgatagatactgagttcgaatctaccaaaatcaattcataaaaagttcttgtcttcaggatagtggttggtttgtagtgaaatcctggtgggaaagccttggccgtcgccttgaagggatttttgtcccaaaattcaggttccatctgcaaaacagttaacaatttatttttataaatataattgttagtttgtttggtaggtggtgtttgagctttggctaaaggtagttttcctttagtattggtggctgttttggtcattgacgcattttggatcattgtttgtaaatttgattcagattcatcatcagattctgaggcaatgtctgccca

SEQ ID NO: 10801 - DNA, 1123 bp, Glycine max
  Gm_smallRNAprecursor_3634
atgaagcttcttcttcctgttgtaacatttgtagaacttccttcagatttttagctaagacctcctttgatgtcgatcctgctaaaaatgctgccagatgagacttttggttcaaaaacacagaagtctctggatcagctgctttgaggaattctggatgggattggaaccatagttttacttgttctgcatccgctttggatgagtcaaattgtgtccaccattttacaaatgcgtgcctttgtagtgatggatattggtttgtcttctcagtcttgctgtaacgatattgccatgagaatatccatgacagtgcaaagcttgaaaagtatttaagatctgctggaattcgtgattcctgcgaattgtattgtttcttaaattgggaaaatccttgttggaccgtttctgggaatatctttgggattggtccaaagaagtcccaccattgcaaaaaccaattgggaaaattgtaaattgtgttggtcttgaaatatatcagccatgaatgtttgaagcgggtattttggtgccaaaacaccttagtccaagcatcaacgtaatcccaataggtataacctactggatcaaatggaactgaaaatctctttcctttgttcaagtccgaaccaaagtgtcttggttgaagaacttttagtatttggatggttgagtgggtgtttaaggtttggtcttttggatctttgaaatgtttgatagatactgagttcgaatctaccaaaatcaattcataaaaagttcttgtcttcaggatagtggttggtttgtagtgaaatcctggtgggaaagccttggccgtcgccttgaagggatttttgtcccaaaattcaggttccatctgcaaaacagttaacaatttatttttataaatataattgttagtttgtttggtaggtggtgtttgagctttggctaaaggtagttttcctttagtattggtggctgttttggtcattgacgcattttggatcattgtttgtaaatttgattcagattcatcatcagattctgaggcaatgtctgcccaagattttttgattatttttggaaatttggtcagacccatgtcttgaagggcctgaagggtttcaattggccatgc

SEQ ID NO: 10802 - DNA, 1107 bp, Glycine max
  Gm_smallRNAprecursor_3635
gtagaacttccttcagatttttagctaagacctcctttgatgtcgatcctgctaaaaatgctgccagatgagacttttggttcaaaaacacagaagtctctggatcagctgctttgaggaattctggatgggattggaaccatagttttacttgttctgcatccgctttggatgagtcaaattgtgtccaccattttacaaatgcgtgcctttgtagtgatggatattggtttgtcttctcagtcttgctgtaacgatattgccatgagaatatccatgacagtgcaaagcttgaaaagtatttaagatctgctggaattcgtgattcctgcgaattgtattgtttcttaaattgggaaaatccttgttggaccgtttctgggaatatctttgggattggtccaaagaagtcccaccattgcaaaaaccaattgggaaaattgtaaattgtgttggtcttgaaatatatcagccatgaatgtttgaagcgggtattttggtgccaaaacaccttagtccaagcatcaacgtaatcccaataggtataacctactggatcaaatggaactgaaaatctctttcctttgttcaagtccgaaccaaagtgtcttggttgaagaacttttagtatttggatggttgagtgggtgtttaaggtttggtcttttggatctttgaaatgtttgatagatactgagttcgaatctaccaaaatcaattcataaaaagttcttgtcttcaggatagtggttggtttgtagtgaaatcctggtgggaaagccttggccgtcgccttgaagggatttttgtcccaaaattcaggttccatctgcaaaacagttaacaatttatttttataaatataattgttagtttgtttggtaggtggtgtttgagctttggctaaaggtagttttcctttagtattggtggctgttttggtcattgacgcattttggatcattgtttgtaaatttgattcagattcatcatcagattctgaggcaatgtctgcccaagattttttgattatttttggaaatttggtcagacccatgtcttgaagggcctgaagggtttcaattggccatgcatagtcggccgatg

SEQ ID NO: 10803 - DNA, 1107 bp, Glycine max; identical to SEQ ID NO: 10802
  Gm_smallRNAprecursor_3636

SEQ ID NO: 10804 - DNA, 1108 bp, Glycine max
  Gm_smallRNAprecursor_3637
gtagaacttccttcagatttttagctaagacctcctttgatgtcgatcctgctaaaaatgctgccagatgagacttttggttcaaaaacacagaagtctctggatcagctgctttgaggaattctggatgggattggaaccatagttttacttgttctgcatccgctttggatgagtcaaattgtgtccaccattttacaaatgcgtgcctttgtagtgatggatattggtttgtcttctcagtcttgctgtaacgatattgccatgagaatatccatgacagtgcaaagcttgaaaagtatttaagatctgctggaattcgtgattcctgcgaattgtattgtttcttaaattgggaaaatccttgttggaccgtttctgggaatatctttgggattggtccaaagaagtcccaccattgcaaaaaccaattgggaaaattgtaaattgtgttggtcttgaaatatatcagccatgaatgtttgaagcgggtattttggtgccaaaacaccttagtccaagcatcaacgtaatcccaataggtataacctactggatcaaatggaactgaaaatctctttcctttgttcaagtccgaaccaaagtgtcttggttgaagaacttttagtatttggatggttgagtgggtgtttaaggtttggtcttttggatctttgaaatgtttgatagatactgagttcgaatctaccaaaatcaattcataaaaagttcttgtcttcaggatagtggttggtttgtagtgaaatcctggtgggaaagccttggccgtcgccttgaagggatttttgtcccaaaattcaggttccatctgcaaaacagttaacaatttatttttataaatataattgttagtttgtttggtaggtggtgtttgagctttggctaaaggtagttttcctttagtattggtggctgttttggtcattgacgcattttggatcattgtttgtaaatttgattcagattcatcatcagattctgaggcaatgtctgcccaagattttttgattatttttggaaatttggtcagacccatgtcttgaagggcctgaagggtttcaattggccatgcatagtcggccgatgt

SEQ ID NO: 10805 - DNA, 1101 bp, Glycine max
  Gm_smallRNAprecursor_3638
gaacttccttcagatttttagctaagacctcctttgatgtcgatcctgctaaaaatgctgccagatgagacttttggttcaaaaacacagaagtctctggatcagctgctttgaggaattctggatgggattggaaccatagttttacttgttctgcatccgctttggatgagtcaaattgtgtccaccattttacaaatgcgtgcctttgtagtgatggatattggtttgtcttctcagtcttgctgtaacgatattgccatgagaatatccatgacagtgcaaagcttgaaaagtatttaagatctgctggaattcgtgattcctgcgaattgtattgtttcttaaattgggaaaatccttgttggaccgtttctgggaatatctttgggattggtccaaagaagtcccaccattgcaaaaaccaattgggaaaattgtaaattgtgttggtcttgaaatatatcagccatgaatgtttgaagcgggtattttggtgccaaaacaccttagtccaagcatcaacgtaatcccaataggtataacctactggatcaaatggaactgaaaatctctttcctttgttcaagtccgaaccaaagtgtcttggttgaagaacttttagtatttggatggttgagtgggtgtttaaggtttggtcttttggatctttgaaatgtttgatagatactgagttcgaatctaccaaaatcaattcataaaaagttcttgtcttcaggatagtggttggtttgtagtgaaatcctggtgggaaagccttggccgtcgccttgaagggatttttgtcccaaaattcaggttccatctgcaaaacagttaacaatttatttttataaatataattgttagtttgtttggtaggtggtgtttgagctttggctaaaggtagttttcctttagtattggtggctgttttggtcattgacgcattttggatcattgtttgtaaatttgattcagattcatcatcagattctgaggcaatgtctgcccaagattttttgattatttttggaaatttggtcagacccatgtcttgaagggcctgaagggtttcaattggccatgcatagtcggccg

SEQ ID NO: 10806 - DNA, 1134 bp, Glycine max
  Gm_smallRNAprecursor_3639
acttccttcagatttttagctaagacctcctttgatgtcgatcctgctaaaaatgctgccagatgagacttttggttcaaaaacacagaagtctctggatcagctgctttgaggaattctggatgggattggaaccatagttttacttgttctgcatccgctttggatgagtcaaattgtgtccaccattttacaaatgcgtgcctttgtagtgatggatattggtttgtcttctcagtcttgctgtaacgatattgccatgagaatatccatgacagtgcaaagcttgaaaagtatttaagatctgctggaattcgtgattcctgcgaattgtattgtttcttaaattgggaaaatccttgttggaccgtttctgggaatatctttgggattggtccaaagaagtcccaccattgcaaaaaccaattgggaaaattgtaaattgtgttggtcttgaaatatatcagccatgaatgtttgaagcgggtattttggtgccaaaacaccttagtccaagcatcaacgtaatcccaataggtataacctactggatcaaatggaactgaaaatctctttcctttgttcaagtccgaaccaaagtgtcttggttgaagaacttttagtatttggatggttgagtgggtgtttaaggtttggtcttttggatctttgaaatgtttgatagatactgagttcgaatctaccaaaatcaattcataaaaagttcttgtcttcaggatagtggttggtttgtagtgaaatcctggtgggaaagccttggccgtcgccttgaagggatttttgtcccaaaattcaggttccatctgcaaaacagttaacaatttatttttataaatataattgttagtttgtttggtaggtggtgtttgagctttggctaaaggtagttttcctttagtattggtggctgttttggtcattgacgcattttggatcattgtttgtaaatttgattcagattcatcatcagattctgaggcaatgtctgcccaagattttttgattatttttggaaatttggtcagacccatgtcttgaagggcctgaagggtttcaattggccatgcatagtcggccgatgtttgtttggcggttgccgatttgggagattcc

SEQ ID NO: 10807 - DNA, 1140 bp, Glycine max
  Gm_smallRNAprecursor_3640
tttttagctaagacctcctttgatgtcgatcctgctaaaaatgctgccagatgagacttttggttcaaaaacacagaagtctctggatcagctgctttgaggaattctggatgggattggaaccatagttttacttgttctgcatccgctttggatgagtcaaattgtgtccaccattttacaaatgcgtgcctttgtagtgatggatattggtttgtcttctcagtcttgctgtaacgatattgccatgagaatatccatgacagtgcaaagcttgaaaagtatttaagatctgctggaattcgtgattcctgcgaattgtattgtttcttaaattgggaaaatccttgttggaccgtttctgggaatatctttgggattggtccaaagaagtcccaccattgcaaaaaccaattgggaaaattgtaaattgtgttggtcttgaaatatatcagccatgaatgtttgaagcgggtattttggtgccaaaacaccttagtccaagcatcaacgtaatcccaataggtataacctactggatcaaatggaactgaaaatctctttcctttgttcaagtccgaaccaaagtgtcttggttgaagaacttttagtatttggatggttgagtgggtgtttaaggtttggtcttttggatctttgaaatgtttgatagatactgagttcgaatctaccaaaatcaattcataaaaagttcttgtcttcaggatagtggttggtttgtagtgaaatcctggtgggaaagccttggccgtcgccttgaagggatttttgtcccaaaattcaggttccatctgcaaaacagttaacaatttatttttataaatataattgttagtttgtttggtaggtggtgtttgagctttggctaaaggtagttttcctttagtattggtggctgttttggtcattgacgcattttggatcattgtttgtaaatttgattcagattcatcatcagattctgaggcaatgtctgcccaagattttttgattatttttggaaatttggtcagacccatgtcttgaagggcctgaagggtttcaattggccatgcatagtcggccgatgtttgtttggcggttgccgatttgggagattcctgagtggatggctcaggt

SEQ ID NO: 10808 - DNA, 1189 bp, Glycine max
  Gm_smallRNAprecursor_3641
acacagaagtctctggatcagctgctttgaggaattctggatgggattggaaccatagttttacttgttctgcatccgctttggatgagtcaaattgtgtccaccattttacaaatgcgtgcctttgtagtgatggatattggtttgtcttctcagtcttgctgtaacgatattgccatgagaatatccatgacagtgcaaagcttgaaaagtatttaagatctgctggaattcgtgattcctgcgaattgtattgtttcttaaattgggaaaatccttgttggaccgtttctgggaatatctttgggattggtccaaagaagtcccaccattgcaaaaaccaattgggaaaattgtaaattgtgttggtcttgaaatatatcagccatgaatgtttgaagcgggtattttggtgccaaaacaccttagtccaagcatcaacgtaatcccaataggtataacctactggatcaaatggaactgaaaatctctttcctttgttcaagtccgaaccaaagtgtcttggttgaagaacttttagtatttggatggttgagtgggtgtttaaggtttggtcttttggatctttgaaatgtttgatagatactgagttcgaatctaccaaaatcaattcataaaaagttcttgtcttcaggatagtggttggtttgtagtgaaatcctggtgggaaagccttggccgtcgccttgaagggatttttgtcccaaaattcaggttccatctgcaaaacagttaacaatttatttttataaatataattgttagtttgtttggtaggtggtgtttgagctttggctaaaggtagttttcctttagtattggtggctgttttggtcattgacgcattttggatcattgtttgtaaatttgattcagattcatcatcagattctgaggcaatgtctgcccaagattttttgattatttttggaaatttggtcagacccatgtcttgaagggcctgaagggtttcaattggccatgcatagtcggccgatgtttgtttggcggttgccgatttgggagattcctgagtggatggctcaggtttgattgaggcaatctgggttgatgacccttctaaattggttttctgggtagatgacccagcctgggttggtgacccagaagaggtagatgatttcttgatggttggctctggaagagc

SEQ ID NO: 10809 - DNA, 1079 bp, Glycine max
  Gm_smallRNAprecursor_3642
ctgctttgaggaattctggatgggattggaaccatagttttacttgttctgcatccgctttggatgagtcaaattgtgtccaccattttacaaatgcgtgcctttgtagtgatggatattggtttgtcttctcagtcttgctgtaacgatattgccatgagaatatccatgacagtgcaaagcttgaaaagtatttaagatctgctggaattcgtgattcctgcgaattgtattgtttcttaaattgggaaaatccttgttggaccgtttctgggaatatctttgggattggtccaaagaagtcccaccattgcaaaaaccaattgggaaaattgtaaattgtgttggtcttgaaatatatcagccatgaatgtttgaagcgggtattttggtgccaaaacaccttagtccaagcatcaacgtaatcccaataggtataacctactggatcaaatggaactgaaaatctctttcctttgttcaagtccgaaccaaagtgtcttggttgaagaacttttagtatttggatggttgagtgggtgtttaaggtttggtcttttggatctttgaaatgtttgatagatactgagttcgaatctaccaaaatcaattcataaaaagttcttgtcttcaggatagtggttggtttgtagtgaaatcctggtgggaaagccttggccgtcgccttgaagggatttttgtcccaaaattcaggttccatctgcaaaacagttaacaatttatttttataaatataattgttagtttgtttggtaggtggtgtttgagctttggctaaaggtagttttcctttagtattggtggctgttttggtcattgacgcattttggatcattgtttgtaaatttgattcagattcatcatcagattctgaggcaatgtctgcccaagattttttgattatttttggaaatttggtcagacccatgtcttgaagggcctgaagggtttcaattggccatgcatagtcggccgatgtttgtttggcggttgccgatttgggagattcctgagtggatggctcaggtttgattgaggcaatctgggttgatgaccct

SEQ ID NO: 10810 - DNA, 1082 bp, Glycine max
  Gm_smallRNAprecursor_3643
ctgctttgaggaattctggatgggattggaaccatagttttacttgttctgcatccgctttggatgagtcaaattgtgtccaccattttacaaatgcgtgcctttgtagtgatggatattggtttgtcttctcagtcttgctgtaacgatattgccatgagaatatccatgacagtgcaaagcttgaaaagtatttaagatctgctggaattcgtgattcctgcgaattgtattgtttcttaaattgggaaaatccttgttggaccgtttctgggaatatctttgggattggtccaaagaagtcccaccattgcaaaaaccaattgggaaaattgtaaattgtgttggtcttgaaatatatcagccatgaatgtttgaagcgggtattttggtgccaaaacaccttagtccaagcatcaacgtaatcccaataggtataacctactggatcaaatggaactgaaaatctctttcctttgttcaagtccgaaccaaagtgtcttggttgaagaacttttagtatttggatggttgagtgggtgtttaaggtttggtcttttggatctttgaaatgtttgatagatactgagttcgaatctaccaaaatcaattcataaaaagttcttgtcttcaggatagtggttggtttgtagtgaaatcctggtgggaaagccttggccgtcgccttgaagggatttttgtcccaaaattcaggttccatctgcaaaacagttaacaatttatttttataaatataattgttagtttgtttggtaggtggtgtttgagctttggctaaaggtagttttcctttagtattggtggctgttttggtcattgacgcattttggatcattgtttgtaaatttgattcagattcatcatcagattctgaggcaatgtctgcccaagattttttgattatttttggaaatttggtcagacccatgtcttgaagggcctgaagggtttcaattggccatgcatagtcggccgatgtttgtttggcggttgccgatttgggagattcctgagtggatggctcaggtttgattgaggcaatctgggttgatgacccttct

SEQ ID NO: 10811 - DNA, 1078 bp, Glycine max
  Gm_smallRNAprecursor_3644
tgctttgaggaattctggatgggattggaaccatagttttacttgttctgcatccgctttggatgagtcaaattgtgtccaccattttacaaatgcgtgcctttgtagtgatggatattggtttgtcttctcagtcttgctgtaacgatattgccatgagaatatccatgacagtgcaaagcttgaaaagtatttaagatctgctggaattcgtgattcctgcgaattgtattgtttcttaaattgggaaaatccttgttggaccgtttctgggaatatctttgggattggtccaaagaagtcccaccattgcaaaaaccaattgggaaaattgtaaattgtgttggtcttgaaatatatcagccatgaatgtttgaagcgggtattttggtgccaaaacaccttagtccaagcatcaacgtaatcccaataggtataacctactggatcaaatggaactgaaaatctctttcctttgttcaagtccgaaccaaagtgtcttggttgaagaacttttagtatttggatggttgagtgggtgtttaaggtttggtcttttggatctttgaaatgtttgatagatactgagttcgaatctaccaaaatcaattcataaaaagttcttgtcttcaggatagtggttggtttgtagtgaaatcctggtgggaaagccttggccgtcgccttgaagggatttttgtcccaaaattcaggttccatctgcaaaacagttaacaatttatttttataaatataattgttagtttgtttggtaggtggtgtttgagctttggctaaaggtagttttcctttagtattggtggctgttttggtcattgacgcattttggatcattgtttgtaaatttgattcagattcatcatcagattctgaggcaatgtctgcccaagattttttgattatttttggaaatttggtcagacccatgtcttgaagggcctgaagggtttcaattggccatgcatagtcggccgatgtttgtttggcggttgccgatttgggagattcctgagtggatggctcaggtttgattgaggcaatctgggttgatgaccct

SEQ ID NO: 10812 - DNA, 1224 bp, Glycine max
  Gm_smallRNAprecursor_3645
tgctttgaggaattctggatgggattggaaccatagttttacttgttctgcatccgctttggatgagtcaaattgtgtccaccattttacaaatgcgtgcctttgtagtgatggatattggtttgtcttctcagtcttgctgtaacgatattgccatgagaatatccatgacagtgcaaagcttgaaaagtatttaagatctgctggaattcgtgattcctgcgaattgtattgtttcttaaattgggaaaatccttgttggaccgtttctgggaatatctttgggattggtccaaagaagtcccaccattgcaaaaaccaattgggaaaattgtaaattgtgttggtcttgaaatatatcagccatgaatgtttgaagcgggtattttggtgccaaaacaccttagtccaagcatcaacgtaatcccaataggtataacctactggatcaaatggaactgaaaatctctttcctttgttcaagtccgaaccaaagtgtcttggttgaagaacttttagtatttggatggttgagtgggtgtttaaggtttggtcttttggatctttgaaatgtttgatagatactgagttcgaatctaccaaaatcaattcataaaaagttcttgtcttcaggatagtggttggtttgtagtgaaatcctggtgggaaagccttggccgtcgccttgaagggatttttgtcccaaaattcaggttccatctgcaaaacagttaacaatttatttttataaatataattgttagtttgtttggtaggtggtgtttgagctttggctaaaggtagttttcctttagtattggtggctgttttggtcattgacgcattttggatcattgtttgtaaatttgattcagattcatcatcagattctgaggcaatgtctgcccaagattttttgattatttttggaaatttggtcagacccatgtcttgaagggcctgaagggtttcaattggccatgcatagtcggccgatgtttgtttggcggttgccgatttgggagattcctgagtggatggctcaggtttgattgaggcaatctgggttgatgacccttctaaattggttttctgggtagatgacccagcctgggttggtgacccagaagaggtagatgatttcttgatggttggctctggaagagccagcctgtactccttcctccccgtagggagattcccgatgccttaggaggcattacc

SEQ ID NO: 10813 - DNA, 1076 bp, Glycine max
  Gm_smallRNAprecursor_3646
ctttgaggaattctggatgggattggaaccatagttttacttgttctgcatccgctttggatgagtcaaattgtgtccaccattttacaaatgcgtgcctttgtagtgatggatattggtttgtcttctcagtcttgctgtaacgatattgccatgagaatatccatgacagtgcaaagcttgaaaagtatttaagatctgctggaattcgtgattcctgcgaattgtattgtttcttaaattgggaaaatccttgttggaccgtttctgggaatatctttgggattggtccaaagaagtcccaccattgcaaaaaccaattgggaaaattgtaaattgtgttggtcttgaaatatatcagccatgaatgtttgaagcgggtattttggtgccaaaacaccttagtccaagcatcaacgtaatcccaataggtataacctactggatcaaatggaactgaaaatctctttcctttgttcaagtccgaaccaaagtgtcttggttgaagaacttttagtatttggatggttgagtgggtgtttaaggtttggtcttttggatctttgaaatgtttgatagatactgagttcgaatctaccaaaatcaattcataaaaagttcttgtcttcaggatagtggttggtttgtagtgaaatcctggtgggaaagccttggccgtcgccttgaagggatttttgtcccaaaattcaggttccatctgcaaaacagttaacaatttatttttataaatataattgttagtttgtttggtaggtggtgtttgagctttggctaaaggtagttttcctttagtattggtggctgttttggtcattgacgcattttggatcattgtttgtaaatttgattcagattcatcatcagattctgaggcaatgtctgcccaagattttttgattatttttggaaatttggtcagacccatgtcttgaagggcctgaagggtttcaattggccatgcatagtcggccgatgtttgtttggcggttgccgatttgggagattcctgagtggatggctcaggtttgattgaggcaatctgggttgatgaccct

SEQ ID NO: 10814 - DNA, 1222 bp, Glycine max
  Gm_smallRNAprecursor_3647
ctttgaggaattctggatgggattggaaccatagttttacttgttctgcatccgctttggatgagtcaaattgtgtccaccattttacaaatgcgtgcctttgtagtgatggatattggtttgtcttctcagtcttgctgtaacgatattgccatgagaatatccatgacagtgcaaagcttgaaaagtatttaagatctgctggaattcgtgattcctgcgaattgtattgtttcttaaattgggaaaatccttgttggaccgtttctgggaatatctttgggattggtccaaagaagtcccaccattgcaaaaaccaattgggaaaattgtaaattgtgttggtcttgaaatatatcagccatgaatgtttgaagcgggtattttggtgccaaaacaccttagtccaagcatcaacgtaatcccaataggtataacctactggatcaaatggaactgaaaatctctttcctttgttcaagtccgaaccaaagtgtcttggttgaagaacttttagtatttggatggttgagtgggtgtttaaggtttggtcttttggatctttgaaatgtttgatagatactgagttcgaatctaccaaaatcaattcataaaaagttcttgtcttcaggatagtggttggtttgtagtgaaatcctggtgggaaagccttggccgtcgccttgaagggatttttgtcccaaaattcaggttccatctgcaaaacagttaacaatttatttttataaatataattgttagtttgtttggtaggtggtgtttgagctttggctaaaggtagttttcctttagtattggtggctgttttggtcattgacgcattttggatcattgtttgtaaatttgattcagattcatcatcagattctgaggcaatgtctgcccaagattttttgattatttttggaaatttggtcagacccatgtcttgaagggcctgaagggtttcaattggccatgcatagtcggccgatgtttgtttggcggttgccgatttgggagattcctgagtggatggctcaggtttgattgaggcaatctgggttgatgacccttctaaattggttttctgggtagatgacccagcctgggttggtgacccagaagaggtagatgatttcttgatggttggctctggaagagccagcctgtactccttcctccccgtagggagattcccgatgccttaggaggcattacc

SEQ ID NO: 10815 - DNA, 1193 bp, Glycine max
  Gm_smallRNAprecursor_3648
accatagttttacttgttctgcatccgctttggatgagtcaaattgtgtccaccattttacaaatgcgtgcctttgtagtgatggatattggtttgtcttctcagtcttgctgtaacgatattgccatgagaatatccatgacagtgcaaagcttgaaaagtatttaagatctgctggaattcgtgattcctgcgaattgtattgtttcttaaattgggaaaatccttgttggaccgtttctgggaatatctttgggattggtccaaagaagtcccaccattgcaaaaaccaattgggaaaattgtaaattgtgttggtcttgaaatatatcagccatgaatgtttgaagcgggtattttggtgccaaaacaccttagtccaagcatcaacgtaatcccaataggtataacctactggatcaaatggaactgaaaatctctttcctttgttcaagtccgaaccaaagtgtcttggttgaagaacttttagtatttggatggttgagtgggtgtttaaggtttggtcttttggatctttgaaatgtttgatagatactgagttcgaatctaccaaaatcaattcataaaaagttcttgtcttcaggatagtggttggtttgtagtgaaatcctggtgggaaagccttggccgtcgccttgaagggatttttgtcccaaaattcaggttccatctgcaaaacagttaacaatttatttttataaatataattgttagtttgtttggtaggtggtgtttgagctttggctaaaggtagttttcctttagtattggtggctgttttggtcattgacgcattttggatcattgtttgtaaatttgattcagattcatcatcagattctgaggcaatgtctgcccaagattttttgattatttttggaaatttggtcagacccatgtcttgaagggcctgaagggtttcaattggccatgcatagtcggccgatgtttgtttggcggttgccgatttgggagattcctgagtggatggctcaggtttgattgaggcaatctgggttgatgacccttctaaattggttttctgggtagatgacccagcctgggttggtgacccagaagaggtagatgatttcttgatggttggctctggaagagccagcctgtactccttcctccccgtagggagattcccgatgccttaggaggcatta

SEQ ID NO: 10816 - DNA, 1195 bp, Glycine max
  Gm_smallRNAprecursor_3649
accatagttttacttgttctgcatccgctttggatgagtcaaattgtgtccaccattttacaaatgcgtgcctttgtagtgatggatattggtttgtcttctcagtcttgctgtaacgatattgccatgagaatatccatgacagtgcaaagcttgaaaagtatttaagatctgctggaattcgtgattcctgcgaattgtattgtttcttaaattgggaaaatccttgttggaccgtttctgggaatatctttgggattggtccaaagaagtcccaccattgcaaaaaccaattgggaaaattgtaaattgtgttggtcttgaaatatatcagccatgaatgtttgaagcgggtattttggtgccaaaacaccttagtccaagcatcaacgtaatcccaataggtataacctactggatcaaatggaactgaaaatctctttcctttgttcaagtccgaaccaaagtgtcttggttgaagaacttttagtatttggatggttgagtgggtgtttaaggtttggtcttttggatctttgaaatgtttgatagatactgagttcgaatctaccaaaatcaattcataaaaagttcttgtcttcaggatagtggttggtttgtagtgaaatcctggtgggaaagccttggccgtcgccttgaagggatttttgtcccaaaattcaggttccatctgcaaaacagttaacaatttatttttataaatataattgttagtttgtttggtaggtggtgtttgagctttggctaaaggtagttttcctttagtattggtggctgttttggtcattgacgcattttggatcattgtttgtaaatttgattcagattcatcatcagattctgaggcaatgtctgcccaagattttttgattatttttggaaatttggtcagacccatgtcttgaagggcctgaagggtttcaattggccatgcatagtcggccgatgtttgtttggcggttgccgatttgggagattcctgagtggatggctcaggtttgattgaggcaatctgggttgatgacccttctaaattggttttctgggtagatgacccagcctgggttggtgacccagaagaggtagatgatttcttgatggttggctctggaagagccagcctgtactccttcctccccgtagggagattcccgatgccttaggaggcattacc

SEQ ID NO: 10817 - DNA, 1058 bp, Glycine max
  Gm_smallRNAprecursor_3650
tacttgttctgcatccgctttggatgagtcaaattgtgtccaccattttacaaatgcgtgcctttgtagtgatggatattggtttgtcttctcagtcttgctgtaacgatattgccatgagaatatccatgacagtgcaaagcttgaaaagtatttaagatctgctggaattcgtgattcctgcgaattgtattgtttcttaaattgggaaaatccttgttggaccgtttctgggaatatctttgggattggtccaaagaagtcccaccattgcaaaaaccaattgggaaaattgtaaattgtgttggtcttgaaatatatcagccatgaatgtttgaagcgggtattttggtgccaaaacaccttagtccaagcatcaacgtaatcccaataggtataacctactggatcaaatggaactgaaaatctctttcctttgttcaagtccgaaccaaagtgtcttggttgaagaacttttagtatttggatggttgagtgggtgtttaaggtttggtcttttggatctttgaaatgtttgatagatactgagttcgaatctaccaaaatcaattcataaaaagttcttgtcttcaggatagtggttggtttgtagtgaaatcctggtgggaaagccttggccgtcgccttgaagggatttttgtcccaaaattcaggttccatctgcaaaacagttaacaatttatttttataaatataattgttagtttgtttggtaggtggtgtttgagctttggctaaaggtagttttcctttagtattggtggctgttttggtcattgacgcattttggatcattgtttgtaaatttgattcagattcatcatcagattctgaggcaatgtctgcccaagattttttgattatttttggaaatttggtcagacccatgtcttgaagggcctgaagggtttcaattggccatgcatagtcggccgatgtttgtttggcggttgccgatttgggagattcctgagtggatggctcaggtttgattgaggcaatctgggttgatgacccttctaaattggttttctggg

SEQ ID NO: 10818 - DNA, 1176 bp, Glycine max
  Gm_smallRNAprecursor_3651
tacttgttctgcatccgctttggatgagtcaaattgtgtccaccattttacaaatgcgtgcctttgtagtgatggatattggtttgtcttctcagtcttgctgtaacgatattgccatgagaatatccatgacagtgcaaagcttgaaaagtatttaagatctgctggaattcgtgattcctgcgaattgtattgtttcttaaattgggaaaatccttgttggaccgtttctgggaatatctttgggattggtccaaagaagtcccaccattgcaaaaaccaattgggaaaattgtaaattgtgttggtcttgaaatatatcagccatgaatgtttgaagcgggtattttggtgccaaaacaccttagtccaagcatcaacgtaatcccaataggtataacctactggatcaaatggaactgaaaatctctttcctttgttcaagtccgaaccaaagtgtcttggttgaagaacttttagtatttggatggttgagtgggtgtttaaggtttggtcttttggatctttgaaatgtttgatagatactgagttcgaatctaccaaaatcaattcataaaaagttcttgtcttcaggatagtggttggtttgtagtgaaatcctggtgggaaagccttggccgtcgccttgaagggatttttgtcccaaaattcaggttccatctgcaaaacagttaacaatttatttttataaatataattgttagtttgtttggtaggtggtgtttgagctttggctaaaggtagttttcctttagtattggtggctgttttggtcattgacgcattttggatcattgtttgtaaatttgattcagattcatcatcagattctgaggcaatgtctgcccaagattttttgattatttttggaaatttggtcagacccatgtcttgaagggcctgaagggtttcaattggccatgcatagtcggccgatgtttgtttggcggttgccgatttgggagattcctgagtggatggctcaggtttgattgaggcaatctgggttgatgacccttctaaattggttttctgggtagatgacccagcctgggttggtgacccagaagaggtagatgatttcttgatggttggctctggaagagccagcctgtactccttcctccccgtagggagattcccgatgccttagga

SEQ ID NO: 10819 - DNA, 1183 bp, Glycine max
  Gm_smallRNAprecursor_3652
tacttgttctgcatccgctttggatgagtcaaattgtgtccaccattttacaaatgcgtgcctttgtagtgatggatattggtttgtcttctcagtcttgctgtaacgatattgccatgagaatatccatgacagtgcaaagcttgaaaagtatttaagatctgctggaattcgtgattcctgcgaattgtattgtttcttaaattgggaaaatccttgttggaccgtttctgggaatatctttgggattggtccaaagaagtcccaccattgcaaaaaccaattgggaaaattgtaaattgtgttggtcttgaaatatatcagccatgaatgtttgaagcgggtattttggtgccaaaacaccttagtccaagcatcaacgtaatcccaataggtataacctactggatcaaatggaactgaaaatctctttcctttgttcaagtccgaaccaaagtgtcttggttgaagaacttttagtatttggatggttgagtgggtgtttaaggtttggtcttttggatctttgaaatgtttgatagatactgagttcgaatctaccaaaatcaattcataaaaagttcttgtcttcaggatagtggttggtttgtagtgaaatcctggtgggaaagccttggccgtcgccttgaagggatttttgtcccaaaattcaggttccatctgcaaaacagttaacaatttatttttataaatataattgttagtttgtttggtaggtggtgtttgagctttggctaaaggtagttttcctttagtattggtggctgttttggtcattgacgcattttggatcattgtttgtaaatttgattcagattcatcatcagattctgaggcaatgtctgcccaagattttttgattatttttggaaatttggtcagacccatgtcttgaagggcctgaagggtttcaattggccatgcatagtcggccgatgtttgtttggcggttgccgatttgggagattcctgagtggatggctcaggtttgattgaggcaatctgggttgatgacccttctaaattggttttctgggtagatgacccagcctgggttggtgacccagaagaggtagatgatttcttgatggttggctctggaagagccagcctgtactccttcctccccgtagggagattcccgatgccttaggaggcatta

SEQ ID NO: 10820 - DNA, 1042 bp, Glycine max
  Gm_smallRNAprecursor_3653
ctgcatccgctttggatgagtcaaattgtgtccaccattttacaaatgcgtgcctttgtagtgatggatattggtttgtcttctcagtcttgctgtaacgatattgccatgagaatatccatgacagtgcaaagcttgaaaagtatttaagatctgctggaattcgtgattcctgcgaattgtattgtttcttaaattgggaaaatccttgttggaccgtttctgggaatatctttgggattggtccaaagaagtcccaccattgcaaaaaccaattgggaaaattgtaaattgtgttggtcttgaaatatatcagccatgaatgtttgaagcgggtattttggtgccaaaacaccttagtccaagcatcaacgtaatcccaataggtataacctactggatcaaatggaactgaaaatctctttcctttgttcaagtccgaaccaaagtgtcttggttgaagaacttttagtatttggatggttgagtgggtgtttaaggtttggtcttttggatctttgaaatgtttgatagatactgagttcgaatctaccaaaatcaattcataaaaagttcttgtcttcaggatagtggttggtttgtagtgaaatcctggtgggaaagccttggccgtcgccttgaagggatttttgtcccaaaattcaggttccatctgcaaaacagttaacaatttatttttataaatataattgttagtttgtttggtaggtggtgtttgagctttggctaaaggtagttttcctttagtattggtggctgttttggtcattgacgcattttggatcattgtttgtaaatttgattcagattcatcatcagattctgaggcaatgtctgcccaagattttttgattatttttggaaatttggtcagacccatgtcttgaagggcctgaagggtttcaattggccatgcatagtcggccgatgtttgtttggcggttgccgatttgggagattcctgagtggatggctcaggtttgattgaggcaatctgggttgatgacccttctaaattggt

SEQ ID NO: 10821 - DNA, 1159 bp, Glycine max
  Gm_smallRNAprecursor_3654
ctgcatccgctttggatgagtcaaattgtgtccaccattttacaaatgcgtgcctttgtagtgatggatattggtttgtcttctcagtcttgctgtaacgatattgccatgagaatatccatgacagtgcaaagcttgaaaagtatttaagatctgctggaattcgtgattcctgcgaattgtattgtttcttaaattgggaaaatccttgttggaccgtttctgggaatatctttgggattggtccaaagaagtcccaccattgcaaaaaccaattgggaaaattgtaaattgtgttggtcttgaaatatatcagccatgaatgtttgaagcgggtattttggtgccaaaacaccttagtccaagcatcaacgtaatcccaataggtataacctactggatcaaatggaactgaaaatctctttcctttgttcaagtccgaaccaaagtgtcttggttgaagaacttttagtatttggatggttgagtgggtgtttaaggtttggtcttttggatctttgaaatgtttgatagatactgagttcgaatctaccaaaatcaattcataaaaagttcttgtcttcaggatagtggttggtttgtagtgaaatcctggtgggaaagccttggccgtcgccttgaagggatttttgtcccaaaattcaggttccatctgcaaaacagttaacaatttatttttataaatataattgttagtttgtttggtaggtggtgtttgagctttggctaaaggtagttttcctttagtattggtggctgttttggtcattgacgcattttggatcattgtttgtaaatttgattcagattcatcatcagattctgaggcaatgtctgcccaagattttttgattatttttggaaatttggtcagacccatgtcttgaagggcctgaagggtttcaattggccatgcatagtcggccgatgtttgtttggcggttgccgatttgggagattcctgagtggatggctcaggtttgattgaggcaatctgggttgatgacccttctaaattggttttctgggtagatgacccagcctgggttggtgacccagaagaggtagatgatttcttgatggttggctctggaagagccagcctgtactccttcctccccgtagggagattcccgat

SEQ ID NO: 10822 - DNA, 1234 bp, Glycine max
  Gm_smallRNAprecursor_3655
tccaccattttacaaatgcgtgcctttgtagtgatggatattggtttgtcttctcagtcttgctgtaacgatattgccatgagaatatccatgacagtgcaaagcttgaaaagtatttaagatctgctggaattcgtgattcctgcgaattgtattgtttcttaaattgggaaaatccttgttggaccgtttctgggaatatctttgggattggtccaaagaagtcccaccattgcaaaaaccaattgggaaaattgtaaattgtgttggtcttgaaatatatcagccatgaatgtttgaagcgggtattttggtgccaaaacaccttagtccaagcatcaacgtaatcccaataggtataacctactggatcaaatggaactgaaaatctctttcctttgttcaagtccgaaccaaagtgtcttggttgaagaacttttagtatttggatggttgagtgggtgtttaaggtttggtcttttggatctttgaaatgtttgatagatactgagttcgaatctaccaaaatcaattcataaaaagttcttgtcttcaggatagtggttggtttgtagtgaaatcctggtgggaaagccttggccgtcgccttgaagggatttttgtcccaaaattcaggttccatctgcaaaacagttaacaatttatttttataaatataattgttagtttgtttggtaggtggtgtttgagctttggctaaaggtagttttcctttagtattggtggctgttttggtcattgacgcattttggatcattgtttgtaaatttgattcagattcatcatcagattctgaggcaatgtctgcccaagattttttgattatttttggaaatttggtcagacccatgtcttgaagggcctgaagggtttcaattggccatgcatagtcggccgatgtttgtttggcggttgccgatttgggagattcctgagtggatggctcaggtttgattgaggcaatctgggttgatgacccttctaaattggttttctgggtagatgacccagcctgggttggtgacccagaagaggtagatgatttcttgatggttggctctggaagagccagcctgtactccttcctccccgtagggagattcccgatgccttaggaggcattaccacttttctgtaagaattcacgggtaaggtagtcaggtagtgaatttgaggtgcccttgatgtattctatgtcaaaatcaaagacact

SEQ ID NO: 10823 - DNA, 1098 bp, Glycine max
  Gm_smallRNAprecursor_3656
gtgcctttgtagtgatggatattggtttgtcttctcagtcttgctgtaacgatattgccatgagaatatccatgacagtgcaaagcttgaaaagtatttaagatctgctggaattcgtgattcctgcgaattgtattgtttcttaaattgggaaaatccttgttggaccgtttctgggaatatctttgggattggtccaaagaagtcccaccattgcaaaaaccaattgggaaaattgtaaattgtgttggtcttgaaatatatcagccatgaatgtttgaagcgggtattttggtgccaaaacaccttagtccaagcatcaacgtaatcccaataggtataacctactggatcaaatggaactgaaaatctctttcctttgttcaagtccgaaccaaagtgtcttggttgaagaacttttagtatttggatggttgagtgggtgtttaaggtttggtcttttggatctttgaaatgtttgatagatactgagttcgaatctaccaaaatcaattcataaaaagttcttgtcttcaggatagtggttggtttgtagtgaaatcctggtgggaaagccttggccgtcgccttgaagggatttttgtcccaaaattcaggttccatctgcaaaacagttaacaatttatttttataaatataattgttagtttgtttggtaggtggtgtttgagctttggctaaaggtagttttcctttagtattggtggctgttttggtcattgacgcattttggatcattgtttgtaaatttgattcagattcatcatcagattctgaggcaatgtctgcccaagattttttgattatttttggaaatttggtcagacccatgtcttgaagggcctgaagggtttcaattggccatgcatagtcggccgatgtttgtttggcggttgccgatttgggagattcctgagtggatggctcaggtttgattgaggcaatctgggttgatgacccttctaaattggttttctgggtagatgacccagcctgggttggtgacccagaagaggtagatgatttcttgatggttggctctggaagagccagcctgtactccttcctccccgtagg

SEQ ID NO: 10824 - DNA, 1090 bp, Glycine max
  Gm_smallRNAprecursor_3657
gcgaattgtattgtttcttaaattgggaaaatccttgttggaccgtttctgggaatatctttgggattggtccaaagaagtcccaccattgcaaaaaccaattgggaaaattgtaaattgtgttggtcttgaaatatatcagccatgaatgtttgaagcgggtattttggtgccaaaacaccttagtccaagcatcaacgtaatcccaataggtataacctactggatcaaatggaactgaaaatctctttcctttgttcaagtccgaaccaaagtgtcttggttgaagaacttttagtatttggatggttgagtgggtgtttaaggtttggtcttttggatctttgaaatgtttgatagatactgagttcgaatctaccaaaatcaattcataaaaagttcttgtcttcaggatagtggttggtttgtagtgaaatcctggtgggaaagccttggccgtcgccttgaagggatttttgtcccaaaattcaggttccatctgcaaaacagttaacaatttatttttataaatataattgttagtttgtttggtaggtggtgtttgagctttggctaaaggtagttttcctttagtattggtggctgttttggtcattgacgcattttggatcattgtttgtaaatttgattcagattcatcatcagattctgaggcaatgtctgcccaagattttttgattatttttggaaatttggtcagacccatgtcttgaagggcctgaagggtttcaattggccatgcatagtcggccgatgtttgtttggcggttgccgatttgggagattcctgagtggatggctcaggtttgattgaggcaatctgggttgatgacccttctaaattggttttctgggtagatgacccagcctgggttggtgacccagaagaggtagatgatttcttgatggttggctctggaagagccagcctgtactccttcctccccgtagggagattcccgatgccttaggaggcattaccacttttctgtaagaattcacgggtaaggtagtcaggtagtgaatttgaggtgcccttgatgtattctatgtcaaaatcaaagacact

SEQ ID NO: 10825 - DNA, 1141 bp, Glycine max
  Gm_smallRNAprecursor_3658
gctgttttggtcattgacgcattttggatcattgtttgtaaatttgattcagattcatcatcagattctgaggcaatgtctgcccaagattttttgattatttttggaaatttggtcagacccatgtcttgaagggcctgaagggtttcaattggccatgcatagtcggccgatgtttgtttggcggttgccgatttgggagattcctgagtggatggctcaggtttgattgaggcaatctgggttgatgacccttctaaattggttttctgggtagatgacccagcctgggttggtgacccagaagaggtagatgatttcttgatggttggctctggaagagccagcctgtactccttcctccccgtagggagattcccgatgccttaggaggcattaccacttttctgtaagaattcacgggtaaggtagtcaggtagtgaatttgaggtgcccttgatgtattctatgtcaaaatcaaagacacttaaaattgcttgccatcgtgcaaaaatttgttttgaggcaaggtttttaacatctttctgtaaaatatctttggctgatttacaatcaaccctgattaaaaatttttggtttaataaatccgattgaaatttggaaatgcacaaaacaattgctaaaacctcttttttaacagttgaatattttaattgtgcaggattccaatgtttcgatgtatatgcaatgacatgatcttggccatggactctttgtttgaggatgccaccataacctatgtcagaagcatcagtttcgacaattttgaatgcctgtggaataggaagatacagacatttaatggattggactttgactttgatttctttaaccgtttgtgtatggaggtcagaccaaggaggcggatttttcttcagcctatcatgtaatggcttgacaatattatttaaataggggacaaattctcctacgtaatttagacaacctagaaatctttgtaactgggttttgtctaagatttggttggggaatttgctagcaaactctattgacctttcgattggaatgattgtaccttgatatatattgtgaccaaggaatcgaattcgagtttggaaaagattgatttttgatttggagactgccaaaccattttgtt

SEQ ID NO: 10826 - DNA, 1049 bp, Glycine max
  Gm_smallRNAprecursor_3659
tttgattatttttggaaatttggtcagacccatgtcttgaagggcctgaagggtttcaattggccatgcatagtcggccgatgtttgtttggcggttgccgatttgggagattcctgagtggatggctcaggtttgattgaggcaatctgggttgatgacccttctaaattggttttctgggtagatgacccagcctgggttggtgacccagaagaggtagatgatttcttgatggttggctctggaagagccagcctgtactccttcctccccgtagggagattcccgatgccttaggaggcattaccacttttctgtaagaattcacgggtaaggtagtcaggtagtgaatttgaggtgcccttgatgtattctatgtcaaaatcaaagacacttaaaattgcttgccatcgtgcaaaaatttgttttgaggcaaggtttttaacatctttctgtaaaatatctttggctgatttacaatcaaccctgattaaaaatttttggtttaataaatccgattgaaatttggaaatgcacaaaacaattgctaaaacctcttttttaacagttgaatattttaattgtgcaggattccaatgtttcgatgtatatgcaatgacatgatcttggccatggactctttgtttgaggatgccaccataacctatgtcagaagcatcagtttcgacaattttgaatgcctgtggaataggaagatacagacatttaatggattggactttgactttgatttctttaaccgtttgtgtatggaggtcagaccaaggaggcggatttttcttcagcctatcatgtaatggcttgacaatattatttaaataggggacaaattctcctacgtaatttagacaacctagaaatctttgtaactgggttttgtctaagatttggttggggaatttgctagcaaactctattgacctttcgattggaatgattgtaccttgatatatattgtgaccaaggaatcgaattcgagtttggaaaagattgatttttgatttggagactgccaaaccattttgtt

SEQ ID NO: 10827 - DNA, 1113 bp, Glycine max
  Gm_smallRNAprecursor_3660
tttgattatttttggaaatttggtcagacccatgtcttgaagggcctgaagggtttcaattggccatgcatagtcggccgatgtttgtttggcggttgccgatttgggagattcctgagtggatggctcaggtttgattgaggcaatctgggttgatgacccttctaaattggttttctgggtagatgacccagcctgggttggtgacccagaagaggtagatgatttcttgatggttggctctggaagagccagcctgtactccttcctccccgtagggagattcccgatgccttaggaggcattaccacttttctgtaagaattcacgggtaaggtagtcaggtagtgaatttgaggtgcccttgatgtattctatgtcaaaatcaaagacacttaaaattgcttgccatcgtgcaaaaatttgttttgaggcaaggtttttaacatctttctgtaaaatatctttggctgatttacaatcaaccctgattaaaaatttttggtttaataaatccgattgaaatttggaaatgcacaaaacaattgctaaaacctcttttttaacagttgaatattttaattgtgcaggattccaatgtttcgatgtatatgcaatgacatgatcttggccatggactctttgtttgaggatgccaccataacctatgtcagaagcatcagtttcgacaattttgaatgcctgtggaataggaagatacagacatttaatggattggactttgactttgatttctttaaccgtttgtgtatggaggtcagaccaaggaggcggatttttcttcagcctatcatgtaatggcttgacaatattatttaaataggggacaaattctcctacgtaatttagacaacctagaaatctttgtaactgggttttgtctaagatttggttggggaatttgctagcaaactctattgacctttcgattggaatgattgtaccttgatatatattgtgaccaaggaatcgaattcgagtttggaaaagattgatttttgatttggagactgccaaaccattttgtttgatgatatgtatgaaggtttggagatgtttgaaatgttggtcaatgttttgggaaaagattaa

SEQ ID NO: 10828 - DNA, 1113 bp, Glycine max; identical to SEQ ID NO: 10827
  Gm_smallRNAprecursor_3661

SEQ ID NO: 10829 - DNA, 1114 bp, Glycine max
  Gm_smallRNAprecursor_3662
tttgattatttttggaaatttggtcagacccatgtcttgaagggcctgaagggtttcaattggccatgcatagtcggccgatgtttgtttggcggttgccgatttgggagattcctgagtggatggctcaggtttgattgaggcaatctgggttgatgacccttctaaattggttttctgggtagatgacccagcctgggttggtgacccagaagaggtagatgatttcttgatggttggctctggaagagccagcctgtactccttcctccccgtagggagattcccgatgccttaggaggcattaccacttttctgtaagaattcacgggtaaggtagtcaggtagtgaatttgaggtgcccttgatgtattctatgtcaaaatcaaagacacttaaaattgcttgccatcgtgcaaaaatttgttttgaggcaaggtttttaacatctttctgtaaaatatctttggctgatttacaatcaaccctgattaaaaatttttggtttaataaatccgattgaaatttggaaatgcacaaaacaattgctaaaacctcttttttaacagttgaatattttaattgtgcaggattccaatgtttcgatgtatatgcaatgacatgatcttggccatggactctttgtttgaggatgccaccataacctatgtcagaagcatcagtttcgacaattttgaatgcctgtggaataggaagatacagacatttaatggattggactttgactttgatttctttaaccgtttgtgtatggaggtcagaccaaggaggcggatttttcttcagcctatcatgtaatggcttgacaatattatttaaataggggacaaattctcctacgtaatttagacaacctagaaatctttgtaactgggttttgtctaagatttggttggggaatttgctagcaaactctattgacctttcgattggaatgattgtaccttgatatatattgtgaccaaggaatcgaattcgagtttggaaaagattgatttttgatttggagactgccaaaccattttgtttgatgatatgtatgaaggtttggagatgtttgaaatgttggtcaatgttttgggaaaagattaaa

SEQ ID NO: 10830 - DNA, 1207 bp, Glycine max
  Gm_smallRNAprecursor_3663
tttgattatttttggaaatttggtcagacccatgtcttgaagggcctgaagggtttcaattggccatgcatagtcggccgatgtttgtttggcggttgccgatttgggagattcctgagtggatggctcaggtttgattgaggcaatctgggttgatgacccttctaaattggttttctgggtagatgacccagcctgggttggtgacccagaagaggtagatgatttcttgatggttggctctggaagagccagcctgtactccttcctccccgtagggagattcccgatgccttaggaggcattaccacttttctgtaagaattcacgggtaaggtagtcaggtagtgaatttgaggtgcccttgatgtattctatgtcaaaatcaaagacacttaaaattgcttgccatcgtgcaaaaatttgttttgaggcaaggtttttaacatctttctgtaaaatatctttggctgatttacaatcaaccctgattaaaaatttttggtttaataaatccgattgaaatttggaaatgcacaaaacaattgctaaaacctcttttttaacagttgaatattttaattgtgcaggattccaatgtttcgatgtatatgcaatgacatgatcttggccatggactctttgtttgaggatgccaccataacctatgtcagaagcatcagtttcgacaattttgaatgcctgtggaataggaagatacagacatttaatggattggactttgactttgatttctttaaccgtttgtgtatggaggtcagaccaaggaggcggatttttcttcagcctatcatgtaatggcttgacaatattatttaaataggggacaaattctcctacgtaatttagacaacctagaaatctttgtaactgggttttgtctaagatttggttggggaatttgctagcaaactctattgacctttcgattggaatgattgtaccttgatatatattgtgaccaaggaatcgaattcgagtttggaaaagattgatttttgatttggagactgccaaaccattttgtttgatgatatgtatgaaggtttggagatgtttgaaatgttggtcaatgttttgggaaaagattaaaacatcatctatgtagacaatgacaaattttgaataaggattaaaaatatcattcataattttttgaaattctgaaggggcattcttcagtccg

SEQ ID NO: 10831 - DNA, 1035 bp, Glycine max
  Gm_smallRNAprecursor_3664
cgatgtttgtttggcggttgccgatttgggagattcctgagtggatggctcaggtttgattgaggcaatctgggttgatgacccttctaaattggttttctgggtagatgacccagcctgggttggtgacccagaagaggtagatgatttcttgatggttggctctggaagagccagcctgtactccttcctccccgtagggagattcccgatgccttaggaggcattaccacttttctgtaagaattcacgggtaaggtagtcaggtagtgaatttgaggtgcccttgatgtattctatgtcaaaatcaaagacacttaaaattgcttgccatcgtgcaaaaatttgttttgaggcaaggtttttaacatctttctgtaaaatatctttggctgatttacaatcaaccctgattaaaaatttttggtttaataaatccgattgaaatttggaaatgcacaaaacaattgctaaaacctcttttttaacagttgaatattttaattgtgcaggattccaatgtttcgatgtatatgcaatgacatgatcttggccatggactctttgtttgaggatgccaccataacctatgtcagaagcatcagtttcgacaattttgaatgcctgtggaataggaagatacagacatttaatggattggactttgactttgatttctttaaccgtttgtgtatggaggtcagaccaaggaggcggatttttcttcagcctatcatgtaatggcttgacaatattatttaaataggggacaaattctcctacgtaatttagacaacctagaaatctttgtaactgggttttgtctaagatttggttggggaatttgctagcaaactctattgacctttcgattggaatgattgtaccttgatatatattgtgaccaaggaatcgaattcgagtttggaaaagattgatttttgatttggagactgccaaaccattttgtttgatgatatgtatgaaggtttggagatgtttgaaatgttggtcaatgttttgggaaaagattaa

SEQ ID NO: 10832 - DNA, 1247 bp, Glycine max
  Gm_smallRNAprecursor_3665
acccagaagaggtagatgatttcttgatggttggctctggaagagccagcctgtactccttcctccccgtagggagattcccgatgccttaggaggcattaccacttttctgtaagaattcacgggtaaggtagtcaggtagtgaatttgaggtgcccttgatgtattctatgtcaaaatcaaagacacttaaaattgcttgccatcgtgcaaaaatttgttttgaggcaaggtttttaacatctttctgtaaaatatctttggctgatttacaatcaaccctgattaaaaatttttggtttaataaatccgattgaaatttggaaatgcacaaaacaattgctaaaacctcttttttaacagttgaatattttaattgtgcaggattccaatgtttcgatgtatatgcaatgacatgatcttggccatggactctttgtttgaggatgccaccataacctatgtcagaagcatcagtttcgacaattttgaatgcctgtggaataggaagatacagacatttaatggattggactttgactttgatttctttaaccgtttgtgtatggaggtcagaccaaggaggcggatttttcttcagcctatcatgtaatggcttgacaatattatttaaataggggacaaattctcctacgtaatttagacaacctagaaatctttgtaactgggttttgtctaagatttggttggggaatttgctagcaaactctattgacctttcgattggaatgattgtaccttgatatatattgtgaccaaggaatcgaattcgagtttggaaaagattgatttttgatttggagactgccaaaccattttgtttgatgatatgtatgaaggtttggagatgtttgaaatgttggtcaatgttttgggaaaagattaaaacatcatctatgtagacaatgacaaattttgaataaggattaaaaatatcattcataattttttgaaattctgaaggggcattcttcagtccgaatggcatcacgttccattcatattgcccgaaaggtacagtaaacgctgttttgtacctatctgattcttggatttggatttgccaaaatccagatttcatatcaaattttgaaaatatctttgcagaatttaatctgttaagcaaatcttttttgtttggaataggatatctaatccattgtaatgcttgatttaatggtttgtaatttatgactaagcggggtgttccacgctcaatctcagat

SEQ ID NO: 10833 - DNA, 1246 bp, Glycine max
  Gm_smallRNAprecursor_3666
cccagaagaggtagatgatttcttgatggttggctctggaagagccagcctgtactccttcctccccgtagggagattcccgatgccttaggaggcattaccacttttctgtaagaattcacgggtaaggtagtcaggtagtgaatttgaggtgcccttgatgtattctatgtcaaaatcaaagacacttaaaattgcttgccatcgtgcaaaaatttgttttgaggcaaggtttttaacatctttctgtaaaatatctttggctgatttacaatcaaccctgattaaaaatttttggtttaataaatccgattgaaatttggaaatgcacaaaacaattgctaaaacctcttttttaacagttgaatattttaattgtgcaggattccaatgtttcgatgtatatgcaatgacatgatcttggccatggactctttgtttgaggatgccaccataacctatgtcagaagcatcagtttcgacaattttgaatgcctgtggaataggaagatacagacatttaatggattggactttgactttgatttctttaaccgtttgtgtatggaggtcagaccaaggaggcggatttttcttcagcctatcatgtaatggcttgacaatattatttaaataggggacaaattctcctacgtaatttagacaacctagaaatctttgtaactgggttttgtctaagatttggttggggaatttgctagcaaactctattgacctttcgattggaatgattgtaccttgatatatattgtgaccaaggaatcgaattcgagtttggaaaagattgatttttgatttggagactgccaaaccattttgtttgatgatatgtatgaaggtttggagatgtttgaaatgttggtcaatgttttgggaaaagattaaaacatcatctatgtagacaatgacaaattttgaataaggattaaaaatatcattcataattttttgaaattctgaaggggcattcttcagtccgaatggcatcacgttccattcatattgcccgaaaggtacagtaaacgctgttttgtacctatctgattcttggatttggatttgccaaaatccagatttcatatcaaattttgaaaatatctttgcagaatttaatctgttaagcaaatcttttttgtttggaataggatatctaatccattgtaatgcttgatttaatggtttgtaatttatgactaagcggggtgttccacgctcaatctcagat

SEQ ID NO: 10834 - DNA, 1031 bp, Glycine max
  Gm_smallRNAprecursor_3667
ctttctgtaaaatatctttggctgatttacaatcaaccctgattaaaaatttttggtttaataaatccgattgaaatttggaaatgcacaaaacaattgctaaaacctcttttttaacagttgaatattttaattgtgcaggattccaatgtttcgatgtatatgcaatgacatgatcttggccatggactctttgtttgaggatgccaccataacctatgtcagaagcatcagtttcgacaattttgaatgcctgtggaataggaagatacagacatttaatggattggactttgactttgatttctttaaccgtttgtgtatggaggtcagaccaaggaggcggatttttcttcagcctatcatgtaatggcttgacaatattatttaaataggggacaaattctcctacgtaatttagacaacctagaaatctttgtaactgggttttgtctaagatttggttggggaatttgctagcaaactctattgacctttcgattggaatgattgtaccttgatatatattgtgaccaaggaatcgaattcgagtttggaaaagattgatttttgatttggagactgccaaaccattttgtttgatgatatgtatgaaggtttggagatgtttgaaatgttggtcaatgttttgggaaaagattaaaacatcatctatgtagacaatgacaaattttgaataaggattaaaaatatcattcataattttttgaaattctgaaggggcattcttcagtccgaatggcatcacgttccattcatattgcccgaaaggtacagtaaacgctgttttgtacctatctgattcttggatttggatttgccaaaatccagatttcatatcaaattttgaaaatatctttgcagaatttaatctgttaagcaaatcttttttgtttggaataggatatctaatccattgtaatgcttgatttaatggtttgtaatttatgactaagcggggtgttccacgctcaatctcagattgtttgttaacataaaaagccgcacaa

SEQ ID NO: 10835 - DNA, 1234 bp, Glycine max
  Gm_smallRNAprecursor_3668
aatcaaccctgattaaaaatttttggtttaataaatccgattgaaatttggaaatgcacaaaacaattgctaaaacctcttttttaacagttgaatattttaattgtgcaggattccaatgtttcgatgtatatgcaatgacatgatcttggccatggactctttgtttgaggatgccaccataacctatgtcagaagcatcagtttcgacaattttgaatgcctgtggaataggaagatacagacatttaatggattggactttgactttgatttctttaaccgtttgtgtatggaggtcagaccaaggaggcggatttttcttcagcctatcatgtaatggcttgacaatattatttaaataggggacaaattctcctacgtaatttagacaacctagaaatctttgtaactgggttttgtctaagatttggttggggaatttgctagcaaactctattgacctttcgattggaatgattgtaccttgatatatattgtgaccaaggaatcgaattcgagtttggaaaagattgatttttgatttggagactgccaaaccattttgtttgatgatatgtatgaaggtttggagatgtttgaaatgttggtcaatgttttgggaaaagattaaaacatcatctatgtagacaatgacaaattttgaataaggattaaaaatatcattcataattttttgaaattctgaaggggcattcttcagtccgaatggcatcacgttccattcatattgcccgaaaggtacagtaaacgctgttttgtacctatctgattcttggatttggatttgccaaaatccagatttcatatcaaattttgaaaatatctttgcagaatttaatctgttaagcaaatcttttttgtttggaataggatatctaatccattgtaatgcttgatttaatggtttgtaatttatgactaagcggggtgttccacgctcaatctcagattgtttgttaacataaaaagccgcacaagaccatgggcttttgcttttctggattaggcctttatcaagcaaatccttgatttccttttgatagtattgaagaagttcttcattcatttggattggtctggcttttgtgggaatttgtttttccctaaagtctttctcataagggagatcgacaatatgtttctttctgtcccaaaatgcatgtggcaattcagaacaaacggtcgattcaatatgatttaataaagattg

SEQ ID NO: 10836 - DNA, 1061 bp, Glycine max
  Gm_smallRNAprecursor_3669
tatttaaataggggacaaattctcctacgtaatttagacaacctagaaatctttgtaactgggttttgtctaagatttggttggggaatttgctagcaaactctattgacctttcgattggaatgattgtaccttgatatatattgtgaccaaggaatcgaattcgagtttggaaaagattgatttttgatttggagactgccaaaccattttgtttgatgatatgtatgaaggtttggagatgtttgaaatgttggtcaatgttttgggaaaagattaaaacatcatctatgtagacaatgacaaattttgaataaggattaaaaatatcattcataattttttgaaattctgaaggggcattcttcagtccgaatggcatcacgttccattcatattgcccgaaaggtacagtaaacgctgttttgtacctatctgattcttggatttggatttgccaaaatccagatttcatatcaaattttgaaaatatctttgcagaatttaatctgttaagcaaatcttttttgtttggaataggatatctaatccattgtaatgcttgatttaatggtttgtaatttatgactaagcggggtgttccacgctcaatctcagattgtttgttaacataaaaagccgcacaagaccatgggcttttgcttttctggattaggcctttatcaagcaaatccttgatttccttttgatagtattgaagaagttcttcattcatttggattggtctggcttttgtgggaatttgtttttccctaaagtctttctcataagggagatcgacaatatgtttctttctgtcccaaaatgcatgtggcaattcagaacaaacggtcgattcaatatgatttaataaagattgaattctttcttttacttggggttttcccagttgtatctgaatattattaaaaggtacttcttcttttaagaagttaatttgattaatcttatgtatatatgtatatatatatatatatatatatgtatgtattgtgataaatgatattgttttggttgtttgaaatgtgttgtttgaagac

SEQ ID NO: 10837 - DNA, 1127 bp, Glycine max
  Gm_smallRNAprecursor_3670
ggacaaattctcctacgtaatttagacaacctagaaatctttgtaactgggttttgtctaagatttggttggggaatttgctagcaaactctattgacctttcgattggaatgattgtaccttgatatatattgtgaccaaggaatcgaattcgagtttggaaaagattgatttttgatttggagactgccaaaccattttgtttgatgatatgtatgaaggtttggagatgtttgaaatgttggtcaatgttttgggaaaagattaaaacatcatctatgtagacaatgacaaattttgaataaggattaaaaatatcattcataattttttgaaattctgaaggggcattcttcagtccgaatggcatcacgttccattcatattgcccgaaaggtacagtaaacgctgttttgtacctatctgattcttggatttggatttgccaaaatccagatttcatatcaaattttgaaaatatctttgcagaatttaatctgttaagcaaatcttttttgtttggaataggatatctaatccattgtaatgcttgatttaatggtttgtaatttatgactaagcggggtgttccacgctcaatctcagattgtttgttaacataaaaagccgcacaagaccatgggcttttgcttttctggattaggcctttatcaagcaaatccttgatttccttttgatagtattgaagaagttcttcattcatttggattggtctggcttttgtgggaatttgtttttccctaaagtctttctcataagggagatcgacaatatgtttctttctgtcccaaaatgcatgtggcaattcagaacaaacggtcgattcaatatgatttaataaagattgaattctttcttttacttggggttttcccagttgtatctgaatattattaaaaggtacttcttcttttaagaagttaatttgattaatcttatgtatatatgtatatatatatatatatatatatgtatgtattgtgataaatgatattgttttggttgtttgaaatgtgttgtttgaagaccatgcgtgtggaaatgatattgttgtggttgtttgaattgttgttgatgttgctattgaggattttaattgatatgtg

SEQ ID NO: 10838 - DNA, 1159 bp, Glycine max
  Gm_smallRNAprecursor_3671
atgaatttatgttgtgacaaaatcacttctattttcataagcaaaaattaagggagttctttttataaaaattgaaattatcgaatattagagtgtggataccgtagcgacgaggcgggtcgttacagcacaagtattcattactttgtactgaatcctatagatcaaagctgctgggattgatcctttttcatgtcaaggtcatgaaagtggatatttaaaaacagagagtcaagaatgtttctgtccattagactcaccgttttgtttggataacagttgaagtatattggaccttatcctaagcttgtttctactgttccaattaaggaatcttcaaacttgttatgcctaatatctctaaggcacattaaaaatgcagcatctatgcccaaatcaattaaggacttgatggctacttatacacaaccgatatgtaaatacttgtatttacggctatgttcataaatagaattttttgaaagcagatgaaattcttcccctatatcttgtcctagaggaatattgttttctactatttttattatatagtcaaaattatgtttgtctttaattgtttcaggaatgtacaccttatcctgaggtatttctggaatgttccagttatccatattttgatttatgtcttcgaatcggacttcctcatcgaagagattgtgttttgggacgacctcgtgggtctggttatcttgttcattgagtaaattattggttgaattcattgaagaagaggatgaagatgagtttgatctaaaaaaatgcgagagaaagaacgtaaaaggcgagacattggattcatcctctagtatctttgccgtcatatggttccatagaaatgtttccaaaaggttatatgttactaaacttcttggatctgaaaaataaagaagatttttattttattttattttattttttacggacaatatagtttgaacactactcctatagccaccagtatattatgttttaatattttatttgaacaatacaccttagccttactgccctttctcatccacgggacttactgttaccgtatcattcaactaaaatatcagactgttgtgcttccagaaaatattgttcaaacatatactgtttaaattaaaattactatacacagttcagatccatg

SEQ ID NO: 10839 - DNA, 1224 bp, Glycine max
  Gm_smallRNAprecursor_3672
ataaatagaattttttgaaagcagatgaaattcttcccctatatcttgtcctagaggaatattgttttctactatttttattatatagtcaaaattatgtttgtctttaattgtttcaggaatgtacaccttatcctgaggtatttctggaatgttccagttatccatattttgatttatgtcttcgaatcggacttcctcatcgaagagattgtgttttgggacgacctcgtgggtctggttatcttgttcattgagtaaattattggttgaattcattgaagaagaggatgaagatgagtttgatctaaaaaaatgcgagagaaagaacgtaaaaggcgagacattggattcatcctctagtatctttgccgtcatatggttccatagaaatgtttccaaaaggttatatgttactaaacttcttggatctgaaaaataaagaagatttttattttattttattttattttttacggacaatatagtttgaacactactcctatagccaccagtatattatgttttaatattttatttgaacaatacaccttagccttactgccctttctcatccacgggacttactgttaccgtatcattcaactaaaatatcagactgttgtgcttccagaaaatattgttcaaacatatactgtttaaattaaaattactatacacagttcagatccatgaattcagttaacatatgcccttacggacactattcctacttccccatcaggctctaataccaaagatcagaggagaaggacctaacggacaaataggaagtaggaatgcagtatgataaatggagatcgaaatgtaaacttttcaaaacaggtatcaagggcacaccggagaccggcttacaattcccaggttttcataaacaaagaaaccgaagcggcgacagagctgcataggatcggtacaagaggaggaggggagacgtatgagaaatagaaatttattaaaacttgaaagaaacgcttacaaaagtttttctttcagagcacctcctctcgaaaacctgaaaaatggccaaatgaaagggtgcctcacaatatggttgaggactccttatatagccaaaattctttgaccggtagttttgatcagaactatttgactggttgttacaaaacaattagttttgaccgggacttatttgctacaggacaggtagtattgtccgaaattacaaattaattaacaaca

SEQ ID NO: 10840 - DNA, 1128 bp, Glycine max
  Gm_smallRNAprecursor_3673
ctatataaggagtcatcaaccatgttgtggggcaccctttcatttggccatttttcaggtttctgagacgaggtgctctgaaagaaaaaattttgtaagcgcttctttcaagttttaataaatttctatttctcatacgtctcccctctccctcttgtatcgatcctgtgcggctctgccgccgcttcggttttctttgtttatgaaaacctgggatttgtaagccggtctccggtgtgcccttgatacttgtttttaaaagtttacattttgaattccatttatcactgcattcatactttctatttgtccatttggtccctttccgctgatctctgtccattcatgttgcccgaaaggtacaataaacattgttttgtacctatctgattcttggatttggatttgccaaaatccagatttcatatcaaaatttgaaaatatctttgcagaatttaatctgttaagtaaatcttttttgtttggaataggatacctaatccattgtaatgcttgattcagtggtttgtaatttatgactaagcggggtgttcctcgctcaagctcagattgtttattgacataaaaagccacacaagaccatgggcttttgctttttcagattaggcctttatcaagcaaatccttgatttctttttggcagtattgaaagagttcttcgttcatttgaattggtctggcttttgtgggaatttgttttttcctaaagtctttctcataagggagatcaacaatatgtttctttctatctcaaaatgcatgtggcaaatcagaacaaacaattgattcgatatgacttaataaagattgaattttctcttttacttggggctttcccaattgtatctgaatattattaaaagatacttcttcctttaagaagttaatttggttaatcttattttctataagatttatatttaatttttcttcctaaataatatgtagttattccttcattagatatttgaatgggaaacaaggctctaatgaagggagttcctaagattacttcgttcttaaggttttttaccagaagaaagtttgtgttaatcctaagaccttggttttcgatgattgcatttgataacttaaaattaatcttta

SEQ ID NO: 10841 - DNA, 1051 bp, Glycine max
  Gm_smallRNAprecursor_3674
tttaagatatttttttggtgaatatatgttttaaaatttaaattttgtataataatatatttattttattaaatatttattttgtataataatctgaattttaaaatttttaatttaactattttactaaatataattagtttgtttatgtttttagatttaattaaaaatgataaaactaaagcttttaacaatttatttatataagaacattatactacgtcatcaataaaatatttaaacaatgacatttgtctaaggaaaaactaagatgaggatacattaggacaattatttctgctatgaccatgttgccgacaaagtccacatttttttctacttgctcgttcatttttgtcttcgtccatctcagtaggaatgcgagttgaaacgggacgaccctttacagtcctctttctccttggatcaggaccccactgatctccttcatattcttgccacattgatttgtgtggcaataaaccaaaggagttgtcgtagatgtgcaaaatgtgttgtaaagtgaatatcatcggcacataggtcatgggatcaacattgacagatttacaggcagccatgacgtgagaacacggtaaatgtttagcctgaaattcaccacaatcacacttttgggattgtaacattactctaaaccttccaggtggtctgggtgtttcaagtggggattgagtctcggttataataaaagtgtgattgtgtctgtcgaattcatttacaatgtgtgtattagattcttgttgaccactattgattgcatcgaagacgacttcagaatactgtgagccggagttgatcattgtctgagtttgtcgacctctattagcaaagagttgtgcggtcttgaaataggtctcctcaaccaatgatgacaccggcaaatgtcttgtgtttttgaacatggaattaacagactccgacaaattggtagtcatatgtccccaacgcttcccctcatcaaagcattgtacccatttttgtttgggtaattgatcaagccattcagctgcacttggcttattcgcacgaa

SEQ ID NO: 10842 - DNA, 1167 bp, Glycine max
  Gm_smallRNAprecursor_3675
aataatatatttattttattaaatatttattttgtataataatctgaattttaaaatttttaatttaactattttactaaatataattagtttgtttatgtttttagatttaattaaaaatgataaaactaaagcttttaacaatttatttatataagaacattatactacgtcatcaataaaatatttaaacaatgacatttgtctaaggaaaaactaagatgaggatacattaggacaattatttctgctatgaccatgttgccgacaaagtccacatttttttctacttgctcgttcatttttgtcttcgtccatctcagtaggaatgcgagttgaaacgggacgaccctttacagtcctctttctccttggatcaggaccccactgatctccttcatattcttgccacattgatttgtgtggcaataaaccaaaggagttgtcgtagatgtgcaaaatgtgttgtaaagtgaatatcatcggcacataggtcatgggatcaacattgacagatttacaggcagccatgacgtgagaacacggtaaatgtttagcctgaaattcaccacaatcacacttttgggattgtaacattactctaaaccttccaggtggtctgggtgtttcaagtggggattgagtctcggttataataaaagtgtgattgtgtctgtcgaattcatttacaatgtgtgtattagattcttgttgaccactattgattgcatcgaagacgacttcagaatactgtgagccggagttgatcattgtctgagtttgtcgacctctattagcaaagagttgtgcggtcttgaaataggtctcctcaaccaatgatgacaccggcaaatgtcttgtgtttttgaacatggaattaacagactccgacaaattggtagtcatatgtccccaacgcttcccctcatcaaagcattgtacccatttttgtttgggtaattgatcaagccattcagctgcacttggcttattcgcacgaatatccccaagatgtcgccagtgcatcttctctgtgtatgcgtaccctgtaaatatttaatcaatgtattatgttataaaatttgattgaaagaaaattataacgaataaataaaatagattctcaccagccaacataagtggtttctttaaatgtttgcagtttga

SEQ ID NO: 10843 - DNA, 1092 bp, Glycine max
  Gm_smallRNAprecursor_3676
ggacaattatttctgctatgaccatgttgccgacaaagtccacatttttttctacttgctcgttcatttttgtcttcgtccatctcagtaggaatgcgagttgaaacgggacgaccctttacagtcctctttctccttggatcaggaccccactgatctccttcatattcttgccacattgatttgtgtggcaataaaccaaaggagttgtcgtagatgtgcaaaatgtgttgtaaagtgaatatcatcggcacataggtcatgggatcaacattgacagatttacaggcagccatgacgtgagaacacggtaaatgtttagcctgaaattcaccacaatcacacttttgggattgtaacattactctaaaccttccaggtggtctgggtgtttcaagtggggattgagtctcggttataataaaagtgtgattgtgtctgtcgaattcatttacaatgtgtgtattagattcttgttgaccactattgattgcatcgaagacgacttcagaatactgtgagccggagttgatcattgtctgagtttgtcgacctctattagcaaagagttgtgcggtcttgaaataggtctcctcaaccaatgatgacaccggcaaatgtcttgtgtttttgaacatggaattaacagactccgacaaattggtagtcatatgtccccaacgcttcccctcatcaaagcattgtacccatttttgtttgggtaattgatcaagccattcagctgcacttggcttattcgcacgaatatccccaagatgtcgccagtgcatcttctctgtgtatgcgtaccctgtaaatatttaatcaatgtattatgttataaaatttgattgaaagaaaattataacgaataaataaaatagattctcaccagccaacataagtggtttctttaaatgtttgcagtttgagttaccacgaagaaagttttgtgcaatgtggcgcaggcaaaagaaatgggatgtgtcctggacccataagttacttgggttgttgtaggcacttataattgaggggtgtcggtctgaaataagagaaatgttaatttgcagagtaacatgtcttctcaaa

SEQ ID NO: 10844 - DNA, 1040 bp, Glycine max
  Gm_smallRNAprecursor_3677
attcgcacgaatatccccaagatgtcgccagtgcatcttctctgtgtatgcgtaccctgtaaatatttaatcaatgtattatgttataaaatttgattgaaagaaaattataacgaataaataaaatagattctcaccagccaacataagtggtttctttaaatgtttgcagtttgagttaccacgaagaaagttttgtgcaatgtggcgcaggcaaaagaaatgggatgtgtcctggacccataagttacttgggttgttgtaggcacttataattgaggggtgtcggtctgaaataagagaaatgttaatttgcagagtaacatgtcttctcaaattctttagaaaaaacccccaagctgaagttgtctccccttctacaatggcataggcaatcgggaagatatggttagctccatcttgtgcggtagctatcaacagtgtgccagtatactttccgtaaagccatgtaccgtctacttgtacaatgggtttgcaatatgcaaaaccattaatgcatggaccaaatgaccaaaagacacgtttaaacaatcttttgcccggtactatttctcccccctcatacaaggattctgtttgagcagcgaccacagtcccgggaacacaagattgcaaagctccgaaaagttttggcagtttggcatatgattcttcccagtttccatgaatcatctccaatgctttttgctttgctaaccatgtcttcttgtaggatggggtataattcatgaacgttttaatctctgcaatcaatgtcttgatggagacagttgggtttgttttgacaattggttggatgatctgtgctatgacgtgtttgtcgagttggcgatgatcttgtgtaagcatcggcacgagacaagtgtgatgacctctgatactcttgataatccatttgttatgcctctttgaattgcatgcgcccaagctccatgtacaaccattttcatgtaacttgcagacgaagtgtagccttctttggtcagagtaaattgttctgcaatcaaaatgatttctga

SEQ ID NO: 10845 - DNA, 1141 bp, Glycine max
  Gm_smallRNAprecursor_3678
aataatttgggggcttaaaataatttagaaactaaattaataattaaaccaaaaatttattcttgtttgcttatatatatatatatatatatataaggtcagcggaataagattaaacggacagataggaagtaagatcaaacggaataagatcaaacggacagataggaagtaagaatgcagtatgataaatggaaaggaaaatataaacttgtaaaacagatatcaagggcacatcggagaccggcttacaaatcccaggttttcataaacaaagaaactgaagcggcggcagagccgcacaggatcggtaaagagagagaagagggatgaaaaaatagaaatttattgaaacttgaaagaagcgcttacaaaaatcttgtttcagagcacctctcttcagaaacctgaaaaatggccaaatgaaagggtgcctcacaacatacttgaggactccttatatagccaaaaatctaagaccgatagttaccggtagttttgaccgggactatttgactgtttgttacaagataagtagttttgaccgggactttaatggctacaggacagatagtattgtccaacattaattacacattaattacaaacagacgattttgtgaccgaaattaaatttaatctaaacagataccaaaacaatcatcttcgttttggtaaaaggtgtcttcttcttcttcttcagcagaacttgtttcttccttctttgaggatgaaccttcttcttcctgctgtaacatttgcagaacttcctttagatttttagtcaggacctcctttgatttcgatcctgctaaaaatgctgccagatgagacttttggttcaaaaacacagaagtttctggatcaggtgctttgaggaattctagatgggattggaaccagagttttacttgttctggatccgctttgaatgagtcaaattgtgtccaccattttacaaatgcgtgtctttgtagtgatggatattggtttgtcttttcagtcttgctgtaacgatattgccatgagaagatccatgacagtgcaaagcttgaaaagtatttaagatctgttggaattcgtgattcctgcgaattgtattgtctctcaaattgagcaaatccttgttggactgtttctg

SEQ ID NO: 10846 - DNA, 1154 bp, Glycine max
  Gm_smallRNAprecursor_3679
aataatttgggggcttaaaataatttagaaactaaattaataattaaaccaaaaatttattcttgtttgcttatatatatatatatatatatataaggtcagcggaataagattaaacggacagataggaagtaagatcaaacggaataagatcaaacggacagataggaagtaagaatgcagtatgataaatggaaaggaaaatataaacttgtaaaacagatatcaagggcacatcggagaccggcttacaaatcccaggttttcataaacaaagaaactgaagcggcggcagagccgcacaggatcggtaaagagagagaagagggatgaaaaaatagaaatttattgaaacttgaaagaagcgcttacaaaaatcttgtttcagagcacctctcttcagaaacctgaaaaatggccaaatgaaagggtgcctcacaacatacttgaggactccttatatagccaaaaatctaagaccgatagttaccggtagttttgaccgggactatttgactgtttgttacaagataagtagttttgaccgggactttaatggctacaggacagatagtattgtccaacattaattacacattaattacaaacagacgattttgtgaccgaaattaaatttaatctaaacagataccaaaacaatcatcttcgttttggtaaaaggtgtcttcttcttcttcttcagcagaacttgtttcttccttctttgaggatgaaccttcttcttcctgctgtaacatttgcagaacttcctttagatttttagtcaggacctcctttgatttcgatcctgctaaaaatgctgccagatgagacttttggttcaaaaacacagaagtttctggatcaggtgctttgaggaattctagatgggattggaaccagagttttacttgttctggatccgctttgaatgagtcaaattgtgtccaccattttacaaatgcgtgtctttgtagtgatggatattggtttgtcttttcagtcttgctgtaacgatattgccatgagaagatccatgacagtgcaaagcttgaaaagtatttaagatctgttggaattcgtgattcctgcgaattgtattgtctctcaaattgagcaaatccttgttggactgtttctgggaatatctctga

SEQ ID NO: 10847 - DNA, 1061 bp, Glycine max
  Gm_smallRNAprecursor_3680
aacggaataagatcaaacggacagataggaagtaagaatgcagtatgataaatggaaaggaaaatataaacttgtaaaacagatatcaagggcacatcggagaccggcttacaaatcccaggttttcataaacaaagaaactgaagcggcggcagagccgcacaggatcggtaaagagagagaagagggatgaaaaaatagaaatttattgaaacttgaaagaagcgcttacaaaaatcttgtttcagagcacctctcttcagaaacctgaaaaatggccaaatgaaagggtgcctcacaacatacttgaggactccttatatagccaaaaatctaagaccgatagttaccggtagttttgaccgggactatttgactgtttgttacaagataagtagttttgaccgggactttaatggctacaggacagatagtattgtccaacattaattacacattaattacaaacagacgattttgtgaccgaaattaaatttaatctaaacagataccaaaacaatcatcttcgttttggtaaaaggtgtcttcttcttcttcttcagcagaacttgtttcttccttctttgaggatgaaccttcttcttcctgctgtaacatttgcagaacttcctttagatttttagtcaggacctcctttgatttcgatcctgctaaaaatgctgccagatgagacttttggttcaaaaacacagaagtttctggatcaggtgctttgaggaattctagatgggattggaaccagagttttacttgttctggatccgctttgaatgagtcaaattgtgtccaccattttacaaatgcgtgtctttgtagtgatggatattggtttgtcttttcagtcttgctgtaacgatattgccatgagaagatccatgacagtgcaaagcttgaaaagtatttaagatctgttggaattcgtgattcctgcgaattgtattgtctctcaaattgagcaaatccttgttggactgtttctgggaatatctctgaaattggtccaaagaagtcccacaattgcaaaaaccaattgggaaaat

SEQ ID NO: 10848 - DNA, 1063 bp, Glycine max
  Gm_smallRNAprecursor_3681
aacggaataagatcaaacggacagataggaagtaagaatgcagtatgataaatggaaaggaaaatataaacttgtaaaacagatatcaagggcacatcggagaccggcttacaaatcccaggttttcataaacaaagaaactgaagcggcggcagagccgcacaggatcggtaaagagagagaagagggatgaaaaaatagaaatttattgaaacttgaaagaagcgcttacaaaaatcttgtttcagagcacctctcttcagaaacctgaaaaatggccaaatgaaagggtgcctcacaacatacttgaggactccttatatagccaaaaatctaagaccgatagttaccggtagttttgaccgggactatttgactgtttgttacaagataagtagttttgaccgggactttaatggctacaggacagatagtattgtccaacattaattacacattaattacaaacagacgattttgtgaccgaaattaaatttaatctaaacagataccaaaacaatcatcttcgttttggtaaaaggtgtcttcttcttcttcttcagcagaacttgtttcttccttctttgaggatgaaccttcttcttcctgctgtaacatttgcagaacttcctttagatttttagtcaggacctcctttgatttcgatcctgctaaaaatgctgccagatgagacttttggttcaaaaacacagaagtttctggatcaggtgctttgaggaattctagatgggattggaaccagagttttacttgttctggatccgctttgaatgagtcaaattgtgtccaccattttacaaatgcgtgtctttgtagtgatggatattggtttgtcttttcagtcttgctgtaacgatattgccatgagaagatccatgacagtgcaaagcttgaaaagtatttaagatctgttggaattcgtgattcctgcgaattgtattgtctctcaaattgagcaaatccttgttggactgtttctgggaatatctctgaaattggtccaaagaagtcccacaattgcaaaaaccaattgggaaaattg

SEQ ID NO: 10849 - DNA, 1063 bp, Glycine max; identical to SEQ ID NO: 10848
  Gm_smallRNAprecursor_3682

SEQ ID NO: 10850 - DNA, 1064 bp, Glycine max
  Gm_smallRNAprecursor_3683
aacggaataagatcaaacggacagataggaagtaagaatgcagtatgataaatggaaaggaaaatataaacttgtaaaacagatatcaagggcacatcggagaccggcttacaaatcccaggttttcataaacaaagaaactgaagcggcggcagagccgcacaggatcggtaaagagagagaagagggatgaaaaaatagaaatttattgaaacttgaaagaagcgcttacaaaaatcttgtttcagagcacctctcttcagaaacctgaaaaatggccaaatgaaagggtgcctcacaacatacttgaggactccttatatagccaaaaatctaagaccgatagttaccggtagttttgaccgggactatttgactgtttgttacaagataagtagttttgaccgggactttaatggctacaggacagatagtattgtccaacattaattacacattaattacaaacagacgattttgtgaccgaaattaaatttaatctaaacagataccaaaacaatcatcttcgttttggtaaaaggtgtcttcttcttcttcttcagcagaacttgtttcttccttctttgaggatgaaccttcttcttcctgctgtaacatttgcagaacttcctttagatttttagtcaggacctcctttgatttcgatcctgctaaaaatgctgccagatgagacttttggttcaaaaacacagaagtttctggatcaggtgctttgaggaattctagatgggattggaaccagagttttacttgttctggatccgctttgaatgagtcaaattgtgtccaccattttacaaatgcgtgtctttgtagtgatggatattggtttgtcttttcagtcttgctgtaacgatattgccatgagaagatccatgacagtgcaaagcttgaaaagtatttaagatctgttggaattcgtgattcctgcgaattgtattgtctctcaaattgagcaaatccttgttggactgtttctgggaatatctctgaaattggtccaaagaagtcccacaattgcaaaaaccaattgggaaaattgt

SEQ ID NO: 10851 - DNA, 1057 bp, Glycine max
  Gm_smallRNAprecursor_3684
ggaataagatcaaacggacagataggaagtaagaatgcagtatgataaatggaaaggaaaatataaacttgtaaaacagatatcaagggcacatcggagaccggcttacaaatcccaggttttcataaacaaagaaactgaagcggcggcagagccgcacaggatcggtaaagagagagaagagggatgaaaaaatagaaatttattgaaacttgaaagaagcgcttacaaaaatcttgtttcagagcacctctcttcagaaacctgaaaaatggccaaatgaaagggtgcctcacaacatacttgaggactccttatatagccaaaaatctaagaccgatagttaccggtagttttgaccgggactatttgactgtttgttacaagataagtagttttgaccgggactttaatggctacaggacagatagtattgtccaacattaattacacattaattacaaacagacgattttgtgaccgaaattaaatttaatctaaacagataccaaaacaatcatcttcgttttggtaaaaggtgtcttcttcttcttcttcagcagaacttgtttcttccttctttgaggatgaaccttcttcttcctgctgtaacatttgcagaacttcctttagatttttagtcaggacctcctttgatttcgatcctgctaaaaatgctgccagatgagacttttggttcaaaaacacagaagtttctggatcaggtgctttgaggaattctagatgggattggaaccagagttttacttgttctggatccgctttgaatgagtcaaattgtgtccaccattttacaaatgcgtgtctttgtagtgatggatattggtttgtcttttcagtcttgctgtaacgatattgccatgagaagatccatgacagtgcaaagcttgaaaagtatttaagatctgttggaattcgtgattcctgcgaattgtattgtctctcaaattgagcaaatccttgttggactgtttctgggaatatctctgaaattggtccaaagaagtcccacaattgcaaaaaccaattgggaaaa

SEQ ID NO: 10852 - DNA, 1058 bp, Glycine max
  Gm_smallRNAprecursor_3685
ggaataagatcaaacggacagataggaagtaagaatgcagtatgataaatggaaaggaaaatataaacttgtaaaacagatatcaagggcacatcggagaccggcttacaaatcccaggttttcataaacaaagaaactgaagcggcggcagagccgcacaggatcggtaaagagagagaagagggatgaaaaaatagaaatttattgaaacttgaaagaagcgcttacaaaaatcttgtttcagagcacctctcttcagaaacctgaaaaatggccaaatgaaagggtgcctcacaacatacttgaggactccttatatagccaaaaatctaagaccgatagttaccggtagttttgaccgggactatttgactgtttgttacaagataagtagttttgaccgggactttaatggctacaggacagatagtattgtccaacattaattacacattaattacaaacagacgattttgtgaccgaaattaaatttaatctaaacagataccaaaacaatcatcttcgttttggtaaaaggtgtcttcttcttcttcttcagcagaacttgtttcttccttctttgaggatgaaccttcttcttcctgctgtaacatttgcagaacttcctttagatttttagtcaggacctcctttgatttcgatcctgctaaaaatgctgccagatgagacttttggttcaaaaacacagaagtttctggatcaggtgctttgaggaattctagatgggattggaaccagagttttacttgttctggatccgctttgaatgagtcaaattgtgtccaccattttacaaatgcgtgtctttgtagtgatggatattggtttgtcttttcagtcttgctgtaacgatattgccatgagaagatccatgacagtgcaaagcttgaaaagtatttaagatctgttggaattcgtgattcctgcgaattgtattgtctctcaaattgagcaaatccttgttggactgtttctgggaatatctctgaaattggtccaaagaagtcccacaattgcaaaaaccaattgggaaaat

SEQ ID NO: 10853 - DNA, 1056 bp, Glycine max
  Gm_smallRNAprecursor_3686
gaataagatcaaacggacagataggaagtaagaatgcagtatgataaatggaaaggaaaatataaacttgtaaaacagatatcaagggcacatcggagaccggcttacaaatcccaggttttcataaacaaagaaactgaagcggcggcagagccgcacaggatcggtaaagagagagaagagggatgaaaaaatagaaatttattgaaacttgaaagaagcgcttacaaaaatcttgtttcagagcacctctcttcagaaacctgaaaaatggccaaatgaaagggtgcctcacaacatacttgaggactccttatatagccaaaaatctaagaccgatagttaccggtagttttgaccgggactatttgactgtttgttacaagataagtagttttgaccgggactttaatggctacaggacagatagtattgtccaacattaattacacattaattacaaacagacgattttgtgaccgaaattaaatttaatctaaacagataccaaaacaatcatcttcgttttggtaaaaggtgtcttcttcttcttcttcagcagaacttgtttcttccttctttgaggatgaaccttcttcttcctgctgtaacatttgcagaacttcctttagatttttagtcaggacctcctttgatttcgatcctgctaaaaatgctgccagatgagacttttggttcaaaaacacagaagtttctggatcaggtgctttgaggaattctagatgggattggaaccagagttttacttgttctggatccgctttgaatgagtcaaattgtgtccaccattttacaaatgcgtgtctttgtagtgatggatattggtttgtcttttcagtcttgctgtaacgatattgccatgagaagatccatgacagtgcaaagcttgaaaagtatttaagatctgttggaattcgtgattcctgcgaattgtattgtctctcaaattgagcaaatccttgttggactgtttctgggaatatctctgaaattggtccaaagaagtcccacaattgcaaaaaccaattgggaaaa

SEQ ID NO: 10854 - DNA, 1056 bp, Glycine max; identical to SEQ ID NO: 10853
  Gm_smallRNAprecursor_3687

SEQ ID NO: 10855 - DNA, 1057 bp, Glycine max
  Gm_smallRNAprecursor_3688
gaataagatcaaacggacagataggaagtaagaatgcagtatgataaatggaaaggaaaatataaacttgtaaaacagatatcaagggcacatcggagaccggcttacaaatcccaggttttcataaacaaagaaactgaagcggcggcagagccgcacaggatcggtaaagagagagaagagggatgaaaaaatagaaatttattgaaacttgaaagaagcgcttacaaaaatcttgtttcagagcacctctcttcagaaacctgaaaaatggccaaatgaaagggtgcctcacaacatacttgaggactccttatatagccaaaaatctaagaccgatagttaccggtagttttgaccgggactatttgactgtttgttacaagataagtagttttgaccgggactttaatggctacaggacagatagtattgtccaacattaattacacattaattacaaacagacgattttgtgaccgaaattaaatttaatctaaacagataccaaaacaatcatcttcgttttggtaaaaggtgtcttcttcttcttcttcagcagaacttgtttcttccttctttgaggatgaaccttcttcttcctgctgtaacatttgcagaacttcctttagatttttagtcaggacctcctttgatttcgatcctgctaaaaatgctgccagatgagacttttggttcaaaaacacagaagtttctggatcaggtgctttgaggaattctagatgggattggaaccagagttttacttgttctggatccgctttgaatgagtcaaattgtgtccaccattttacaaatgcgtgtctttgtagtgatggatattggtttgtcttttcagtcttgctgtaacgatattgccatgagaagatccatgacagtgcaaagcttgaaaagtatttaagatctgttggaattcgtgattcctgcgaattgtattgtctctcaaattgagcaaatccttgttggactgtttctgggaatatctctgaaattggtccaaagaagtcccacaattgcaaaaaccaattgggaaaat

SEQ ID NO: 10856 - DNA, 1059 bp, Glycine max
  Gm_smallRNAprecursor_3689
gaataagatcaaacggacagataggaagtaagaatgcagtatgataaatggaaaggaaaatataaacttgtaaaacagatatcaagggcacatcggagaccggcttacaaatcccaggttttcataaacaaagaaactgaagcggcggcagagccgcacaggatcggtaaagagagagaagagggatgaaaaaatagaaatttattgaaacttgaaagaagcgcttacaaaaatcttgtttcagagcacctctcttcagaaacctgaaaaatggccaaatgaaagggtgcctcacaacatacttgaggactccttatatagccaaaaatctaagaccgatagttaccggtagttttgaccgggactatttgactgtttgttacaagataagtagttttgaccgggactttaatggctacaggacagatagtattgtccaacattaattacacattaattacaaacagacgattttgtgaccgaaattaaatttaatctaaacagataccaaaacaatcatcttcgttttggtaaaaggtgtcttcttcttcttcttcagcagaacttgtttcttccttctttgaggatgaaccttcttcttcctgctgtaacatttgcagaacttcctttagatttttagtcaggacctcctttgatttcgatcctgctaaaaatgctgccagatgagacttttggttcaaaaacacagaagtttctggatcaggtgctttgaggaattctagatgggattggaaccagagttttacttgttctggatccgctttgaatgagtcaaattgtgtccaccattttacaaatgcgtgtctttgtagtgatggatattggtttgtcttttcagtcttgctgtaacgatattgccatgagaagatccatgacagtgcaaagcttgaaaagtatttaagatctgttggaattcgtgattcctgcgaattgtattgtctctcaaattgagcaaatccttgttggactgtttctgggaatatctctgaaattggtccaaagaagtcccacaattgcaaaaaccaattgggaaaattg

SEQ ID NO: 10857 - DNA, 1059 bp, Glycine max; identical to SEQ ID NO: 10856
  Gm_smallRNAprecursor_3690

SEQ ID NO: 10858 - DNA, 1055 bp, Glycine max
  Gm_smallRNAprecursor_3691
aataagatcaaacggacagataggaagtaagaatgcagtatgataaatggaaaggaaaatataaacttgtaaaacagatatcaagggcacatcggagaccggcttacaaatcccaggttttcataaacaaagaaactgaagcggcggcagagccgcacaggatcggtaaagagagagaagagggatgaaaaaatagaaatttattgaaacttgaaagaagcgcttacaaaaatcttgtttcagagcacctctcttcagaaacctgaaaaatggccaaatgaaagggtgcctcacaacatacttgaggactccttatatagccaaaaatctaagaccgatagttaccggtagttttgaccgggactatttgactgtttgttacaagataagtagttttgaccgggactttaatggctacaggacagatagtattgtccaacattaattacacattaattacaaacagacgattttgtgaccgaaattaaatttaatctaaacagataccaaaacaatcatcttcgttttggtaaaaggtgtcttcttcttcttcttcagcagaacttgtttcttccttctttgaggatgaaccttcttcttcctgctgtaacatttgcagaacttcctttagatttttagtcaggacctcctttgatttcgatcctgctaaaaatgctgccagatgagacttttggttcaaaaacacagaagtttctggatcaggtgctttgaggaattctagatgggattggaaccagagttttacttgttctggatccgctttgaatgagtcaaattgtgtccaccattttacaaatgcgtgtctttgtagtgatggatattggtttgtcttttcagtcttgctgtaacgatattgccatgagaagatccatgacagtgcaaagcttgaaaagtatttaagatctgttggaattcgtgattcctgcgaattgtattgtctctcaaattgagcaaatccttgttggactgtttctgggaatatctctgaaattggtccaaagaagtcccacaattgcaaaaaccaattgggaaaa

SEQ ID NO: 10859 - DNA, 1058 bp, Glycine max
  Gm_smallRNAprecursor_3692
aataagatcaaacggacagataggaagtaagaatgcagtatgataaatggaaaggaaaatataaacttgtaaaacagatatcaagggcacatcggagaccggcttacaaatcccaggttttcataaacaaagaaactgaagcggcggcagagccgcacaggatcggtaaagagagagaagagggatgaaaaaatagaaatttattgaaacttgaaagaagcgcttacaaaaatcttgtttcagagcacctctcttcagaaacctgaaaaatggccaaatgaaagggtgcctcacaacatacttgaggactccttatatagccaaaaatctaagaccgatagttaccggtagttttgaccgggactatttgactgtttgttacaagataagtagttttgaccgggactttaatggctacaggacagatagtattgtccaacattaattacacattaattacaaacagacgattttgtgaccgaaattaaatttaatctaaacagataccaaaacaatcatcttcgttttggtaaaaggtgtcttcttcttcttcttcagcagaacttgtttcttccttctttgaggatgaaccttcttcttcctgctgtaacatttgcagaacttcctttagatttttagtcaggacctcctttgatttcgatcctgctaaaaatgctgccagatgagacttttggttcaaaaacacagaagtttctggatcaggtgctttgaggaattctagatgggattggaaccagagttttacttgttctggatccgctttgaatgagtcaaattgtgtccaccattttacaaatgcgtgtctttgtagtgatggatattggtttgtcttttcagtcttgctgtaacgatattgccatgagaagatccatgacagtgcaaagcttgaaaagtatttaagatctgttggaattcgtgattcctgcgaattgtattgtctctcaaattgagcaaatccttgttggactgtttctgggaatatctctgaaattggtccaaagaagtcccacaattgcaaaaaccaattgggaaaattg

SEQ ID NO: 10860 - DNA, 1058 bp, Glycine max; identical to SEQ ID NO: 10859
  Gm_smallRNAprecursor_3693

SEQ ID NO: 10861 - DNA, 1130 bp, Glycine max
  Gm_smallRNAprecursor_3694
agaaacctgaaaaatggccaaatgaaagggtgcctcacaacatacttgaggactccttatatagccaaaaatctaagaccgatagttaccggtagttttgaccgggactatttgactgtttgttacaagataagtagttttgaccgggactttaatggctacaggacagatagtattgtccaacattaattacacattaattacaaacagacgattttgtgaccgaaattaaatttaatctaaacagataccaaaacaatcatcttcgttttggtaaaaggtgtcttcttcttcttcttcagcagaacttgtttcttccttctttgaggatgaaccttcttcttcctgctgtaacatttgcagaacttcctttagatttttagtcaggacctcctttgatttcgatcctgctaaaaatgctgccagatgagacttttggttcaaaaacacagaagtttctggatcaggtgctttgaggaattctagatgggattggaaccagagttttacttgttctggatccgctttgaatgagtcaaattgtgtccaccattttacaaatgcgtgtctttgtagtgatggatattggtttgtcttttcagtcttgctgtaacgatattgccatgagaagatccatgacagtgcaaagcttgaaaagtatttaagatctgttggaattcgtgattcctgcgaattgtattgtctctcaaattgagcaaatccttgttggactgtttctgggaatatctctgaaattggtccaaagaagtcccacaattgcaaaaaccaattgggaaaattgtaaattgtattggtcttgaaatatatcagccatgaatgcttgaaacgagtattttggtgccaaaacaccttagtccaagcatcaacataatcccaataggtataacctgccggatcaaatggaactgaaaatctctttcctttgttcaagtccgaaccaaagtgtcttggttgaagaacttttagtatttggattgtcgagtgggtgtttaatgtttggtcttttgggtctttgaaatgtttaatagatactgagtttgaatctaccaaaatcaattcataaaaagttcttgtcttcaggatggtggttggtttgtagtgaaatcctg

SEQ ID NO: 10862 - DNA, 1200 bp, Glycine max
  Gm_smallRNAprecursor_3695
ggacagatagtattgtccaacattaattacacattaattacaaacagacgattttgtgaccgaaattaaatttaatctaaacagataccaaaacaatcatcttcgttttggtaaaaggtgtcttcttcttcttcttcagcagaacttgtttcttccttctttgaggatgaaccttcttcttcctgctgtaacatttgcagaacttcctttagatttttagtcaggacctcctttgatttcgatcctgctaaaaatgctgccagatgagacttttggttcaaaaacacagaagtttctggatcaggtgctttgaggaattctagatgggattggaaccagagttttacttgttctggatccgctttgaatgagtcaaattgtgtccaccattttacaaatgcgtgtctttgtagtgatggatattggtttgtcttttcagtcttgctgtaacgatattgccatgagaagatccatgacagtgcaaagcttgaaaagtatttaagatctgttggaattcgtgattcctgcgaattgtattgtctctcaaattgagcaaatccttgttggactgtttctgggaatatctctgaaattggtccaaagaagtcccacaattgcaaaaaccaattgggaaaattgtaaattgtattggtcttgaaatatatcagccatgaatgcttgaaacgagtattttggtgccaaaacaccttagtccaagcatcaacataatcccaataggtataacctgccggatcaaatggaactgaaaatctctttcctttgttcaagtccgaaccaaagtgtcttggttgaagaacttttagtatttggattgtcgagtgggtgtttaatgtttggtcttttgggtctttgaaatgtttaatagatactgagtttgaatctaccaaaatcaattcataaaaagttcttgtcttcaggatggtggttggtttgtagtgaaatcctggtgggaaagccttggccgtcgccttgaagggatttttgtcccaaaatttaggttccatctacaaaacagttgtaaatttatttttataaatataattgttagtttgtttggtaggtggtgtttgagctttggctaaaggtagtttccctttaggattggaagttgttttggtcattgatgcattttggatcattgtttgtaaatttgattcaagttcatcatcagattctgag

SEQ ID NO: 10863 - DNA, 1170 bp, Glycine max
  Gm_smallRNAprecursor_3696
gcagaacttgtttcttccttctttgaggatgaaccttcttcttcctgctgtaacatttgcagaacttcctttagatttttagtcaggacctcctttgatttcgatcctgctaaaaatgctgccagatgagacttttggttcaaaaacacagaagtttctggatcaggtgctttgaggaattctagatgggattggaaccagagttttacttgttctggatccgctttgaatgagtcaaattgtgtccaccattttacaaatgcgtgtctttgtagtgatggatattggtttgtcttttcagtcttgctgtaacgatattgccatgagaagatccatgacagtgcaaagcttgaaaagtatttaagatctgttggaattcgtgattcctgcgaattgtattgtctctcaaattgagcaaatccttgttggactgtttctgggaatatctctgaaattggtccaaagaagtcccacaattgcaaaaaccaattgggaaaattgtaaattgtattggtcttgaaatatatcagccatgaatgcttgaaacgagtattttggtgccaaaacaccttagtccaagcatcaacataatcccaataggtataacctgccggatcaaatggaactgaaaatctctttcctttgttcaagtccgaaccaaagtgtcttggttgaagaacttttagtatttggattgtcgagtgggtgtttaatgtttggtcttttgggtctttgaaatgtttaatagatactgagtttgaatctaccaaaatcaattcataaaaagttcttgtcttcaggatggtggttggtttgtagtgaaatcctggtgggaaagccttggccgtcgccttgaagggatttttgtcccaaaatttaggttccatctacaaaacagttgtaaatttatttttataaatataattgttagtttgtttggtaggtggtgtttgagctttggctaaaggtagtttccctttaggattggaagttgttttggtcattgatgcattttggatcattgtttgtaaatttgattcaagttcatcatcagattctgaggcaatgtctgcccaagattttttgattatttttggaaatttggttagacccatgtcttgaagggcctgaagggtttcaattggccatgcatagtcggccgatgtttgt

SEQ ID NO: 10864 - DNA, 1107 bp, Glycine max
  Gm_smallRNAprecursor_3697
gcagaacttcctttagatttttagtcaggacctcctttgatttcgatcctgctaaaaatgctgccagatgagacttttggttcaaaaacacagaagtttctggatcaggtgctttgaggaattctagatgggattggaaccagagttttacttgttctggatccgctttgaatgagtcaaattgtgtccaccattttacaaatgcgtgtctttgtagtgatggatattggtttgtcttttcagtcttgctgtaacgatattgccatgagaagatccatgacagtgcaaagcttgaaaagtatttaagatctgttggaattcgtgattcctgcgaattgtattgtctctcaaattgagcaaatccttgttggactgtttctgggaatatctctgaaattggtccaaagaagtcccacaattgcaaaaaccaattgggaaaattgtaaattgtattggtcttgaaatatatcagccatgaatgcttgaaacgagtattttggtgccaaaacaccttagtccaagcatcaacataatcccaataggtataacctgccggatcaaatggaactgaaaatctctttcctttgttcaagtccgaaccaaagtgtcttggttgaagaacttttagtatttggattgtcgagtgggtgtttaatgtttggtcttttgggtctttgaaatgtttaatagatactgagtttgaatctaccaaaatcaattcataaaaagttcttgtcttcaggatggtggttggtttgtagtgaaatcctggtgggaaagccttggccgtcgccttgaagggatttttgtcccaaaatttaggttccatctacaaaacagttgtaaatttatttttataaatataattgttagtttgtttggtaggtggtgtttgagctttggctaaaggtagtttccctttaggattggaagttgttttggtcattgatgcattttggatcattgtttgtaaatttgattcaagttcatcatcagattctgaggcaatgtctgcccaagattttttgattatttttggaaatttggttagacccatgtcttgaagggcctgaagggtttcaattggccatgcatagtcggccgatg

SEQ ID NO: 10865 - DNA, 1107 bp, Glycine max; identical to SEQ ID NO: 10864
  Gm_smallRNAprecursor_3698

SEQ ID NO: 10866 - DNA, 1108 bp, Glycine max
  Gm_smallRNAprecursor_3699
gcagaacttcctttagatttttagtcaggacctcctttgatttcgatcctgctaaaaatgctgccagatgagacttttggttcaaaaacacagaagtttctggatcaggtgctttgaggaattctagatgggattggaaccagagttttacttgttctggatccgctttgaatgagtcaaattgtgtccaccattttacaaatgcgtgtctttgtagtgatggatattggtttgtcttttcagtcttgctgtaacgatattgccatgagaagatccatgacagtgcaaagcttgaaaagtatttaagatctgttggaattcgtgattcctgcgaattgtattgtctctcaaattgagcaaatccttgttggactgtttctgggaatatctctgaaattggtccaaagaagtcccacaattgcaaaaaccaattgggaaaattgtaaattgtattggtcttgaaatatatcagccatgaatgcttgaaacgagtattttggtgccaaaacaccttagtccaagcatcaacataatcccaataggtataacctgccggatcaaatggaactgaaaatctctttcctttgttcaagtccgaaccaaagtgtcttggttgaagaacttttagtatttggattgtcgagtgggtgtttaatgtttggtcttttgggtctttgaaatgtttaatagatactgagtttgaatctaccaaaatcaattcataaaaagttcttgtcttcaggatggtggttggtttgtagtgaaatcctggtgggaaagccttggccgtcgccttgaagggatttttgtcccaaaatttaggttccatctacaaaacagttgtaaatttatttttataaatataattgttagtttgtttggtaggtggtgtttgagctttggctaaaggtagtttccctttaggattggaagttgttttggtcattgatgcattttggatcattgtttgtaaatttgattcaagttcatcatcagattctgaggcaatgtctgcccaagattttttgattatttttggaaatttggttagacccatgtcttgaagggcctgaagggtttcaattggccatgcatagtcggccgatgt

SEQ ID NO: 10867 - DNA, 1101 bp, Glycine max
  Gm_smallRNAprecursor_3700
gaacttcctttagatttttagtcaggacctcctttgatttcgatcctgctaaaaatgctgccagatgagacttttggttcaaaaacacagaagtttctggatcaggtgctttgaggaattctagatgggattggaaccagagttttacttgttctggatccgctttgaatgagtcaaattgtgtccaccattttacaaatgcgtgtctttgtagtgatggatattggtttgtcttttcagtcttgctgtaacgatattgccatgagaagatccatgacagtgcaaagcttgaaaagtatttaagatctgttggaattcgtgattcctgcgaattgtattgtctctcaaattgagcaaatccttgttggactgtttctgggaatatctctgaaattggtccaaagaagtcccacaattgcaaaaaccaattgggaaaattgtaaattgtattggtcttgaaatatatcagccatgaatgcttgaaacgagtattttggtgccaaaacaccttagtccaagcatcaacataatcccaataggtataacctgccggatcaaatggaactgaaaatctctttcctttgttcaagtccgaaccaaagtgtcttggttgaagaacttttagtatttggattgtcgagtgggtgtttaatgtttggtcttttgggtctttgaaatgtttaatagatactgagtttgaatctaccaaaatcaattcataaaaagttcttgtcttcaggatggtggttggtttgtagtgaaatcctggtgggaaagccttggccgtcgccttgaagggatttttgtcccaaaatttaggttccatctacaaaacagttgtaaatttatttttataaatataattgttagtttgtttggtaggtggtgtttgagctttggctaaaggtagtttccctttaggattggaagttgttttggtcattgatgcattttggatcattgtttgtaaatttgattcaagttcatcatcagattctgaggcaatgtctgcccaagattttttgattatttttggaaatttggttagacccatgtcttgaagggcctgaagggtttcaattggccatgcatagtcggccg

SEQ ID NO: 10868 - DNA, 1189 bp, Glycine max
  Gm_smallRNAprecursor_3701
acacagaagtttctggatcaggtgctttgaggaattctagatgggattggaaccagagttttacttgttctggatccgctttgaatgagtcaaattgtgtccaccattttacaaatgcgtgtctttgtagtgatggatattggtttgtcttttcagtcttgctgtaacgatattgccatgagaagatccatgacagtgcaaagcttgaaaagtatttaagatctgttggaattcgtgattcctgcgaattgtattgtctctcaaattgagcaaatccttgttggactgtttctgggaatatctctgaaattggtccaaagaagtcccacaattgcaaaaaccaattgggaaaattgtaaattgtattggtcttgaaatatatcagccatgaatgcttgaaacgagtattttggtgccaaaacaccttagtccaagcatcaacataatcccaataggtataacctgccggatcaaatggaactgaaaatctctttcctttgttcaagtccgaaccaaagtgtcttggttgaagaacttttagtatttggattgtcgagtgggtgtttaatgtttggtcttttgggtctttgaaatgtttaatagatactgagtttgaatctaccaaaatcaattcataaaaagttcttgtcttcaggatggtggttggtttgtagtgaaatcctggtgggaaagccttggccgtcgccttgaagggatttttgtcccaaaatttaggttccatctacaaaacagttgtaaatttatttttataaatataattgttagtttgtttggtaggtggtgtttgagctttggctaaaggtagtttccctttaggattggaagttgttttggtcattgatgcattttggatcattgtttgtaaatttgattcaagttcatcatcagattctgaggcaatgtctgcccaagattttttgattatttttggaaatttggttagacccatgtcttgaagggcctgaagggtttcaattggccatgcatagtcggccgatgtttgtttggcggttgccggtttgggagattcctgagtggatggctcaggtttgattgaggtaatcagggttgatgacccttctaaattggttttctgggtagatgacccagcctgggttggtgacccataagaggttgatgatttcttaatggttggttctggaagagc

SEQ ID NO: 10869 - DNA, 1168 bp, Glycine max
  Gm_smallRNAprecursor_3702
ggaggcattaccacttttctgtaagaattcacggataaggtagtcaggtaatgaatttgaggtgcccttgatgtattctatgtcaaaatcaaagacacttaaaattgcttgccatcttgcaaaaatttgttttgaggcaaggtttttaacatttttttgtaaaatatccttggctgatttacaatcaactctgattaaaaaattttggtttagtaaatccgattgaaatttggaaatgcacaaaacaattgctaaaactttctttttaacggttgaatattttaattgtgcgggattccaatgttttgatgtatatgcaatgacatgatcttggccatggactctttgtttgagaatgccaccataacctatgtctgaagcatcagtttcgataattttaaatgcctgtggaataagaagatacagacattttatggattggactttgactttgatttctttaactgtttgtgtatggaggtcagaccaaggaggcagatttttcttcagcctatcatgcaaaggcttgacaatattgtttaaataggggacaaattctcctacgtaatttagacaacctagaaatctttgtaactgggttttgtctaagatttggttgggaaatttgctagcaaactctattgacctttctattgaaatgattgtaccttgatatatattgtgaccaaggaattgaattcgagtttggaaaagattgatttttgatttggagactgccaaaccattctgtttgatgatatggatgaaggtctggagatgtttgaaatgttagtcaatgttttgggaaaagattaaaacatcatctatgtagacaatgacaaattttgaatagggattaaaaatatcattcataattttttgaaattctgaaggggcattcttcagtccgaatggcatcacattccattcatattgcccgaaaggtacagtaaacgttgttttgtacctatctgattcttggatttggatttgccaaaatccatatttcatatcaaattttgaaaatatctttgcagaatttaatctgttaagcaaatcttttttgtttggaataggatatctaatccattgtaatgcttgatttagtggtttgtagtttatgactaagcgaggtgttccacgctcaatctcagattgtttgttgaca

SEQ ID NO: 10870 - DNA, 1159 bp, Glycine max
  Gm_smallRNAprecursor_3703
acccatctttcgggaagagttacttcatcccattttatttttctcgggagagaaacattagcctttgtcatatcagtgataaacaaagttgtttctcctttttgaggttttaacaagactctagatgcacaagtattcatgaccttgtactggatcctataaattaaggctgctgggattgatccttctttcatgtcaaggccatgaaagtggatgtttaagaacagagagtcaagaatgtttttgtccatcaaactcactgttttgtttggataacaattaaaatatattggaccttgtcctaggctggtttcgactgttccaattagggagtcttcaaatttattatgcctaatatctcttagacacattaaaactgctgcatctatgcccatgtcaattaagggcttgatggctacttgtacacaaccgatgtgtagatatttatacttacggctatgttcataaattgaattttttgaaagtaaatgaaattcttcccctatatcttgtcctagaggaatattgttttctactgttttgattatgtaatcaaagttgtgtttgtccttaattgtttcaggaacgtatagttgatcctgagggatttttggaatgtttcagtcatccatgttttgattgatatcttcgaatcggacttcctcatcgaagagattgtgtttgggggcgacctcttgggtctggttatcttgatcatttagtaaattggagtttcttgaagaagatgatgaggaggaatttgatcgaaaagagatacgggaaaaagatcgcaatagtctagacatgattataacattctctaatatctttgccttcatttggttccatagaaatatttccataaggctatatgttacagaacttcttggatctgaacaaatgaaaaagatttttttttttacggtcaatatagtttgagcactactcctatagccaccagtatattatgtctcaatattttatttgaacaatcactactacaaaagtttcattttacgacgcaggatctacgacggttcatgaagacccgatttagaaggtggcgcagtgacatttctgtaattaggagcaaagtttttagtttttacatcgcgatttctaagacggtcgtatataaccgtcttagaatgcttaataa

SEQ ID NO: 10871 - DNA, 1121 bp, Glycine max
  Gm_smallRNAprecursor_3704
caattatgcctatattcacaacattttgtctttctatttttctcattattaaggattacgatgaaatcacaagttcaatttaaaaatttatagctaatacattatgatttgttttcactcaaaaacatgtgttaataaaatgtgttatttttaaaaaataatttagaattacatttagtggattatagaatttattttcaccaaaaaatatccattaatgacaaatattaattgaaaaaattaatatggggaataagattttattgtatttatttttacattcaataataaaatcaagttagatagttatttcttttaggcaaaattgtatttttggtctcccagtttatctctagttgcggatttagtctcccggtaatttaattcacaaattgagtcctcctattttgtaaaatcgtgtaatgttagtcccctatgccgacattgaccgttagtaagtgatgttgactgtcacgttcttattggatgatgattgtcacgtgtcatgttctgattggatgtcaactccatgaaagatgaaatgcattgttgttttcattgaccaatcacaacatgatatgtgacagtcatcatccaataagaacgtgacacgtggcagtcaacatcacttgctaacggtcaacatccaattgtggcctagggcaccaacattgcacgattttacaaaataagaggacccaattcgtgaattaaattatcggggaaccaaatccgaaactgaagataaactgggggaccaaaaatacaattttatctttcttttatatagacaaagatattatttatgggagacaatgttacttgagtcgtgtagaatcattatggaccacaaattttgtaacaacctaatttgtcaattttttagtaacttaatttttttacttcattaactcaatggtggaatttagagattttttttttgcaaattaaaataatgttttggaaattttttttattaataacaattaaaagatacaacttgatttcttctaatataactaaaaataaaataattatttttacgaaagtaatgcaattacatattacatattttggcatgataaggatttacattacgttataatgatactataacacga

SEQ ID NO: 10872 - DNA, 1136 bp, Glycine max
  Gm_smallRNAprecursor_3705
tctgctccttgcgttatttcaggagtaataactgatgataggggcatactttattcttcggataattaatgaaaaacagttttggtgattttttatgggttcggtgaaataatatatatatatatatataccagagggtcagcggagtaggatcaaacggacagataggaagtaagaatgcagtatgattaatgaaatgaaaatataaacttagaaaacagatatcaaggtcacaccggagaccggcttacaaaacctaggttttcataaacaaagaaaccgaagcggcggcagagccgcacaggatcggtgaagggagaagagagaaggatgaaaaatagaaatttattgaatctagaaagaagcgcttacaaaaatcttgtttcagagcacctctcttccgaaacctgaaaaatggctaaatgaaagggtgcctcacaacatacttgaggactccttatatagccaaaaatctaagaccggtagttgccggtagttttgaccgggactatttgactgtttgttacaagacaagtagttttgaccgggactttaatggctacaggacaggtagtattgtccatcattaattacacattaattacaaacagacggttttgtgaccgaaatttaatctaaacagataccaaaacaatcatcttcgttttggtaaaagggatcttcttcgtcttcttcaggagaacttgtttcttccttctttgaggatgaagcttcttcttcctgttgtaacatttgtagaacttccttcagatttttagctaagacctcctttgatgtagatcctgctaaaaatgccgccagatgagacttttggttcaagaacacagaagtctctggatcagccgctttgaggaattctggatgggattggaaccatagttttacttgttctggatccgctttagatgagtcaaattgtgtccaccattttacaaatgcgtgtctttgtagtgatggatattggtttgtcttttcagtcttgctgtaacgatattgccatgagaatatccatgacagtgcaaagcttgaaaagtatttaagatctgctggaattcgtgattcctgcgaattgtattgtttcttaaattgggaaaatccttgttggaccgtttttg

SEQ ID NO: 10873 - DNA, 1149 bp, Glycine max
  Gm_smallRNAprecursor_3706
tctgctccttgcgttatttcaggagtaataactgatgataggggcatactttattcttcggataattaatgaaaaacagttttggtgattttttatgggttcggtgaaataatatatatatatatatataccagagggtcagcggagtaggatcaaacggacagataggaagtaagaatgcagtatgattaatgaaatgaaaatataaacttagaaaacagatatcaaggtcacaccggagaccggcttacaaaacctaggttttcataaacaaagaaaccgaagcggcggcagagccgcacaggatcggtgaagggagaagagagaaggatgaaaaatagaaatttattgaatctagaaagaagcgcttacaaaaatcttgtttcagagcacctctcttccgaaacctgaaaaatggctaaatgaaagggtgcctcacaacatacttgaggactccttatatagccaaaaatctaagaccggtagttgccggtagttttgaccgggactatttgactgtttgttacaagacaagtagttttgaccgggactttaatggctacaggacaggtagtattgtccatcattaattacacattaattacaaacagacggttttgtgaccgaaatttaatctaaacagataccaaaacaatcatcttcgttttggtaaaagggatcttcttcgtcttcttcaggagaacttgtttcttccttctttgaggatgaagcttcttcttcctgttgtaacatttgtagaacttccttcagatttttagctaagacctcctttgatgtagatcctgctaaaaatgccgccagatgagacttttggttcaagaacacagaagtctctggatcagccgctttgaggaattctggatgggattggaaccatagttttacttgttctggatccgctttagatgagtcaaattgtgtccaccattttacaaatgcgtgtctttgtagtgatggatattggtttgtcttttcagtcttgctgtaacgatattgccatgagaatatccatgacagtgcaaagcttgaaaagtatttaagatctgctggaattcgtgattcctgcgaattgtattgtttcttaaattgggaaaatccttgttggaccgtttttgggaatatctctgg

SEQ ID NO: 10874 - DNA, 1209 bp, Glycine max
  Gm_smallRNAprecursor_3707
gggtcagcggagtaggatcaaacggacagataggaagtaagaatgcagtatgattaatgaaatgaaaatataaacttagaaaacagatatcaaggtcacaccggagaccggcttacaaaacctaggttttcataaacaaagaaaccgaagcggcggcagagccgcacaggatcggtgaagggagaagagagaaggatgaaaaatagaaatttattgaatctagaaagaagcgcttacaaaaatcttgtttcagagcacctctcttccgaaacctgaaaaatggctaaatgaaagggtgcctcacaacatacttgaggactccttatatagccaaaaatctaagaccggtagttgccggtagttttgaccgggactatttgactgtttgttacaagacaagtagttttgaccgggactttaatggctacaggacaggtagtattgtccatcattaattacacattaattacaaacagacggttttgtgaccgaaatttaatctaaacagataccaaaacaatcatcttcgttttggtaaaagggatcttcttcgtcttcttcaggagaacttgtttcttccttctttgaggatgaagcttcttcttcctgttgtaacatttgtagaacttccttcagatttttagctaagacctcctttgatgtagatcctgctaaaaatgccgccagatgagacttttggttcaagaacacagaagtctctggatcagccgctttgaggaattctggatgggattggaaccatagttttacttgttctggatccgctttagatgagtcaaattgtgtccaccattttacaaatgcgtgtctttgtagtgatggatattggtttgtcttttcagtcttgctgtaacgatattgccatgagaatatccatgacagtgcaaagcttgaaaagtatttaagatctgctggaattcgtgattcctgcgaattgtattgtttcttaaattgggaaaatccttgttggaccgtttttgggaatatctctgggattggtccaaagaagtcccaccattgcaaaaaccagttgggaaaattgtaaattgtgttggtcttgaaatatatcagccatgaatgcttgaagcgggtattttggtgccaaaacaccttagtccaagcatcaacgtaatcccaataggtataacctaccggatcaaatggaactgaaaatctctttcctttgtt

SEQ ID NO: 10875 - DNA, 1083 bp, Glycine max
  Gm_smallRNAprecursor_3708
tcagcggagtaggatcaaacggacagataggaagtaagaatgcagtatgattaatgaaatgaaaatataaacttagaaaacagatatcaaggtcacaccggagaccggcttacaaaacctaggttttcataaacaaagaaaccgaagcggcggcagagccgcacaggatcggtgaagggagaagagagaaggatgaaaaatagaaatttattgaatctagaaagaagcgcttacaaaaatcttgtttcagagcacctctcttccgaaacctgaaaaatggctaaatgaaagggtgcctcacaacatacttgaggactccttatatagccaaaaatctaagaccggtagttgccggtagttttgaccgggactatttgactgtttgttacaagacaagtagttttgaccgggactttaatggctacaggacaggtagtattgtccatcattaattacacattaattacaaacagacggttttgtgaccgaaatttaatctaaacagataccaaaacaatcatcttcgttttggtaaaagggatcttcttcgtcttcttcaggagaacttgtttcttccttctttgaggatgaagcttcttcttcctgttgtaacatttgtagaacttccttcagatttttagctaagacctcctttgatgtagatcctgctaaaaatgccgccagatgagacttttggttcaagaacacagaagtctctggatcagccgctttgaggaattctggatgggattggaaccatagttttacttgttctggatccgctttagatgagtcaaattgtgtccaccattttacaaatgcgtgtctttgtagtgatggatattggtttgtcttttcagtcttgctgtaacgatattgccatgagaatatccatgacagtgcaaagcttgaaaagtatttaagatctgctggaattcgtgattcctgcgaattgtattgtttcttaaattgggaaaatccttgttggaccgtttttgggaatatctctgggattggtccaaagaagtcccaccattgcaaaaaccagttgggaaaattgtaaattgtgttggtcttgaaata

SEQ ID NO: 10876 - DNA, 1082 bp, Glycine max
  Gm_smallRNAprecursor_3709
cagcggagtaggatcaaacggacagataggaagtaagaatgcagtatgattaatgaaatgaaaatataaacttagaaaacagatatcaaggtcacaccggagaccggcttacaaaacctaggttttcataaacaaagaaaccgaagcggcggcagagccgcacaggatcggtgaagggagaagagagaaggatgaaaaatagaaatttattgaatctagaaagaagcgcttacaaaaatcttgtttcagagcacctctcttccgaaacctgaaaaatggctaaatgaaagggtgcctcacaacatacttgaggactccttatatagccaaaaatctaagaccggtagttgccggtagttttgaccgggactatttgactgtttgttacaagacaagtagttttgaccgggactttaatggctacaggacaggtagtattgtccatcattaattacacattaattacaaacagacggttttgtgaccgaaatttaatctaaacagataccaaaacaatcatcttcgttttggtaaaagggatcttcttcgtcttcttcaggagaacttgtttcttccttctttgaggatgaagcttcttcttcctgttgtaacatttgtagaacttccttcagatttttagctaagacctcctttgatgtagatcctgctaaaaatgccgccagatgagacttttggttcaagaacacagaagtctctggatcagccgctttgaggaattctggatgggattggaaccatagttttacttgttctggatccgctttagatgagtcaaattgtgtccaccattttacaaatgcgtgtctttgtagtgatggatattggtttgtcttttcagtcttgctgtaacgatattgccatgagaatatccatgacagtgcaaagcttgaaaagtatttaagatctgctggaattcgtgattcctgcgaattgtattgtttcttaaattgggaaaatccttgttggaccgtttttgggaatatctctgggattggtccaaagaagtcccaccattgcaaaaaccagttgggaaaattgtaaattgtgttggtcttgaaata

SEQ ID NO: 10877 - DNA, 1081 bp, Glycine max
  Gm_smallRNAprecursor_3710
agcggagtaggatcaaacggacagataggaagtaagaatgcagtatgattaatgaaatgaaaatataaacttagaaaacagatatcaaggtcacaccggagaccggcttacaaaacctaggttttcataaacaaagaaaccgaagcggcggcagagccgcacaggatcggtgaagggagaagagagaaggatgaaaaatagaaatttattgaatctagaaagaagcgcttacaaaaatcttgtttcagagcacctctcttccgaaacctgaaaaatggctaaatgaaagggtgcctcacaacatacttgaggactccttatatagccaaaaatctaagaccggtagttgccggtagttttgaccgggactatttgactgtttgttacaagacaagtagttttgaccgggactttaatggctacaggacaggtagtattgtccatcattaattacacattaattacaaacagacggttttgtgaccgaaatttaatctaaacagataccaaaacaatcatcttcgttttggtaaaagggatcttcttcgtcttcttcaggagaacttgtttcttccttctttgaggatgaagcttcttcttcctgttgtaacatttgtagaacttccttcagatttttagctaagacctcctttgatgtagatcctgctaaaaatgccgccagatgagacttttggttcaagaacacagaagtctctggatcagccgctttgaggaattctggatgggattggaaccatagttttacttgttctggatccgctttagatgagtcaaattgtgtccaccattttacaaatgcgtgtctttgtagtgatggatattggtttgtcttttcagtcttgctgtaacgatattgccatgagaatatccatgacagtgcaaagcttgaaaagtatttaagatctgctggaattcgtgattcctgcgaattgtattgtttcttaaattgggaaaatccttgttggaccgtttttgggaatatctctgggattggtccaaagaagtcccaccattgcaaaaaccagttgggaaaattgtaaattgtgttggtcttgaaata

SEQ ID NO: 10878 - DNA, 1131 bp, Glycine max
  Gm_smallRNAprecursor_3711
acaagacaagtagttttgaccgggactttaatggctacaggacaggtagtattgtccatcattaattacacattaattacaaacagacggttttgtgaccgaaatttaatctaaacagataccaaaacaatcatcttcgttttggtaaaagggatcttcttcgtcttcttcaggagaacttgtttcttccttctttgaggatgaagcttcttcttcctgttgtaacatttgtagaacttccttcagatttttagctaagacctcctttgatgtagatcctgctaaaaatgccgccagatgagacttttggttcaagaacacagaagtctctggatcagccgctttgaggaattctggatgggattggaaccatagttttacttgttctggatccgctttagatgagtcaaattgtgtccaccattttacaaatgcgtgtctttgtagtgatggatattggtttgtcttttcagtcttgctgtaacgatattgccatgagaatatccatgacagtgcaaagcttgaaaagtatttaagatctgctggaattcgtgattcctgcgaattgtattgtttcttaaattgggaaaatccttgttggaccgtttttgggaatatctctgggattggtccaaagaagtcccaccattgcaaaaaccagttgggaaaattgtaaattgtgttggtcttgaaatatatcagccatgaatgcttgaagcgggtattttggtgccaaaacaccttagtccaagcatcaacgtaatcccaataggtataacctaccggatcaaatggaactgaaaatctctttcctttgttcaagtccgaaccaaagtgtcttggttgaagaacttttagtatttggatggttgagtgggtgtttaaagtttggtcttttggatctttgaaatgtttgatagatactgagtttgaatctaccaaaatcaattcataaaaagttcttgtcttcaggatggtggttggtttgtagtgaaatcctggtgggaaagccttggccgtcgccttgaagggatttttgtcccaaaattcaggttccatctgcaaaacagttaacaatttatttttataaatataattgttagtttgtttggtaggtggtgtttgagtttt

SEQ ID NO: 10879 - DNA, 1146 bp, Glycine max
  Gm_smallRNAprecursor_3712
taatggctacaggacaggtagtattgtccatcattaattacacattaattacaaacagacggttttgtgaccgaaatttaatctaaacagataccaaaacaatcatcttcgttttggtaaaagggatcttcttcgtcttcttcaggagaacttgtttcttccttctttgaggatgaagcttcttcttcctgttgtaacatttgtagaacttccttcagatttttagctaagacctcctttgatgtagatcctgctaaaaatgccgccagatgagacttttggttcaagaacacagaagtctctggatcagccgctttgaggaattctggatgggattggaaccatagttttacttgttctggatccgctttagatgagtcaaattgtgtccaccattttacaaatgcgtgtctttgtagtgatggatattggtttgtcttttcagtcttgctgtaacgatattgccatgagaatatccatgacagtgcaaagcttgaaaagtatttaagatctgctggaattcgtgattcctgcgaattgtattgtttcttaaattgggaaaatccttgttggaccgtttttgggaatatctctgggattggtccaaagaagtcccaccattgcaaaaaccagttgggaaaattgtaaattgtgttggtcttgaaatatatcagccatgaatgcttgaagcgggtattttggtgccaaaacaccttagtccaagcatcaacgtaatcccaataggtataacctaccggatcaaatggaactgaaaatctctttcctttgttcaagtccgaaccaaagtgtcttggttgaagaacttttagtatttggatggttgagtgggtgtttaaagtttggtcttttggatctttgaaatgtttgatagatactgagtttgaatctaccaaaatcaattcataaaaagttcttgtcttcaggatggtggttggtttgtagtgaaatcctggtgggaaagccttggccgtcgccttgaagggatttttgtcccaaaattcaggttccatctgcaaaacagttaacaatttatttttataaatataattgttagtttgtttggtaggtggtgtttgagttttggctaaaggtagttttcctttagtattggtggctgttttggtc

SEQ ID NO: 10880 - DNA, 1080 bp, Glycine max
  Gm_smallRNAprecursor_3713
ttcaggagaacttgtttcttccttctttgaggatgaagcttcttcttcctgttgtaacatttgtagaacttccttcagatttttagctaagacctcctttgatgtagatcctgctaaaaatgccgccagatgagacttttggttcaagaacacagaagtctctggatcagccgctttgaggaattctggatgggattggaaccatagttttacttgttctggatccgctttagatgagtcaaattgtgtccaccattttacaaatgcgtgtctttgtagtgatggatattggtttgtcttttcagtcttgctgtaacgatattgccatgagaatatccatgacagtgcaaagcttgaaaagtatttaagatctgctggaattcgtgattcctgcgaattgtattgtttcttaaattgggaaaatccttgttggaccgtttttgggaatatctctgggattggtccaaagaagtcccaccattgcaaaaaccagttgggaaaattgtaaattgtgttggtcttgaaatatatcagccatgaatgcttgaagcgggtattttggtgccaaaacaccttagtccaagcatcaacgtaatcccaataggtataacctaccggatcaaatggaactgaaaatctctttcctttgttcaagtccgaaccaaagtgtcttggttgaagaacttttagtatttggatggttgagtgggtgtttaaagtttggtcttttggatctttgaaatgtttgatagatactgagtttgaatctaccaaaatcaattcataaaaagttcttgtcttcaggatggtggttggtttgtagtgaaatcctggtgggaaagccttggccgtcgccttgaagggatttttgtcccaaaattcaggttccatctgcaaaacagttaacaatttatttttataaatataattgttagtttgtttggtaggtggtgtttgagttttggctaaaggtagttttcctttagtattggtggctgttttggtcattgacgcattttggatcattatttgtaaatttgattcagattcatcatcagattctgaggcaatgtctgccca

SEQ ID NO: 10881 - DNA, 1104 bp, Glycine max
  Gm_smallRNAprecursor_3714
ttcaggagaacttgtttcttccttctttgaggatgaagcttcttcttcctgttgtaacatttgtagaacttccttcagatttttagctaagacctcctttgatgtagatcctgctaaaaatgccgccagatgagacttttggttcaagaacacagaagtctctggatcagccgctttgaggaattctggatgggattggaaccatagttttacttgttctggatccgctttagatgagtcaaattgtgtccaccattttacaaatgcgtgtctttgtagtgatggatattggtttgtcttttcagtcttgctgtaacgatattgccatgagaatatccatgacagtgcaaagcttgaaaagtatttaagatctgctggaattcgtgattcctgcgaattgtattgtttcttaaattgggaaaatccttgttggaccgtttttgggaatatctctgggattggtccaaagaagtcccaccattgcaaaaaccagttgggaaaattgtaaattgtgttggtcttgaaatatatcagccatgaatgcttgaagcgggtattttggtgccaaaacaccttagtccaagcatcaacgtaatcccaataggtataacctaccggatcaaatggaactgaaaatctctttcctttgttcaagtccgaaccaaagtgtcttggttgaagaacttttagtatttggatggttgagtgggtgtttaaagtttggtcttttggatctttgaaatgtttgatagatactgagtttgaatctaccaaaatcaattcataaaaagttcttgtcttcaggatggtggttggtttgtagtgaaatcctggtgggaaagccttggccgtcgccttgaagggatttttgtcccaaaattcaggttccatctgcaaaacagttaacaatttatttttataaatataattgttagtttgtttggtaggtggtgtttgagttttggctaaaggtagttttcctttagtattggtggctgttttggtcattgacgcattttggatcattatttgtaaatttgattcagattcatcatcagattctgaggcaatgtctgcccaagattttttgattatttttggaaa

SEQ ID NO: 10882 - DNA, 1107 bp, Glycine max
  Gm_smallRNAprecursor_3715
gtagaacttccttcagatttttagctaagacctcctttgatgtagatcctgctaaaaatgccgccagatgagacttttggttcaagaacacagaagtctctggatcagccgctttgaggaattctggatgggattggaaccatagttttacttgttctggatccgctttagatgagtcaaattgtgtccaccattttacaaatgcgtgtctttgtagtgatggatattggtttgtcttttcagtcttgctgtaacgatattgccatgagaatatccatgacagtgcaaagcttgaaaagtatttaagatctgctggaattcgtgattcctgcgaattgtattgtttcttaaattgggaaaatccttgttggaccgtttttgggaatatctctgggattggtccaaagaagtcccaccattgcaaaaaccagttgggaaaattgtaaattgtgttggtcttgaaatatatcagccatgaatgcttgaagcgggtattttggtgccaaaacaccttagtccaagcatcaacgtaatcccaataggtataacctaccggatcaaatggaactgaaaatctctttcctttgttcaagtccgaaccaaagtgtcttggttgaagaacttttagtatttggatggttgagtgggtgtttaaagtttggtcttttggatctttgaaatgtttgatagatactgagtttgaatctaccaaaatcaattcataaaaagttcttgtcttcaggatggtggttggtttgtagtgaaatcctggtgggaaagccttggccgtcgccttgaagggatttttgtcccaaaattcaggttccatctgcaaaacagttaacaatttatttttataaatataattgttagtttgtttggtaggtggtgtttgagttttggctaaaggtagttttcctttagtattggtggctgttttggtcattgacgcattttggatcattatttgtaaatttgattcagattcatcatcagattctgaggcaatgtctgcccaagattttttgattatttttggaaatttggtcagacccatgtcttgaagggcctgaagggtttcaattggccatgcatagtcggccgatg

SEQ ID NO: 10883 - DNA, 1107 bp, Glycine max; identical to SEQ ID NO: 10882
  Gm_smallRNAprecursor_3716

SEQ ID NO: 10884 - DNA, 1108 bp, Glycine max
  Gm_smallRNAprecursor_3717
gtagaacttccttcagatttttagctaagacctcctttgatgtagatcctgctaaaaatgccgccagatgagacttttggttcaagaacacagaagtctctggatcagccgctttgaggaattctggatgggattggaaccatagttttacttgttctggatccgctttagatgagtcaaattgtgtccaccattttacaaatgcgtgtctttgtagtgatggatattggtttgtcttttcagtcttgctgtaacgatattgccatgagaatatccatgacagtgcaaagcttgaaaagtatttaagatctgctggaattcgtgattcctgcgaattgtattgtttcttaaattgggaaaatccttgttggaccgtttttgggaatatctctgggattggtccaaagaagtcccaccattgcaaaaaccagttgggaaaattgtaaattgtgttggtcttgaaatatatcagccatgaatgcttgaagcgggtattttggtgccaaaacaccttagtccaagcatcaacgtaatcccaataggtataacctaccggatcaaatggaactgaaaatctctttcctttgttcaagtccgaaccaaagtgtcttggttgaagaacttttagtatttggatggttgagtgggtgtttaaagtttggtcttttggatctttgaaatgtttgatagatactgagtttgaatctaccaaaatcaattcataaaaagttcttgtcttcaggatggtggttggtttgtagtgaaatcctggtgggaaagccttggccgtcgccttgaagggatttttgtcccaaaattcaggttccatctgcaaaacagttaacaatttatttttataaatataattgttagtttgtttggtaggtggtgtttgagttttggctaaaggtagttttcctttagtattggtggctgttttggtcattgacgcattttggatcattatttgtaaatttgattcagattcatcatcagattctgaggcaatgtctgcccaagattttttgattatttttggaaatttggtcagacccatgtcttgaagggcctgaagggtttcaattggccatgcatagtcggccgatgt

SEQ ID NO: 10885 - DNA, 1101 bp, Glycine max
  Gm_smallRNAprecursor_3718
gaacttccttcagatttttagctaagacctcctttgatgtagatcctgctaaaaatgccgccagatgagacttttggttcaagaacacagaagtctctggatcagccgctttgaggaattctggatgggattggaaccatagttttacttgttctggatccgctttagatgagtcaaattgtgtccaccattttacaaatgcgtgtctttgtagtgatggatattggtttgtcttttcagtcttgctgtaacgatattgccatgagaatatccatgacagtgcaaagcttgaaaagtatttaagatctgctggaattcgtgattcctgcgaattgtattgtttcttaaattgggaaaatccttgttggaccgtttttgggaatatctctgggattggtccaaagaagtcccaccattgcaaaaaccagttgggaaaattgtaaattgtgttggtcttgaaatatatcagccatgaatgcttgaagcgggtattttggtgccaaaacaccttagtccaagcatcaacgtaatcccaataggtataacctaccggatcaaatggaactgaaaatctctttcctttgttcaagtccgaaccaaagtgtcttggttgaagaacttttagtatttggatggttgagtgggtgtttaaagtttggtcttttggatctttgaaatgtttgatagatactgagtttgaatctaccaaaatcaattcataaaaagttcttgtcttcaggatggtggttggtttgtagtgaaatcctggtgggaaagccttggccgtcgccttgaagggatttttgtcccaaaattcaggttccatctgcaaaacagttaacaatttatttttataaatataattgttagtttgtttggtaggtggtgtttgagttttggctaaaggtagttttcctttagtattggtggctgttttggtcattgacgcattttggatcattatttgtaaatttgattcagattcatcatcagattctgaggcaatgtctgcccaagattttttgattatttttggaaatttggtcagacccatgtcttgaagggcctgaagggtttcaattggccatgcatagtcggccg

SEQ ID NO: 10886 - DNA, 1140 bp, Glycine max
  Gm_smallRNAprecursor_3719
tttttagctaagacctcctttgatgtagatcctgctaaaaatgccgccagatgagacttttggttcaagaacacagaagtctctggatcagccgctttgaggaattctggatgggattggaaccatagttttacttgttctggatccgctttagatgagtcaaattgtgtccaccattttacaaatgcgtgtctttgtagtgatggatattggtttgtcttttcagtcttgctgtaacgatattgccatgagaatatccatgacagtgcaaagcttgaaaagtatttaagatctgctggaattcgtgattcctgcgaattgtattgtttcttaaattgggaaaatccttgttggaccgtttttgggaatatctctgggattggtccaaagaagtcccaccattgcaaaaaccagttgggaaaattgtaaattgtgttggtcttgaaatatatcagccatgaatgcttgaagcgggtattttggtgccaaaacaccttagtccaagcatcaacgtaatcccaataggtataacctaccggatcaaatggaactgaaaatctctttcctttgttcaagtccgaaccaaagtgtcttggttgaagaacttttagtatttggatggttgagtgggtgtttaaagtttggtcttttggatctttgaaatgtttgatagatactgagtttgaatctaccaaaatcaattcataaaaagttcttgtcttcaggatggtggttggtttgtagtgaaatcctggtgggaaagccttggccgtcgccttgaagggatttttgtcccaaaattcaggttccatctgcaaaacagttaacaatttatttttataaatataattgttagtttgtttggtaggtggtgtttgagttttggctaaaggtagttttcctttagtattggtggctgttttggtcattgacgcattttggatcattatttgtaaatttgattcagattcatcatcagattctgaggcaatgtctgcccaagattttttgattatttttggaaatttggtcagacccatgtcttgaagggcctgaagggtttcaattggccatgcatagtcggccgatgtttgtttggcggttgccggtttgggagattcctgagtggatgactcaggt

SEQ ID NO: 10887 - DNA, 1090 bp, Glycine max
  Gm_smallRNAprecursor_3720
gtagatcctgctaaaaatgccgccagatgagacttttggttcaagaacacagaagtctctggatcagccgctttgaggaattctggatgggattggaaccatagttttacttgttctggatccgctttagatgagtcaaattgtgtccaccattttacaaatgcgtgtctttgtagtgatggatattggtttgtcttttcagtcttgctgtaacgatattgccatgagaatatccatgacagtgcaaagcttgaaaagtatttaagatctgctggaattcgtgattcctgcgaattgtattgtttcttaaattgggaaaatccttgttggaccgtttttgggaatatctctgggattggtccaaagaagtcccaccattgcaaaaaccagttgggaaaattgtaaattgtgttggtcttgaaatatatcagccatgaatgcttgaagcgggtattttggtgccaaaacaccttagtccaagcatcaacgtaatcccaataggtataacctaccggatcaaatggaactgaaaatctctttcctttgttcaagtccgaaccaaagtgtcttggttgaagaacttttagtatttggatggttgagtgggtgtttaaagtttggtcttttggatctttgaaatgtttgatagatactgagtttgaatctaccaaaatcaattcataaaaagttcttgtcttcaggatggtggttggtttgtagtgaaatcctggtgggaaagccttggccgtcgccttgaagggatttttgtcccaaaattcaggttccatctgcaaaacagttaacaatttatttttataaatataattgttagtttgtttggtaggtggtgtttgagttttggctaaaggtagttttcctttagtattggtggctgttttggtcattgacgcattttggatcattatttgtaaatttgattcagattcatcatcagattctgaggcaatgtctgcccaagattttttgattatttttggaaatttggtcagacccatgtcttgaagggcctgaagggtttcaattggccatgcatagtcggccgatgtttgtttggcggttgccggtttgg

SEQ ID NO: 10888 - DNA, 1087 bp, Glycine max
  Gm_smallRNAprecursor_3721
gatcctgctaaaaatgccgccagatgagacttttggttcaagaacacagaagtctctggatcagccgctttgaggaattctggatgggattggaaccatagttttacttgttctggatccgctttagatgagtcaaattgtgtccaccattttacaaatgcgtgtctttgtagtgatggatattggtttgtcttttcagtcttgctgtaacgatattgccatgagaatatccatgacagtgcaaagcttgaaaagtatttaagatctgctggaattcgtgattcctgcgaattgtattgtttcttaaattgggaaaatccttgttggaccgtttttgggaatatctctgggattggtccaaagaagtcccaccattgcaaaaaccagttgggaaaattgtaaattgtgttggtcttgaaatatatcagccatgaatgcttgaagcgggtattttggtgccaaaacaccttagtccaagcatcaacgtaatcccaataggtataacctaccggatcaaatggaactgaaaatctctttcctttgttcaagtccgaaccaaagtgtcttggttgaagaacttttagtatttggatggttgagtgggtgtttaaagtttggtcttttggatctttgaaatgtttgatagatactgagtttgaatctaccaaaatcaattcataaaaagttcttgtcttcaggatggtggttggtttgtagtgaaatcctggtgggaaagccttggccgtcgccttgaagggatttttgtcccaaaattcaggttccatctgcaaaacagttaacaatttatttttataaatataattgttagtttgtttggtaggtggtgtttgagttttggctaaaggtagttttcctttagtattggtggctgttttggtcattgacgcattttggatcattatttgtaaatttgattcagattcatcatcagattctgaggcaatgtctgcccaagattttttgattatttttggaaatttggtcagacccatgtcttgaagggcctgaagggtttcaattggccatgcatagtcggccgatgtttgtttggcggttgccggtttgg

SEQ ID NO: 10889 - DNA, 1189 bp, Glycine max
  Gm_smallRNAprecursor_3722
acacagaagtctctggatcagccgctttgaggaattctggatgggattggaaccatagttttacttgttctggatccgctttagatgagtcaaattgtgtccaccattttacaaatgcgtgtctttgtagtgatggatattggtttgtcttttcagtcttgctgtaacgatattgccatgagaatatccatgacagtgcaaagcttgaaaagtatttaagatctgctggaattcgtgattcctgcgaattgtattgtttcttaaattgggaaaatccttgttggaccgtttttgggaatatctctgggattggtccaaagaagtcccaccattgcaaaaaccagttgggaaaattgtaaattgtgttggtcttgaaatatatcagccatgaatgcttgaagcgggtattttggtgccaaaacaccttagtccaagcatcaacgtaatcccaataggtataacctaccggatcaaatggaactgaaaatctctttcctttgttcaagtccgaaccaaagtgtcttggttgaagaacttttagtatttggatggttgagtgggtgtttaaagtttggtcttttggatctttgaaatgtttgatagatactgagtttgaatctaccaaaatcaattcataaaaagttcttgtcttcaggatggtggttggtttgtagtgaaatcctggtgggaaagccttggccgtcgccttgaagggatttttgtcccaaaattcaggttccatctgcaaaacagttaacaatttatttttataaatataattgttagtttgtttggtaggtggtgtttgagttttggctaaaggtagttttcctttagtattggtggctgttttggtcattgacgcattttggatcattatttgtaaatttgattcagattcatcatcagattctgaggcaatgtctgcccaagattttttgattatttttggaaatttggtcagacccatgtcttgaagggcctgaagggtttcaattggccatgcatagtcggccgatgtttgtttggcggttgccggtttgggagattcctgagtggatgactcaggtttgattgaggcaatctgggttgatgacccttctgaattggttttctgggtagatgacccagcctgggttggtgacccagaagaggtagatgatttcttgatggttggctctggaagagc

SEQ ID NO: 10890 - DNA, 1224 bp, Glycine max
  Gm_smallRNAprecursor_3723
cgctttgaggaattctggatgggattggaaccatagttttacttgttctggatccgctttagatgagtcaaattgtgtccaccattttacaaatgcgtgtctttgtagtgatggatattggtttgtcttttcagtcttgctgtaacgatattgccatgagaatatccatgacagtgcaaagcttgaaaagtatttaagatctgctggaattcgtgattcctgcgaattgtattgtttcttaaattgggaaaatccttgttggaccgtttttgggaatatctctgggattggtccaaagaagtcccaccattgcaaaaaccagttgggaaaattgtaaattgtgttggtcttgaaatatatcagccatgaatgcttgaagcgggtattttggtgccaaaacaccttagtccaagcatcaacgtaatcccaataggtataacctaccggatcaaatggaactgaaaatctctttcctttgttcaagtccgaaccaaagtgtcttggttgaagaacttttagtatttggatggttgagtgggtgtttaaagtttggtcttttggatctttgaaatgtttgatagatactgagtttgaatctaccaaaatcaattcataaaaagttcttgtcttcaggatggtggttggtttgtagtgaaatcctggtgggaaagccttggccgtcgccttgaagggatttttgtcccaaaattcaggttccatctgcaaaacagttaacaatttatttttataaatataattgttagtttgtttggtaggtggtgtttgagttttggctaaaggtagttttcctttagtattggtggctgttttggtcattgacgcattttggatcattatttgtaaatttgattcagattcatcatcagattctgaggcaatgtctgcccaagattttttgattatttttggaaatttggtcagacccatgtcttgaagggcctgaagggtttcaattggccatgcatagtcggccgatgtttgtttggcggttgccggtttgggagattcctgagtggatgactcaggtttgattgaggcaatctgggttgatgacccttctgaattggttttctgggtagatgacccagcctgggttggtgacccagaagaggtagatgatttcttgatggttggctctggaagagccagcctggctcctttgcctgtactccttcctccccgtagggagattcccgatgcctt

SEQ ID NO: 10891 - DNA, 1222 bp, Glycine max
  Gm_smallRNAprecursor_3724
ctttgaggaattctggatgggattggaaccatagttttacttgttctggatccgctttagatgagtcaaattgtgtccaccattttacaaatgcgtgtctttgtagtgatggatattggtttgtcttttcagtcttgctgtaacgatattgccatgagaatatccatgacagtgcaaagcttgaaaagtatttaagatctgctggaattcgtgattcctgcgaattgtattgtttcttaaattgggaaaatccttgttggaccgtttttgggaatatctctgggattggtccaaagaagtcccaccattgcaaaaaccagttgggaaaattgtaaattgtgttggtcttgaaatatatcagccatgaatgcttgaagcgggtattttggtgccaaaacaccttagtccaagcatcaacgtaatcccaataggtataacctaccggatcaaatggaactgaaaatctctttcctttgttcaagtccgaaccaaagtgtcttggttgaagaacttttagtatttggatggttgagtgggtgtttaaagtttggtcttttggatctttgaaatgtttgatagatactgagtttgaatctaccaaaatcaattcataaaaagttcttgtcttcaggatggtggttggtttgtagtgaaatcctggtgggaaagccttggccgtcgccttgaagggatttttgtcccaaaattcaggttccatctgcaaaacagttaacaatttatttttataaatataattgttagtttgtttggtaggtggtgtttgagttttggctaaaggtagttttcctttagtattggtggctgttttggtcattgacgcattttggatcattatttgtaaatttgattcagattcatcatcagattctgaggcaatgtctgcccaagattttttgattatttttggaaatttggtcagacccatgtcttgaagggcctgaagggtttcaattggccatgcatagtcggccgatgtttgtttggcggttgccggtttgggagattcctgagtggatgactcaggtttgattgaggcaatctgggttgatgacccttctgaattggttttctgggtagatgacccagcctgggttggtgacccagaagaggtagatgatttcttgatggttggctctggaagagccagcctggctcctttgcctgtactccttcctccccgtagggagattcccgatgcctt

SEQ ID NO: 10892 - DNA, 1159 bp, Glycine max
  Gm_smallRNAprecursor_3725
ctggatccgctttagatgagtcaaattgtgtccaccattttacaaatgcgtgtctttgtagtgatggatattggtttgtcttttcagtcttgctgtaacgatattgccatgagaatatccatgacagtgcaaagcttgaaaagtatttaagatctgctggaattcgtgattcctgcgaattgtattgtttcttaaattgggaaaatccttgttggaccgtttttgggaatatctctgggattggtccaaagaagtcccaccattgcaaaaaccagttgggaaaattgtaaattgtgttggtcttgaaatatatcagccatgaatgcttgaagcgggtattttggtgccaaaacaccttagtccaagcatcaacgtaatcccaataggtataacctaccggatcaaatggaactgaaaatctctttcctttgttcaagtccgaaccaaagtgtcttggttgaagaacttttagtatttggatggttgagtgggtgtttaaagtttggtcttttggatctttgaaatgtttgatagatactgagtttgaatctaccaaaatcaattcataaaaagttcttgtcttcaggatggtggttggtttgtagtgaaatcctggtgggaaagccttggccgtcgccttgaagggatttttgtcccaaaattcaggttccatctgcaaaacagttaacaatttatttttataaatataattgttagtttgtttggtaggtggtgtttgagttttggctaaaggtagttttcctttagtattggtggctgttttggtcattgacgcattttggatcattatttgtaaatttgattcagattcatcatcagattctgaggcaatgtctgcccaagattttttgattatttttggaaatttggtcagacccatgtcttgaagggcctgaagggtttcaattggccatgcatagtcggccgatgtttgtttggcggttgccggtttgggagattcctgagtggatgactcaggtttgattgaggcaatctgggttgatgacccttctgaattggttttctgggtagatgacccagcctgggttggtgacccagaagaggtagatgatttcttgatggttggctctggaagagccagcctggctcctttgcctgtactccttcctccccgtag

SEQ ID NO: 10893 - DNA, 1098 bp, Glycine max
  Gm_smallRNAprecursor_3726
gtgtctttgtagtgatggatattggtttgtcttttcagtcttgctgtaacgatattgccatgagaatatccatgacagtgcaaagcttgaaaagtatttaagatctgctggaattcgtgattcctgcgaattgtattgtttcttaaattgggaaaatccttgttggaccgtttttgggaatatctctgggattggtccaaagaagtcccaccattgcaaaaaccagttgggaaaattgtaaattgtgttggtcttgaaatatatcagccatgaatgcttgaagcgggtattttggtgccaaaacaccttagtccaagcatcaacgtaatcccaataggtataacctaccggatcaaatggaactgaaaatctctttcctttgttcaagtccgaaccaaagtgtcttggttgaagaacttttagtatttggatggttgagtgggtgtttaaagtttggtcttttggatctttgaaatgtttgatagatactgagtttgaatctaccaaaatcaattcataaaaagttcttgtcttcaggatggtggttggtttgtagtgaaatcctggtgggaaagccttggccgtcgccttgaagggatttttgtcccaaaattcaggttccatctgcaaaacagttaacaatttatttttataaatataattgttagtttgtttggtaggtggtgtttgagttttggctaaaggtagttttcctttagtattggtggctgttttggtcattgacgcattttggatcattatttgtaaatttgattcagattcatcatcagattctgaggcaatgtctgcccaagattttttgattatttttggaaatttggtcagacccatgtcttgaagggcctgaagggtttcaattggccatgcatagtcggccgatgtttgtttggcggttgccggtttgggagattcctgagtggatgactcaggtttgattgaggcaatctgggttgatgacccttctgaattggttttctgggtagatgacccagcctgggttggtgacccagaagaggtagatgatttcttgatggttggctctggaagagccagcctggctcctttgcctgtactcct

SEQ ID NO: 10894 - DNA, 1098 bp, Glycine max
  Gm_smallRNAprecursor_3727
ttggtttgtcttttcagtcttgctgtaacgatattgccatgagaatatccatgacagtgcaaagcttgaaaagtatttaagatctgctggaattcgtgattcctgcgaattgtattgtttcttaaattgggaaaatccttgttggaccgtttttgggaatatctctgggattggtccaaagaagtcccaccattgcaaaaaccagttgggaaaattgtaaattgtgttggtcttgaaatatatcagccatgaatgcttgaagcgggtattttggtgccaaaacaccttagtccaagcatcaacgtaatcccaataggtataacctaccggatcaaatggaactgaaaatctctttcctttgttcaagtccgaaccaaagtgtcttggttgaagaacttttagtatttggatggttgagtgggtgtttaaagtttggtcttttggatctttgaaatgtttgatagatactgagtttgaatctaccaaaatcaattcataaaaagttcttgtcttcaggatggtggttggtttgtagtgaaatcctggtgggaaagccttggccgtcgccttgaagggatttttgtcccaaaattcaggttccatctgcaaaacagttaacaatttatttttataaatataattgttagtttgtttggtaggtggtgtttgagttttggctaaaggtagttttcctttagtattggtggctgttttggtcattgacgcattttggatcattatttgtaaatttgattcagattcatcatcagattctgaggcaatgtctgcccaagattttttgattatttttggaaatttggtcagacccatgtcttgaagggcctgaagggtttcaattggccatgcatagtcggccgatgtttgtttggcggttgccggtttgggagattcctgagtggatgactcaggtttgattgaggcaatctgggttgatgacccttctgaattggttttctgggtagatgacccagcctgggttggtgacccagaagaggtagatgatttcttgatggttggctctggaagagccagcctggctcctttgcctgtactccttcctccccgtagggagattcc

SEQ ID NO: 10895 - DNA, 1090 bp, Glycine max
  Gm_smallRNAprecursor_3728
gcgaattgtattgtttcttaaattgggaaaatccttgttggaccgtttttgggaatatctctgggattggtccaaagaagtcccaccattgcaaaaaccagttgggaaaattgtaaattgtgttggtcttgaaatatatcagccatgaatgcttgaagcgggtattttggtgccaaaacaccttagtccaagcatcaacgtaatcccaataggtataacctaccggatcaaatggaactgaaaatctctttcctttgttcaagtccgaaccaaagtgtcttggttgaagaacttttagtatttggatggttgagtgggtgtttaaagtttggtcttttggatctttgaaatgtttgatagatactgagtttgaatctaccaaaatcaattcataaaaagttcttgtcttcaggatggtggttggtttgtagtgaaatcctggtgggaaagccttggccgtcgccttgaagggatttttgtcccaaaattcaggttccatctgcaaaacagttaacaatttatttttataaatataattgttagtttgtttggtaggtggtgtttgagttttggctaaaggtagttttcctttagtattggtggctgttttggtcattgacgcattttggatcattatttgtaaatttgattcagattcatcatcagattctgaggcaatgtctgcccaagattttttgattatttttggaaatttggtcagacccatgtcttgaagggcctgaagggtttcaattggccatgcatagtcggccgatgtttgtttggcggttgccggtttgggagattcctgagtggatgactcaggtttgattgaggcaatctgggttgatgacccttctgaattggttttctgggtagatgacccagcctgggttggtgacccagaagaggtagatgatttcttgatggttggctctggaagagccagcctggctcctttgcctgtactccttcctccccgtagggagattcccgatgccttaggaggcattaccacttttctgtaagaattcacgggtaaggtagtcaggtagtgaatttgaggtgcccttgatgtattctatgtcaa

SEQ ID NO: 10896 - DNA, 1247 bp, Glycine max
  Gm_smallRNAprecursor_3729
agatgatttcttgatggttggctctggaagagccagcctggctcctttgcctgtactccttcctccccgtagggagattcccgatgccttaggaggcattaccacttttctgtaagaattcacgggtaaggtagtcaggtagtgaatttgaggtgcccttgatgtattctatgtcaaaatcaaagacacttaaaattgcttgccatcgtgcaaaaatttgttttgagacaaggtttttaacatctttttgtaaaatatctttggctgatttacaatcaaccctgattaaaaatttttggtttaataaatctgattgaaatttggaaatgcacaaaacaattgctaaaacttcttttttaacagttgaatattttaattatgcaggattccaatgttttgatgtatatgcaatgacatgatcttggccatggactctttgtttgaggatgccaccataacctatgtctgaagcatcagtttcgacaattttaaatgcctgtggaataggaagatacagacatttaatggattggactttgactttgatttctttaactgtttgtgtatggaggtcagaccaaggaggcggatttttcttcagcctatcatgtaatggcttgacaatattatttaaataggggacaaattctcctacgtaatttagacaacctagaaatctttgtaactgggttttgtctaagatttggttgggaaatttgctagcaaactctattgacctttcgattggaatgattgtaccttgatatatattgtgaccaaggaatcgaattcgagtttggaaaagattgatttttgatttggagactgccaaaccattttgtttgatgatatgtatgaaagtttggagatgtttgaaatgttggtcaatgttttgggaaaagattaaaacatcatctatgtagacaatgacaaattttgaataaggattaaaaatatcgttcataattttttgaaattctgaaggggcattcttcagtccgaatggcatcacgttccattcatattgcccgaaaggtacagtaaacgctgttttgtacctatctgattcttggatttggatttgccaaaatccagatttcatatcaaattttgaaaatatctttgcataatttaatctgttaagcaaatcttttttgtttggaataggatatctaatccattgtaatgcttgatttaatggtttgtaatttatgactaagcggggtgttccacgctcaatctcagat

SEQ ID NO: 10897 - DNA, 1246 bp, Glycine max
  Gm_smallRNAprecursor_3730
gatgatttcttgatggttggctctggaagagccagcctggctcctttgcctgtactccttcctccccgtagggagattcccgatgccttaggaggcattaccacttttctgtaagaattcacgggtaaggtagtcaggtagtgaatttgaggtgcccttgatgtattctatgtcaaaatcaaagacacttaaaattgcttgccatcgtgcaaaaatttgttttgagacaaggtttttaacatctttttgtaaaatatctttggctgatttacaatcaaccctgattaaaaatttttggtttaataaatctgattgaaatttggaaatgcacaaaacaattgctaaaacttcttttttaacagttgaatattttaattatgcaggattccaatgttttgatgtatatgcaatgacatgatcttggccatggactctttgtttgaggatgccaccataacctatgtctgaagcatcagtttcgacaattttaaatgcctgtggaataggaagatacagacatttaatggattggactttgactttgatttctttaactgtttgtgtatggaggtcagaccaaggaggcggatttttcttcagcctatcatgtaatggcttgacaatattatttaaataggggacaaattctcctacgtaatttagacaacctagaaatctttgtaactgggttttgtctaagatttggttgggaaatttgctagcaaactctattgacctttcgattggaatgattgtaccttgatatatattgtgaccaaggaatcgaattcgagtttggaaaagattgatttttgatttggagactgccaaaccattttgtttgatgatatgtatgaaagtttggagatgtttgaaatgttggtcaatgttttgggaaaagattaaaacatcatctatgtagacaatgacaaattttgaataaggattaaaaatatcgttcataattttttgaaattctgaaggggcattcttcagtccgaatggcatcacgttccattcatattgcccgaaaggtacagtaaacgctgttttgtacctatctgattcttggatttggatttgccaaaatccagatttcatatcaaattttgaaaatatctttgcataatttaatctgttaagcaaatcttttttgtttggaataggatatctaatccattgtaatgcttgatttaatggtttgtaatttatgactaagcggggtgttccacgctcaatctcagat

SEQ ID NO: 10898 - DNA, 1031 bp, Glycine max
  Gm_smallRNAprecursor_3731
ctttttgtaaaatatctttggctgatttacaatcaaccctgattaaaaatttttggtttaataaatctgattgaaatttggaaatgcacaaaacaattgctaaaacttcttttttaacagttgaatattttaattatgcaggattccaatgttttgatgtatatgcaatgacatgatcttggccatggactctttgtttgaggatgccaccataacctatgtctgaagcatcagtttcgacaattttaaatgcctgtggaataggaagatacagacatttaatggattggactttgactttgatttctttaactgtttgtgtatggaggtcagaccaaggaggcggatttttcttcagcctatcatgtaatggcttgacaatattatttaaataggggacaaattctcctacgtaatttagacaacctagaaatctttgtaactgggttttgtctaagatttggttgggaaatttgctagcaaactctattgacctttcgattggaatgattgtaccttgatatatattgtgaccaaggaatcgaattcgagtttggaaaagattgatttttgatttggagactgccaaaccattttgtttgatgatatgtatgaaagtttggagatgtttgaaatgttggtcaatgttttgggaaaagattaaaacatcatctatgtagacaatgacaaattttgaataaggattaaaaatatcgttcataattttttgaaattctgaaggggcattcttcagtccgaatggcatcacgttccattcatattgcccgaaaggtacagtaaacgctgttttgtacctatctgattcttggatttggatttgccaaaatccagatttcatatcaaattttgaaaatatctttgcataatttaatctgttaagcaaatcttttttgtttggaataggatatctaatccattgtaatgcttgatttaatggtttgtaatttatgactaagcggggtgttccacgctcaatctcagattgtttgttaacataaaaagccgcacaa

SEQ ID NO: 10899 - DNA, 1234 bp, Glycine max
  Gm_smallRNAprecursor_3732
aatcaaccctgattaaaaatttttggtttaataaatctgattgaaatttggaaatgcacaaaacaattgctaaaacttcttttttaacagttgaatattttaattatgcaggattccaatgttttgatgtatatgcaatgacatgatcttggccatggactctttgtttgaggatgccaccataacctatgtctgaagcatcagtttcgacaattttaaatgcctgtggaataggaagatacagacatttaatggattggactttgactttgatttctttaactgtttgtgtatggaggtcagaccaaggaggcggatttttcttcagcctatcatgtaatggcttgacaatattatttaaataggggacaaattctcctacgtaatttagacaacctagaaatctttgtaactgggttttgtctaagatttggttgggaaatttgctagcaaactctattgacctttcgattggaatgattgtaccttgatatatattgtgaccaaggaatcgaattcgagtttggaaaagattgatttttgatttggagactgccaaaccattttgtttgatgatatgtatgaaagtttggagatgtttgaaatgttggtcaatgttttgggaaaagattaaaacatcatctatgtagacaatgacaaattttgaataaggattaaaaatatcgttcataattttttgaaattctgaaggggcattcttcagtccgaatggcatcacgttccattcatattgcccgaaaggtacagtaaacgctgttttgtacctatctgattcttggatttggatttgccaaaatccagatttcatatcaaattttgaaaatatctttgcataatttaatctgttaagcaaatcttttttgtttggaataggatatctaatccattgtaatgcttgatttaatggtttgtaatttatgactaagcggggtgttccacgctcaatctcagattgtttgttaacataaaaagccgcacaagaccatgggcttttgcttttccggattaggcctttatcaagcaaatccttgatttccttttgacagtattgaagaagttcttcattcatttggattggtctggcttttgtgggaatttgtttttccctaaagtctttctcataagggagatcgacaatatgtttctttctgtcccaaaatgcatgtggcaattcagaacaaacggtcgattcaatatgatttaataaagattg

SEQ ID NO: 10900 - DNA, 1127 bp, Glycine max
  Gm_smallRNAprecursor_3733
ggacaaattctcctacgtaatttagacaacctagaaatctttgtaactgggttttgtctaagatttggttgggaaatttgctagcaaactctattgacctttcgattggaatgattgtaccttgatatatattgtgaccaaggaatcgaattcgagtttggaaaagattgatttttgatttggagactgccaaaccattttgtttgatgatatgtatgaaagtttggagatgtttgaaatgttggtcaatgttttgggaaaagattaaaacatcatctatgtagacaatgacaaattttgaataaggattaaaaatatcgttcataattttttgaaattctgaaggggcattcttcagtccgaatggcatcacgttccattcatattgcccgaaaggtacagtaaacgctgttttgtacctatctgattcttggatttggatttgccaaaatccagatttcatatcaaattttgaaaatatctttgcataatttaatctgttaagcaaatcttttttgtttggaataggatatctaatccattgtaatgcttgatttaatggtttgtaatttatgactaagcggggtgttccacgctcaatctcagattgtttgttaacataaaaagccgcacaagaccatgggcttttgcttttccggattaggcctttatcaagcaaatccttgatttccttttgacagtattgaagaagttcttcattcatttggattggtctggcttttgtgggaatttgtttttccctaaagtctttctcataagggagatcgacaatatgtttctttctgtcccaaaatgcatgtggcaattcagaacaaacggtcgattcaatatgatttaataaagattgaattttttcttttatttggggttttcccagttgtatctgaatattattaaaagatacttcttcttttaagaagttaatttgattaatcttattttctataagatttatatttctagaaattggtttagtagaaaaattaaatataatttttcttcctaaataatttgtggttattccttcattagatatttggatgggaaacagggctctaatgaagggcgttcctaagattacttcattcttaaggttttttaccaga

SEQ ID NO: 10901 - DNA, 1159 bp, Glycine max
  Gm_smallRNAprecursor_3734
acccatcttttgggaagagttacttcatcccattttatttttctcgggagagacacgttagcctttgtcatatcagtgataaacaaggttgtttctcctttttgaggttttaacaggactctagatgcacaagtattcatgaccttgtactggatcctataaattaaggctgctgggattgatccttctttcatgtcaaggccatgaaagtggatgtttaagaacagagagtcaagaatgtttctgtccatcagactcactgttttgtttggataacaattaaaatatattggaccttgtcctaggctggtttcgactgttccaattagggagtcttcaaattgattatgcctaatatctcttagacacattaaaactgctgcatctatgcccatatcaattaagggcttgatggctacttgtacacaaccgatgtgtaggtatttatacttacggctatgttcataaattgaattttttgaaagtagatgaaattcttcccctatatcttgtcctagaggaatattgttttctactgttttgattatgtaatcaaagttgtgtttgtctttaattgtttcaggaacatatagttgatcctgagggatttctggaatgttccagtcatccatgttttgattaatatcttcgaatcggacttcctcatcgaagagattgtgttttgaggcgacctcttgggtctggttatcttgatcatttaagagattggtgtttcttgaagaagatgaagaggaggaattcgagcgaaaagaaatacgggaaaaggatcgcaataatctagacatatttaaaacattctctaatatctttgccttcatttggttccataggaatctttccataaggttatatgttacagaacttcttggatctgaataaatgaaaaagaagattttttttttttactgaacttatggatctgaagcatgtacagtaattttaatttaaacagtatgtgtttgaacagtattttctggaagcacagcagtctgatattttagttgaatgatactgtagcagtaagtcccgtggatgagaaagggcagtaaggctaaggtgtattgttcaaataaaatattgagacataatatactggtggctataggagtaatgttcaaactatattgtctgtaaaaaa

SEQ ID NO: 10902 - DNA, 1157 bp, Glycine max
  Gm_smallRNAprecursor_3735
tgaaaaagaagattttttttttttactgaacttatggatctgaagcatgtacagtaattttaatttaaacagtatgtgtttgaacagtattttctggaagcacagcagtctgatattttagttgaatgatactgtagcagtaagtcccgtggatgagaaagggcagtaaggctaaggtgtattgttcaaataaaatattgagacataatatactggtggctataggagtaatgttcaaactatattgtctgtaaaaaaaaaaaaaaatcttctttttcatttattcagatccaagaagttctgtaacatataaccttatggaaagattcctatggaaccaaatgaaggcaaagatattagagaatgttttaattatgtctagattattgcgatccttttcccgtatttcttttcgctcgaattcctcctcttcatcttcttcaagaaacaccaatctcttaaatgatcaagataaccagacccaagaggtcgccccaaaacacaatctcttcgatgaggaagtccgattcgaagatattaatcaaaacatggatgactggaacattccagaaatccctcaggatcaactatacgttcctgaaacaattaaagacaaacacaactttgattacataatcaaaacagtagaaaacaatattcctctaggacaagatataggggaagaatttcatctactttcaaaaaattcaatttatgaacatagccgtaagtataaatacctacacatcggttgtgtacaagtagccatcaagcccttaattgatatgggcatagatgcagcagttttaatgtgtctaagagatattaggcataatcaatttgaagactccctaattggaacagtcgaaaccagcctaggacaaggtccaatatattttaattgttatccaaacaaaacagtgagtctgatggacataaacattcttgactctctgttcttaaacatccactttcatggccttgacatgaaagaaggatcaacaaccttgtttatcactgatatgagaataaaccgatcaatacaaagagatttccaaggaggagatactcacacaaaccatcaaccaatagaggaatggaaaatcctaaacaaaaaacaaaatcaaaaataacgtgctacaattgtggaaaacaag

SEQ ID NO: 10903 - DNA, 1080 bp, Glycine max
  Gm_smallRNAprecursor_3736
atgatttcgttttagaaacaatggccctatttgacacaggggctgattcaaactgcattttagaaggattaattcctacaaaattctttgaaaaaacctcagaaaaattaagtacggcaaacggctcaaaattaaaaattaattttaagctatcaaatgcaataattgaaaaccaaggtcttaagattaacacaaactttcttctggtaaaaaaccttaagaatgaagtaatcttaggaacgtccttcattagagccctgtttcccatccaaatatctaatgaaggaataaccacaaattatttaggaagaaaaattatatttaatttttctactaaaccaatttctagaaatataaatcttatagaaaataagattaatcaaattaacttcttaaaagaagaagtatcttttaataatattcagatacaactgggaaaaccccaagtaaaagaaaaaattcaatctttattaaatcatattgaatcgaccgtttgttctgaattgccacatgcattttgggacagaaagaaacatattgtcgatctcccttatgagaaagactttagggaaaaacaaattcccacaaaagccagaccaatccaaatgaatgaagaacttcttcaatactgtcaaaaggaaatcaaggatttgcttgataaaggcctaatccggaaaagcaaaagcccatggtcttgtgcggctttttatgttaacaaacaatctgagattgagcgtggaacaccccgcttagtcataaattacaaaccattaaatcaagcattacaatggattagatatcctattccaaacaaaaaagatttgcttaacagattaaattatgcaaagatattttcaaaatttgatatgaaatctggattttggcaaatccaaatccaagaatcagataggtacaaaacagcgtttactgtacctttcgggcaatatgaatggaacgtgatgccattcggactgaagaatgccccttcagaatttcaaaaaattatgaacgatatttttaatccttattcaaaatttgtcattgtctacatagatgatgttttaatcttttcccaaaaca

SEQ ID NO: 10904 - DNA, 1092 bp, Glycine max
  Gm_smallRNAprecursor_3737
gtcataaattacaaaccattaaatcaagcattacaatggattagatatcctattccaaacaaaaaagatttgcttaacagattaaattatgcaaagatattttcaaaatttgatatgaaatctggattttggcaaatccaaatccaagaatcagataggtacaaaacagcgtttactgtacctttcgggcaatatgaatggaacgtgatgccattcggactgaagaatgccccttcagaatttcaaaaaattatgaacgatatttttaatccttattcaaaatttgtcattgtctacatagatgatgttttaatcttttcccaaaacattgaccaacatttcaaacatctccaaactttcatacatatcatcaaacaaaatggtttggcagtctccaaatcaaaaatcaatcttttccaaactcgaattcgattccttggtcacaatatatatcaaggtacaatcattccaatcgaaaggtcaatagagtttgctagcaaatttcccaaccaaatcttagacaaaacccagttacaaagatttctaggttgtctaaattacgtaggagaatttgtcccctatttaaataatattgtcaagccattacatgataggctgaagaaaaatccgcctccttggtctgacctccatacacaaacaattaaagaaatcaaagtcaaagtccaatccattaaatgtctgtatcttcctattccacaggcatttaaaattgtcgaaactgatgcttcagacataggttatggtggcatcctcaaacaaagagtccatggccaagatcatgtcattgcatatacatcaaaacattggaatcctacacaattaaaatattcaactgttaaaaaagaagttttagcaattgttttgtgcatttccaaatttcaatcagatttattaaaccaaaaatttttaatcagggttgattgtaaatcagccaaagatattttacaaaaagatgttaaaaaccttgcctcaaaacaaatttttgcacgatggcaagcaattttaagtgtctttgattttgacatagaatacatcaagggcacctcaaattcactacctgactaccttacc

SEQ ID NO: 10905 - DNA, 1179 bp, Glycine max
  Gm_smallRNAprecursor_3738
gtcataaattacaaaccattaaatcaagcattacaatggattagatatcctattccaaacaaaaaagatttgcttaacagattaaattatgcaaagatattttcaaaatttgatatgaaatctggattttggcaaatccaaatccaagaatcagataggtacaaaacagcgtttactgtacctttcgggcaatatgaatggaacgtgatgccattcggactgaagaatgccccttcagaatttcaaaaaattatgaacgatatttttaatccttattcaaaatttgtcattgtctacatagatgatgttttaatcttttcccaaaacattgaccaacatttcaaacatctccaaactttcatacatatcatcaaacaaaatggtttggcagtctccaaatcaaaaatcaatcttttccaaactcgaattcgattccttggtcacaatatatatcaaggtacaatcattccaatcgaaaggtcaatagagtttgctagcaaatttcccaaccaaatcttagacaaaacccagttacaaagatttctaggttgtctaaattacgtaggagaatttgtcccctatttaaataatattgtcaagccattacatgataggctgaagaaaaatccgcctccttggtctgacctccatacacaaacaattaaagaaatcaaagtcaaagtccaatccattaaatgtctgtatcttcctattccacaggcatttaaaattgtcgaaactgatgcttcagacataggttatggtggcatcctcaaacaaagagtccatggccaagatcatgtcattgcatatacatcaaaacattggaatcctacacaattaaaatattcaactgttaaaaaagaagttttagcaattgttttgtgcatttccaaatttcaatcagatttattaaaccaaaaatttttaatcagggttgattgtaaatcagccaaagatattttacaaaaagatgttaaaaaccttgcctcaaaacaaatttttgcacgatggcaagcaattttaagtgtctttgattttgacatagaatacatcaagggcacctcaaattcactacctgactaccttacccgtgaattcttacagaaaagtggtaatgcctcctaaggcatcgggaatctccctacggggaggaaggagtacaggcaaaggagccag

SEQ ID NO: 10906 - DNA, 1181 bp, Glycine max
  Gm_smallRNAprecursor_3739
gtcataaattacaaaccattaaatcaagcattacaatggattagatatcctattccaaacaaaaaagatttgcttaacagattaaattatgcaaagatattttcaaaatttgatatgaaatctggattttggcaaatccaaatccaagaatcagataggtacaaaacagcgtttactgtacctttcgggcaatatgaatggaacgtgatgccattcggactgaagaatgccccttcagaatttcaaaaaattatgaacgatatttttaatccttattcaaaatttgtcattgtctacatagatgatgttttaatcttttcccaaaacattgaccaacatttcaaacatctccaaactttcatacatatcatcaaacaaaatggtttggcagtctccaaatcaaaaatcaatcttttccaaactcgaattcgattccttggtcacaatatatatcaaggtacaatcattccaatcgaaaggtcaatagagtttgctagcaaatttcccaaccaaatcttagacaaaacccagttacaaagatttctaggttgtctaaattacgtaggagaatttgtcccctatttaaataatattgtcaagccattacatgataggctgaagaaaaatccgcctccttggtctgacctccatacacaaacaattaaagaaatcaaagtcaaagtccaatccattaaatgtctgtatcttcctattccacaggcatttaaaattgtcgaaactgatgcttcagacataggttatggtggcatcctcaaacaaagagtccatggccaagatcatgtcattgcatatacatcaaaacattggaatcctacacaattaaaatattcaactgttaaaaaagaagttttagcaattgttttgtgcatttccaaatttcaatcagatttattaaaccaaaaatttttaatcagggttgattgtaaatcagccaaagatattttacaaaaagatgttaaaaaccttgcctcaaaacaaatttttgcacgatggcaagcaattttaagtgtctttgattttgacatagaatacatcaagggcacctcaaattcactacctgactaccttacccgtgaattcttacagaaaagtggtaatgcctcctaaggcatcgggaatctccctacggggaggaaggagtacaggcaaaggagccaggc

SEQ ID NO: 10907 - DNA, 1091 bp, Glycine max
  Gm_smallRNAprecursor_3740
tcataaattacaaaccattaaatcaagcattacaatggattagatatcctattccaaacaaaaaagatttgcttaacagattaaattatgcaaagatattttcaaaatttgatatgaaatctggattttggcaaatccaaatccaagaatcagataggtacaaaacagcgtttactgtacctttcgggcaatatgaatggaacgtgatgccattcggactgaagaatgccccttcagaatttcaaaaaattatgaacgatatttttaatccttattcaaaatttgtcattgtctacatagatgatgttttaatcttttcccaaaacattgaccaacatttcaaacatctccaaactttcatacatatcatcaaacaaaatggtttggcagtctccaaatcaaaaatcaatcttttccaaactcgaattcgattccttggtcacaatatatatcaaggtacaatcattccaatcgaaaggtcaatagagtttgctagcaaatttcccaaccaaatcttagacaaaacccagttacaaagatttctaggttgtctaaattacgtaggagaatttgtcccctatttaaataatattgtcaagccattacatgataggctgaagaaaaatccgcctccttggtctgacctccatacacaaacaattaaagaaatcaaagtcaaagtccaatccattaaatgtctgtatcttcctattccacaggcatttaaaattgtcgaaactgatgcttcagacataggttatggtggcatcctcaaacaaagagtccatggccaagatcatgtcattgcatatacatcaaaacattggaatcctacacaattaaaatattcaactgttaaaaaagaagttttagcaattgttttgtgcatttccaaatttcaatcagatttattaaaccaaaaatttttaatcagggttgattgtaaatcagccaaagatattttacaaaaagatgttaaaaaccttgcctcaaaacaaatttttgcacgatggcaagcaattttaagtgtctttgattttgacatagaatacatcaagggcacctcaaattcactacctgactaccttacc

SEQ ID NO: 10908 - DNA, 1073 bp, Glycine max
  Gm_smallRNAprecursor_3741
tgtacctttcgggcaatatgaatggaacgtgatgccattcggactgaagaatgccccttcagaatttcaaaaaattatgaacgatatttttaatccttattcaaaatttgtcattgtctacatagatgatgttttaatcttttcccaaaacattgaccaacatttcaaacatctccaaactttcatacatatcatcaaacaaaatggtttggcagtctccaaatcaaaaatcaatcttttccaaactcgaattcgattccttggtcacaatatatatcaaggtacaatcattccaatcgaaaggtcaatagagtttgctagcaaatttcccaaccaaatcttagacaaaacccagttacaaagatttctaggttgtctaaattacgtaggagaatttgtcccctatttaaataatattgtcaagccattacatgataggctgaagaaaaatccgcctccttggtctgacctccatacacaaacaattaaagaaatcaaagtcaaagtccaatccattaaatgtctgtatcttcctattccacaggcatttaaaattgtcgaaactgatgcttcagacataggttatggtggcatcctcaaacaaagagtccatggccaagatcatgtcattgcatatacatcaaaacattggaatcctacacaattaaaatattcaactgttaaaaaagaagttttagcaattgttttgtgcatttccaaatttcaatcagatttattaaaccaaaaatttttaatcagggttgattgtaaatcagccaaagatattttacaaaaagatgttaaaaaccttgcctcaaaacaaatttttgcacgatggcaagcaattttaagtgtctttgattttgacatagaatacatcaagggcacctcaaattcactacctgactaccttacccgtgaattcttacagaaaagtggtaatgcctcctaaggcatcgggaatctccctacggggaggaaggagtacaggcaaaggagccaggctggctcttccagagccaaccatcaagaaatcatctacctcttctgggtcaccaacccaggctgggtca

SEQ ID NO: 10909 - DNA, 1071 bp, Glycine max
  Gm_smallRNAprecursor_3742
tacctttcgggcaatatgaatggaacgtgatgccattcggactgaagaatgccccttcagaatttcaaaaaattatgaacgatatttttaatccttattcaaaatttgtcattgtctacatagatgatgttttaatcttttcccaaaacattgaccaacatttcaaacatctccaaactttcatacatatcatcaaacaaaatggtttggcagtctccaaatcaaaaatcaatcttttccaaactcgaattcgattccttggtcacaatatatatcaaggtacaatcattccaatcgaaaggtcaatagagtttgctagcaaatttcccaaccaaatcttagacaaaacccagttacaaagatttctaggttgtctaaattacgtaggagaatttgtcccctatttaaataatattgtcaagccattacatgataggctgaagaaaaatccgcctccttggtctgacctccatacacaaacaattaaagaaatcaaagtcaaagtccaatccattaaatgtctgtatcttcctattccacaggcatttaaaattgtcgaaactgatgcttcagacataggttatggtggcatcctcaaacaaagagtccatggccaagatcatgtcattgcatatacatcaaaacattggaatcctacacaattaaaatattcaactgttaaaaaagaagttttagcaattgttttgtgcatttccaaatttcaatcagatttattaaaccaaaaatttttaatcagggttgattgtaaatcagccaaagatattttacaaaaagatgttaaaaaccttgcctcaaaacaaatttttgcacgatggcaagcaattttaagtgtctttgattttgacatagaatacatcaagggcacctcaaattcactacctgactaccttacccgtgaattcttacagaaaagtggtaatgcctcctaaggcatcgggaatctccctacggggaggaaggagtacaggcaaaggagccaggctggctcttccagagccaaccatcaagaaatcatctacctcttctgggtcaccaacccaggctgggtca

SEQ ID NO: 10910 - DNA, 1115 bp, Glycine max
  Gm_smallRNAprecursor_3743
tcaatagagtttgctagcaaatttcccaaccaaatcttagacaaaacccagttacaaagatttctaggttgtctaaattacgtaggagaatttgtcccctatttaaataatattgtcaagccattacatgataggctgaagaaaaatccgcctccttggtctgacctccatacacaaacaattaaagaaatcaaagtcaaagtccaatccattaaatgtctgtatcttcctattccacaggcatttaaaattgtcgaaactgatgcttcagacataggttatggtggcatcctcaaacaaagagtccatggccaagatcatgtcattgcatatacatcaaaacattggaatcctacacaattaaaatattcaactgttaaaaaagaagttttagcaattgttttgtgcatttccaaatttcaatcagatttattaaaccaaaaatttttaatcagggttgattgtaaatcagccaaagatattttacaaaaagatgttaaaaaccttgcctcaaaacaaatttttgcacgatggcaagcaattttaagtgtctttgattttgacatagaatacatcaagggcacctcaaattcactacctgactaccttacccgtgaattcttacagaaaagtggtaatgcctcctaaggcatcgggaatctccctacggggaggaaggagtacaggcaaaggagccaggctggctcttccagagccaaccatcaagaaatcatctacctcttctgggtcaccaacccaggctgggtcatctacccagaaaaccaattcagaagggtcatcaacccagattgcctcaatcaaacctgagccatccactcaggaatctcccaaaccggcaaccgccaaacaaacatcggccgactatgcatggccaattgaaaccctttcatttagccatttttcaggtttcggaagagaggtgctctgaaacaagatttttgtaagcgcttctttctaaatttgatcctaatccaatttaaaaaatataaatatatattattgttagagacttagaggtgacaaaattccttatccagctcattacaagttgatagaatgaggataactgattatgacgaactagaggaaaaatc

SEQ ID NO: 10911 - DNA, 1081 bp, Glycine max
  Gm_smallRNAprecursor_3744
gcatactacattattatatacaattaatacgttatgtaaagtttaaattacatatatacacaataaataaattaactttttttaaacctattctttagccattttttaaaaaaaatttaagtgtatatcgtgtttataatgataaattttgttaaaaataaattaaatttgtttgtaaagtgtttattttatcccactatatatctcatcttttgatgttccacccgcatccattttggcaccaatcattcgcaagaattaggattgaaagttagcaacagattcggttcgcggagcactggcccatgcggtagtgcaacgcatgggcttcttaccctttttgaaaattgattgaatgtgacgtgggccaatgacacctttgtaatcagacttgggtgttgctaggtgcacccagcccttaagctgaaatgacaaaaatacccttaatccgtaagtcatttaaattgatccgtaaaaagtttacagatcaacttgattcataagtcttttatggatcaacttgatccgtaaaagacttacggatcaagttgatctatattttccgtaaaaggcttacggatcaagttgatccgtaagccttttacgaatcaacttgatccgtaagtcttttacagaacaatacagatcaacttgatcggtagaagccttacggatcaacttgatctgtatcaaccttacggatcaacttgatccgtacaatttacggaccaccctcacatatacccatcacaaatgcgaaaaaagcgcagagatagttttgatattttaaaaaaatgctgggtgcaccagcaataatgctggttgcacctagcaactcccattagactttcaattgacaacaacatgcgagttccttggggcacccagcatttttgttggtacatccagtaattttcaaaactgaaaatatccttatgggtatttttggttataaataatagattaacttttttatttctgcaaccctttttttcttcttcgtaaaaccgcactcccttagtgtaacttgcttccattagcatccttttgtgagcgtttgttgtcgccggtgatatacggt

SEQ ID NO: 10912 - DNA, 1053 bp, Glycine max
  Gm_smallRNAprecursor_3745
acgttatgtaaagtttaaattacatatatacacaataaataaattaactttttttaaacctattctttagccattttttaaaaaaaatttaagtgtatatcgtgtttataatgataaattttgttaaaaataaattaaatttgtttgtaaagtgtttattttatcccactatatatctcatcttttgatgttccacccgcatccattttggcaccaatcattcgcaagaattaggattgaaagttagcaacagattcggttcgcggagcactggcccatgcggtagtgcaacgcatgggcttcttaccctttttgaaaattgattgaatgtgacgtgggccaatgacacctttgtaatcagacttgggtgttgctaggtgcacccagcccttaagctgaaatgacaaaaatacccttaatccgtaagtcatttaaattgatccgtaaaaagtttacagatcaacttgattcataagtcttttatggatcaacttgatccgtaaaagacttacggatcaagttgatctatattttccgtaaaaggcttacggatcaagttgatccgtaagccttttacgaatcaacttgatccgtaagtcttttacagaacaatacagatcaacttgatcggtagaagccttacggatcaacttgatctgtatcaaccttacggatcaacttgatccgtacaatttacggaccaccctcacatatacccatcacaaatgcgaaaaaagcgcagagatagttttgatattttaaaaaaatgctgggtgcaccagcaataatgctggttgcacctagcaactcccattagactttcaattgacaacaacatgcgagttccttggggcacccagcatttttgttggtacatccagtaattttcaaaactgaaaatatccttatgggtatttttggttataaataatagattaacttttttatttctgcaaccctttttttcttcttcgtaaaaccgcactcccttagtgtaacttgcttccattagcatccttttgtgagcgtttgttgtcgccggtgatatacggt

SEQ ID NO: 10913 - DNA, 1082 bp, Glycine max
  Gm_smallRNAprecursor_3746
acgttatgtaaagtttaaattacatatatacacaataaataaattaactttttttaaacctattctttagccattttttaaaaaaaatttaagtgtatatcgtgtttataatgataaattttgttaaaaataaattaaatttgtttgtaaagtgtttattttatcccactatatatctcatcttttgatgttccacccgcatccattttggcaccaatcattcgcaagaattaggattgaaagttagcaacagattcggttcgcggagcactggcccatgcggtagtgcaacgcatgggcttcttaccctttttgaaaattgattgaatgtgacgtgggccaatgacacctttgtaatcagacttgggtgttgctaggtgcacccagcccttaagctgaaatgacaaaaatacccttaatccgtaagtcatttaaattgatccgtaaaaagtttacagatcaacttgattcataagtcttttatggatcaacttgatccgtaaaagacttacggatcaagttgatctatattttccgtaaaaggcttacggatcaagttgatccgtaagccttttacgaatcaacttgatccgtaagtcttttacagaacaatacagatcaacttgatcggtagaagccttacggatcaacttgatctgtatcaaccttacggatcaacttgatccgtacaatttacggaccaccctcacatatacccatcacaaatgcgaaaaaagcgcagagatagttttgatattttaaaaaaatgctgggtgcaccagcaataatgctggttgcacctagcaactcccattagactttcaattgacaacaacatgcgagttccttggggcacccagcatttttgttggtacatccagtaattttcaaaactgaaaatatccttatgggtatttttggttataaataatagattaacttttttatttctgcaaccctttttttcttcttcgtaaaaccgcactcccttagtgtaacttgcttccattagcatccttttgtgagcgtttgttgtcgccggtgatatacggtgaagttcagtggtttatcgttgtcaaaga

SEQ ID NO: 10914 - DNA, 1153 bp, Glycine max
  Gm_smallRNAprecursor_3747
aagataaattagaaacaaaaacactcaggagccagaagtacaattgctcaccaaaagaaacatagtattcattgttaagaattagttcaaaagttgcttctacataagttgttgagaattgaaattccatattgactagagatatggcaaatataatacttataaagtttttgaaattctcaccatacaaattggtttgagattcattaggccttaagcccaaactctaagatagtatcggatcctaagtttgttattgagtgatagaaaccttagtaaggaagtgggccttgatgagaatgttaataggcccaaggtttggagagtgtatacgaggaagaagggaaaagggaaaaagaatgatgaggtggcagaggatacatcaaaatagtactatataagtagtagtattgagcagtagtggggaggaaagaattctgttatttggtagggtcactgaatcagtgatttgggatctggtagtacactatcagattattatcttttattccttcagctgttgagatcgtaattgtcctaccataatacaattccactatttcatccatttcttcccactgtttttatctgttatttactgtttcattcatctttctcatacttaatttcaccaattggtccgattacaatctcaacagctgaaggaataaaagataataatctgatagtgtactaccagatcccaaatcactgattcagtgaccctaccaaataacagaattctttctccccactactgctcaatactactacttatatagtactattttgatgtatcctctgccacctcatcattctttttcccttttcccttcttcctcgtatacactctccaaaccttgggcctattaacattctcatcaaggcccacttccttactaaggtttctatcattgagtcacccatatttttcttcattttattcctaggtgtgatgtgaggagtgttgttattggactacccatattagtccacactctagatgtctagtcttgggaatgaggatgtgttgagatcatacattgactagagatatcacaaatgtgatccttataaggcttgggcagtcctcgtcttataaactggttttgtaaggatgacctaggccttgagcccaaattctaagatggta

SEQ ID NO: 10915 - DNA, 1153 bp, Glycine max; identical to SEQ ID NO: 10914
  Gm_smallRNAprecursor_3748

SEQ ID NO: 10916 - DNA, 1152 bp, Glycine max
  Gm_smallRNAprecursor_3749
agataaattagaaacaaaaacactcaggagccagaagtacaattgctcaccaaaagaaacatagtattcattgttaagaattagttcaaaagttgcttctacataagttgttgagaattgaaattccatattgactagagatatggcaaatataatacttataaagtttttgaaattctcaccatacaaattggtttgagattcattaggccttaagcccaaactctaagatagtatcggatcctaagtttgttattgagtgatagaaaccttagtaaggaagtgggccttgatgagaatgttaataggcccaaggtttggagagtgtatacgaggaagaagggaaaagggaaaaagaatgatgaggtggcagaggatacatcaaaatagtactatataagtagtagtattgagcagtagtggggaggaaagaattctgttatttggtagggtcactgaatcagtgatttgggatctggtagtacactatcagattattatcttttattccttcagctgttgagatcgtaattgtcctaccataatacaattccactatttcatccatttcttcccactgtttttatctgttatttactgtttcattcatctttctcatacttaatttcaccaattggtccgattacaatctcaacagctgaaggaataaaagataataatctgatagtgtactaccagatcccaaatcactgattcagtgaccctaccaaataacagaattctttctccccactactgctcaatactactacttatatagtactattttgatgtatcctctgccacctcatcattctttttcccttttcccttcttcctcgtatacactctccaaaccttgggcctattaacattctcatcaaggcccacttccttactaaggtttctatcattgagtcacccatatttttcttcattttattcctaggtgtgatgtgaggagtgttgttattggactacccatattagtccacactctagatgtctagtcttgggaatgaggatgtgttgagatcatacattgactagagatatcacaaatgtgatccttataaggcttgggcagtcctcgtcttataaactggttttgtaaggatgacctaggccttgagcccaaattctaagatggta

SEQ ID NO: 10917 - DNA, 1152 bp, Glycine max; identical to SEQ ID NO: 10916
  Gm_smallRNAprecursor_3750

SEQ ID NO: 10918 - DNA, 1148 bp, Glycine max
  Gm_smallRNAprecursor_3751
ataaattagaaacaaaaacactcaggagccagaagtacaattgctcaccaaaagaaacatagtattcattgttaagaattagttcaaaagttgcttctacataagttgttgagaattgaaattccatattgactagagatatggcaaatataatacttataaagtttttgaaattctcaccatacaaattggtttgagattcattaggccttaagcccaaactctaagatagtatcggatcctaagtttgttattgagtgatagaaaccttagtaaggaagtgggccttgatgagaatgttaataggcccaaggtttggagagtgtatacgaggaagaagggaaaagggaaaaagaatgatgaggtggcagaggatacatcaaaatagtactatataagtagtagtattgagcagtagtggggaggaaagaattctgttatttggtagggtcactgaatcagtgatttgggatctggtagtacactatcagattattatcttttattccttcagctgttgagatcgtaattgtcctaccataatacaattccactatttcatccatttcttcccactgtttttatctgttatttactgtttcattcatctttctcatacttaatttcaccaattggtccgattacaatctcaacagctgaaggaataaaagataataatctgatagtgtactaccagatcccaaatcactgattcagtgaccctaccaaataacagaattctttctccccactactgctcaatactactacttatatagtactattttgatgtatcctctgccacctcatcattctttttcccttttcccttcttcctcgtatacactctccaaaccttgggcctattaacattctcatcaaggcccacttccttactaaggtttctatcattgagtcacccatatttttcttcattttattcctaggtgtgatgtgaggagtgttgttattggactacccatattagtccacactctagatgtctagtcttgggaatgaggatgtgttgagatcatacattgactagagatatcacaaatgtgatccttataaggcttgggcagtcctcgtcttataaactggttttgtaaggatgacctaggccttgagcccaaattctaagatgg

SEQ ID NO: 10919 - DNA, 1070 bp, Glycine max
  Gm_smallRNAprecursor_3752
tgaaatagctcgaactagaatacgcacaagcaccgcaatggaatgcatcgaattaaacacttgcaaccgtagcatgcagtttaattcaaccaaggcccaaacaccatcagaaaacctcaaaatgttttttttttccaaccgactcgcaatctcaattagcttaacctataccaatacaataaatccatgattttttcaatttgaataaaaaaaaattcagcttgattattaatctaatcgatgaaaggtagcacgtcaagtgaaaatccaaacaaggaaaaagcaaatcagaaaccggtttttcctagatgtagattctgtgcatcgggatctatagcataaaccacgctttccgcacagaaacgataaacttaaatctagaagcgtttcggatctgataagcagagattaaaataaataaataaataaaatttacgggtagtggaatctcggagatgagatctgagcggaaaacaaagcaaaggttcaccgcggcctccgattcagttgatgcaaggcgggatccaattcggcgccggcgaccgctcctccattccgcgcgaaaaccggttcccgacctgcaccaagcgaattagagaccgcacagtgagggagaaagaatcaaaatccccaaacgcaatcgcatggcatcacatcgaatcgaacttcaccaaaccaaaaccaccaaccaccgctctctctctctcttcaaccgcgaagacgaaagagtgagagagaaatcagaatcgcgaagctaaccccaacccacaccctatgtggtgaacgggtgaggattgggttagcgaggggttatttataaagagcacagacgaaggagatatggacacgtggcataacacgctctcactgatgcgatgcgattaatactgtgcaagtggtctattttttatttttattttttctgaagaagcgcggcagggagagacgtgaaaattttggacatggattttggaaagatttactcaagtgatgccgttttgtgttgaagtacgtggctgcacgtgcgcgtgtttctgccactgcaaacgtgttttctgacccgactttca

SEQ ID NO: 10920 - DNA, 1071 bp, Glycine max
  Gm_smallRNAprecursor_3753
tgaaatagctcgaactagaatacgcacaagcaccgcaatggaatgcatcgaattaaacacttgcaaccgtagcatgcagtttaattcaaccaaggcccaaacaccatcagaaaacctcaaaatgttttttttttccaaccgactcgcaatctcaattagcttaacctataccaatacaataaatccatgattttttcaatttgaataaaaaaaaattcagcttgattattaatctaatcgatgaaaggtagcacgtcaagtgaaaatccaaacaaggaaaaagcaaatcagaaaccggtttttcctagatgtagattctgtgcatcgggatctatagcataaaccacgctttccgcacagaaacgataaacttaaatctagaagcgtttcggatctgataagcagagattaaaataaataaataaataaaatttacgggtagtggaatctcggagatgagatctgagcggaaaacaaagcaaaggttcaccgcggcctccgattcagttgatgcaaggcgggatccaattcggcgccggcgaccgctcctccattccgcgcgaaaaccggttcccgacctgcaccaagcgaattagagaccgcacagtgagggagaaagaatcaaaatccccaaacgcaatcgcatggcatcacatcgaatcgaacttcaccaaaccaaaaccaccaaccaccgctctctctctctcttcaaccgcgaagacgaaagagtgagagagaaatcagaatcgcgaagctaaccccaacccacaccctatgtggtgaacgggtgaggattgggttagcgaggggttatttataaagagcacagacgaaggagatatggacacgtggcataacacgctctcactgatgcgatgcgattaatactgtgcaagtggtctattttttatttttattttttctgaagaagcgcggcagggagagacgtgaaaattttggacatggattttggaaagatttactcaagtgatgccgttttgtgttgaagtacgtggctgcacgtgcgcgtgtttctgccactgcaaacgtgttttctgacccgactttcac

SEQ ID NO: 10921 - DNA, 1071 bp, Glycine max; identical to SEQ ID NO: 10920
  Gm_smallRNAprecursor_3754

SEQ ID NO: 10922 - DNA, 1071 bp, Glycine max; identical to SEQ ID NO: 10920
  Gm_smallRNAprecursor_3755

SEQ ID NO: 10923 - DNA, 1069 bp, Glycine max
  Gm_smallRNAprecursor_3756
gaaatagctcgaactagaatacgcacaagcaccgcaatggaatgcatcgaattaaacacttgcaaccgtagcatgcagtttaattcaaccaaggcccaaacaccatcagaaaacctcaaaatgttttttttttccaaccgactcgcaatctcaattagcttaacctataccaatacaataaatccatgattttttcaatttgaataaaaaaaaattcagcttgattattaatctaatcgatgaaaggtagcacgtcaagtgaaaatccaaacaaggaaaaagcaaatcagaaaccggtttttcctagatgtagattctgtgcatcgggatctatagcataaaccacgctttccgcacagaaacgataaacttaaatctagaagcgtttcggatctgataagcagagattaaaataaataaataaataaaatttacgggtagtggaatctcggagatgagatctgagcggaaaacaaagcaaaggttcaccgcggcctccgattcagttgatgcaaggcgggatccaattcggcgccggcgaccgctcctccattccgcgcgaaaaccggttcccgacctgcaccaagcgaattagagaccgcacagtgagggagaaagaatcaaaatccccaaacgcaatcgcatggcatcacatcgaatcgaacttcaccaaaccaaaaccaccaaccaccgctctctctctctcttcaaccgcgaagacgaaagagtgagagagaaatcagaatcgcgaagctaaccccaacccacaccctatgtggtgaacgggtgaggattgggttagcgaggggttatttataaagagcacagacgaaggagatatggacacgtggcataacacgctctcactgatgcgatgcgattaatactgtgcaagtggtctattttttatttttattttttctgaagaagcgcggcagggagagacgtgaaaattttggacatggattttggaaagatttactcaagtgatgccgttttgtgttgaagtacgtggctgcacgtgcgcgtgtttctgccactgcaaacgtgttttctgacccgactttca

SEQ ID NO: 10924 - DNA, 1069 bp, Glycine max; identical to SEQ ID NO: 10923
  Gm_smallRNAprecursor_3757

SEQ ID NO: 10925 - DNA, 1070 bp, Glycine max
  Gm_smallRNAprecursor_3758
gaaatagctcgaactagaatacgcacaagcaccgcaatggaatgcatcgaattaaacacttgcaaccgtagcatgcagtttaattcaaccaaggcccaaacaccatcagaaaacctcaaaatgttttttttttccaaccgactcgcaatctcaattagcttaacctataccaatacaataaatccatgattttttcaatttgaataaaaaaaaattcagcttgattattaatctaatcgatgaaaggtagcacgtcaagtgaaaatccaaacaaggaaaaagcaaatcagaaaccggtttttcctagatgtagattctgtgcatcgggatctatagcataaaccacgctttccgcacagaaacgataaacttaaatctagaagcgtttcggatctgataagcagagattaaaataaataaataaataaaatttacgggtagtggaatctcggagatgagatctgagcggaaaacaaagcaaaggttcaccgcggcctccgattcagttgatgcaaggcgggatccaattcggcgccggcgaccgctcctccattccgcgcgaaaaccggttcccgacctgcaccaagcgaattagagaccgcacagtgagggagaaagaatcaaaatccccaaacgcaatcgcatggcatcacatcgaatcgaacttcaccaaaccaaaaccaccaaccaccgctctctctctctcttcaaccgcgaagacgaaagagtgagagagaaatcagaatcgcgaagctaaccccaacccacaccctatgtggtgaacgggtgaggattgggttagcgaggggttatttataaagagcacagacgaaggagatatggacacgtggcataacacgctctcactgatgcgatgcgattaatactgtgcaagtggtctattttttatttttattttttctgaagaagcgcggcagggagagacgtgaaaattttggacatggattttggaaagatttactcaagtgatgccgttttgtgttgaagtacgtggctgcacgtgcgcgtgtttctgccactgcaaacgtgttttctgacccgactttcac

SEQ ID NO: 10926 - DNA, 1070 bp, Glycine max; identical to SEQ ID NO: 10925
  Gm_smallRNAprecursor_3759

SEQ ID NO: 10927 - DNA, 1070 bp, Glycine max; identical to SEQ ID NO: 10925
  Gm_smallRNAprecursor_3760

SEQ ID NO: 10928 - DNA, 1070 bp, Glycine max; identical to SEQ ID NO: 10925
  Gm_smallRNAprecursor_3761

SEQ ID NO: 10929 - DNA, 1070 bp, Glycine max; identical to SEQ ID NO: 10925
  Gm_smallRNAprecursor_3762

SEQ ID NO: 10930 - DNA, 1070 bp, Glycine max; identical to SEQ ID NO: 10925
  Gm_smallRNAprecursor_3763

SEQ ID NO: 10931 - DNA, 1071 bp, Glycine max
  Gm_smallRNAprecursor_3764
gaaatagctcgaactagaatacgcacaagcaccgcaatggaatgcatcgaattaaacacttgcaaccgtagcatgcagtttaattcaaccaaggcccaaacaccatcagaaaacctcaaaatgttttttttttccaaccgactcgcaatctcaattagcttaacctataccaatacaataaatccatgattttttcaatttgaataaaaaaaaattcagcttgattattaatctaatcgatgaaaggtagcacgtcaagtgaaaatccaaacaaggaaaaagcaaatcagaaaccggtttttcctagatgtagattctgtgcatcgggatctatagcataaaccacgctttccgcacagaaacgataaacttaaatctagaagcgtttcggatctgataagcagagattaaaataaataaataaataaaatttacgggtagtggaatctcggagatgagatctgagcggaaaacaaagcaaaggttcaccgcggcctccgattcagttgatgcaaggcgggatccaattcggcgccggcgaccgctcctccattccgcgcgaaaaccggttcccgacctgcaccaagcgaattagagaccgcacagtgagggagaaagaatcaaaatccccaaacgcaatcgcatggcatcacatcgaatcgaacttcaccaaaccaaaaccaccaaccaccgctctctctctctcttcaaccgcgaagacgaaagagtgagagagaaatcagaatcgcgaagctaaccccaacccacaccctatgtggtgaacgggtgaggattgggttagcgaggggttatttataaagagcacagacgaaggagatatggacacgtggcataacacgctctcactgatgcgatgcgattaatactgtgcaagtggtctattttttatttttattttttctgaagaagcgcggcagggagagacgtgaaaattttggacatggattttggaaagatttactcaagtgatgccgttttgtgttgaagtacgtggctgcacgtgcgcgtgtttctgccactgcaaacgtgttttctgacccgactttcaca

SEQ ID NO: 10932 - DNA, 1068 bp, Glycine max
  Gm_smallRNAprecursor_3765
aaatagctcgaactagaatacgcacaagcaccgcaatggaatgcatcgaattaaacacttgcaaccgtagcatgcagtttaattcaaccaaggcccaaacaccatcagaaaacctcaaaatgttttttttttccaaccgactcgcaatctcaattagcttaacctataccaatacaataaatccatgattttttcaatttgaataaaaaaaaattcagcttgattattaatctaatcgatgaaaggtagcacgtcaagtgaaaatccaaacaaggaaaaagcaaatcagaaaccggtttttcctagatgtagattctgtgcatcgggatctatagcataaaccacgctttccgcacagaaacgataaacttaaatctagaagcgtttcggatctgataagcagagattaaaataaataaataaataaaatttacgggtagtggaatctcggagatgagatctgagcggaaaacaaagcaaaggttcaccgcggcctccgattcagttgatgcaaggcgggatccaattcggcgccggcgaccgctcctccattccgcgcgaaaaccggttcccgacctgcaccaagcgaattagagaccgcacagtgagggagaaagaatcaaaatccccaaacgcaatcgcatggcatcacatcgaatcgaacttcaccaaaccaaaaccaccaaccaccgctctctctctctcttcaaccgcgaagacgaaagagtgagagagaaatcagaatcgcgaagctaaccccaacccacaccctatgtggtgaacgggtgaggattgggttagcgaggggttatttataaagagcacagacgaaggagatatggacacgtggcataacacgctctcactgatgcgatgcgattaatactgtgcaagtggtctattttttatttttattttttctgaagaagcgcggcagggagagacgtgaaaattttggacatggattttggaaagatttactcaagtgatgccgttttgtgttgaagtacgtggctgcacgtgcgcgtgtttctgccactgcaaacgtgttttctgacccgactttca

SEQ ID NO: 10933 - DNA, 1069 bp, Glycine max
  Gm_smallRNAprecursor_3766
aaatagctcgaactagaatacgcacaagcaccgcaatggaatgcatcgaattaaacacttgcaaccgtagcatgcagtttaattcaaccaaggcccaaacaccatcagaaaacctcaaaatgttttttttttccaaccgactcgcaatctcaattagcttaacctataccaatacaataaatccatgattttttcaatttgaataaaaaaaaattcagcttgattattaatctaatcgatgaaaggtagcacgtcaagtgaaaatccaaacaaggaaaaagcaaatcagaaaccggtttttcctagatgtagattctgtgcatcgggatctatagcataaaccacgctttccgcacagaaacgataaacttaaatctagaagcgtttcggatctgataagcagagattaaaataaataaataaataaaatttacgggtagtggaatctcggagatgagatctgagcggaaaacaaagcaaaggttcaccgcggcctccgattcagttgatgcaaggcgggatccaattcggcgccggcgaccgctcctccattccgcgcgaaaaccggttcccgacctgcaccaagcgaattagagaccgcacagtgagggagaaagaatcaaaatccccaaacgcaatcgcatggcatcacatcgaatcgaacttcaccaaaccaaaaccaccaaccaccgctctctctctctcttcaaccgcgaagacgaaagagtgagagagaaatcagaatcgcgaagctaaccccaacccacaccctatgtggtgaacgggtgaggattgggttagcgaggggttatttataaagagcacagacgaaggagatatggacacgtggcataacacgctctcactgatgcgatgcgattaatactgtgcaagtggtctattttttatttttattttttctgaagaagcgcggcagggagagacgtgaaaattttggacatggattttggaaagatttactcaagtgatgccgttttgtgttgaagtacgtggctgcacgtgcgcgtgtttctgccactgcaaacgtgttttctgacccgactttcac

SEQ ID NO: 10934 - DNA, 1069 bp, Glycine max; identical to SEQ ID NO: 10933
  Gm_smallRNAprecursor_3767

SEQ ID NO: 10935 - DNA, 1069 bp, Glycine max; identical to SEQ ID NO: 10933
  Gm_smallRNAprecursor_3768

SEQ ID NO: 10936 - DNA, 1119 bp, Glycine max
  Gm_smallRNAprecursor_3769
ttctacaattttaaggggtcaacccaatttcgaagaaattttcgtttgtatatggttatttataggataatttttttattatataactcataaaaacagtcattgtacatattggatttctttatccaataacatatgatattataattataattatttggatttgggcagtatcaacctatatatgtattggacccaacaaagatctagatccaaaatatttttatgggtctgacttagatcacatccatcaaagttaggtgctccaaaatcttactaacctttttagagcacattattattacctaacacttttgaattttttggagagttaatgtgttaggaccaaattatgtcacatgtgacttacctgtatatgaattttataaacaaacaaaggaggtctcaaactattgaagcatcaactaatttgagtatcaatatatctttgcaagcatctcattcacccataagctatgaaacacggacaccccagtttcttgccgtgtccggtgtccgacacgcgtccatgtcagtgtctgacatcgacacgacacccgtactacgttctatattttggacattacaggtgtccatgtgtctttgtccgtatcgtatccggtgtccgtgtcggtgtcgatgcttcatagcccataagatccatcacaccataagatcggaggaatacaaaccacaagaaaagggtgtctaattacatcctaaatctttgctcatacattatacaaatattaaactaatatatatatatatatattttatcaattgcttatttatttttggaagaattaaaagtgtgtttgaattaacattaaaaacacattaaatgaaaaaattacgcatttcatcgcaaaaatttcaagcaattatattataacttttatctgaaagtctgttgatattcaattcaacagcttgccaaacacacacttagttgatgatacaaagtatatatatcattagggtatactaatggaagatagatgtgcttgaaatgaatggagatccaatatatgcaccaaaataaatatattttctaatatataaaacaattttatttataatacaccaacacaatcaattcgtagtatctttgctcca

SEQ ID NO: 10937 - DNA, 1118 bp, Glycine max
  Gm_smallRNAprecursor_3770
tctacaattttaaggggtcaacccaatttcgaagaaattttcgtttgtatatggttatttataggataatttttttattatataactcataaaaacagtcattgtacatattggatttctttatccaataacatatgatattataattataattatttggatttgggcagtatcaacctatatatgtattggacccaacaaagatctagatccaaaatatttttatgggtctgacttagatcacatccatcaaagttaggtgctccaaaatcttactaacctttttagagcacattattattacctaacacttttgaattttttggagagttaatgtgttaggaccaaattatgtcacatgtgacttacctgtatatgaattttataaacaaacaaaggaggtctcaaactattgaagcatcaactaatttgagtatcaatatatctttgcaagcatctcattcacccataagctatgaaacacggacaccccagtttcttgccgtgtccggtgtccgacacgcgtccatgtcagtgtctgacatcgacacgacacccgtactacgttctatattttggacattacaggtgtccatgtgtctttgtccgtatcgtatccggtgtccgtgtcggtgtcgatgcttcatagcccataagatccatcacaccataagatcggaggaatacaaaccacaagaaaagggtgtctaattacatcctaaatctttgctcatacattatacaaatattaaactaatatatatatatatatattttatcaattgcttatttatttttggaagaattaaaagtgtgtttgaattaacattaaaaacacattaaatgaaaaaattacgcatttcatcgcaaaaatttcaagcaattatattataacttttatctgaaagtctgttgatattcaattcaacagcttgccaaacacacacttagttgatgatacaaagtatatatatcattagggtatactaatggaagatagatgtgcttgaaatgaatggagatccaatatatgcaccaaaataaatatattttctaatatataaaacaattttatttataatacaccaacacaatcaattcgtagtatctttgctcca

SEQ ID NO: 10938 - DNA, 1118 bp, Glycine max; identical to SEQ ID NO: 10937
  Gm_smallRNAprecursor_3771

SEQ ID NO: 10939 - DNA, 1117 bp, Glycine max
  Gm_smallRNAprecursor_3772
ctacaattttaaggggtcaacccaatttcgaagaaattttcgtttgtatatggttatttataggataatttttttattatataactcataaaaacagtcattgtacatattggatttctttatccaataacatatgatattataattataattatttggatttgggcagtatcaacctatatatgtattggacccaacaaagatctagatccaaaatatttttatgggtctgacttagatcacatccatcaaagttaggtgctccaaaatcttactaacctttttagagcacattattattacctaacacttttgaattttttggagagttaatgtgttaggaccaaattatgtcacatgtgacttacctgtatatgaattttataaacaaacaaaggaggtctcaaactattgaagcatcaactaatttgagtatcaatatatctttgcaagcatctcattcacccataagctatgaaacacggacaccccagtttcttgccgtgtccggtgtccgacacgcgtccatgtcagtgtctgacatcgacacgacacccgtactacgttctatattttggacattacaggtgtccatgtgtctttgtccgtatcgtatccggtgtccgtgtcggtgtcgatgcttcatagcccataagatccatcacaccataagatcggaggaatacaaaccacaagaaaagggtgtctaattacatcctaaatctttgctcatacattatacaaatattaaactaatatatatatatatatattttatcaattgcttatttatttttggaagaattaaaagtgtgtttgaattaacattaaaaacacattaaatgaaaaaattacgcatttcatcgcaaaaatttcaagcaattatattataacttttatctgaaagtctgttgatattcaattcaacagcttgccaaacacacacttagttgatgatacaaagtatatatatcattagggtatactaatggaagatagatgtgcttgaaatgaatggagatccaatatatgcaccaaaataaatatattttctaatatataaaacaattttatttataatacaccaacacaatcaattcgtagtatctttgctcca

SEQ ID NO: 10940 - DNA, 1132 bp, Glycine max
  Gm_smallRNAprecursor_3773
tacaagattggtgctgaccactttggttccgactttgcaatggctcaaaggaaaacccattctcctagtaagaaacttttatcatactattttttttatgtattagtgttataattcagaattctaagttatgctcttggttggtaattggtattgtagcatattggtggcgaatgtttgggtcacaaactccaaatttgcagaagctggctattaagattttgagtttgacttgcagtgcttcaggatgtgaaagaaattggagtgtgtttgagcaagtaattgtgacaaaactctaactatactttttaattttatttaattttgatgatcaagttatatttggagtatatttgagattgaaatcaacatttatttgttatgttgtagattcattccaaaaaaagaaataggcttgagcacaagaggttgcatgatttggtgtttgtcaaatacaaccaacaattgaagcaaagatataatgcaagagatgaaattgatccaatttctcttaatgatattgatgtatgcaatgaatggctcgtgggagagatggatcaagatgatgataatgatgctggaaatgatttggtatttgaagatgatgatgctctaaattgggcaactgtgtatcaggcttcgggggttggagagtgtaggatgtatactaggcggaaaaagcaaaaaacaagtgttgctgctgcccaaacttctaaaaaacaggcaatggttgttggatcttcatcaaggaagcaaaaagcagtccaagaaaatgatgaggatctagatgttcaggagaatattgatgttgaatctgaagaagaagaaatcatggtcaattttgaggcgtctgatggggaagagggagatggagatgctccattaccatatgataacaacgaagatgattatgttgggattggagaagatgattagagtctcaaccttcactttacactttgcattatgtttttatcattttcttattttgaactctttaatgagtttatttggtgttggtacttgattattgtatgaactcatgaaacttttttagtttatttgaatgcaatcctttgtttttttcaatttcaatgagtttatatatatgttttttttttgtgtccgccat

SEQ ID NO: 10941 - DNA, 1092 bp, Glycine max
  Gm_smallRNAprecursor_3774
agtttgacttgcagtgcttcaggatgtgaaagaaattggagtgtgtttgagcaagtaattgtgacaaaactctaactatactttttaattttatttaattttgatgatcaagttatatttggagtatatttgagattgaaatcaacatttatttgttatgttgtagattcattccaaaaaaagaaataggcttgagcacaagaggttgcatgatttggtgtttgtcaaatacaaccaacaattgaagcaaagatataatgcaagagatgaaattgatccaatttctcttaatgatattgatgtatgcaatgaatggctcgtgggagagatggatcaagatgatgataatgatgctggaaatgatttggtatttgaagatgatgatgctctaaattgggcaactgtgtatcaggcttcgggggttggagagtgtaggatgtatactaggcggaaaaagcaaaaaacaagtgttgctgctgcccaaacttctaaaaaacaggcaatggttgttggatcttcatcaaggaagcaaaaagcagtccaagaaaatgatgaggatctagatgttcaggagaatattgatgttgaatctgaagaagaagaaatcatggtcaattttgaggcgtctgatggggaagagggagatggagatgctccattaccatatgataacaacgaagatgattatgttgggattggagaagatgattagagtctcaaccttcactttacactttgcattatgtttttatcattttcttattttgaactctttaatgagtttatttggtgttggtacttgattattgtatgaactcatgaaacttttttagtttatttgaatgcaatcctttgtttttttcaatttcaatgagtttatatatatgttttttttttgtgtccgccatgacatccgccattttccgctacgccatccgccatatttttatggcggatttttgactttccgccatgaaccgtcatccgccattaacaacattgtcattaacttaattggactcaccaaagaacaacaaaaaaggcaaaaaaacactattctggaaaattcaatgcattttttcttaaaactag

SEQ ID NO: 10942 - DNA, 1092 bp, Glycine max; identical to SEQ ID NO: 10941
  Gm_smallRNAprecursor_3775

SEQ ID NO: 10943 - DNA, 1044 bp, Glycine max
  Gm_smallRNAprecursor_3776
taaatttatagggggccaaaatcggaaatggggggaaaaaggggggggcccaaaaattcaatttttccctcaaaaaaaaataaaacttttccggggaacccactcggacgttgcccgggggcattgcccccgtaccagtcaacttcgggggtttacggtaaaccttccaaattcaaactttttttacccattttggcaggggattttttaaaactggggagcccaaattttttgaattaaatttacaagggggccccaattccgaaaatagagataaaccgggaggacccaaaaggtaaaaatttttccctttcccatttttatttatgtttttctttgctattctattccccaaaatgtgcgaatttaaattataagagggaccaaaatcgaaattggagtaaaagtgagggaccaaaaatacaattttacctaaaaaaaatgaaacctttacagggaatcactcagacgttgacacgtggcattgacacgtgacagtcaacgtctgaggttaacggtcaacgtccaaatcaaacttctatgaccaattttgcagggatttataaaactgggagaccaaatttgtgaattaaattacaaggggaccaaatccaaaattagagataaacgggaggaccaaaaataaaattttacctttccatttttattatgttttcttgctatctattctcaaggtgatatttcaataaaaaaaaaatgtaagaccttactactattgtatagcatacatgttagttttatttttatttagatttattttgaatattaaaactattctaaaaaatattatcaaattttaactaaacatattttttaatatatccaaaaataataataaaagaaaaatatattcaggaataacattcatgattatattattcttatcaatgtgatttatgaaaggtaatattatttcgtgaaacaaatcgtcctttgaattttttaatggtcacgtgacaaacgtaatttttttaaaacgaaacataacttgaaactatctaacaaatgaaataggttaagatg

SEQ ID NO: 10944 - DNA, 1079 bp, Glycine max
  Gm_smallRNAprecursor_3777
gatagaagaatctagaactatcatgatattaatctatcatgaaaactctagaaagacctaaagtaatgtagaaacattcaccaccattgagaggttggtgacttgagcctataaataggcaattggtatgttgtaattgattatccaagaaatcaatgacataaccttctttctaaaacaattgtctaaaactatcaactatcatctaaccaactatcaacagtggcattagagttacgttcggtcatacattgggcgtagttatattacctacctaccattacaaaatcctcccaactacttcaaaattttcctttgtactattaacccactccaataatattttttctaagctatggataacactactcaatcgtcaactatttatgtccctatcttcaatggtgaaaattatgatttctggtgtgttaaaatggaaacatattttttatctcaagatttatgggacatagtagaagaaggtttcaccgttcccgcggatacttcagctcttaatgcatctcaagaaaaaatgctgaagaaaaaaaaacagaaaaatttaaaggcgttgttcaccttgcaacaagcggtgactgatccaattttcccaagaattatgggagctaagactgccaaagaagcgtggaacacattgcaggaggagtttcaaggaagtgttaaggtacgtgccgttaaacttcaatctctaagaagagattttgaactattgaagatgaaggagtttgagacagttaaagattactattctaaagttaaagaaatagttaatcaaatgagaacttttgaggaagatattcttgacaagaaaattgttgagaaaattctaattgttatgccccaaaagtttgacccaatcgtgacaacgattgaggaaaccaaagatctgtccactttatcagagacaaaacttgtgggctctcttgaagcatatgagcaaagactgtataggcataaagaagatacacttgaaaatgtcttccagtcaaattttaaatttcagccccaaaacaaagaaaatggaggaaagaaaaattatggaaaaacttccagaagaagag

SEQ ID NO: 10945 - DNA, 1040 bp, Glycine max
  Gm_smallRNAprecursor_3778
agttgagaatgttggaatcaacaaagtgctcattgatggaggagcggctgtcaacttaatgcctcgatctatgctctacaagatcgggaaacatgacactgatctatctgcccacaacattgtgctttcgaattatgagggtaaaactggctattctttgggagccattcaagtagatgttgctgtaggtagtatagttcgaccaactcttttcctggtgatacagtctaaggctaattttaacttactattaggaagggagtggattcatggagttggagctgtgccatctacccttcaccagaagctcattatctggagggaggatgggattgtggaaaatatagaggcggatcaaagcttctataagtcagaggtcgataatgttactgcacaaacctttgacaaaaagttggctaacatagcgccttgtggtgacaaggaggctgttgtcgaatcgagtgacaatgttgtccactctgtcaaactccatcctacctatgggtttatatgggagagggaggaaattaatgctgttccctctgaagatggagtcattccaccaactgggtggaatatatatgaagattaatatgactgaggccactgcatgggccagaattacggcttatatggccgaaaatagactaaatacggcctttgaggctgaatttcaacaaaatatggcagttgaagccaagatcgaagatcttgaaaacaaagaaacaaaggatcgaagactggattgtatttatgatgatgagccgctgggttttgagaaaaatcccataagtgagacgccaaagatgcaggctcaagatcctttggaagaggtcgatattggagatggctcgattaaaaggccaacttatatcagtgccaatatcacctcaagtttaaaagaaaagctggtgcctcttcttagagagtttaaagactgttttgcttgggattaccacgaaatgcctgggttaagcagaaaaatggtcgaaatgaagttacctattaaggagggaaaaagaccagtaaaacaactacca

SEQ ID NO: 10946 - DNA, 1157 bp, Glycine max
  Gm_smallRNAprecursor_3779
aagaccagtaaaacaactaccaagaagattcgcaccagaaatcatgtccaagatcaaggaagagatcgaaaggctgctgaggtgtaaattcatcagggctgccaggtatgtcgaatggttagcaaatatagtccctgtcattaaaaagaatggaactcttagagtatgcatagattttagggatttaaataatgctacacctaaagatgaatatgctatgccagtagcggaaatgttggtagattcggcagctggtttcgaatttttaagcatgttagatggttattctggttataaccaaatatttattgctgaaaatgatgtgtcgaaaacagcatttcgatgccctggtgctttaggcacttatgaatgggtggttatgccctttgggttgaaaaatgctggggccacttatcaaagggctatgaattccatgtttcatgattttattgacacatttatgcaaatttatattgatgatataatcatcaaatcctcctcagaagatagccatttggattatcttaggcaatctttcgaacgaatgaggaaacatggattaaaaatgaatccattaaaatgtgctttttgtgtgcgtgcaggagatttccttggttttgtggtacataaaaaaggcattgagataaatcaaaataagacaaaggctattcttgagacgaagcctccttcgactaaaaaacagcttcagtctttgctaggaaaaatcaacttcttgaggcgattcatttcgaatctaagtggcaaagctcagattttttcgccattacttcgactcaagaaagatgaactattcaaatggaatgaagagcatcaaaaggctttcgatgaaattaaagaatatctgatcaagcctcctgtgttaatgcctcctagtcgaaacaagtctatgaagttgtatattgctgcgtctgacaagaccattggtagcatgttggctcaggaagatgatgatagcatagaacatgcaatttattatcttagtcgtgtactaaatgatgcagaaactagatatactgccatagaaaaactttgtctttgtctgtatttctcttgtgcaaaacttaagcaatatataaagcctgttgatgtttatgtgtattctcattatgatgttattaagcacatgttgtcaaaac

SEQ ID NO: 10947 - DNA, 1114 bp, Glycine max
  Gm_smallRNAprecursor_3780
aatctaagtggcaaagctcagattttttcgccattacttcgactcaagaaagatgaactattcaaatggaatgaagagcatcaaaaggctttcgatgaaattaaagaatatctgatcaagcctcctgtgttaatgcctcctagtcgaaacaagtctatgaagttgtatattgctgcgtctgacaagaccattggtagcatgttggctcaggaagatgatgatagcatagaacatgcaatttattatcttagtcgtgtactaaatgatgcagaaactagatatactgccatagaaaaactttgtctttgtctgtatttctcttgtgcaaaacttaagcaatatataaagcctgttgatgtttatgtgtattctcattatgatgttattaagcacatgttgtcaaaaccgattttacacagtagaattggaaaatgggctttagcattaacagaatattctttaacgtacaagcctttgaaatctgttaagggtcaaattgtggcagattttattgtagatcactcagtggtcgaaatgtcgcaagactatgtcgatacagagccatggattttgtatttcgatggttcgaaacacaaacatggaactggaattggagttttaataatatcccccaataaaattccaactaaattcaagtataaaatcaaagggctttgttctaataatgaggctgagtatgaagctctaattacaggccttgaaattttaattagcctgggggcaagaaatgttaatataagaggtgattcagaattagtgttgaggcaattaacacaagaatacaaatgtgttaatgaacacttagcaaaatattttgttatagcaagttctcttctgaatcattttgattatattaacattgagcatgtacctcgacaagaaaaccgagaagcaaatgatttagcccaaatagcttcagggtacaaaatgtcgaaggaaaagttaactcagttgatcgaaataaaaaataaactggtgttaccagagccattaagcactaaattgccaatgccaaaacttgtgggggcaagtataccacaaaataatgaagatgaaagtatgaatgatcttcaggaaaaaattcaaattttgg

SEQ ID NO: 10948 - DNA, 1110 bp, Glycine max
  Gm_smallRNAprecursor_3781
tattgtagatcactcagtggtcgaaatgtcgcaagactatgtcgatacagagccatggattttgtatttcgatggttcgaaacacaaacatggaactggaattggagttttaataatatcccccaataaaattccaactaaattcaagtataaaatcaaagggctttgttctaataatgaggctgagtatgaagctctaattacaggccttgaaattttaattagcctgggggcaagaaatgttaatataagaggtgattcagaattagtgttgaggcaattaacacaagaatacaaatgtgttaatgaacacttagcaaaatattttgttatagcaagttctcttctgaatcattttgattatattaacattgagcatgtacctcgacaagaaaaccgagaagcaaatgatttagcccaaatagcttcagggtacaaaatgtcgaaggaaaagttaactcagttgatcgaaataaaaaataaactggtgttaccagagccattaagcactaaattgccaatgccaaaacttgtgggggcaagtataccacaaaataatgaagatgaaagtatgaatgatcttcaggaaaaaattcaaattttggccattgacaatatgttagataatgattggagaaagtccattattgaatatttggaaaatccaataggcaatgtggctcgaaagattaaatatagggctttaaattacatgattatgggaaatgatttgtttaaaaagactgcagaaggagtgttgttaaaatgtctaaatgaatcagaagcatacttagcagtttcccatgttcacagtggggcttgtggatcacaccaagcaggccataaaatgaaatggcttttatttcgacaaggtttgtattggccttcgatgttaaaagactgcatagaatttgctaaaggctgtcaggaatgccaaaagcatgcagggatacagcatgtacctgctagtgagttacactccataatcaaaccttggcctttcagaggatgggctttggatttaattggcgaaatcaagcctgcttcttctaggaaccagcgttatattatagttggtatcgattactttacaaaatggatcgaagcagt

SEQ ID NO: 10949 - DNA, 1082 bp, Glycine max
  Gm_smallRNAprecursor_3782
cagtggtcgaaatgtcgcaagactatgtcgatacagagccatggattttgtatttcgatggttcgaaacacaaacatggaactggaattggagttttaataatatcccccaataaaattccaactaaattcaagtataaaatcaaagggctttgttctaataatgaggctgagtatgaagctctaattacaggccttgaaattttaattagcctgggggcaagaaatgttaatataagaggtgattcagaattagtgttgaggcaattaacacaagaatacaaatgtgttaatgaacacttagcaaaatattttgttatagcaagttctcttctgaatcattttgattatattaacattgagcatgtacctcgacaagaaaaccgagaagcaaatgatttagcccaaatagcttcagggtacaaaatgtcgaaggaaaagttaactcagttgatcgaaataaaaaataaactggtgttaccagagccattaagcactaaattgccaatgccaaaacttgtgggggcaagtataccacaaaataatgaagatgaaagtatgaatgatcttcaggaaaaaattcaaattttggccattgacaatatgttagataatgattggagaaagtccattattgaatatttggaaaatccaataggcaatgtggctcgaaagattaaatatagggctttaaattacatgattatgggaaatgatttgtttaaaaagactgcagaaggagtgttgttaaaatgtctaaatgaatcagaagcatacttagcagtttcccatgttcacagtggggcttgtggatcacaccaagcaggccataaaatgaaatggcttttatttcgacaaggtttgtattggccttcgatgttaaaagactgcatagaatttgctaaaggctgtcaggaatgccaaaagcatgcagggatacagcatgtacctgctagtgagttacactccataatcaaaccttggcctttcagaggatgggctttggatttaattggcgaaatcaagcctgcttcttctaggaaccagcgttatattatagttggtatcgattactttacaaaa

SEQ ID NO: 10950 - DNA, 1086 bp, Glycine max
  Gm_smallRNAprecursor_3783
gcttctgaatcgaatcagcagccttctcctggagttctttgcgtttggcctgctctgttacaattttctgccttagatcatcgacctgagacagcaaatttgtaatagttgcctcccaggaggagatattatcatcacaggctttgatctcagaagatccttctttcgcctctttggtgagacgctcgacttcacgttgagccgctcgggctttctcgagcagaaggatatgtgcctgtttctgggcatcgagtctggcgccattttcgcgttttttctgcacagtatttgcaaattgatcgataatggactcgatttgtataactttacccagaatctcatcagaagtaagggggttatgcaatttcttcaaaaagttcaggtgcccaaaagcagcagaagggttctcttcaatggatttaagtacgtctgcccgtgcgtattccattgataacttcaaaagcaggcaatcttggcgtactgtagaggttatatcagcatcagatgaggacgaagcaccaggattcttttcacttgaggtgttggcttgactggtgttcagcaggagtcgaagggctgcagcagggtcttcgtcttgcatttgaatgaaggtatcctctgcgatccctatgctagcggaaagcttagatgtcgaagacgctgggaaaatgtctgaacctccagcttcagcctcttgtatggcctcttcatcggaaaagtgttcttcagatgaacttctttgactcgacccctgaggactgctgggtccaataccttgaccttcaccctgttcctcaacattcactgcatccgtctcaggagcaggagaggttcgagcacatgagggtatttcttctatagaaacattttgttgtacctgattcgagttgtcatggaaaaggttaacaaatagtttcgtattagctatgattaaaatcatattaagaatgatacctcgacggtagggtgttcttgtggtaagtccggttgttcgacaaggttgcccatctcagcaatagagggagtagtttctgtttcagcgccgccagcatcagtcgaaggtggttggacgtcaacaggttgatt

SEQ ID NO: 10951 - DNA, 1046 bp, Glycine max
  Gm_smallRNAprecursor_3784
atctctgtagctgtcaacaccaatgggcgaggtctgcataaccattctcttttcctctttttttttttcttcaattaccatcaatgtatcattctgggttctgattttttgtgtgttttgaataggaagagaaaaaaccagaggaaaacaaagtggaggagaaaaaagcaaatgaagaagaaaagaaagaagaagagaaaaaaccaaaggaatcaaaagacgacaaggaatccaaggaggaatctgcgcagtcagaaatcgtgctaggcacaacctttgcaatgcatggacactttaagcatgatttctagcatcttttaagttagggactattttgcaatacttatgcaaaagatagggactattttgaatttttcattaagttagggactaatatgtaacagaggtacaaagtcagggactaaattacctatttactcattttattatcatcaaatgacgtggcatcaggcatgtccacgtgtcatgtcacgtcatcctttagtgccacgtggatagtccacgtggcactaaaattgacatcactaacggcgttactttaaaatttaacggaaggactattttgcaacacttatgcaaagatatggactattttgaatttaatattaagttagggactaatatacaaaatgggtacaatctcagggactaaattgcctattcactcatcattttagagaaattattggatggtacttaaacatcaattgttcatgatataaagtcattttataaagtctatatataacaggtattcaattttcacaatttataaaaaagaaataataatacttaagtatcatctaaagattaaccgataatctatttttttatattttatcataaattattatgtataataaagttattgtcttataaagattaactaggatgatggtagtctaaaacaatctaataattatcttaaaaatcattcatgattaatagtgtaaaaaagtttacattagtgttatcaatatactctcatcatcatgtataaaaaactatactttcatgataagttt

SEQ ID NO: 10952 - DNA, 1035 bp, Glycine max
  Gm_smallRNAprecursor_3785
tcttccttattttttccacaaagaagttgagccaagactttaagaactaatggattgcctttggcataattgaccaccctttttgatagttcatcgtactcccattgatgatcactttgcttaaaggcattcaaattgaaaagttcaagggctttatctaaactgaactctccaagctggtttgtctcgttagctttgttagcgttaagcacttgcacgtatctggttgttacaattattctactacctaatccaaacttataaggagttctcagtaatttttgtaggtgatctgaatcattaacatcatcgagaacaataagaactttcatactaccaattcttctatcaacatcaataggaaatgcatttggattgtctattttcacaacattttctaaaagtctagaaaaaatttctttctgcaaagaatctattccatgtttacttgatttttctctttcattggtgttagcccatatttttgatgagctaaaatatgctctaaatacgcattagatgtcgtcttgaatttcgaagcgtattaaagagcaagagtcttgtcagatcctgttcgaatcgaaaagaaagaagagtttattgaaagggattcacgggatcaaagaagtatttatgaagtataaggctaagacaagaaagagggcttcgaaccattgggcgattcgaactggtgtatggtcgagtcgaagtcaaggcagcaagatttctggacttagcacaatttctgacaaaacttcacaaaatcagttcgacttcgagcaatgtggataaccgttctaaagagcagttatatgcatgcaaggtgtacgtagcaagacacttggcattaggataatgttcgaccgttaggacagtttattttcgaatgtctatatatagcagtttttagtcagatttcggggtcgcaaatcatttctacaaaatccttatatactcaaagtacccagcgcagagagaaacgagtacgcaaggaaaatgtatgattgtgaaccattttaagtttctgtaaacttt

SEQ ID NO: 10953 - DNA, 1109 bp, Glycine max
  Gm_smallRNAprecursor_3786
ataaaccaaccaaacaaacacaatccattcaacacaacaatgtcattctcgagaaggttaagctcttctctctctccttccattcccaaatttcctccttttcttccaaatcccactttccttccttgctttcattctcagccttcatccattgataatattgttgttgatgctgtttgtcagttcaatagcatgctccttgtgcgtgataccccacccatcatggaatttaacaagattgtgggatctcttgtaaagatgaagcactatcccactgccatttctctttttaaacaaatgcaagtcaaaggaatcgagccagatctttttactttgaacatcctcatcaattgtttctgccacttgggccaaatgaccttttcttttactgtattgggcaaaattctaaaattaggttatcagccgaataccataaccttgaatacactcatgaaaggtctgtgtctcaagggtgaggtcaagaaatcactgcactttcatgacaaggtcgtagcacaaggatttcagatggaccaggttagttacgcaaccctgctcaatggactatgtaaaataggagaaacgagaagtgccctcaagttgctgagaatgattgaagacagatcaactaggcctaatgtggtaatgtacaacaccatcattgatggcttatgcaaagataaacttgtaaacgaggcatatgatttatattctgaaatggatgccagaggaatttttcctaatgttatcacttacagtactctaatctatggcttttgccttgcgggtcagttaatggaagcatttggtttattaaatgaaatgatattgaagaacatcaacccgaatgtctatacctatactatattgatggatgcattatgtaaagaaggaaaggtgaaagaagccaaaaatttattagctgtgatgacgaaagaaggagtaaaacctaatgttgtttcttataatactttaatggatgggtattgtttaattggtgaagtgcagaatgcaaaacaaatgtttcacactatggtccaaaagggagtaaatcctaatgtttacagctacaatataatgattgatagattatgtaagagtaaaagggt

SEQ ID NO: 10954 - DNA, 1109 bp, Glycine max
  Gm_smallRNAprecursor_3787
aacaaacacaatccattcaacacaacaatgtcattctcattctcattgtcaagaaggttaagctcttctccctctcttcccattcccaactttcctccttttcttccaaaccccactttccctctttgctttcactctcagcctccatccattgacaatgttgttgatgatactgtttcccagttcagtggcatgctccttgttcgtcataccccacccatcatcgaatttaacaagattttaggatcccttgcaaagatgaagcagtatcttactgccatttccctttctaaacaaatggaagtcaaaggaatcagggcaaattttgttactttgaacatcctcatcaattgtttctgccacttgggccaaatggccttttctttttctgtattgggcaaaattctaaaattaggttatcagccggataccataaccttgaatacactcatgaaaggtctgtgtctcaagggtgaggtcaagaaatcactgcactttcatgacaaggtcgtagcacaaggatttcagatggaccatgttagttacgggaccctgctcaatggactatgtaaaataggagaaacgagatgtgccgtcaagttgctgagaatgattgaagacagatcaactaggcctaatgtggtaatgtacaacaccatcattgatggcttatgcaaagataaacttgtaaacgaggcttatgatttatattctgaaatggatgctaggggaatttttcctgatgctatcacttacactactctaatatatggtttttgccttttgggtcagttaatgggagcattcagtttattagatgaaatgatattgaagaacatcaacccgggtgtttatatctataatatattgattaatgcattatgtaaagaaggaaatgtgaaagaagccaaaaatttattagctgtgatgacgaaagaaggaataaaacctggtgttgttacttatagtactttaatggatgggtattgtttagttggtgaagtgcagaatgcaaaacagatattccacgctatggtgcaaatgggagtaaatcctaatgtgtacagctacaatataatgattaatggattatgtaagtgtaaaagggt

SEQ ID NO: 10955 - DNA, 1186 bp, Glycine max
  Gm_smallRNAprecursor_3788
aacaaacacaatccattcaacacaacaatgtcattctcattctcattgtcaagaaggttaagctcttctccctctcttcccattcccaactttcctccttttcttccaaaccccactttccctctttgctttcactctcagcctccatccattgacaatgttgttgatgatactgtttcccagttcagtggcatgctccttgttcgtcataccccacccatcatcgaatttaacaagattttaggatcccttgcaaagatgaagcagtatcttactgccatttccctttctaaacaaatggaagtcaaaggaatcagggcaaattttgttactttgaacatcctcatcaattgtttctgccacttgggccaaatggccttttctttttctgtattgggcaaaattctaaaattaggttatcagccggataccataaccttgaatacactcatgaaaggtctgtgtctcaagggtgaggtcaagaaatcactgcactttcatgacaaggtcgtagcacaaggatttcagatggaccatgttagttacgggaccctgctcaatggactatgtaaaataggagaaacgagatgtgccgtcaagttgctgagaatgattgaagacagatcaactaggcctaatgtggtaatgtacaacaccatcattgatggcttatgcaaagataaacttgtaaacgaggcttatgatttatattctgaaatggatgctaggggaatttttcctgatgctatcacttacactactctaatatatggtttttgccttttgggtcagttaatgggagcattcagtttattagatgaaatgatattgaagaacatcaacccgggtgtttatatctataatatattgattaatgcattatgtaaagaaggaaatgtgaaagaagccaaaaatttattagctgtgatgacgaaagaaggaataaaacctggtgttgttacttatagtactttaatggatgggtattgtttagttggtgaagtgcagaatgcaaaacagatattccacgctatggtgcaaatgggagtaaatcctaatgtgtacagctacaatataatgattaatggattatgtaagtgtaaaagggtggatgaggccatgaatctcctaagagaaatgctgcataaaaatatggttcctgatacagtgacgtacaattctctta

SEQ ID NO: 10956 - DNA, 1080 bp, Glycine max
  Gm_smallRNAprecursor_3789
caagcaaactgtgattcagcgatttcagccttcgatgaaccaaagcccctatgagctactactcagtctgaaacacgaaggaatagtagaagaatatcgcgaaaagttcgaattatatgcaggtctcctgagaggaacagaacctgagtacttgaaagggatattcctgaatgggttgaaagaggtggtcagggcagagctgaagttgcatccagtaaactctctccctgaactgatggactatgcgcaacgaatagatgagaaaaattcactaatagaaaaaggtaactctgaaagaaacaaagggggttcaactagaagttacagttcctcaagaactataacatgggatccaggaaacaaaggcaccacggaaaaaacaagagagacgagctcgagctcaaagtcaaatagtgtgaagtccactcaatgttgttaatggcggatggcggttcatggcggaaagtcaaaaatccgccataaaaatatggcggatggcatagcggaaaatggcggatgtcatggcggacacaaaaaaaaaaaaaaacatatatataaactcattgaaattgaaaaaaacaaaggattgcattcaaataaactaaaaaagtttcatgagttcatacaataatcaagtaccaacaccaaataaactcattaaagagttcaaaataagaaaatgataaaaacataatgcaaagtgcaaagtgaaggttgaggctctaatcatcttctccaatcccaacataatcatcttcgttgttatcatatggtaatggagcatctccctctccctcttccccatcagacgcctcaaaattgaccatgatttcttcttcttcagattcaacatcaatattctcctcaacatctagatcctcatcattttcttggattgctttttgcttccttgatgaagatccaacaaccattgcctgttttttagaagtttgggcagcagcaacacttgttttttgctttttccgcctagtatacatcctacactctccaacccccgaagcctgatacacagttgcccaatttagagcatcatcatcttcaaataccaaatcatttcca

SEQ ID NO: 10957 - DNA, 1131 bp, Glycine max
  Gm_smallRNAprecursor_3790
aatggcggatgtcatggcggacacaaaaaaaaaaaaaaacatatatataaactcattgaaattgaaaaaaacaaaggattgcattcaaataaactaaaaaagtttcatgagttcatacaataatcaagtaccaacaccaaataaactcattaaagagttcaaaataagaaaatgataaaaacataatgcaaagtgcaaagtgaaggttgaggctctaatcatcttctccaatcccaacataatcatcttcgttgttatcatatggtaatggagcatctccctctccctcttccccatcagacgcctcaaaattgaccatgatttcttcttcttcagattcaacatcaatattctcctcaacatctagatcctcatcattttcttggattgctttttgcttccttgatgaagatccaacaaccattgcctgttttttagaagtttgggcagcagcaacacttgttttttgctttttccgcctagtatacatcctacactctccaacccccgaagcctgatacacagttgcccaatttagagcatcatcatcttcaaataccaaatcatttccagcatcattatcatcatcttgatccatctctcccacgagccattcattgcatacatcaatatcattaagagaaattggatcaatttcatcttttgcattatatctttgcttcaattgttggttgtatttgacaaacaccaaatcatgcaacctcttgtgctcaagcctatttctttttttggaatgaatctacaacataacaaataaatgttgatttcaatctcaaatatactccaaatataacttgatcatcaaaattaaataaaattaaaaagtatagttagagttttgtcacaattacttgctcaaacacactccaatttctttcacatcctgaagcactgcaagtcaaactcaaaatcttaatagccagcttctgcaaatttggagtttgtgacccaaacattcgccaccaatatgctgcaataccaattaccaaccaagagcataacttagaattctgaattctaacactaatacataaaaaaaatagtatgataaaagtttcttactaggagaatgggttttcctttgagccattgcaaagtcggaaccaaagt

SEQ ID NO: 10958 - DNA, 1158 bp, Glycine max
  Gm_smallRNAprecursor_3791
attgatttgtgaatttattgtattatatattattttgtagtagcaatgacatcttcatcatcatcttcatcacatattaacattaagtctggccccatcgatgctgatgtattatggatgcaacctaagcatgtttcagaacatgtttggaatggggaagaagatcggaaattacatatcagacgagttgtccccacgtatcaagggaaagaacaaattcccaagcaaatttttccttttcttctacaatctagtttcgcctggattatcaagatgggatacttaaaaataaaggcctcattaattagtgctctgatagaaagatggaggccggaaacacatacgtttcacatgagatgcggagaatatactattactctccaagacgtctctgtattgttaggtataagtgtggatggtttaccattaatcggtccaacaaatcttgattgggctgatttatatgaggaattattgggagtgagaccacaagaagatgaaattaaaggtagtgtggttaaattaagttggctggctcaccattttgcgcaaataaataacgacgacgacgaagaacaagtacgaaggtttgccagtgcatggatactgagattcattggaggtgtcttgttcgttgacaaaagcagtaacaaagtttcgctaaggtaccttcaatttttacgtgactttgaagaatgtggcagatatgcatggggagctgccgtacttggttttctatatagagagatgtgcaatgccaccggttataaaactaaatcaatcagaggtatgtgcatcttactacaaatgtgggcatgggaacaatgtccaaccttggctccaaagagaactccttcccaagtagaaaatacaccactggggcacaggttagtcatttttaacagcgtctttcatttcaatagaataaatggttttagcatatattaaattttaatctttgtaggtggctgcgacgtggaaaccaacatatcggcaatgatgatgtgagagtttttcgtcgcaagttggatattatgaaacgtcatgaggtaagaacatgctattgtatttgtaaaataaaaaattatatgtgttattttactaaaatattcacaactatgttgttatatgcagtttgtgtgggagtcgtacccatca

SEQ ID NO: 10959 - DNA, 1155 bp, Glycine max
  Gm_smallRNAprecursor_3792
tgatttgtgaatttattgtattatatattattttgtagtagcaatgacatcttcatcatcatcttcatcacatattaacattaagtctggccccatcgatgctgatgtattatggatgcaacctaagcatgtttcagaacatgtttggaatggggaagaagatcggaaattacatatcagacgagttgtccccacgtatcaagggaaagaacaaattcccaagcaaatttttccttttcttctacaatctagtttcgcctggattatcaagatgggatacttaaaaataaaggcctcattaattagtgctctgatagaaagatggaggccggaaacacatacgtttcacatgagatgcggagaatatactattactctccaagacgtctctgtattgttaggtataagtgtggatggtttaccattaatcggtccaacaaatcttgattgggctgatttatatgaggaattattgggagtgagaccacaagaagatgaaattaaaggtagtgtggttaaattaagttggctggctcaccattttgcgcaaataaataacgacgacgacgaagaacaagtacgaaggtttgccagtgcatggatactgagattcattggaggtgtcttgttcgttgacaaaagcagtaacaaagtttcgctaaggtaccttcaatttttacgtgactttgaagaatgtggcagatatgcatggggagctgccgtacttggttttctatatagagagatgtgcaatgccaccggttataaaactaaatcaatcagaggtatgtgcatcttactacaaatgtgggcatgggaacaatgtccaaccttggctccaaagagaactccttcccaagtagaaaatacaccactggggcacaggttagtcatttttaacagcgtctttcatttcaatagaataaatggttttagcatatattaaattttaatctttgtaggtggctgcgacgtggaaaccaacatatcggcaatgatgatgtgagagtttttcgtcgcaagttggatattatgaaacgtcatgaggtaagaacatgctattgtatttgtaaaataaaaaattatatgtgttattttactaaaatattcacaactatgttgttatatgcagtttgtgtgggagtcgtacccatc

SEQ ID NO: 10960 - DNA, 1036 bp, Glycine max
  Gm_smallRNAprecursor_3793
agaccacaagaagatgaaattaaaggtagtgtggttaaattaagttggctggctcaccattttgcgcaaataaataacgacgacgacgaagaacaagtacgaaggtttgccagtgcatggatactgagattcattggaggtgtcttgttcgttgacaaaagcagtaacaaagtttcgctaaggtaccttcaatttttacgtgactttgaagaatgtggcagatatgcatggggagctgccgtacttggttttctatatagagagatgtgcaatgccaccggttataaaactaaatcaatcagaggtatgtgcatcttactacaaatgtgggcatgggaacaatgtccaaccttggctccaaagagaactccttcccaagtagaaaatacaccactggggcacaggttagtcatttttaacagcgtctttcatttcaatagaataaatggttttagcatatattaaattttaatctttgtaggtggctgcgacgtggaaaccaacatatcggcaatgatgatgtgagagtttttcgtcgcaagttggatattatgaaacgtcatgaggtaagaacatgctattgtatttgtaaaataaaaaattatatgtgttattttactaaaatattcacaactatgttgttatatgcagtttgtgtgggagtcgtacccatcaaccgttatatcattgttgcctcccatttgtttagtcagaagtctcgcgtggtacacggtggtgccactaatttgtttccaagttattgagtggcaccaaccggatagaatattgagataatttggtatgcaacaaccaattccagagtctccttcacaacccttaaacattcatggcataacattaaaagggaaacatgacgaaaattgggggcaattgttcgccccaatgattcatcagtggaaaaatcgcgatgcatttagggtcgacgcttatcccgacaagaagacctattgagctttaactcggactacatggtctggtataggcgaaagacaaagatgtttgttgacccacaaaa

SEQ ID NO: 10961 - DNA, 1056 bp, Glycine max
  Gm_smallRNAprecursor_3794
aggtcttgataaatcccgccacttcgttttcatcgcaagtttttcactcacttggaatctagagaaaaatcattctttgtctctctctcacttccgaggttgttcaacttgagaaagtggcgcatgaatcccaacgtgagcctaaaattttcagatctcttactttaataggttctgtaataaccccctatttttttttttctttttttgctccccatgaggtattatgtgtatacgactgtttaaaatatcacttctcccgtaatgaaatttgggataccagtgcctatgtatgacaatggtatttttgtttgaaatttaagataccacttctcccgtaatgaaatttggctgaatttataaagggatttataaaattggagggccaaatgtgcgaattaaattataagggaaccaaaattgagattggagtaaaactaggagaccaaaagtataattttacctacaaagaataaagcctttacagggaatcactcagacgttgacatgtggcattgacatgtgacaatcacacgtgacattgacaaatgacagtcaacgtctgaggttaacggtcaggtccaaatcggacttctagaaccaattttgtagggatttataaaactggggatcaaatttgtgaattaaattagagaagatcaaatccaaaattggagataaaatggataactaaaaatacaattttgccaaatttttaatatattatactatttgattttcagttactagtttttttactctgttcctttttatgtgttgttttaggttgttgtatcaataaaaaaagttattctattaaaatagttacgaaattttttattttatctatttttcttctcattcaatgataaatgtatatgaaaaataaataatgatataattgataaaaaaaaataattaatatgatcctaacatttgtaaatgataaaataaataatttttttttcaaaaatccaacgattaaaaagaaacaaagagaatagtaagtgaattaatgataatgagattaaggttatatttggaaaaaaaataggt

SEQ ID NO: 10962 - DNA, 1037 bp, Glycine max
  Gm_smallRNAprecursor_3795
gtgaaaaaataaatattaattggttagaaagaaaatctttttttctatttaatattttatttatttcaattattttactctgattatatgtttatttttttcaattattttgttcactataatcaaaacttgctaattaactatgttttatcaacaggcagctgtgtctccagcaaaatctctagaaagcccggatgaagaggtcgacgatcccctgtacctgatgacattgaccatcccacaactgtttttgaagccgctccaggttatgtgggatgctaccatattcggggtgtttaatcaaaacttcccgttgtatataaagcacgaagatctccctgaaattgcacacggtggtcaatgtctcagcatatctgttatacagttgtggattctgtaagtcattttagattactattaattaccaaagtaattgttttaaattcatacataattaactttgacttaacaacacagccatctgaccgagacaagtgtgcgagcggggaattctgatgtgtatggattcctcgagccacagtccattcagagatctgggcaatcacaatttgaatctgaaagttacatcaagagttggatacagagttcaaaacgagatgtttaccttggagcctatttgaatgggtaagttaaacacaataattgaatttaaataatctatactactacaataacccatattcgtctctactgcagcggacactggcaaatggtcatcattctgcctaaggaaaacctagttgtctggttttgttttttacataacaggccagacaactaccttaagggaataattaacaggtcagtattgttttcaatacattttcattggcataactcaacaacattaatattttaatgttcctcatattcaacactagtgctttgaaaggacttgatgatactccacaaccgaaatccaaggctgctgctaggtggattgttgttaaggtacgtgatttaaataaaagttctacttatatatattttatgtgtgtgtacactaattgtagtta

SEQ ID NO: 10963 - DNA, 1213 bp, Glycine max
  Gm_smallRNAprecursor_3796
ctttgtttataacttttggtgcataactgattttatgcgtttttatacaactttgaacgataagttgtggtatgaattaattactacaagttgttaattaaaaaataaatacgatatttaaaaataaatcataaaacaacatcgatttttctgaataactgatgttgttttcttcttactaacatcgatttttaggaaaattgatattgttgtttatgacaacatcgattttttttaaatcgatatttttttgctacaataacatcaatttttaaataaccaatgttaatgttagtaatttcaatatcgattaataaccgatgttagaagtttttaataaccgatgttacaagtttttaataactgatgttaaaaatctattttatagtattacaaccaattgaaccttgaaatctttaataatatcatgaaaaaaaaaatgctgtcaagtgaaatatattaaattttatagtgcagccaagacatccgaaaggtccccttaaaaaccggttcataagggggtggtctacccaactatataagcacttatcatgttcatgaattacccgatgtgagactattcttaacacaccccctcgagccagggttcgtcaccacaaagcgagggctggcggcacccaccggacagaaacagaatatggctctgataccatattaaattttatagtgcagccaaggcatccgaaaggtccccttaaaaaccggttcataagggagtggtctacccagttatataagcacttatcatgttcatgaattacccgatgtggaactattcttaacaaaatatagaaaggatacatcacgcgaatcatatatatgattaattagattcgtgtgcgactgaaagtttaaaataaacaggtataagtgggtgcaagcaaggtgacaagtgccacaaacgtagtaggaagaaattaagaatacgaagaagagatgcatggtttgaacaatttatcaataattaggataatgacagaataataatttaataattcttttttatagtttgtatagagtaagattcttttcctaattcattggtccagctctagttatctttgctggtgatcgattttcttttggtcagatgccctctcgggttgtgaggtgtagagacaaaacctggtggtgtatttgattttccagcacttcttgtgtgctttataatgaaattattgttgataaaaaa

SEQ ID NO: 10964 - DNA, 1126 bp, Glycine max
  Gm_smallRNAprecursor_3797
aggattaacacaaactttcttctggtaaaaaaccttaggaatgaagtaatcttaggaacacccttcattagagccctgtttcccatccaaatatctaatgaaggaataaccacaaattatttaggaagaaagattatatttaatttttctactaaaccaatttccagaaatataaattttatagaaaataagattaatcaaattaacttcttaaaagaagaagtatcttttaataatattcagatacaactagaaaaaccctaagtaaaagagaaaattcaatctttattaaatcatattgaatcaactgtctgttctgagttgccacatgcattttgggacagaaagaaacatattgttgatctcccctatgagaaagactttagggaaaaacaaattcccacaaaagctagaccaatccaaatgaatgaagaacttcttcaatactgtcaaaaggaaatcaaggatttgcttgataaaggcctaatccggaaaagcaaaagcccatggtcttgtgcggctttttatgtcaacaaacaatctgagattgagcgtggaacaccccgcttagtcataaattacaaaccactaaatcaagcattacaatggattagatatcctattccaaacaaaaaagatttgcttaatagattaaattctgcaaagatattttcaaaatttgatatgaaatctggattttggcaaatccaaatccaagaatcagataggtacaaaacagcgtttactgtacctttcgggcaatatgaatggaatgtaatgccattcggactgaagaatgccccttcagaatttcaaaaaattatgaatgatatttttaatccctattcaaaatttgtcattgtctacataaatgatgttttaatcttttcccaaaacattgaccagcatttcaaacatctccaaaccttcatccatatcatcaaacaaaatggtttggcagtctccaaatcaaaaatcaatcttttccaaacacgaattcgattccttggtcacaatatttatcaaggtacaatcgttccaatcgaaaggtcaattgagtttgctagcaaattccccaaccaaatcttagacaaaacccagttacaaagatttctaggttgtctaa

SEQ ID NO: 10965 - DNA, 1150 bp, Glycine max
  Gm_smallRNAprecursor_3798
aaccttgcctcaaaacaaatttttgcaagatggcaagcaattttaagtgtctttgattttaatatagaatatatcaagggctcttccaactctctacctgactacctcacccgtgaatttttacagaaaattcccgatgcctcttaaggtgtctagttcctccggcagaggaggaagatccagtacaaaaggtaaagaagttctactggctctaccagagccaataaacaaaagggcaactacaacatcttctgggtcacctacccagactgggtcatcaacctagaaaggaaaacttgaagggtcattgacccagacaactaccgtcaaatctgagtcatcaactcaggaatctccaaaaccaacaacaaccaaacagaccgtggctgactatgcctggtcaatacaaactctcttggccttagaagatataggcctcaccaaaataccaaaattagccaaaaagacctgggcagaaatggcctcagaatcagacgatgattctgaaacagatctgcaaaaacaaatccaaaaagccaaacagaccaaaacggtctgtaaccaaaaaccaagccaatcgttgactcaacaagaatcaacaccgcaacccggtaacagttacatttcaaaaaacaaatttttcaatgttttacaaatggaaccagaatactgggacaagaatcctttcaaagcaaccgccaaagtattttccccgggattccattacaggccaatagccacaaacaaaacccgtaaattctacgaattcatcctaatagatacaaactcagtatctattaaacacttcaaagaccccaaagatccaaatctaaatacccattccacaatccaaatcttgaaagttatgcagccacgacattatggctcaaacttaaaccaacccaaaaaattctctgcaccatttgaccctgcaggatataattattgggattacattgacgcctggaccaatgtgttctggcatcaaaatagtaaattcaagcattcatggctaatttacttcaaaaataatactgcatataattttccaaattggttcctccaatggtggaactacttcggaccaattccccaaatatttccagaagaagtccaacagggattcgaacaattcaacaagctctataat

SEQ ID NO: 10966 - DNA, 1148 bp, Glycine max
  Gm_smallRNAprecursor_3799
accttgcctcaaaacaaatttttgcaagatggcaagcaattttaagtgtctttgattttaatatagaatatatcaagggctcttccaactctctacctgactacctcacccgtgaatttttacagaaaattcccgatgcctcttaaggtgtctagttcctccggcagaggaggaagatccagtacaaaaggtaaagaagttctactggctctaccagagccaataaacaaaagggcaactacaacatcttctgggtcacctacccagactgggtcatcaacctagaaaggaaaacttgaagggtcattgacccagacaactaccgtcaaatctgagtcatcaactcaggaatctccaaaaccaacaacaaccaaacagaccgtggctgactatgcctggtcaatacaaactctcttggccttagaagatataggcctcaccaaaataccaaaattagccaaaaagacctgggcagaaatggcctcagaatcagacgatgattctgaaacagatctgcaaaaacaaatccaaaaagccaaacagaccaaaacggtctgtaaccaaaaaccaagccaatcgttgactcaacaagaatcaacaccgcaacccggtaacagttacatttcaaaaaacaaatttttcaatgttttacaaatggaaccagaatactgggacaagaatcctttcaaagcaaccgccaaagtattttccccgggattccattacaggccaatagccacaaacaaaacccgtaaattctacgaattcatcctaatagatacaaactcagtatctattaaacacttcaaagaccccaaagatccaaatctaaatacccattccacaatccaaatcttgaaagttatgcagccacgacattatggctcaaacttaaaccaacccaaaaaattctctgcaccatttgaccctgcaggatataattattgggattacattgacgcctggaccaatgtgttctggcatcaaaatagtaaattcaagcattcatggctaatttacttcaaaaataatactgcatataattttccaaattggttcctccaatggtggaactacttcggaccaattccccaaatatttccagaagaagtccaacagggattcgaacaattcaacaagctctataa

SEQ ID NO: 10967 - DNA, 1149 bp, Glycine max
  Gm_smallRNAprecursor_3800
accttgcctcaaaacaaatttttgcaagatggcaagcaattttaagtgtctttgattttaatatagaatatatcaagggctcttccaactctctacctgactacctcacccgtgaatttttacagaaaattcccgatgcctcttaaggtgtctagttcctccggcagaggaggaagatccagtacaaaaggtaaagaagttctactggctctaccagagccaataaacaaaagggcaactacaacatcttctgggtcacctacccagactgggtcatcaacctagaaaggaaaacttgaagggtcattgacccagacaactaccgtcaaatctgagtcatcaactcaggaatctccaaaaccaacaacaaccaaacagaccgtggctgactatgcctggtcaatacaaactctcttggccttagaagatataggcctcaccaaaataccaaaattagccaaaaagacctgggcagaaatggcctcagaatcagacgatgattctgaaacagatctgcaaaaacaaatccaaaaagccaaacagaccaaaacggtctgtaaccaaaaaccaagccaatcgttgactcaacaagaatcaacaccgcaacccggtaacagttacatttcaaaaaacaaatttttcaatgttttacaaatggaaccagaatactgggacaagaatcctttcaaagcaaccgccaaagtattttccccgggattccattacaggccaatagccacaaacaaaacccgtaaattctacgaattcatcctaatagatacaaactcagtatctattaaacacttcaaagaccccaaagatccaaatctaaatacccattccacaatccaaatcttgaaagttatgcagccacgacattatggctcaaacttaaaccaacccaaaaaattctctgcaccatttgaccctgcaggatataattattgggattacattgacgcctggaccaatgtgttctggcatcaaaatagtaaattcaagcattcatggctaatttacttcaaaaataatactgcatataattttccaaattggttcctccaatggtggaactacttcggaccaattccccaaatatttccagaagaagtccaacagggattcgaacaattcaacaagctctataat

SEQ ID NO: 10968 - DNA, 1058 bp, Glycine max
  Gm_smallRNAprecursor_3801
acaacaaccaaacagaccgtggctgactatgcctggtcaatacaaactctcttggccttagaagatataggcctcaccaaaataccaaaattagccaaaaagacctgggcagaaatggcctcagaatcagacgatgattctgaaacagatctgcaaaaacaaatccaaaaagccaaacagaccaaaacggtctgtaaccaaaaaccaagccaatcgttgactcaacaagaatcaacaccgcaacccggtaacagttacatttcaaaaaacaaatttttcaatgttttacaaatggaaccagaatactgggacaagaatcctttcaaagcaaccgccaaagtattttccccgggattccattacaggccaatagccacaaacaaaacccgtaaattctacgaattcatcctaatagatacaaactcagtatctattaaacacttcaaagaccccaaagatccaaatctaaatacccattccacaatccaaatcttgaaagttatgcagccacgacattatggctcaaacttaaaccaacccaaaaaattctctgcaccatttgaccctgcaggatataattattgggattacattgacgcctggaccaatgtgttctggcatcaaaatagtaaattcaagcattcatggctaatttacttcaaaaataatactgcatataattttccaaattggttcctccaatggtggaactacttcggaccaattccccaaatatttccagaagaagtccaacagggattcgaacaattcaacaagctctataatagcaaggaatcacgtattccggcagacttaaagtacttttccaattttgccttgtcatggatcttttcatggcaatacagatacggaaaaactgaaaacaacaagcaatatccaccgttacagagacacacctttgtaaaatggtggtcacaattcgatacttcaaaggctgctccagatcaagtcaagaactggttccagagcaatcctgagttccttaaacctgctgatccggagacatctttgtttctaaatcagaagtcgcaactggc

SEQ ID NO: 10969 - DNA, 1231 bp, Glycine max
  Gm_smallRNAprecursor_3802
taaatacccattccacaatccaaatcttgaaagttatgcagccacgacattatggctcaaacttaaaccaacccaaaaaattctctgcaccatttgaccctgcaggatataattattgggattacattgacgcctggaccaatgtgttctggcatcaaaatagtaaattcaagcattcatggctaatttacttcaaaaataatactgcatataattttccaaattggttcctccaatggtggaactacttcggaccaattccccaaatatttccagaagaagtccaacagggattcgaacaattcaacaagctctataatagcaaggaatcacgtattccggcagacttaaagtacttttccaattttgccttgtcatggatcttttcatggcaatacagatacggaaaaactgaaaacaacaagcaatatccaccgttacagagacacacctttgtaaaatggtggtcacaattcgatacttcaaaggctgctccagatcaagtcaagaactggttccagagcaatcctgagttccttaaacctgctgatccggagacatctttgtttctaaatcagaagtcgcaactggcagcattcttagaaagctcaaaatctaaagagagtcttgctcagaatctcaaagaagttctccaactacttcaacaggaagtggaagaagaaccttccaagaaggaagctgaatcatccgagactaatgatgaccaagaagatgatccattctaccagaatgaagatgactgttttggcatatcattggacgacgattaattagttgtagtaatcatgaattattgtaactaatttgtcagtttcttttaaataatgtaatttgtaaaagttttgtaatagtttcggtaaacactaccgatactgtagaaacagtaaaaattgggtctatttaaaggagtcctcgtcccctttgtgaggcaccctttcagatagtcccagaatcaggtttttagagagagaagctcagcctagggaaaaactctttgtaagcttttctttcggttttaataaatttcaagttctatttttcatatctcccttctcccctcaccgatcctgtgcggctctgccgccgcttcggtttctttgttttcaaaaacctgggtttgtaagccgtttcggtgtgcccttgatatctgctttacaagtttataattcttattcttgattatcatactgcaaggacatatgttaatata

SEQ ID NO: 10970 - DNA, 1124 bp, Glycine max
  Gm_smallRNAprecursor_3803
attccacaatccaaatcttgaaagttatgcagccacgacattatggctcaaacttaaaccaacccaaaaaattctctgcaccatttgaccctgcaggatataattattgggattacattgacgcctggaccaatgtgttctggcatcaaaatagtaaattcaagcattcatggctaatttacttcaaaaataatactgcatataattttccaaattggttcctccaatggtggaactacttcggaccaattccccaaatatttccagaagaagtccaacagggattcgaacaattcaacaagctctataatagcaaggaatcacgtattccggcagacttaaagtacttttccaattttgccttgtcatggatcttttcatggcaatacagatacggaaaaactgaaaacaacaagcaatatccaccgttacagagacacacctttgtaaaatggtggtcacaattcgatacttcaaaggctgctccagatcaagtcaagaactggttccagagcaatcctgagttccttaaacctgctgatccggagacatctttgtttctaaatcagaagtcgcaactggcagcattcttagaaagctcaaaatctaaagagagtcttgctcagaatctcaaagaagttctccaactacttcaacaggaagtggaagaagaaccttccaagaaggaagctgaatcatccgagactaatgatgaccaagaagatgatccattctaccagaatgaagatgactgttttggcatatcattggacgacgattaattagttgtagtaatcatgaattattgtaactaatttgtcagtttcttttaaataatgtaatttgtaaaagttttgtaatagtttcggtaaacactaccgatactgtagaaacagtaaaaattgggtctatttaaaggagtcctcgtcccctttgtgaggcaccctttcagatagtcccagaatcaggtttttagagagagaagctcagcctagggaaaaactctttgtaagcttttctttcggttttaataaatttcaagttctatttttcatatctcccttctcccctcaccgatcctgtgcggctctgccgccgcttcggtttctttgttttcaaaaacc

SEQ ID NO: 10971 - DNA, 1123 bp, Glycine max
  Gm_smallRNAprecursor_3804
ttccacaatccaaatcttgaaagttatgcagccacgacattatggctcaaacttaaaccaacccaaaaaattctctgcaccatttgaccctgcaggatataattattgggattacattgacgcctggaccaatgtgttctggcatcaaaatagtaaattcaagcattcatggctaatttacttcaaaaataatactgcatataattttccaaattggttcctccaatggtggaactacttcggaccaattccccaaatatttccagaagaagtccaacagggattcgaacaattcaacaagctctataatagcaaggaatcacgtattccggcagacttaaagtacttttccaattttgccttgtcatggatcttttcatggcaatacagatacggaaaaactgaaaacaacaagcaatatccaccgttacagagacacacctttgtaaaatggtggtcacaattcgatacttcaaaggctgctccagatcaagtcaagaactggttccagagcaatcctgagttccttaaacctgctgatccggagacatctttgtttctaaatcagaagtcgcaactggcagcattcttagaaagctcaaaatctaaagagagtcttgctcagaatctcaaagaagttctccaactacttcaacaggaagtggaagaagaaccttccaagaaggaagctgaatcatccgagactaatgatgaccaagaagatgatccattctaccagaatgaagatgactgttttggcatatcattggacgacgattaattagttgtagtaatcatgaattattgtaactaatttgtcagtttcttttaaataatgtaatttgtaaaagttttgtaatagtttcggtaaacactaccgatactgtagaaacagtaaaaattgggtctatttaaaggagtcctcgtcccctttgtgaggcaccctttcagatagtcccagaatcaggtttttagagagagaagctcagcctagggaaaaactctttgtaagcttttctttcggttttaataaatttcaagttctatttttcatatctcccttctcccctcaccgatcctgtgcggctctgccgccgcttcggtttctttgttttcaaaaacc

SEQ ID NO: 10972 - DNA, 1182 bp, Glycine max
  Gm_smallRNAprecursor_3805
aaatcttgtttcagagcacctctcttccgaaacctgaaaaatggctcaatgaaagggtgcctcacaacatacttgaggactccttatatagccaaaaatctaagaccggtagttgccggtagttttgaccgggactatttgactgtttgttacaagacaagtagttttgaccgggactttaatggctacaggacaggtagtattgtccatcattaattacacattaattacaaacagacggttttgtgaccgaaatttaatctaaacagataccaaaacaatcatcttcgttttggtaaaagggatcttcttcgtcttcttcaggagaacttgtttcttccttctttgaggatgaagcttcttcttcctgttgtaacatttgtagaacttccttcagatttttagctaagacctcctttgatgtcgatcctgctaaaaatgccgccagatgagacttttggttcaagaacacagaagtctctggatcagccgctttgagaaattctggatgggattggaaccatagttttacttgttctggatccgctttggatgagtcaaattgtgtccaccattttacaaatgtgtgtctttgtagtgatggatattggtttgtcttttcagtcttgttgtaacgatattgccatgagaatatccatgacagtgcaaagcttgaaaagtatttaagatctgctggaattcgtgattcctgcgaattgtattgtttcttaaattgggaaaatccttgttggaccgtttctgggaatatctctaggattggtccaaagaagtcccaccattgcaaaaaccaattgggaaaattgtaaattgtgttggtcttgaaatatatcagccatgaatgcttgaagcgggtattttggtgccaaaacaccttagtccaagcatcaacgtaatcccaataggtataacctaccggatcaaatggaactgaaaatctctttcctttgttcaagtccgaaccaaagtgtcttggttgaagaacttttagtatttggatggttgagtgggtgtttaaagtttggtcttttggatctttgaaatgtttgatagatactgagtttgaatctaccaaaatcaattcataaaaagttcttgtcttcaggatggtggttggtttgtagtgaaatcctggtgggaaagccttggccgtcgccttgaagg

SEQ ID NO: 10973 - DNA, 1031 bp, Glycine max
  Gm_smallRNAprecursor_3806
acaagacaagtagttttgaccgggactttaatggctacaggacaggtagtattgtccatcattaattacacattaattacaaacagacggttttgtgaccgaaatttaatctaaacagataccaaaacaatcatcttcgttttggtaaaagggatcttcttcgtcttcttcaggagaacttgtttcttccttctttgaggatgaagcttcttcttcctgttgtaacatttgtagaacttccttcagatttttagctaagacctcctttgatgtcgatcctgctaaaaatgccgccagatgagacttttggttcaagaacacagaagtctctggatcagccgctttgagaaattctggatgggattggaaccatagttttacttgttctggatccgctttggatgagtcaaattgtgtccaccattttacaaatgtgtgtctttgtagtgatggatattggtttgtcttttcagtcttgttgtaacgatattgccatgagaatatccatgacagtgcaaagcttgaaaagtatttaagatctgctggaattcgtgattcctgcgaattgtattgtttcttaaattgggaaaatccttgttggaccgtttctgggaatatctctaggattggtccaaagaagtcccaccattgcaaaaaccaattgggaaaattgtaaattgtgttggtcttgaaatatatcagccatgaatgcttgaagcgggtattttggtgccaaaacaccttagtccaagcatcaacgtaatcccaataggtataacctaccggatcaaatggaactgaaaatctctttcctttgttcaagtccgaaccaaagtgtcttggttgaagaacttttagtatttggatggttgagtgggtgtttaaagtttggtcttttggatctttgaaatgtttgatagatactgagtttgaatctaccaaaatcaattcataaaaagttcttgtcttcaggatggtggttggtttgtagtgaaatcctggtgggaaagccttggccgtcgccttgaagg

SEQ ID NO: 10974 - DNA, 1031 bp, Glycine max; identical to SEQ ID NO: 10973
  Gm_smallRNAprecursor_3807

SEQ ID NO: 10975 - DNA, 1114 bp, Glycine max
  Gm_smallRNAprecursor_3808
gaccgggactttaatggctacaggacaggtagtattgtccatcattaattacacattaattacaaacagacggttttgtgaccgaaatttaatctaaacagataccaaaacaatcatcttcgttttggtaaaagggatcttcttcgtcttcttcaggagaacttgtttcttccttctttgaggatgaagcttcttcttcctgttgtaacatttgtagaacttccttcagatttttagctaagacctcctttgatgtcgatcctgctaaaaatgccgccagatgagacttttggttcaagaacacagaagtctctggatcagccgctttgagaaattctggatgggattggaaccatagttttacttgttctggatccgctttggatgagtcaaattgtgtccaccattttacaaatgtgtgtctttgtagtgatggatattggtttgtcttttcagtcttgttgtaacgatattgccatgagaatatccatgacagtgcaaagcttgaaaagtatttaagatctgctggaattcgtgattcctgcgaattgtattgtttcttaaattgggaaaatccttgttggaccgtttctgggaatatctctaggattggtccaaagaagtcccaccattgcaaaaaccaattgggaaaattgtaaattgtgttggtcttgaaatatatcagccatgaatgcttgaagcgggtattttggtgccaaaacaccttagtccaagcatcaacgtaatcccaataggtataacctaccggatcaaatggaactgaaaatctctttcctttgttcaagtccgaaccaaagtgtcttggttgaagaacttttagtatttggatggttgagtgggtgtttaaagtttggtcttttggatctttgaaatgtttgatagatactgagtttgaatctaccaaaatcaattcataaaaagttcttgtcttcaggatggtggttggtttgtagtgaaatcctggtgggaaagccttggccgtcgccttgaagggatttttgtcccaaaattcaggttccatctgcaaaacagttaacaatttatttttataaatataattgttagtttgtttggtaggtggtgtttgagcttt

SEQ ID NO: 10976 - DNA, 1146 bp, Glycine max
  Gm_smallRNAprecursor_3809
atggctacaggacaggtagtattgtccatcattaattacacattaattacaaacagacggttttgtgaccgaaatttaatctaaacagataccaaaacaatcatcttcgttttggtaaaagggatcttcttcgtcttcttcaggagaacttgtttcttccttctttgaggatgaagcttcttcttcctgttgtaacatttgtagaacttccttcagatttttagctaagacctcctttgatgtcgatcctgctaaaaatgccgccagatgagacttttggttcaagaacacagaagtctctggatcagccgctttgagaaattctggatgggattggaaccatagttttacttgttctggatccgctttggatgagtcaaattgtgtccaccattttacaaatgtgtgtctttgtagtgatggatattggtttgtcttttcagtcttgttgtaacgatattgccatgagaatatccatgacagtgcaaagcttgaaaagtatttaagatctgctggaattcgtgattcctgcgaattgtattgtttcttaaattgggaaaatccttgttggaccgtttctgggaatatctctaggattggtccaaagaagtcccaccattgcaaaaaccaattgggaaaattgtaaattgtgttggtcttgaaatatatcagccatgaatgcttgaagcgggtattttggtgccaaaacaccttagtccaagcatcaacgtaatcccaataggtataacctaccggatcaaatggaactgaaaatctctttcctttgttcaagtccgaaccaaagtgtcttggttgaagaacttttagtatttggatggttgagtgggtgtttaaagtttggtcttttggatctttgaaatgtttgatagatactgagtttgaatctaccaaaatcaattcataaaaagttcttgtcttcaggatggtggttggtttgtagtgaaatcctggtgggaaagccttggccgtcgccttgaagggatttttgtcccaaaattcaggttccatctgcaaaacagttaacaatttatttttataaatataattgttagtttgtttggtaggtggtgtttgagctttggctaaaggtagttttcctttagtattggtggctgttttggtcat

SEQ ID NO: 10977 - DNA, 1146 bp, Glycine max; identical to SEQ ID NO: 10976
  Gm_smallRNAprecursor_3810

SEQ ID NO: 10978 - DNA, 1147 bp, Glycine max
  Gm_smallRNAprecursor_3811
atggctacaggacaggtagtattgtccatcattaattacacattaattacaaacagacggttttgtgaccgaaatttaatctaaacagataccaaaacaatcatcttcgttttggtaaaagggatcttcttcgtcttcttcaggagaacttgtttcttccttctttgaggatgaagcttcttcttcctgttgtaacatttgtagaacttccttcagatttttagctaagacctcctttgatgtcgatcctgctaaaaatgccgccagatgagacttttggttcaagaacacagaagtctctggatcagccgctttgagaaattctggatgggattggaaccatagttttacttgttctggatccgctttggatgagtcaaattgtgtccaccattttacaaatgtgtgtctttgtagtgatggatattggtttgtcttttcagtcttgttgtaacgatattgccatgagaatatccatgacagtgcaaagcttgaaaagtatttaagatctgctggaattcgtgattcctgcgaattgtattgtttcttaaattgggaaaatccttgttggaccgtttctgggaatatctctaggattggtccaaagaagtcccaccattgcaaaaaccaattgggaaaattgtaaattgtgttggtcttgaaatatatcagccatgaatgcttgaagcgggtattttggtgccaaaacaccttagtccaagcatcaacgtaatcccaataggtataacctaccggatcaaatggaactgaaaatctctttcctttgttcaagtccgaaccaaagtgtcttggttgaagaacttttagtatttggatggttgagtgggtgtttaaagtttggtcttttggatctttgaaatgtttgatagatactgagtttgaatctaccaaaatcaattcataaaaagttcttgtcttcaggatggtggttggtttgtagtgaaatcctggtgggaaagccttggccgtcgccttgaagggatttttgtcccaaaattcaggttccatctgcaaaacagttaacaatttatttttataaatataattgttagtttgtttggtaggtggtgtttgagctttggctaaaggtagttttcctttagtattggtggctgttttggtcatt

SEQ ID NO: 10979 - DNA, 1147 bp, Glycine max; identical to SEQ ID NO: 10978
  Gm_smallRNAprecursor_3812

SEQ ID NO: 10980 - DNA, 1247 bp, Glycine max
  Gm_smallRNAprecursor_3813
atggctacaggacaggtagtattgtccatcattaattacacattaattacaaacagacggttttgtgaccgaaatttaatctaaacagataccaaaacaatcatcttcgttttggtaaaagggatcttcttcgtcttcttcaggagaacttgtttcttccttctttgaggatgaagcttcttcttcctgttgtaacatttgtagaacttccttcagatttttagctaagacctcctttgatgtcgatcctgctaaaaatgccgccagatgagacttttggttcaagaacacagaagtctctggatcagccgctttgagaaattctggatgggattggaaccatagttttacttgttctggatccgctttggatgagtcaaattgtgtccaccattttacaaatgtgtgtctttgtagtgatggatattggtttgtcttttcagtcttgttgtaacgatattgccatgagaatatccatgacagtgcaaagcttgaaaagtatttaagatctgctggaattcgtgattcctgcgaattgtattgtttcttaaattgggaaaatccttgttggaccgtttctgggaatatctctaggattggtccaaagaagtcccaccattgcaaaaaccaattgggaaaattgtaaattgtgttggtcttgaaatatatcagccatgaatgcttgaagcgggtattttggtgccaaaacaccttagtccaagcatcaacgtaatcccaataggtataacctaccggatcaaatggaactgaaaatctctttcctttgttcaagtccgaaccaaagtgtcttggttgaagaacttttagtatttggatggttgagtgggtgtttaaagtttggtcttttggatctttgaaatgtttgatagatactgagtttgaatctaccaaaatcaattcataaaaagttcttgtcttcaggatggtggttggtttgtagtgaaatcctggtgggaaagccttggccgtcgccttgaagggatttttgtcccaaaattcaggttccatctgcaaaacagttaacaatttatttttataaatataattgttagtttgtttggtaggtggtgtttgagctttggctaaaggtagttttcctttagtattggtggctgttttggtcattgacgcattttggatcattgtttgtaaatttgattcagattcatcatcagattctgaggcaatgtctgcccaagattttttgattatttttggaaatttgg

SEQ ID NO: 10981 - DNA, 1247 bp, Glycine max; identical to SEQ ID NO: 10980
  Gm_smallRNAprecursor_3814

SEQ ID NO: 10982 - DNA, 1072 bp, Glycine max
  Gm_smallRNAprecursor_3815
gcttcttcttcctgttgtaacatttgtagaacttccttcagatttttagctaagacctcctttgatgtcgatcctgctaaaaatgccgccagatgagacttttggttcaagaacacagaagtctctggatcagccgctttgagaaattctggatgggattggaaccatagttttacttgttctggatccgctttggatgagtcaaattgtgtccaccattttacaaatgtgtgtctttgtagtgatggatattggtttgtcttttcagtcttgttgtaacgatattgccatgagaatatccatgacagtgcaaagcttgaaaagtatttaagatctgctggaattcgtgattcctgcgaattgtattgtttcttaaattgggaaaatccttgttggaccgtttctgggaatatctctaggattggtccaaagaagtcccaccattgcaaaaaccaattgggaaaattgtaaattgtgttggtcttgaaatatatcagccatgaatgcttgaagcgggtattttggtgccaaaacaccttagtccaagcatcaacgtaatcccaataggtataacctaccggatcaaatggaactgaaaatctctttcctttgttcaagtccgaaccaaagtgtcttggttgaagaacttttagtatttggatggttgagtgggtgtttaaagtttggtcttttggatctttgaaatgtttgatagatactgagtttgaatctaccaaaatcaattcataaaaagttcttgtcttcaggatggtggttggtttgtagtgaaatcctggtgggaaagccttggccgtcgccttgaagggatttttgtcccaaaattcaggttccatctgcaaaacagttaacaatttatttttataaatataattgttagtttgtttggtaggtggtgtttgagctttggctaaaggtagttttcctttagtattggtggctgttttggtcattgacgcattttggatcattgtttgtaaatttgattcagattcatcatcagattctgaggcaatgtctgcccaagattttttgattatttttggaaatttgg

SEQ ID NO: 10983 - DNA, 1124 bp, Glycine max
  Gm_smallRNAprecursor_3816
ccttcagatttttagctaagacctcctttgatgtcgatcctgctaaaaatgccgccagatgagacttttggttcaagaacacagaagtctctggatcagccgctttgagaaattctggatgggattggaaccatagttttacttgttctggatccgctttggatgagtcaaattgtgtccaccattttacaaatgtgtgtctttgtagtgatggatattggtttgtcttttcagtcttgttgtaacgatattgccatgagaatatccatgacagtgcaaagcttgaaaagtatttaagatctgctggaattcgtgattcctgcgaattgtattgtttcttaaattgggaaaatccttgttggaccgtttctgggaatatctctaggattggtccaaagaagtcccaccattgcaaaaaccaattgggaaaattgtaaattgtgttggtcttgaaatatatcagccatgaatgcttgaagcgggtattttggtgccaaaacaccttagtccaagcatcaacgtaatcccaataggtataacctaccggatcaaatggaactgaaaatctctttcctttgttcaagtccgaaccaaagtgtcttggttgaagaacttttagtatttggatggttgagtgggtgtttaaagtttggtcttttggatctttgaaatgtttgatagatactgagtttgaatctaccaaaatcaattcataaaaagttcttgtcttcaggatggtggttggtttgtagtgaaatcctggtgggaaagccttggccgtcgccttgaagggatttttgtcccaaaattcaggttccatctgcaaaacagttaacaatttatttttataaatataattgttagtttgtttggtaggtggtgtttgagctttggctaaaggtagttttcctttagtattggtggctgttttggtcattgacgcattttggatcattgtttgtaaatttgattcagattcatcatcagattctgaggcaatgtctgcccaagattttttgattatttttggaaatttggtcagacccatgtcttgaagggcctgaagggtttcaattggccatgcatagtcggccgatgtttgtttggcggttgccggtttggga

SEQ ID NO: 10984 - DNA, 1087 bp, Glycine max
  Gm_smallRNAprecursor_3817
tcctgctaaaaatgccgccagatgagacttttggttcaagaacacagaagtctctggatcagccgctttgagaaattctggatgggattggaaccatagttttacttgttctggatccgctttggatgagtcaaattgtgtccaccattttacaaatgtgtgtctttgtagtgatggatattggtttgtcttttcagtcttgttgtaacgatattgccatgagaatatccatgacagtgcaaagcttgaaaagtatttaagatctgctggaattcgtgattcctgcgaattgtattgtttcttaaattgggaaaatccttgttggaccgtttctgggaatatctctaggattggtccaaagaagtcccaccattgcaaaaaccaattgggaaaattgtaaattgtgttggtcttgaaatatatcagccatgaatgcttgaagcgggtattttggtgccaaaacaccttagtccaagcatcaacgtaatcccaataggtataacctaccggatcaaatggaactgaaaatctctttcctttgttcaagtccgaaccaaagtgtcttggttgaagaacttttagtatttggatggttgagtgggtgtttaaagtttggtcttttggatctttgaaatgtttgatagatactgagtttgaatctaccaaaatcaattcataaaaagttcttgtcttcaggatggtggttggtttgtagtgaaatcctggtgggaaagccttggccgtcgccttgaagggatttttgtcccaaaattcaggttccatctgcaaaacagttaacaatttatttttataaatataattgttagtttgtttggtaggtggtgtttgagctttggctaaaggtagttttcctttagtattggtggctgttttggtcattgacgcattttggatcattgtttgtaaatttgattcagattcatcatcagattctgaggcaatgtctgcccaagattttttgattatttttggaaatttggtcagacccatgtcttgaagggcctgaagggtttcaattggccatgcatagtcggccgatgtttgtttggcggttgccggtttggga

SEQ ID NO: 10985 - DNA, 1174 bp, Glycine max
  Gm_smallRNAprecursor_3818
cgggtattttggtgccaaaacaccttagtccaagcatcaacgtaatcccaataggtataacctaccggatcaaatggaactgaaaatctctttcctttgttcaagtccgaaccaaagtgtcttggttgaagaacttttagtatttggatggttgagtgggtgtttaaagtttggtcttttggatctttgaaatgtttgatagatactgagtttgaatctaccaaaatcaattcataaaaagttcttgtcttcaggatggtggttggtttgtagtgaaatcctggtgggaaagccttggccgtcgccttgaagggatttttgtcccaaaattcaggttccatctgcaaaacagttaacaatttatttttataaatataattgttagtttgtttggtaggtggtgtttgagctttggctaaaggtagttttcctttagtattggtggctgttttggtcattgacgcattttggatcattgtttgtaaatttgattcagattcatcatcagattctgaggcaatgtctgcccaagattttttgattatttttggaaatttggtcagacccatgtcttgaagggcctgaagggtttcaattggccatgcatagtcggccgatgtttgtttggcggttgccggtttgggagattcctgagtggatggctcaggtttgattgaggcaatctgggttgatgacccttctaaattggttttctgggtagatgacccagcctgggttggtgacccagaagaggtagatgatttcttgatggttggctctggaagagccagcctggctcctttgcctgtactccttcctccccgtagggagattcccgatgccttaggaggcattaccacttttctgtaagaattcacgggtaaggtagtcaggtagtgaatttgaggtgcccttgatgtattctatgtcaaaatcaaagacacttaaaattgcttgccatcgtgcaaaaatttgttttgaggcaaggtttttaacatctttttgtaaaatatctttggctgatttacaatcaaccctgattaaaaatttttggtttaataaatccgattgaaatttggaaatgcacaaaacaattgctaaaacttcttttttaacagttgaatattttaattgtgcaggattccaatgttttgatgtatatgcaatgacatga

SEQ ID NO: 10986 - DNA, 1173 bp, Glycine max
  Gm_smallRNAprecursor_3819
gggtattttggtgccaaaacaccttagtccaagcatcaacgtaatcccaataggtataacctaccggatcaaatggaactgaaaatctctttcctttgttcaagtccgaaccaaagtgtcttggttgaagaacttttagtatttggatggttgagtgggtgtttaaagtttggtcttttggatctttgaaatgtttgatagatactgagtttgaatctaccaaaatcaattcataaaaagttcttgtcttcaggatggtggttggtttgtagtgaaatcctggtgggaaagccttggccgtcgccttgaagggatttttgtcccaaaattcaggttccatctgcaaaacagttaacaatttatttttataaatataattgttagtttgtttggtaggtggtgtttgagctttggctaaaggtagttttcctttagtattggtggctgttttggtcattgacgcattttggatcattgtttgtaaatttgattcagattcatcatcagattctgaggcaatgtctgcccaagattttttgattatttttggaaatttggtcagacccatgtcttgaagggcctgaagggtttcaattggccatgcatagtcggccgatgtttgtttggcggttgccggtttgggagattcctgagtggatggctcaggtttgattgaggcaatctgggttgatgacccttctaaattggttttctgggtagatgacccagcctgggttggtgacccagaagaggtagatgatttcttgatggttggctctggaagagccagcctggctcctttgcctgtactccttcctccccgtagggagattcccgatgccttaggaggcattaccacttttctgtaagaattcacgggtaaggtagtcaggtagtgaatttgaggtgcccttgatgtattctatgtcaaaatcaaagacacttaaaattgcttgccatcgtgcaaaaatttgttttgaggcaaggtttttaacatctttttgtaaaatatctttggctgatttacaatcaaccctgattaaaaatttttggtttaataaatccgattgaaatttggaaatgcacaaaacaattgctaaaacttcttttttaacagttgaatattttaattgtgcaggattccaatgttttgatgtatatgcaatgacatga

SEQ ID NO: 10987 - DNA, 1176 bp, Glycine max
  Gm_smallRNAprecursor_3820
gggtattttggtgccaaaacaccttagtccaagcatcaacgtaatcccaataggtataacctaccggatcaaatggaactgaaaatctctttcctttgttcaagtccgaaccaaagtgtcttggttgaagaacttttagtatttggatggttgagtgggtgtttaaagtttggtcttttggatctttgaaatgtttgatagatactgagtttgaatctaccaaaatcaattcataaaaagttcttgtcttcaggatggtggttggtttgtagtgaaatcctggtgggaaagccttggccgtcgccttgaagggatttttgtcccaaaattcaggttccatctgcaaaacagttaacaatttatttttataaatataattgttagtttgtttggtaggtggtgtttgagctttggctaaaggtagttttcctttagtattggtggctgttttggtcattgacgcattttggatcattgtttgtaaatttgattcagattcatcatcagattctgaggcaatgtctgcccaagattttttgattatttttggaaatttggtcagacccatgtcttgaagggcctgaagggtttcaattggccatgcatagtcggccgatgtttgtttggcggttgccggtttgggagattcctgagtggatggctcaggtttgattgaggcaatctgggttgatgacccttctaaattggttttctgggtagatgacccagcctgggttggtgacccagaagaggtagatgatttcttgatggttggctctggaagagccagcctggctcctttgcctgtactccttcctccccgtagggagattcccgatgccttaggaggcattaccacttttctgtaagaattcacgggtaaggtagtcaggtagtgaatttgaggtgcccttgatgtattctatgtcaaaatcaaagacacttaaaattgcttgccatcgtgcaaaaatttgttttgaggcaaggtttttaacatctttttgtaaaatatctttggctgatttacaatcaaccctgattaaaaatttttggtttaataaatccgattgaaatttggaaatgcacaaaacaattgctaaaacttcttttttaacagttgaatattttaattgtgcaggattccaatgttttgatgtatatgcaatgacatgatct

SEQ ID NO: 10988 - DNA, 1129 bp, Glycine max
  Gm_smallRNAprecursor_3821
ctgcaaaacagttaacaatttatttttataaatataattgttagtttgtttggtaggtggtgtttgagctttggctaaaggtagttttcctttagtattggtggctgttttggtcattgacgcattttggatcattgtttgtaaatttgattcagattcatcatcagattctgaggcaatgtctgcccaagattttttgattatttttggaaatttggtcagacccatgtcttgaagggcctgaagggtttcaattggccatgcatagtcggccgatgtttgtttggcggttgccggtttgggagattcctgagtggatggctcaggtttgattgaggcaatctgggttgatgacccttctaaattggttttctgggtagatgacccagcctgggttggtgacccagaagaggtagatgatttcttgatggttggctctggaagagccagcctggctcctttgcctgtactccttcctccccgtagggagattcccgatgccttaggaggcattaccacttttctgtaagaattcacgggtaaggtagtcaggtagtgaatttgaggtgcccttgatgtattctatgtcaaaatcaaagacacttaaaattgcttgccatcgtgcaaaaatttgttttgaggcaaggtttttaacatctttttgtaaaatatctttggctgatttacaatcaaccctgattaaaaatttttggtttaataaatccgattgaaatttggaaatgcacaaaacaattgctaaaacttcttttttaacagttgaatattttaattgtgcaggattccaatgttttgatgtatatgcaatgacatgatcttggccatggactctttgtttgaggatgccaccataacctatgtctgaagcatcagtttcgacaattttaaatgcctgtggaataggaagatacagacatttaatggattggactttgactttgatttctttaaccgtttgtgtatggaggtcagaccaaggaggcggatttttcttcagcctatcatgtaatggcttgacaatattatttaaataggggacaaattctcctacgtaatttagacaacctagaaatctttgtaactgggttttgtctaagatttggttggggaa

SEQ ID NO: 10989 - DNA, 1115 bp, Glycine max
  Gm_smallRNAprecursor_3822
acaatttatttttataaatataattgttagtttgtttggtaggtggtgtttgagctttggctaaaggtagttttcctttagtattggtggctgttttggtcattgacgcattttggatcattgtttgtaaatttgattcagattcatcatcagattctgaggcaatgtctgcccaagattttttgattatttttggaaatttggtcagacccatgtcttgaagggcctgaagggtttcaattggccatgcatagtcggccgatgtttgtttggcggttgccggtttgggagattcctgagtggatggctcaggtttgattgaggcaatctgggttgatgacccttctaaattggttttctgggtagatgacccagcctgggttggtgacccagaagaggtagatgatttcttgatggttggctctggaagagccagcctggctcctttgcctgtactccttcctccccgtagggagattcccgatgccttaggaggcattaccacttttctgtaagaattcacgggtaaggtagtcaggtagtgaatttgaggtgcccttgatgtattctatgtcaaaatcaaagacacttaaaattgcttgccatcgtgcaaaaatttgttttgaggcaaggtttttaacatctttttgtaaaatatctttggctgatttacaatcaaccctgattaaaaatttttggtttaataaatccgattgaaatttggaaatgcacaaaacaattgctaaaacttcttttttaacagttgaatattttaattgtgcaggattccaatgttttgatgtatatgcaatgacatgatcttggccatggactctttgtttgaggatgccaccataacctatgtctgaagcatcagtttcgacaattttaaatgcctgtggaataggaagatacagacatttaatggattggactttgactttgatttctttaaccgtttgtgtatggaggtcagaccaaggaggcggatttttcttcagcctatcatgtaatggcttgacaatattatttaaataggggacaaattctcctacgtaatttagacaacctagaaatctttgtaactgggttttgtctaagatttggttggggaa

SEQ ID NO: 10990 - DNA, 1071 bp, Glycine max
  Gm_smallRNAprecursor_3823
taaattggttttctgggtagatgacccagcctgggttggtgacccagaagaggtagatgatttcttgatggttggctctggaagagccagcctggctcctttgcctgtactccttcctccccgtagggagattcccgatgccttaggaggcattaccacttttctgtaagaattcacgggtaaggtagtcaggtagtgaatttgaggtgcccttgatgtattctatgtcaaaatcaaagacacttaaaattgcttgccatcgtgcaaaaatttgttttgaggcaaggtttttaacatctttttgtaaaatatctttggctgatttacaatcaaccctgattaaaaatttttggtttaataaatccgattgaaatttggaaatgcacaaaacaattgctaaaacttcttttttaacagttgaatattttaattgtgcaggattccaatgttttgatgtatatgcaatgacatgatcttggccatggactctttgtttgaggatgccaccataacctatgtctgaagcatcagtttcgacaattttaaatgcctgtggaataggaagatacagacatttaatggattggactttgactttgatttctttaaccgtttgtgtatggaggtcagaccaaggaggcggatttttcttcagcctatcatgtaatggcttgacaatattatttaaataggggacaaattctcctacgtaatttagacaacctagaaatctttgtaactgggttttgtctaagatttggttggggaatttgctagcaaactctattgacctttcgaatggaatgattgtaccttgatatatattgtgaccaaggaatctaattcgagtttggaaaagattgatttttgatttggagactgccaaaccattttgtttgatgatatgtatgaaggtttggagatgtttgaaatgttggtcaatgttttgggaaaagattaaaacatcatctatgtagacaatgacaaattttgaataaggattaaaaatattgttcataattttttgaaattctgaaggggcattcttcagtccgaatggcatcacgttcc

SEQ ID NO: 10991 - DNA, 1073 bp, Glycine max
  Gm_smallRNAprecursor_3824
taaattggttttctgggtagatgacccagcctgggttggtgacccagaagaggtagatgatttcttgatggttggctctggaagagccagcctggctcctttgcctgtactccttcctccccgtagggagattcccgatgccttaggaggcattaccacttttctgtaagaattcacgggtaaggtagtcaggtagtgaatttgaggtgcccttgatgtattctatgtcaaaatcaaagacacttaaaattgcttgccatcgtgcaaaaatttgttttgaggcaaggtttttaacatctttttgtaaaatatctttggctgatttacaatcaaccctgattaaaaatttttggtttaataaatccgattgaaatttggaaatgcacaaaacaattgctaaaacttcttttttaacagttgaatattttaattgtgcaggattccaatgttttgatgtatatgcaatgacatgatcttggccatggactctttgtttgaggatgccaccataacctatgtctgaagcatcagtttcgacaattttaaatgcctgtggaataggaagatacagacatttaatggattggactttgactttgatttctttaaccgtttgtgtatggaggtcagaccaaggaggcggatttttcttcagcctatcatgtaatggcttgacaatattatttaaataggggacaaattctcctacgtaatttagacaacctagaaatctttgtaactgggttttgtctaagatttggttggggaatttgctagcaaactctattgacctttcgaatggaatgattgtaccttgatatatattgtgaccaaggaatctaattcgagtttggaaaagattgatttttgatttggagactgccaaaccattttgtttgatgatatgtatgaaggtttggagatgtttgaaatgttggtcaatgttttgggaaaagattaaaacatcatctatgtagacaatgacaaattttgaataaggattaaaaatattgttcataattttttgaaattctgaaggggcattcttcagtccgaatggcatcacgttccat

SEQ ID NO: 10992 - DNA, 1178 bp, Glycine max
  Gm_smallRNAprecursor_3825
tggttggctctggaagagccagcctggctcctttgcctgtactccttcctccccgtagggagattcccgatgccttaggaggcattaccacttttctgtaagaattcacgggtaaggtagtcaggtagtgaatttgaggtgcccttgatgtattctatgtcaaaatcaaagacacttaaaattgcttgccatcgtgcaaaaatttgttttgaggcaaggtttttaacatctttttgtaaaatatctttggctgatttacaatcaaccctgattaaaaatttttggtttaataaatccgattgaaatttggaaatgcacaaaacaattgctaaaacttcttttttaacagttgaatattttaattgtgcaggattccaatgttttgatgtatatgcaatgacatgatcttggccatggactctttgtttgaggatgccaccataacctatgtctgaagcatcagtttcgacaattttaaatgcctgtggaataggaagatacagacatttaatggattggactttgactttgatttctttaaccgtttgtgtatggaggtcagaccaaggaggcggatttttcttcagcctatcatgtaatggcttgacaatattatttaaataggggacaaattctcctacgtaatttagacaacctagaaatctttgtaactgggttttgtctaagatttggttggggaatttgctagcaaactctattgacctttcgaatggaatgattgtaccttgatatatattgtgaccaaggaatctaattcgagtttggaaaagattgatttttgatttggagactgccaaaccattttgtttgatgatatgtatgaaggtttggagatgtttgaaatgttggtcaatgttttgggaaaagattaaaacatcatctatgtagacaatgacaaattttgaataaggattaaaaatattgttcataattttttgaaattctgaaggggcattcttcagtccgaatggcatcacgttccattcatattgcccgaaaggtacagtaaacgctgttttgtacctatctgattcttggatttggatttgccaaaatccagatttcatatcaaattttgaaaatatctttgcagaatttaatctgttaagcaaatcttttttgtttggaataggatatctaatccattgtaatgcttg

SEQ ID NO: 10993 - DNA, 1080 bp, Glycine max
  Gm_smallRNAprecursor_3826
gatgtttgaaatgttggtcaatgttttgggaaaagattaaaacatcatctatgtagacaatgacaaattttgaataaggattaaaaatattgttcataattttttgaaattctgaaggggcattcttcagtccgaatggcatcacgttccattcatattgcccgaaaggtacagtaaacgctgttttgtacctatctgattcttggatttggatttgccaaaatccagatttcatatcaaattttgaaaatatctttgcagaatttaatctgttaagcaaatcttttttgtttggaataggatatctaatccattgtaatgcttgatttaatggtttgtaatttatgactaagcggggtgttccacgctcaatctcagattgtttgttaacataaaaagccgcacaagaccatgggcttttgcttttccggattaggccttcatcaagcaaatccttgatttccttttgacaatattgaagaagttcttcattcatttggattggtctggcttttgtgggaatttgtttttccctaaagtctttctcataagggagatcgacaatatgtttctttctgtcccaaaatgcatgtggcaattcagaacaaacggtcgattcaatatgatttaataaagattgaattctttcttttacttggggttttcccagttgtatctgaatattattaaaagatacttcttcttttaagaagttaatttgattaatcttattttctataagatttatatttctggaaattggtttagtagaaaaattaaatataatttttcttcctaaataatttgtggttattccttcattagatatttggatgggaaacagggctctaatgaagggcgttcctaagattacttcattcttaaggttttttaccagaagaaagtttgtgttaatcttaagaccttggttttcaattattgcatttgatagcttaaaattaatttttaattttgagccgtttgccgtacttaatttttctgaggttttctcaaagaattttgtaggaattaatccttctaaaatgcagtttgaatcagcccctgtatcaaatagggcca

SEQ ID NO: 10994 - DNA, 1159 bp, Glycine max
  Gm_smallRNAprecursor_3827
ccatctttcgggaagagttacttcatcccattttatttttctcgggagagacacgttagcctttgtcatatcagtgataaacaaggttgtttctcctttttgaggttttaacaggactctagatgcacaagtattcatgaccttgtactggatcctataaattaaggctgctgggattgatccttctttcatgtcaaggccatgaaagtggatgtttaagaacagagagtcaagaatgtttctgtccatcagactcactgttttgtttggataacaattaaaatatattggaccttgtcctaggctggtttcgactgttccaattagggagtcttcaaattgattatgcctaatatctcttagacacattaaaactgctgcatctatgcccatatcaattaagggcttgatggctacttgtatacaaccgatgtgtagatatttatacttacggctatgttcataaattgaattttttgaaagtagatgaaattcttcccctatatcttgtcctagaggaatattgttttctacttttttgattatataatcaaagttgtgtttgtctttaattgtttcaggaacatatagttgatcctgagggatttctggaatgttccagtcatccatgttttgattaatatcttcgaatcggacttcctcatcgaagagattgtgttttggggcgacctcttgggtctggttatcttgatcatttaagagattggtgtttcttgaagaagatgaagaggaggaatttgagcgaaaagagatacgggaaaaggatcgcaataatctagacatgattaaaacattctctaatatctttgccttcatttggttccataggaatctttccataaggctatatgttacagaacttcttggatctgaataaatgaaaaagaagatttttttttttttaactacagacaatatagtttgaacattactcctatagccaccagtatattatgtctcaatattttatttgaacaatacaccttagccttactgccctttctcatccacgggacttactgctacagtatcattcaactaaaatatcagactgctgtgcttccagaaaatactgttcaaacacatactgtttaaattaaaatcactgtacatgcttcagtgattatgggatgggacg

SEQ ID NO: 10995 - DNA, 1046 bp, Glycine max
  Gm_smallRNAprecursor_3828
ccaaatatcaaacggacagataggaagtaagaatgcagtatgataaatgaaaggaaaatataaactggtaaaacagatatcaagggcacaccagagaccggcttacaaatcccaggttttcattaaaaaaaagaaaccgaagcggcggcagagccgcacaggatcggtaaagagagagaagaggaatgaaaaatagaaatttattgaaacttgaaagaagcgcttacaaaatcgtgtttcagagcacctcttcttcagaaacctgaaaaatggctaaatgaaagggtgcctcacaacatacttgaggactccttatatagccaaaaatctaagaccggtagttttgatcgggactatttgactgtttgttacaagacaagtagtttcgaccgggactttaatggctacaggacaggtagtattgtccagcattaattacacattaattacaaacagacggttttgtgaccgaaattaaatttaatctaaacagataccaaaacaatcatcttcgttttggtaaaaggggtcttcttcttcttcttcagcagaacttgtttcttccttctttgaggataaactttcttcttcctgctgtaacatttgcagaacttcctttagatttttagctaagacctcctttgatttcgatcctgctaaaaatgctgccatatgagacttttggttcaaaaacacagaagtttctggatcagcggctttgaggaattctggatgggattggaaccagagttttacttgttctggatccgctttggatgagtcaaattgtgtccaccattttacaaacgcgtgtctttgtagtgatggatattggtttgtcttttcagtcttgctgtaacgatattgccatgagaagatccatgacagtgcaaagcttgaaaagtatttaagatctgctggaattcgtgattcctgcgaattgtattgtctctcaaattgagcaaatccttgttggactgtttctgggaatatctctgggattggtccaaagaagtcccaccattgcaaaaaccaattgggaaaat

SEQ ID NO: 10996 - DNA, 1182 bp, Glycine max
  Gm_smallRNAprecursor_3829
tacaaaatcgtgtttcagagcacctcttcttcagaaacctgaaaaatggctaaatgaaagggtgcctcacaacatacttgaggactccttatatagccaaaaatctaagaccggtagttttgatcgggactatttgactgtttgttacaagacaagtagtttcgaccgggactttaatggctacaggacaggtagtattgtccagcattaattacacattaattacaaacagacggttttgtgaccgaaattaaatttaatctaaacagataccaaaacaatcatcttcgttttggtaaaaggggtcttcttcttcttcttcagcagaacttgtttcttccttctttgaggataaactttcttcttcctgctgtaacatttgcagaacttcctttagatttttagctaagacctcctttgatttcgatcctgctaaaaatgctgccatatgagacttttggttcaaaaacacagaagtttctggatcagcggctttgaggaattctggatgggattggaaccagagttttacttgttctggatccgctttggatgagtcaaattgtgtccaccattttacaaacgcgtgtctttgtagtgatggatattggtttgtcttttcagtcttgctgtaacgatattgccatgagaagatccatgacagtgcaaagcttgaaaagtatttaagatctgctggaattcgtgattcctgcgaattgtattgtctctcaaattgagcaaatccttgttggactgtttctgggaatatctctgggattggtccaaagaagtcccaccattgcaaaaaccaattgggaaaattgtaaattgtattggtcttgaaatatatcagccatgaatgcttgaagcgggtattttggtgccaaaacaccttagtccaagcatcaacataatcccaataggtataacctaccggatcaaatggaactgaaaatctctttcctttgttcaagtccgaaccaaagtgtcttggttgaagaacttttagtatttggattgtcgagtgggtgtttaatgtttggtcttttgggtctttgaaatgtttgatagatactgagtttgaatctaccaaaatcaattcataaaaagttcttgtcttcaggatggttgttggtttgtagtgaaatcctggtgggaaagccttggccgtcgccttgaagg

SEQ ID NO: 10997 - DNA, 1080 bp, Glycine max
  Gm_smallRNAprecursor_3830
aagacaagtagtttcgaccgggactttaatggctacaggacaggtagtattgtccagcattaattacacattaattacaaacagacggttttgtgaccgaaattaaatttaatctaaacagataccaaaacaatcatcttcgttttggtaaaaggggtcttcttcttcttcttcagcagaacttgtttcttccttctttgaggataaactttcttcttcctgctgtaacatttgcagaacttcctttagatttttagctaagacctcctttgatttcgatcctgctaaaaatgctgccatatgagacttttggttcaaaaacacagaagtttctggatcagcggctttgaggaattctggatgggattggaaccagagttttacttgttctggatccgctttggatgagtcaaattgtgtccaccattttacaaacgcgtgtctttgtagtgatggatattggtttgtcttttcagtcttgctgtaacgatattgccatgagaagatccatgacagtgcaaagcttgaaaagtatttaagatctgctggaattcgtgattcctgcgaattgtattgtctctcaaattgagcaaatccttgttggactgtttctgggaatatctctgggattggtccaaagaagtcccaccattgcaaaaaccaattgggaaaattgtaaattgtattggtcttgaaatatatcagccatgaatgcttgaagcgggtattttggtgccaaaacaccttagtccaagcatcaacataatcccaataggtataacctaccggatcaaatggaactgaaaatctctttcctttgttcaagtccgaaccaaagtgtcttggttgaagaacttttagtatttggattgtcgagtgggtgtttaatgtttggtcttttgggtctttgaaatgtttgatagatactgagtttgaatctaccaaaatcaattcataaaaagttcttgtcttcaggatggttgttggtttgtagtgaaatcctggtgggaaagccttggccgtcgccttgaagggatttttgtcccaaaattcaggttccatctgcaaaacagttgtaaa

SEQ ID NO: 10998 - DNA, 1060 bp, Glycine max
  Gm_smallRNAprecursor_3831
ggactttaatggctacaggacaggtagtattgtccagcattaattacacattaattacaaacagacggttttgtgaccgaaattaaatttaatctaaacagataccaaaacaatcatcttcgttttggtaaaaggggtcttcttcttcttcttcagcagaacttgtttcttccttctttgaggataaactttcttcttcctgctgtaacatttgcagaacttcctttagatttttagctaagacctcctttgatttcgatcctgctaaaaatgctgccatatgagacttttggttcaaaaacacagaagtttctggatcagcggctttgaggaattctggatgggattggaaccagagttttacttgttctggatccgctttggatgagtcaaattgtgtccaccattttacaaacgcgtgtctttgtagtgatggatattggtttgtcttttcagtcttgctgtaacgatattgccatgagaagatccatgacagtgcaaagcttgaaaagtatttaagatctgctggaattcgtgattcctgcgaattgtattgtctctcaaattgagcaaatccttgttggactgtttctgggaatatctctgggattggtccaaagaagtcccaccattgcaaaaaccaattgggaaaattgtaaattgtattggtcttgaaatatatcagccatgaatgcttgaagcgggtattttggtgccaaaacaccttagtccaagcatcaacataatcccaataggtataacctaccggatcaaatggaactgaaaatctctttcctttgttcaagtccgaaccaaagtgtcttggttgaagaacttttagtatttggattgtcgagtgggtgtttaatgtttggtcttttgggtctttgaaatgtttgatagatactgagtttgaatctaccaaaatcaattcataaaaagttcttgtcttcaggatggttgttggtttgtagtgaaatcctggtgggaaagccttggccgtcgccttgaagggatttttgtcccaaaattcaggttccatctgcaaaacagttgtaaa

SEQ ID NO: 10999 - DNA, 1114 bp, Glycine max
  Gm_smallRNAprecursor_3832
ggactttaatggctacaggacaggtagtattgtccagcattaattacacattaattacaaacagacggttttgtgaccgaaattaaatttaatctaaacagataccaaaacaatcatcttcgttttggtaaaaggggtcttcttcttcttcttcagcagaacttgtttcttccttctttgaggataaactttcttcttcctgctgtaacatttgcagaacttcctttagatttttagctaagacctcctttgatttcgatcctgctaaaaatgctgccatatgagacttttggttcaaaaacacagaagtttctggatcagcggctttgaggaattctggatgggattggaaccagagttttacttgttctggatccgctttggatgagtcaaattgtgtccaccattttacaaacgcgtgtctttgtagtgatggatattggtttgtcttttcagtcttgctgtaacgatattgccatgagaagatccatgacagtgcaaagcttgaaaagtatttaagatctgctggaattcgtgattcctgcgaattgtattgtctctcaaattgagcaaatccttgttggactgtttctgggaatatctctgggattggtccaaagaagtcccaccattgcaaaaaccaattgggaaaattgtaaattgtattggtcttgaaatatatcagccatgaatgcttgaagcgggtattttggtgccaaaacaccttagtccaagcatcaacataatcccaataggtataacctaccggatcaaatggaactgaaaatctctttcctttgttcaagtccgaaccaaagtgtcttggttgaagaacttttagtatttggattgtcgagtgggtgtttaatgtttggtcttttgggtctttgaaatgtttgatagatactgagtttgaatctaccaaaatcaattcataaaaagttcttgtcttcaggatggttgttggtttgtagtgaaatcctggtgggaaagccttggccgtcgccttgaagggatttttgtcccaaaattcaggttccatctgcaaaacagttgtaaatttatttttataaatataattgttagtttgtttggtaggtggtgtttgagcttt

SEQ ID NO: 11000 - DNA, 1247 bp, Glycine max
  Gm_smallRNAprecursor_3833
tacaggacaggtagtattgtccagcattaattacacattaattacaaacagacggttttgtgaccgaaattaaatttaatctaaacagataccaaaacaatcatcttcgttttggtaaaaggggtcttcttcttcttcttcagcagaacttgtttcttccttctttgaggataaactttcttcttcctgctgtaacatttgcagaacttcctttagatttttagctaagacctcctttgatttcgatcctgctaaaaatgctgccatatgagacttttggttcaaaaacacagaagtttctggatcagcggctttgaggaattctggatgggattggaaccagagttttacttgttctggatccgctttggatgagtcaaattgtgtccaccattttacaaacgcgtgtctttgtagtgatggatattggtttgtcttttcagtcttgctgtaacgatattgccatgagaagatccatgacagtgcaaagcttgaaaagtatttaagatctgctggaattcgtgattcctgcgaattgtattgtctctcaaattgagcaaatccttgttggactgtttctgggaatatctctgggattggtccaaagaagtcccaccattgcaaaaaccaattgggaaaattgtaaattgtattggtcttgaaatatatcagccatgaatgcttgaagcgggtattttggtgccaaaacaccttagtccaagcatcaacataatcccaataggtataacctaccggatcaaatggaactgaaaatctctttcctttgttcaagtccgaaccaaagtgtcttggttgaagaacttttagtatttggattgtcgagtgggtgtttaatgtttggtcttttgggtctttgaaatgtttgatagatactgagtttgaatctaccaaaatcaattcataaaaagttcttgtcttcaggatggttgttggtttgtagtgaaatcctggtgggaaagccttggccgtcgccttgaagggatttttgtcccaaaattcaggttccatctgcaaaacagttgtaaatttatttttataaatataattgttagtttgtttggtaggtggtgtttgagctttggctaaaggtagtttcccattaggattggtggttgttttggtcattgatgcattttggatcattgtttgtaaatttgattaagattcatcatcagattctgaggcaatgtctgcccaagattttttgattatttttggaaatttgg

SEQ ID NO: 11001 - DNA, 1247 bp, Glycine max; identical to SEQ ID NO: 11000
  Gm_smallRNAprecursor_3834

SEQ ID NO: 11002 - DNA, 1162 bp, Glycine max
  Gm_smallRNAprecursor_3835
gttttgtgaccgaaattaaatttaatctaaacagataccaaaacaatcatcttcgttttggtaaaaggggtcttcttcttcttcttcagcagaacttgtttcttccttctttgaggataaactttcttcttcctgctgtaacatttgcagaacttcctttagatttttagctaagacctcctttgatttcgatcctgctaaaaatgctgccatatgagacttttggttcaaaaacacagaagtttctggatcagcggctttgaggaattctggatgggattggaaccagagttttacttgttctggatccgctttggatgagtcaaattgtgtccaccattttacaaacgcgtgtctttgtagtgatggatattggtttgtcttttcagtcttgctgtaacgatattgccatgagaagatccatgacagtgcaaagcttgaaaagtatttaagatctgctggaattcgtgattcctgcgaattgtattgtctctcaaattgagcaaatccttgttggactgtttctgggaatatctctgggattggtccaaagaagtcccaccattgcaaaaaccaattgggaaaattgtaaattgtattggtcttgaaatatatcagccatgaatgcttgaagcgggtattttggtgccaaaacaccttagtccaagcatcaacataatcccaataggtataacctaccggatcaaatggaactgaaaatctctttcctttgttcaagtccgaaccaaagtgtcttggttgaagaacttttagtatttggattgtcgagtgggtgtttaatgtttggtcttttgggtctttgaaatgtttgatagatactgagtttgaatctaccaaaatcaattcataaaaagttcttgtcttcaggatggttgttggtttgtagtgaaatcctggtgggaaagccttggccgtcgccttgaagggatttttgtcccaaaattcaggttccatctgcaaaacagttgtaaatttatttttataaatataattgttagtttgtttggtaggtggtgtttgagctttggctaaaggtagtttcccattaggattggtggttgttttggtcattgatgcattttggatcattgtttgtaaatttgattaagattcatcatcagattctgaggcaatgtctgcc

SEQ ID NO: 11003 - DNA, 1165 bp, Glycine max
  Gm_smallRNAprecursor_3836
gttttgtgaccgaaattaaatttaatctaaacagataccaaaacaatcatcttcgttttggtaaaaggggtcttcttcttcttcttcagcagaacttgtttcttccttctttgaggataaactttcttcttcctgctgtaacatttgcagaacttcctttagatttttagctaagacctcctttgatttcgatcctgctaaaaatgctgccatatgagacttttggttcaaaaacacagaagtttctggatcagcggctttgaggaattctggatgggattggaaccagagttttacttgttctggatccgctttggatgagtcaaattgtgtccaccattttacaaacgcgtgtctttgtagtgatggatattggtttgtcttttcagtcttgctgtaacgatattgccatgagaagatccatgacagtgcaaagcttgaaaagtatttaagatctgctggaattcgtgattcctgcgaattgtattgtctctcaaattgagcaaatccttgttggactgtttctgggaatatctctgggattggtccaaagaagtcccaccattgcaaaaaccaattgggaaaattgtaaattgtattggtcttgaaatatatcagccatgaatgcttgaagcgggtattttggtgccaaaacaccttagtccaagcatcaacataatcccaataggtataacctaccggatcaaatggaactgaaaatctctttcctttgttcaagtccgaaccaaagtgtcttggttgaagaacttttagtatttggattgtcgagtgggtgtttaatgtttggtcttttgggtctttgaaatgtttgatagatactgagtttgaatctaccaaaatcaattcataaaaagttcttgtcttcaggatggttgttggtttgtagtgaaatcctggtgggaaagccttggccgtcgccttgaagggatttttgtcccaaaattcaggttccatctgcaaaacagttgtaaatttatttttataaatataattgttagtttgtttggtaggtggtgtttgagctttggctaaaggtagtttcccattaggattggtggttgttttggtcattgatgcattttggatcattgtttgtaaatttgattaagattcatcatcagattctgaggcaatgtctgcccaa

SEQ ID NO: 11004 - DNA, 1072 bp, Glycine max
  Gm_smallRNAprecursor_3837
ctttcttcttcctgctgtaacatttgcagaacttcctttagatttttagctaagacctcctttgatttcgatcctgctaaaaatgctgccatatgagacttttggttcaaaaacacagaagtttctggatcagcggctttgaggaattctggatgggattggaaccagagttttacttgttctggatccgctttggatgagtcaaattgtgtccaccattttacaaacgcgtgtctttgtagtgatggatattggtttgtcttttcagtcttgctgtaacgatattgccatgagaagatccatgacagtgcaaagcttgaaaagtatttaagatctgctggaattcgtgattcctgcgaattgtattgtctctcaaattgagcaaatccttgttggactgtttctgggaatatctctgggattggtccaaagaagtcccaccattgcaaaaaccaattgggaaaattgtaaattgtattggtcttgaaatatatcagccatgaatgcttgaagcgggtattttggtgccaaaacaccttagtccaagcatcaacataatcccaataggtataacctaccggatcaaatggaactgaaaatctctttcctttgttcaagtccgaaccaaagtgtcttggttgaagaacttttagtatttggattgtcgagtgggtgtttaatgtttggtcttttgggtctttgaaatgtttgatagatactgagtttgaatctaccaaaatcaattcataaaaagttcttgtcttcaggatggttgttggtttgtagtgaaatcctggtgggaaagccttggccgtcgccttgaagggatttttgtcccaaaattcaggttccatctgcaaaacagttgtaaatttatttttataaatataattgttagtttgtttggtaggtggtgtttgagctttggctaaaggtagtttcccattaggattggtggttgttttggtcattgatgcattttggatcattgtttgtaaatttgattaagattcatcatcagattctgaggcaatgtctgcccaagattttttgattatttttggaaatttgg

SEQ ID NO: 11005 - DNA, 1174 bp, Glycine max
  Gm_smallRNAprecursor_3838
cgggtattttggtgccaaaacaccttagtccaagcatcaacataatcccaataggtataacctaccggatcaaatggaactgaaaatctctttcctttgttcaagtccgaaccaaagtgtcttggttgaagaacttttagtatttggattgtcgagtgggtgtttaatgtttggtcttttgggtctttgaaatgtttgatagatactgagtttgaatctaccaaaatcaattcataaaaagttcttgtcttcaggatggttgttggtttgtagtgaaatcctggtgggaaagccttggccgtcgccttgaagggatttttgtcccaaaattcaggttccatctgcaaaacagttgtaaatttatttttataaatataattgttagtttgtttggtaggtggtgtttgagctttggctaaaggtagtttcccattaggattggtggttgttttggtcattgatgcattttggatcattgtttgtaaatttgattaagattcatcatcagattctgaggcaatgtctgcccaagattttttgattatttttggaaatttggttaggcccatgtcttgaagggcctgaagggtttcaattggccatgcatagtcggccgatgtttgtttggcggttgccggtttgggagattcctgagtggatggctcaggtttgattgaggcaatctgggttgatgacccttctaaattggttttctgggtagatgacccagcctgggttggtgacccagaagaggttgatgatttcttaatggttggctctggaagagccagtctggctcctttgcctgtacttcttcctccctttagggagattcccgatgcctaaggaggcattatcacttttctgtaagaattcacgagtaaggtagtcaggtaatgaatttgaggtgcccttgatgtattctatgtcaaaatcaaagacacttagaattgcttgccatcttgcaaaaatttgttttgaagcaaggtttttgacatctttctgtaaaatatctttggctgatttacaattaactctgattaaaaatttttggtttaataaatccgattgaaatttggaaatgcacaaaaaaattgctaaaacttcctttttaacagttgaatattttaattgtgcaggattccaatgttttgatgcatatgcaatgacatga

SEQ ID NO: 11006 - DNA, 1173 bp, Glycine max
  Gm_smallRNAprecursor_3839
gggtattttggtgccaaaacaccttagtccaagcatcaacataatcccaataggtataacctaccggatcaaatggaactgaaaatctctttcctttgttcaagtccgaaccaaagtgtcttggttgaagaacttttagtatttggattgtcgagtgggtgtttaatgtttggtcttttgggtctttgaaatgtttgatagatactgagtttgaatctaccaaaatcaattcataaaaagttcttgtcttcaggatggttgttggtttgtagtgaaatcctggtgggaaagccttggccgtcgccttgaagggatttttgtcccaaaattcaggttccatctgcaaaacagttgtaaatttatttttataaatataattgttagtttgtttggtaggtggtgtttgagctttggctaaaggtagtttcccattaggattggtggttgttttggtcattgatgcattttggatcattgtttgtaaatttgattaagattcatcatcagattctgaggcaatgtctgcccaagattttttgattatttttggaaatttggttaggcccatgtcttgaagggcctgaagggtttcaattggccatgcatagtcggccgatgtttgtttggcggttgccggtttgggagattcctgagtggatggctcaggtttgattgaggcaatctgggttgatgacccttctaaattggttttctgggtagatgacccagcctgggttggtgacccagaagaggttgatgatttcttaatggttggctctggaagagccagtctggctcctttgcctgtacttcttcctccctttagggagattcccgatgcctaaggaggcattatcacttttctgtaagaattcacgagtaaggtagtcaggtaatgaatttgaggtgcccttgatgtattctatgtcaaaatcaaagacacttagaattgcttgccatcttgcaaaaatttgttttgaagcaaggtttttgacatctttctgtaaaatatctttggctgatttacaattaactctgattaaaaatttttggtttaataaatccgattgaaatttggaaatgcacaaaaaaattgctaaaacttcctttttaacagttgaatattttaattgtgcaggattccaatgttttgatgcatatgcaatgacatga

SEQ ID NO: 11007 - DNA, 1176 bp, Glycine max
  Gm_smallRNAprecursor_3840
gggtattttggtgccaaaacaccttagtccaagcatcaacataatcccaataggtataacctaccggatcaaatggaactgaaaatctctttcctttgttcaagtccgaaccaaagtgtcttggttgaagaacttttagtatttggattgtcgagtgggtgtttaatgtttggtcttttgggtctttgaaatgtttgatagatactgagtttgaatctaccaaaatcaattcataaaaagttcttgtcttcaggatggttgttggtttgtagtgaaatcctggtgggaaagccttggccgtcgccttgaagggatttttgtcccaaaattcaggttccatctgcaaaacagttgtaaatttatttttataaatataattgttagtttgtttggtaggtggtgtttgagctttggctaaaggtagtttcccattaggattggtggttgttttggtcattgatgcattttggatcattgtttgtaaatttgattaagattcatcatcagattctgaggcaatgtctgcccaagattttttgattatttttggaaatttggttaggcccatgtcttgaagggcctgaagggtttcaattggccatgcatagtcggccgatgtttgtttggcggttgccggtttgggagattcctgagtggatggctcaggtttgattgaggcaatctgggttgatgacccttctaaattggttttctgggtagatgacccagcctgggttggtgacccagaagaggttgatgatttcttaatggttggctctggaagagccagtctggctcctttgcctgtacttcttcctccctttagggagattcccgatgcctaaggaggcattatcacttttctgtaagaattcacgagtaaggtagtcaggtaatgaatttgaggtgcccttgatgtattctatgtcaaaatcaaagacacttagaattgcttgccatcttgcaaaaatttgttttgaagcaaggtttttgacatctttctgtaaaatatctttggctgatttacaattaactctgattaaaaatttttggtttaataaatccgattgaaatttggaaatgcacaaaaaaattgctaaaacttcctttttaacagttgaatattttaattgtgcaggattccaatgttttgatgcatatgcaatgacatgatct

SEQ ID NO: 11008 - DNA, 1173 bp, Glycine max
  Gm_smallRNAprecursor_3841
atgatttcttaatggttggctctggaagagccagtctggctcctttgcctgtacttcttcctccctttagggagattcccgatgcctaaggaggcattatcacttttctgtaagaattcacgagtaaggtagtcaggtaatgaatttgaggtgcccttgatgtattctatgtcaaaatcaaagacacttagaattgcttgccatcttgcaaaaatttgttttgaagcaaggtttttgacatctttctgtaaaatatctttggctgatttacaattaactctgattaaaaatttttggtttaataaatccgattgaaatttggaaatgcacaaaaaaattgctaaaacttcctttttaacagttgaatattttaattgtgcaggattccaatgttttgatgcatatgcaatgacatgatcttgaccatgtactctttgtttgaggatgccaccataacctatgtctgaagcatcagtttcgacaattttaaatgcatgtggaataggaagatacagacattttatggattggattttgactttgatttctttaactgtttgtgtatggaggtcagaccaaggaggcggatttttcttcagcctatcatgcaatggcttgacaatattgtttaagtaggggacaaattctcctacgtaatttagacaacctagaaatgtttgtaactgggttttgtctaagatttggttgggaaatttgctagcaaactctattgacctttctattggaatgattgtaccttgatatatattgtgaccaaggaatcgaattcgagtttggaaaagattgatttttgatttggagactgccaaaccactctgtttgatgatatggatgaaggtctggagctgtttgaaatgttggtcaatgttttggagaattttctatttgaagaattttcagctatttgaagaaaagattgatttttgatttggagactgccaaaccaatctctatttgaagaattttctaaacaatctaaaaagagaggtaaaagaacttcgtcaacaacaagaaattcatcagatcattctttctcagcttgaggaagatagccaacaacagtgaggaaaaccaaccagaaaatttagaagatgatatgtttatgggattaatcaacaagattaaaatccaaaaattatacataaacataaa

SEQ ID NO: 11009 - DNA, 1126 bp, Glycine max
  Gm_smallRNAprecursor_3842
aagattaacacaaactttcttctggtaaaaaaccttaagaatgaagtaatcctaggaacgcccttcattagagccttgtttcccatccaaatatctaatgaaggaataaccacaaattatttaggaagaaaaattatatttaatttttctactaaaccaatttccaaaaatataaatcttatagaaaataagattaatcaaattaacttcttaaaagaagaagtatcttttaataatattcagatacaactgggaaaaccccaagtaaaagaaaaaattcaatctttattaaatcatattgaatcgactgtctgttctgatttgtcacatgcattttgggacagaaagaaacatattgttgatctcccttatgagaaagactttagggaaaaacaaattcccacaaaagtcagaccaattcaaatgaatgaagaacttcttcaatactgccaaaaggaaatcaaggatttgcttgataaaggcctaatccggaaaagcaaaagcccatggtcttgtgcggctttttatgtcaacaaacaatctgagattgagcgtggaacaccccgcttagtcataaattacaaaccactaaatcaagcattacaatggattagatatcctattccaaacaaaaaagatttgcttaacagattaaattctgcaaagatattttcaaaatttgatatgaaatctggattttggcaaatccaaatccaagaatcagataggtacaaaacagcgtttactgtacctttcaggcaatatgaatggaatgtgatgccattcggactgaagaatgccccttcagaatttcaaaaaattatgaatgatatttttaatccctattcaaaatttgtcattgtctacatagatgatgttttaatcttttcccaaaacattgaccaacatttcaaacatctccagaccttcatccatatcatcaaacagaatggtttggcagtctccaaatcaaaaatcaatcttttccaaactcgaattcgattccttggtcacaatatatatcaaggtacaatcattccaatagaaaggtcaatagagtttgctagcaaatttcccaaccaaatcttagacaaaacccagatacaaacatttctaggttgtctaa

SEQ ID NO: 11010 - DNA, 1168 bp, Glycine max
  Gm_smallRNAprecursor_3843
atggtcttgtgcggctttttatgtcaacaaacaatctgagattgagcgtggaacaccccgcttagtcataaattacaaaccactaaatcaagcattacaatggattagatatcctattccaaacaaaaaagatttgcttaacagattaaattctgcaaagatattttcaaaatttgatatgaaatctggattttggcaaatccaaatccaagaatcagataggtacaaaacagcgtttactgtacctttcaggcaatatgaatggaatgtgatgccattcggactgaagaatgccccttcagaatttcaaaaaattatgaatgatatttttaatccctattcaaaatttgtcattgtctacatagatgatgttttaatcttttcccaaaacattgaccaacatttcaaacatctccagaccttcatccatatcatcaaacagaatggtttggcagtctccaaatcaaaaatcaatcttttccaaactcgaattcgattccttggtcacaatatatatcaaggtacaatcattccaatagaaaggtcaatagagtttgctagcaaatttcccaaccaaatcttagacaaaacccagatacaaacatttctaggttgtctaaattacgtaggagaatttgtcccctacttaaacaatattgtcaagccattgcatgataggctgaagaaaaatccgcctccttggtctgacctccatacacaaacagttaaagaaatcaaagtcaaagtccaatccataaaatgtatgtatcttcctattccacatgcatttaaaattgtcgaaactgatgcttcagacataggttatggtggcatcctcaaacaaagagtacatggtcaagatcatgtcattgcatatgcatcaaaacattggaatcctgcacaattaaaatattcaactgttaaaaaggaagttttagcaatttttttgtgcatttccaaatttcaatcggatttattaaaccaaaaatttttaatcagagttgattgtaaatcagccaaagatattttacagaaagatgtcaaaaaccttgcttcaaaacaaatttttgcaagatggcaagcaattctaagtgtctttgattttgacatagaatacatcaagggcacctcaaattcattacctgactaccttactcgtgaattctta

SEQ ID NO: 11011 - DNA, 1208 bp, Glycine max
  Gm_smallRNAprecursor_3844
ctaaggcatcgggaatctccctaaagggaggaagaagtacaggcaaaggagccagactggctcttccagagccaaccattaagaaatcatcaacctcatctgggtcaccaacccaggctggatcatctacccagaaaaccaatttagaagggtcatcaacccagattgcctcaatcaaacctgagccatccactcaggaatctcccaaaccggcaaccgccaaacaaacatcggccgactatgcatggccaattgaaacccttcaggcccttcaagacatgggcctaaccaaatttccaaaaataatcaaaaaatcttgggcagacattgcctcagaatctgatgatgaatcttaatcaaatttacaaacaatgatccaaaatgcatcaatgaccaaaacaaccaccaatcctaatgggaaactacctttagccaaagctcaaacaccacctaccaaacaaactaacaattatatttataaaaataaatttacaactgttttgcagatggaacctgaattttgggacaaaaatcccttcaaggcgacggccaaggctttcccaccaggatttcactacaaaccaacaaccatcctgaagacaagaactttttatgaattgattttggtagattcaaactcagtatctatcaaacatttcaaagacccaaaagaccaaacattaaacacccactcgacaatccaaatactaaaagttcttcaaccaagacactttggttcggacttgaacaaaggaaagagattttcagttccatttgatccggtaggttatacctattgggattatgttgatgcttggactaaggtgttttggcaccaaaatacccgcttcaagcattcatggctgatatatttcaagaccaatacaatttacaattttcccaattggtttttgcaatggtgggacttctttggaccaatcccagagatattcccagaaacagtccaacaaggatttgctcaatttgagagacaatacaattcgcaggaatcacgaattccagcagatcttaaatacttttcaagctttgcactgtcatggatcttctcatggcaatatcgttacagcaagactgaaaagacaaaccaatatccatcactacaaagacacgcgtttgtaaaatggtggacacaatttgactcatccaaagcggatccagaacaagtaaaactctggttccaatcccat

SEQ ID NO: 11012 - DNA, 1208 bp, Glycine max; identical to SEQ ID NO: 11011
  Gm_smallRNAprecursor_3845

SEQ ID NO: 11013 - DNA, 1211 bp, Glycine max
  Gm_smallRNAprecursor_3846
ctaaggcatcgggaatctccctaaagggaggaagaagtacaggcaaaggagccagactggctcttccagagccaaccattaagaaatcatcaacctcatctgggtcaccaacccaggctggatcatctacccagaaaaccaatttagaagggtcatcaacccagattgcctcaatcaaacctgagccatccactcaggaatctcccaaaccggcaaccgccaaacaaacatcggccgactatgcatggccaattgaaacccttcaggcccttcaagacatgggcctaaccaaatttccaaaaataatcaaaaaatcttgggcagacattgcctcagaatctgatgatgaatcttaatcaaatttacaaacaatgatccaaaatgcatcaatgaccaaaacaaccaccaatcctaatgggaaactacctttagccaaagctcaaacaccacctaccaaacaaactaacaattatatttataaaaataaatttacaactgttttgcagatggaacctgaattttgggacaaaaatcccttcaaggcgacggccaaggctttcccaccaggatttcactacaaaccaacaaccatcctgaagacaagaactttttatgaattgattttggtagattcaaactcagtatctatcaaacatttcaaagacccaaaagaccaaacattaaacacccactcgacaatccaaatactaaaagttcttcaaccaagacactttggttcggacttgaacaaaggaaagagattttcagttccatttgatccggtaggttatacctattgggattatgttgatgcttggactaaggtgttttggcaccaaaatacccgcttcaagcattcatggctgatatatttcaagaccaatacaatttacaattttcccaattggtttttgcaatggtgggacttctttggaccaatcccagagatattcccagaaacagtccaacaaggatttgctcaatttgagagacaatacaattcgcaggaatcacgaattccagcagatcttaaatacttttcaagctttgcactgtcatggatcttctcatggcaatatcgttacagcaagactgaaaagacaaaccaatatccatcactacaaagacacgcgtttgtaaaatggtggacacaatttgactcatccaaagcggatccagaacaagtaaaactctggttccaatcccatcca

SEQ ID NO: 11014 - DNA, 1098 bp, Glycine max
  Gm_smallRNAprecursor_3847
ggaatctccctaaagggaggaagaagtacaggcaaaggagccagactggctcttccagagccaaccattaagaaatcatcaacctcatctgggtcaccaacccaggctggatcatctacccagaaaaccaatttagaagggtcatcaacccagattgcctcaatcaaacctgagccatccactcaggaatctcccaaaccggcaaccgccaaacaaacatcggccgactatgcatggccaattgaaacccttcaggcccttcaagacatgggcctaaccaaatttccaaaaataatcaaaaaatcttgggcagacattgcctcagaatctgatgatgaatcttaatcaaatttacaaacaatgatccaaaatgcatcaatgaccaaaacaaccaccaatcctaatgggaaactacctttagccaaagctcaaacaccacctaccaaacaaactaacaattatatttataaaaataaatttacaactgttttgcagatggaacctgaattttgggacaaaaatcccttcaaggcgacggccaaggctttcccaccaggatttcactacaaaccaacaaccatcctgaagacaagaactttttatgaattgattttggtagattcaaactcagtatctatcaaacatttcaaagacccaaaagaccaaacattaaacacccactcgacaatccaaatactaaaagttcttcaaccaagacactttggttcggacttgaacaaaggaaagagattttcagttccatttgatccggtaggttatacctattgggattatgttgatgcttggactaaggtgttttggcaccaaaatacccgcttcaagcattcatggctgatatatttcaagaccaatacaatttacaattttcccaattggtttttgcaatggtgggacttctttggaccaatcccagagatattcccagaaacagtccaacaaggatttgctcaatttgagagacaatacaattcgcaggaatcacgaattccagcagatcttaaatacttttcaagctttgcactgtcatggatcttctcatggcaatatcgttacagcaagactgaaaagacaaaccaa

SEQ ID NO: 11015 - DNA, 1190 bp, Glycine max
  Gm_smallRNAprecursor_3848
acaggcaaaggagccagactggctcttccagagccaaccattaagaaatcatcaacctcatctgggtcaccaacccaggctggatcatctacccagaaaaccaatttagaagggtcatcaacccagattgcctcaatcaaacctgagccatccactcaggaatctcccaaaccggcaaccgccaaacaaacatcggccgactatgcatggccaattgaaacccttcaggcccttcaagacatgggcctaaccaaatttccaaaaataatcaaaaaatcttgggcagacattgcctcagaatctgatgatgaatcttaatcaaatttacaaacaatgatccaaaatgcatcaatgaccaaaacaaccaccaatcctaatgggaaactacctttagccaaagctcaaacaccacctaccaaacaaactaacaattatatttataaaaataaatttacaactgttttgcagatggaacctgaattttgggacaaaaatcccttcaaggcgacggccaaggctttcccaccaggatttcactacaaaccaacaaccatcctgaagacaagaactttttatgaattgattttggtagattcaaactcagtatctatcaaacatttcaaagacccaaaagaccaaacattaaacacccactcgacaatccaaatactaaaagttcttcaaccaagacactttggttcggacttgaacaaaggaaagagattttcagttccatttgatccggtaggttatacctattgggattatgttgatgcttggactaaggtgttttggcaccaaaatacccgcttcaagcattcatggctgatatatttcaagaccaatacaatttacaattttcccaattggtttttgcaatggtgggacttctttggaccaatcccagagatattcccagaaacagtccaacaaggatttgctcaatttgagagacaatacaattcgcaggaatcacgaattccagcagatcttaaatacttttcaagctttgcactgtcatggatcttctcatggcaatatcgttacagcaagactgaaaagacaaaccaatatccatcactacaaagacacgcgtttgtaaaatggtggacacaatttgactcatccaaagcggatccagaacaagtaaaactctggttccaatcccatccagaattcctcaaagccgc

SEQ ID NO: 11016 - DNA, 1171 bp, Glycine max
  Gm_smallRNAprecursor_3849
tcccaaaccggcaaccgccaaacaaacatcggccgactatgcatggccaattgaaacccttcaggcccttcaagacatgggcctaaccaaatttccaaaaataatcaaaaaatcttgggcagacattgcctcagaatctgatgatgaatcttaatcaaatttacaaacaatgatccaaaatgcatcaatgaccaaaacaaccaccaatcctaatgggaaactacctttagccaaagctcaaacaccacctaccaaacaaactaacaattatatttataaaaataaatttacaactgttttgcagatggaacctgaattttgggacaaaaatcccttcaaggcgacggccaaggctttcccaccaggatttcactacaaaccaacaaccatcctgaagacaagaactttttatgaattgattttggtagattcaaactcagtatctatcaaacatttcaaagacccaaaagaccaaacattaaacacccactcgacaatccaaatactaaaagttcttcaaccaagacactttggttcggacttgaacaaaggaaagagattttcagttccatttgatccggtaggttatacctattgggattatgttgatgcttggactaaggtgttttggcaccaaaatacccgcttcaagcattcatggctgatatatttcaagaccaatacaatttacaattttcccaattggtttttgcaatggtgggacttctttggaccaatcccagagatattcccagaaacagtccaacaaggatttgctcaatttgagagacaatacaattcgcaggaatcacgaattccagcagatcttaaatacttttcaagctttgcactgtcatggatcttctcatggcaatatcgttacagcaagactgaaaagacaaaccaatatccatcactacaaagacacgcgtttgtaaaatggtggacacaatttgactcatccaaagcggatccagaacaagtaaaactctggttccaatcccatccagaattcctcaaagccgctgatccagaaacttctgtgtttttgaaccaaaagtctcatatggcagcatttttagcaggatcgaaatcaaaggaggtcttagctaaaaatctaaaggaagttctacaaatgttacagcaggaagaagaaagtttatcctcaaag

SEQ ID NO: 11017 - DNA, 1166 bp, Glycine max
  Gm_smallRNAprecursor_3850
ccaaaccggcaaccgccaaacaaacatcggccgactatgcatggccaattgaaacccttcaggcccttcaagacatgggcctaaccaaatttccaaaaataatcaaaaaatcttgggcagacattgcctcagaatctgatgatgaatcttaatcaaatttacaaacaatgatccaaaatgcatcaatgaccaaaacaaccaccaatcctaatgggaaactacctttagccaaagctcaaacaccacctaccaaacaaactaacaattatatttataaaaataaatttacaactgttttgcagatggaacctgaattttgggacaaaaatcccttcaaggcgacggccaaggctttcccaccaggatttcactacaaaccaacaaccatcctgaagacaagaactttttatgaattgattttggtagattcaaactcagtatctatcaaacatttcaaagacccaaaagaccaaacattaaacacccactcgacaatccaaatactaaaagttcttcaaccaagacactttggttcggacttgaacaaaggaaagagattttcagttccatttgatccggtaggttatacctattgggattatgttgatgcttggactaaggtgttttggcaccaaaatacccgcttcaagcattcatggctgatatatttcaagaccaatacaatttacaattttcccaattggtttttgcaatggtgggacttctttggaccaatcccagagatattcccagaaacagtccaacaaggatttgctcaatttgagagacaatacaattcgcaggaatcacgaattccagcagatcttaaatacttttcaagctttgcactgtcatggatcttctcatggcaatatcgttacagcaagactgaaaagacaaaccaatatccatcactacaaagacacgcgtttgtaaaatggtggacacaatttgactcatccaaagcggatccagaacaagtaaaactctggttccaatcccatccagaattcctcaaagccgctgatccagaaacttctgtgtttttgaaccaaaagtctcatatggcagcatttttagcaggatcgaaatcaaaggaggtcttagctaaaaatctaaaggaagttctacaaatgttacagcaggaagaagaaagtttatcctca

SEQ ID NO: 11018 - DNA, 1169 bp, Glycine max
  Gm_smallRNAprecursor_3851
ccaaaccggcaaccgccaaacaaacatcggccgactatgcatggccaattgaaacccttcaggcccttcaagacatgggcctaaccaaatttccaaaaataatcaaaaaatcttgggcagacattgcctcagaatctgatgatgaatcttaatcaaatttacaaacaatgatccaaaatgcatcaatgaccaaaacaaccaccaatcctaatgggaaactacctttagccaaagctcaaacaccacctaccaaacaaactaacaattatatttataaaaataaatttacaactgttttgcagatggaacctgaattttgggacaaaaatcccttcaaggcgacggccaaggctttcccaccaggatttcactacaaaccaacaaccatcctgaagacaagaactttttatgaattgattttggtagattcaaactcagtatctatcaaacatttcaaagacccaaaagaccaaacattaaacacccactcgacaatccaaatactaaaagttcttcaaccaagacactttggttcggacttgaacaaaggaaagagattttcagttccatttgatccggtaggttatacctattgggattatgttgatgcttggactaaggtgttttggcaccaaaatacccgcttcaagcattcatggctgatatatttcaagaccaatacaatttacaattttcccaattggtttttgcaatggtgggacttctttggaccaatcccagagatattcccagaaacagtccaacaaggatttgctcaatttgagagacaatacaattcgcaggaatcacgaattccagcagatcttaaatacttttcaagctttgcactgtcatggatcttctcatggcaatatcgttacagcaagactgaaaagacaaaccaatatccatcactacaaagacacgcgtttgtaaaatggtggacacaatttgactcatccaaagcggatccagaacaagtaaaactctggttccaatcccatccagaattcctcaaagccgctgatccagaaacttctgtgtttttgaaccaaaagtctcatatggcagcatttttagcaggatcgaaatcaaaggaggtcttagctaaaaatctaaaggaagttctacaaatgttacagcaggaagaagaaagtttatcctcaaag

SEQ ID NO: 11019 - DNA, 1107 bp, Glycine max
  Gm_smallRNAprecursor_3852
aaccggcaaccgccaaacaaacatcggccgactatgcatggccaattgaaacccttcaggcccttcaagacatgggcctaaccaaatttccaaaaataatcaaaaaatcttgggcagacattgcctcagaatctgatgatgaatcttaatcaaatttacaaacaatgatccaaaatgcatcaatgaccaaaacaaccaccaatcctaatgggaaactacctttagccaaagctcaaacaccacctaccaaacaaactaacaattatatttataaaaataaatttacaactgttttgcagatggaacctgaattttgggacaaaaatcccttcaaggcgacggccaaggctttcccaccaggatttcactacaaaccaacaaccatcctgaagacaagaactttttatgaattgattttggtagattcaaactcagtatctatcaaacatttcaaagacccaaaagaccaaacattaaacacccactcgacaatccaaatactaaaagttcttcaaccaagacactttggttcggacttgaacaaaggaaagagattttcagttccatttgatccggtaggttatacctattgggattatgttgatgcttggactaaggtgttttggcaccaaaatacccgcttcaagcattcatggctgatatatttcaagaccaatacaatttacaattttcccaattggtttttgcaatggtgggacttctttggaccaatcccagagatattcccagaaacagtccaacaaggatttgctcaatttgagagacaatacaattcgcaggaatcacgaattccagcagatcttaaatacttttcaagctttgcactgtcatggatcttctcatggcaatatcgttacagcaagactgaaaagacaaaccaatatccatcactacaaagacacgcgtttgtaaaatggtggacacaatttgactcatccaaagcggatccagaacaagtaaaactctggttccaatcccatccagaattcctcaaagccgctgatccagaaacttctgtgtttttgaaccaaaagtctcatatggcagcatttttagcaggatcgaaatcaaaggaggtcttagcta

SEQ ID NO: 11020 - DNA, 1107 bp, Glycine max; identical to SEQ ID NO: 11019
  Gm_smallRNAprecursor_3853

SEQ ID NO: 11021 - DNA, 1108 bp, Glycine max
  Gm_smallRNAprecursor_3854
aaccggcaaccgccaaacaaacatcggccgactatgcatggccaattgaaacccttcaggcccttcaagacatgggcctaaccaaatttccaaaaataatcaaaaaatcttgggcagacattgcctcagaatctgatgatgaatcttaatcaaatttacaaacaatgatccaaaatgcatcaatgaccaaaacaaccaccaatcctaatgggaaactacctttagccaaagctcaaacaccacctaccaaacaaactaacaattatatttataaaaataaatttacaactgttttgcagatggaacctgaattttgggacaaaaatcccttcaaggcgacggccaaggctttcccaccaggatttcactacaaaccaacaaccatcctgaagacaagaactttttatgaattgattttggtagattcaaactcagtatctatcaaacatttcaaagacccaaaagaccaaacattaaacacccactcgacaatccaaatactaaaagttcttcaaccaagacactttggttcggacttgaacaaaggaaagagattttcagttccatttgatccggtaggttatacctattgggattatgttgatgcttggactaaggtgttttggcaccaaaatacccgcttcaagcattcatggctgatatatttcaagaccaatacaatttacaattttcccaattggtttttgcaatggtgggacttctttggaccaatcccagagatattcccagaaacagtccaacaaggatttgctcaatttgagagacaatacaattcgcaggaatcacgaattccagcagatcttaaatacttttcaagctttgcactgtcatggatcttctcatggcaatatcgttacagcaagactgaaaagacaaaccaatatccatcactacaaagacacgcgtttgtaaaatggtggacacaatttgactcatccaaagcggatccagaacaagtaaaactctggttccaatcccatccagaattcctcaaagccgctgatccagaaacttctgtgtttttgaaccaaaagtctcatatggcagcatttttagcaggatcgaaatcaaaggaggtcttagctaa

SEQ ID NO: 11022 - DNA, 1108 bp, Glycine max; identical to SEQ ID NO: 11021
  Gm_smallRNAprecursor_3855

SEQ ID NO: 11023 - DNA, 1102 bp, Glycine max
  Gm_smallRNAprecursor_3856
cggcaaccgccaaacaaacatcggccgactatgcatggccaattgaaacccttcaggcccttcaagacatgggcctaaccaaatttccaaaaataatcaaaaaatcttgggcagacattgcctcagaatctgatgatgaatcttaatcaaatttacaaacaatgatccaaaatgcatcaatgaccaaaacaaccaccaatcctaatgggaaactacctttagccaaagctcaaacaccacctaccaaacaaactaacaattatatttataaaaataaatttacaactgttttgcagatggaacctgaattttgggacaaaaatcccttcaaggcgacggccaaggctttcccaccaggatttcactacaaaccaacaaccatcctgaagacaagaactttttatgaattgattttggtagattcaaactcagtatctatcaaacatttcaaagacccaaaagaccaaacattaaacacccactcgacaatccaaatactaaaagttcttcaaccaagacactttggttcggacttgaacaaaggaaagagattttcagttccatttgatccggtaggttatacctattgggattatgttgatgcttggactaaggtgttttggcaccaaaatacccgcttcaagcattcatggctgatatatttcaagaccaatacaatttacaattttcccaattggtttttgcaatggtgggacttctttggaccaatcccagagatattcccagaaacagtccaacaaggatttgctcaatttgagagacaatacaattcgcaggaatcacgaattccagcagatcttaaatacttttcaagctttgcactgtcatggatcttctcatggcaatatcgttacagcaagactgaaaagacaaaccaatatccatcactacaaagacacgcgtttgtaaaatggtggacacaatttgactcatccaaagcggatccagaacaagtaaaactctggttccaatcccatccagaattcctcaaagccgctgatccagaaacttctgtgtttttgaaccaaaagtctcatatggcagcatttttagcaggatcgaaatcaaaggaggtcttagc

SEQ ID NO: 11024 - DNA, 1098 bp, Glycine max
  Gm_smallRNAprecursor_3857
caagacatgggcctaaccaaatttccaaaaataatcaaaaaatcttgggcagacattgcctcagaatctgatgatgaatcttaatcaaatttacaaacaatgatccaaaatgcatcaatgaccaaaacaaccaccaatcctaatgggaaactacctttagccaaagctcaaacaccacctaccaaacaaactaacaattatatttataaaaataaatttacaactgttttgcagatggaacctgaattttgggacaaaaatcccttcaaggcgacggccaaggctttcccaccaggatttcactacaaaccaacaaccatcctgaagacaagaactttttatgaattgattttggtagattcaaactcagtatctatcaaacatttcaaagacccaaaagaccaaacattaaacacccactcgacaatccaaatactaaaagttcttcaaccaagacactttggttcggacttgaacaaaggaaagagattttcagttccatttgatccggtaggttatacctattgggattatgttgatgcttggactaaggtgttttggcaccaaaatacccgcttcaagcattcatggctgatatatttcaagaccaatacaatttacaattttcccaattggtttttgcaatggtgggacttctttggaccaatcccagagatattcccagaaacagtccaacaaggatttgctcaatttgagagacaatacaattcgcaggaatcacgaattccagcagatcttaaatacttttcaagctttgcactgtcatggatcttctcatggcaatatcgttacagcaagactgaaaagacaaaccaatatccatcactacaaagacacgcgtttgtaaaatggtggacacaatttgactcatccaaagcggatccagaacaagtaaaactctggttccaatcccatccagaattcctcaaagccgctgatccagaaacttctgtgtttttgaaccaaaagtctcatatggcagcatttttagcaggatcgaaatcaaaggaggtcttagctaaaaatctaaaggaagttctacaaatgttacagcaggaagaagaaagtttatcctca

SEQ ID NO: 11025 - DNA, 1099 bp, Glycine max
  Gm_smallRNAprecursor_3858
caagacatgggcctaaccaaatttccaaaaataatcaaaaaatcttgggcagacattgcctcagaatctgatgatgaatcttaatcaaatttacaaacaatgatccaaaatgcatcaatgaccaaaacaaccaccaatcctaatgggaaactacctttagccaaagctcaaacaccacctaccaaacaaactaacaattatatttataaaaataaatttacaactgttttgcagatggaacctgaattttgggacaaaaatcccttcaaggcgacggccaaggctttcccaccaggatttcactacaaaccaacaaccatcctgaagacaagaactttttatgaattgattttggtagattcaaactcagtatctatcaaacatttcaaagacccaaaagaccaaacattaaacacccactcgacaatccaaatactaaaagttcttcaaccaagacactttggttcggacttgaacaaaggaaagagattttcagttccatttgatccggtaggttatacctattgggattatgttgatgcttggactaaggtgttttggcaccaaaatacccgcttcaagcattcatggctgatatatttcaagaccaatacaatttacaattttcccaattggtttttgcaatggtgggacttctttggaccaatcccagagatattcccagaaacagtccaacaaggatttgctcaatttgagagacaatacaattcgcaggaatcacgaattccagcagatcttaaatacttttcaagctttgcactgtcatggatcttctcatggcaatatcgttacagcaagactgaaaagacaaaccaatatccatcactacaaagacacgcgtttgtaaaatggtggacacaatttgactcatccaaagcggatccagaacaagtaaaactctggttccaatcccatccagaattcctcaaagccgctgatccagaaacttctgtgtttttgaaccaaaagtctcatatggcagcatttttagcaggatcgaaatcaaaggaggtcttagctaaaaatctaaaggaagttctacaaatgttacagcaggaagaagaaagtttatcctcaa

SEQ ID NO: 11026 - DNA, 1244 bp, Glycine max
  Gm_smallRNAprecursor_3859
caagacatgggcctaaccaaatttccaaaaataatcaaaaaatcttgggcagacattgcctcagaatctgatgatgaatcttaatcaaatttacaaacaatgatccaaaatgcatcaatgaccaaaacaaccaccaatcctaatgggaaactacctttagccaaagctcaaacaccacctaccaaacaaactaacaattatatttataaaaataaatttacaactgttttgcagatggaacctgaattttgggacaaaaatcccttcaaggcgacggccaaggctttcccaccaggatttcactacaaaccaacaaccatcctgaagacaagaactttttatgaattgattttggtagattcaaactcagtatctatcaaacatttcaaagacccaaaagaccaaacattaaacacccactcgacaatccaaatactaaaagttcttcaaccaagacactttggttcggacttgaacaaaggaaagagattttcagttccatttgatccggtaggttatacctattgggattatgttgatgcttggactaaggtgttttggcaccaaaatacccgcttcaagcattcatggctgatatatttcaagaccaatacaatttacaattttcccaattggtttttgcaatggtgggacttctttggaccaatcccagagatattcccagaaacagtccaacaaggatttgctcaatttgagagacaatacaattcgcaggaatcacgaattccagcagatcttaaatacttttcaagctttgcactgtcatggatcttctcatggcaatatcgttacagcaagactgaaaagacaaaccaatatccatcactacaaagacacgcgtttgtaaaatggtggacacaatttgactcatccaaagcggatccagaacaagtaaaactctggttccaatcccatccagaattcctcaaagccgctgatccagaaacttctgtgtttttgaaccaaaagtctcatatggcagcatttttagcaggatcgaaatcaaaggaggtcttagctaaaaatctaaaggaagttctacaaatgttacagcaggaagaagaaagtttatcctcaaagaaggaagaaacaagttctgctgaagaagaagaagaagaccccttttaccaaaacgaagatgattgttttggtatctgtttagattaaatttaatttcggtcacaaaaccgtctgtttgtaattaatgtgtaattaatgctgga

SEQ ID NO: 11027 - DNA, 1146 bp, Glycine max
  Gm_smallRNAprecursor_3860
aatgatccaaaatgcatcaatgaccaaaacaaccaccaatcctaatgggaaactacctttagccaaagctcaaacaccacctaccaaacaaactaacaattatatttataaaaataaatttacaactgttttgcagatggaacctgaattttgggacaaaaatcccttcaaggcgacggccaaggctttcccaccaggatttcactacaaaccaacaaccatcctgaagacaagaactttttatgaattgattttggtagattcaaactcagtatctatcaaacatttcaaagacccaaaagaccaaacattaaacacccactcgacaatccaaatactaaaagttcttcaaccaagacactttggttcggacttgaacaaaggaaagagattttcagttccatttgatccggtaggttatacctattgggattatgttgatgcttggactaaggtgttttggcaccaaaatacccgcttcaagcattcatggctgatatatttcaagaccaatacaatttacaattttcccaattggtttttgcaatggtgggacttctttggaccaatcccagagatattcccagaaacagtccaacaaggatttgctcaatttgagagacaatacaattcgcaggaatcacgaattccagcagatcttaaatacttttcaagctttgcactgtcatggatcttctcatggcaatatcgttacagcaagactgaaaagacaaaccaatatccatcactacaaagacacgcgtttgtaaaatggtggacacaatttgactcatccaaagcggatccagaacaagtaaaactctggttccaatcccatccagaattcctcaaagccgctgatccagaaacttctgtgtttttgaaccaaaagtctcatatggcagcatttttagcaggatcgaaatcaaaggaggtcttagctaaaaatctaaaggaagttctacaaatgttacagcaggaagaagaaagtttatcctcaaagaaggaagaaacaagttctgctgaagaagaagaagaagaccccttttaccaaaacgaagatgattgttttggtatctgtttagattaaatttaatttcggtcacaaaaccgtctgtttgtaattaatgtgtaattaatgctgga

SEQ ID NO: 11028 - DNA, 1144 bp, Glycine max
  Gm_smallRNAprecursor_3861
tgatccaaaatgcatcaatgaccaaaacaaccaccaatcctaatgggaaactacctttagccaaagctcaaacaccacctaccaaacaaactaacaattatatttataaaaataaatttacaactgttttgcagatggaacctgaattttgggacaaaaatcccttcaaggcgacggccaaggctttcccaccaggatttcactacaaaccaacaaccatcctgaagacaagaactttttatgaattgattttggtagattcaaactcagtatctatcaaacatttcaaagacccaaaagaccaaacattaaacacccactcgacaatccaaatactaaaagttcttcaaccaagacactttggttcggacttgaacaaaggaaagagattttcagttccatttgatccggtaggttatacctattgggattatgttgatgcttggactaaggtgttttggcaccaaaatacccgcttcaagcattcatggctgatatatttcaagaccaatacaatttacaattttcccaattggtttttgcaatggtgggacttctttggaccaatcccagagatattcccagaaacagtccaacaaggatttgctcaatttgagagacaatacaattcgcaggaatcacgaattccagcagatcttaaatacttttcaagctttgcactgtcatggatcttctcatggcaatatcgttacagcaagactgaaaagacaaaccaatatccatcactacaaagacacgcgtttgtaaaatggtggacacaatttgactcatccaaagcggatccagaacaagtaaaactctggttccaatcccatccagaattcctcaaagccgctgatccagaaacttctgtgtttttgaaccaaaagtctcatatggcagcatttttagcaggatcgaaatcaaaggaggtcttagctaaaaatctaaaggaagttctacaaatgttacagcaggaagaagaaagtttatcctcaaagaaggaagaaacaagttctgctgaagaagaagaagaagaccccttttaccaaaacgaagatgattgttttggtatctgtttagattaaatttaatttcggtcacaaaaccgtctgtttgtaattaatgtgtaattaatgctgga

SEQ ID NO: 11029 - DNA, 1159 bp, Glycine max
  Gm_smallRNAprecursor_3862
gaattttgggacaaaaatcccttcaaggcgacggccaaggctttcccaccaggatttcactacaaaccaacaaccatcctgaagacaagaactttttatgaattgattttggtagattcaaactcagtatctatcaaacatttcaaagacccaaaagaccaaacattaaacacccactcgacaatccaaatactaaaagttcttcaaccaagacactttggttcggacttgaacaaaggaaagagattttcagttccatttgatccggtaggttatacctattgggattatgttgatgcttggactaaggtgttttggcaccaaaatacccgcttcaagcattcatggctgatatatttcaagaccaatacaatttacaattttcccaattggtttttgcaatggtgggacttctttggaccaatcccagagatattcccagaaacagtccaacaaggatttgctcaatttgagagacaatacaattcgcaggaatcacgaattccagcagatcttaaatacttttcaagctttgcactgtcatggatcttctcatggcaatatcgttacagcaagactgaaaagacaaaccaatatccatcactacaaagacacgcgtttgtaaaatggtggacacaatttgactcatccaaagcggatccagaacaagtaaaactctggttccaatcccatccagaattcctcaaagccgctgatccagaaacttctgtgtttttgaaccaaaagtctcatatggcagcatttttagcaggatcgaaatcaaaggaggtcttagctaaaaatctaaaggaagttctacaaatgttacagcaggaagaagaaagtttatcctcaaagaaggaagaaacaagttctgctgaagaagaagaagaagaccccttttaccaaaacgaagatgattgttttggtatctgtttagattaaatttaatttcggtcacaaaaccgtctgtttgtaattaatgtgtaattaatgctggacaatactacctgtcctgtagccattaaagtcccggtcgaaactacttgtcttgtaacaaacagtcaaatagtcccgatcaaaactaccggtcttagatttttggctatataaagagtcctcaagtatgttgtgaggcaccctttcatttagccatttt

SEQ ID NO: 11030 - DNA, 1131 bp, Glycine max
  Gm_smallRNAprecursor_3863
cgacggccaaggctttcccaccaggatttcactacaaaccaacaaccatcctgaagacaagaactttttatgaattgattttggtagattcaaactcagtatctatcaaacatttcaaagacccaaaagaccaaacattaaacacccactcgacaatccaaatactaaaagttcttcaaccaagacactttggttcggacttgaacaaaggaaagagattttcagttccatttgatccggtaggttatacctattgggattatgttgatgcttggactaaggtgttttggcaccaaaatacccgcttcaagcattcatggctgatatatttcaagaccaatacaatttacaattttcccaattggtttttgcaatggtgggacttctttggaccaatcccagagatattcccagaaacagtccaacaaggatttgctcaatttgagagacaatacaattcgcaggaatcacgaattccagcagatcttaaatacttttcaagctttgcactgtcatggatcttctcatggcaatatcgttacagcaagactgaaaagacaaaccaatatccatcactacaaagacacgcgtttgtaaaatggtggacacaatttgactcatccaaagcggatccagaacaagtaaaactctggttccaatcccatccagaattcctcaaagccgctgatccagaaacttctgtgtttttgaaccaaaagtctcatatggcagcatttttagcaggatcgaaatcaaaggaggtcttagctaaaaatctaaaggaagttctacaaatgttacagcaggaagaagaaagtttatcctcaaagaaggaagaaacaagttctgctgaagaagaagaagaagaccccttttaccaaaacgaagatgattgttttggtatctgtttagattaaatttaatttcggtcacaaaaccgtctgtttgtaattaatgtgtaattaatgctggacaatactacctgtcctgtagccattaaagtcccggtcgaaactacttgtcttgtaacaaacagtcaaatagtcccgatcaaaactaccggtcttagatttttggctatataaagagtcctcaagtatgttgtgaggcaccctttcatttagccatttt

SEQ ID NO: 11031 - DNA, 1057 bp, Glycine max
  Gm_smallRNAprecursor_3864
atttcaagaccaatacaatttacaattttcccaattggtttttgcaatggtgggacttctttggaccaatcccagagatattcccagaaacagtccaacaaggatttgctcaatttgagagacaatacaattcgcaggaatcacgaattccagcagatcttaaatacttttcaagctttgcactgtcatggatcttctcatggcaatatcgttacagcaagactgaaaagacaaaccaatatccatcactacaaagacacgcgtttgtaaaatggtggacacaatttgactcatccaaagcggatccagaacaagtaaaactctggttccaatcccatccagaattcctcaaagccgctgatccagaaacttctgtgtttttgaaccaaaagtctcatatggcagcatttttagcaggatcgaaatcaaaggaggtcttagctaaaaatctaaaggaagttctacaaatgttacagcaggaagaagaaagtttatcctcaaagaaggaagaaacaagttctgctgaagaagaagaagaagaccccttttaccaaaacgaagatgattgttttggtatctgtttagattaaatttaatttcggtcacaaaaccgtctgtttgtaattaatgtgtaattaatgctggacaatactacctgtcctgtagccattaaagtcccggtcgaaactacttgtcttgtaacaaacagtcaaatagtcccgatcaaaactaccggtcttagatttttggctatataaagagtcctcaagtatgttgtgaggcaccctttcatttagccatttttcaggtttctgaagaagaggtgctctgaaacaagattttgtaagcgcttctttcaagtttcaataaatttctatttttcatccctcttctctctctttaccgatcctgtgcggctctgacgccgcttcggtttctttttttttatgaaaacctagaatttgtaaaccggtctccggtgtgcccttgatatctgttttaccagtttatattttcctttcatttatcatattgcattcttacttcctatctgtcc

SEQ ID NO: 11032 - DNA, 1064 bp, Glycine max
  Gm_smallRNAprecursor_3865
atttcaagaccaatacaatttacaattttcccaattggtttttgcaatggtgggacttctttggaccaatcccagagatattcccagaaacagtccaacaaggatttgctcaatttgagagacaatacaattcgcaggaatcacgaattccagcagatcttaaatacttttcaagctttgcactgtcatggatcttctcatggcaatatcgttacagcaagactgaaaagacaaaccaatatccatcactacaaagacacgcgtttgtaaaatggtggacacaatttgactcatccaaagcggatccagaacaagtaaaactctggttccaatcccatccagaattcctcaaagccgctgatccagaaacttctgtgtttttgaaccaaaagtctcatatggcagcatttttagcaggatcgaaatcaaaggaggtcttagctaaaaatctaaaggaagttctacaaatgttacagcaggaagaagaaagtttatcctcaaagaaggaagaaacaagttctgctgaagaagaagaagaagaccccttttaccaaaacgaagatgattgttttggtatctgtttagattaaatttaatttcggtcacaaaaccgtctgtttgtaattaatgtgtaattaatgctggacaatactacctgtcctgtagccattaaagtcccggtcgaaactacttgtcttgtaacaaacagtcaaatagtcccgatcaaaactaccggtcttagatttttggctatataaagagtcctcaagtatgttgtgaggcaccctttcatttagccatttttcaggtttctgaagaagaggtgctctgaaacaagattttgtaagcgcttctttcaagtttcaataaatttctatttttcatccctcttctctctctttaccgatcctgtgcggctctgacgccgcttcggtttctttttttttatgaaaacctagaatttgtaaaccggtctccggtgtgcccttgatatctgttttaccagtttatattttcctttcatttatcatattgcattcttacttcctatctgtccgtttgat

SEQ ID NO: 11033 - DNA, 1059 bp, Glycine max
  Gm_smallRNAprecursor_3866
tttcaagaccaatacaatttacaattttcccaattggtttttgcaatggtgggacttctttggaccaatcccagagatattcccagaaacagtccaacaaggatttgctcaatttgagagacaatacaattcgcaggaatcacgaattccagcagatcttaaatacttttcaagctttgcactgtcatggatcttctcatggcaatatcgttacagcaagactgaaaagacaaaccaatatccatcactacaaagacacgcgtttgtaaaatggtggacacaatttgactcatccaaagcggatccagaacaagtaaaactctggttccaatcccatccagaattcctcaaagccgctgatccagaaacttctgtgtttttgaaccaaaagtctcatatggcagcatttttagcaggatcgaaatcaaaggaggtcttagctaaaaatctaaaggaagttctacaaatgttacagcaggaagaagaaagtttatcctcaaagaaggaagaaacaagttctgctgaagaagaagaagaagaccccttttaccaaaacgaagatgattgttttggtatctgtttagattaaatttaatttcggtcacaaaaccgtctgtttgtaattaatgtgtaattaatgctggacaatactacctgtcctgtagccattaaagtcccggtcgaaactacttgtcttgtaacaaacagtcaaatagtcccgatcaaaactaccggtcttagatttttggctatataaagagtcctcaagtatgttgtgaggcaccctttcatttagccatttttcaggtttctgaagaagaggtgctctgaaacaagattttgtaagcgcttctttcaagtttcaataaatttctatttttcatccctcttctctctctttaccgatcctgtgcggctctgacgccgcttcggtttctttttttttatgaaaacctagaatttgtaaaccggtctccggtgtgcccttgatatctgttttaccagtttatattttcctttcatttatcatattgcattcttacttcctatctgtccgtt

SEQ ID NO: 11034 - DNA, 1060 bp, Glycine max
  Gm_smallRNAprecursor_3867
tttcaagaccaatacaatttacaattttcccaattggtttttgcaatggtgggacttctttggaccaatcccagagatattcccagaaacagtccaacaaggatttgctcaatttgagagacaatacaattcgcaggaatcacgaattccagcagatcttaaatacttttcaagctttgcactgtcatggatcttctcatggcaatatcgttacagcaagactgaaaagacaaaccaatatccatcactacaaagacacgcgtttgtaaaatggtggacacaatttgactcatccaaagcggatccagaacaagtaaaactctggttccaatcccatccagaattcctcaaagccgctgatccagaaacttctgtgtttttgaaccaaaagtctcatatggcagcatttttagcaggatcgaaatcaaaggaggtcttagctaaaaatctaaaggaagttctacaaatgttacagcaggaagaagaaagtttatcctcaaagaaggaagaaacaagttctgctgaagaagaagaagaagaccccttttaccaaaacgaagatgattgttttggtatctgtttagattaaatttaatttcggtcacaaaaccgtctgtttgtaattaatgtgtaattaatgctggacaatactacctgtcctgtagccattaaagtcccggtcgaaactacttgtcttgtaacaaacagtcaaatagtcccgatcaaaactaccggtcttagatttttggctatataaagagtcctcaagtatgttgtgaggcaccctttcatttagccatttttcaggtttctgaagaagaggtgctctgaaacaagattttgtaagcgcttctttcaagtttcaataaatttctatttttcatccctcttctctctctttaccgatcctgtgcggctctgacgccgcttcggtttctttttttttatgaaaacctagaatttgtaaaccggtctccggtgtgcccttgatatctgttttaccagtttatattttcctttcatttatcatattgcattcttacttcctatctgtccgttt

SEQ ID NO: 11035 - DNA, 1060 bp, Glycine max; identical to SEQ ID NO: 11034
  Gm_smallRNAprecursor_3868

SEQ ID NO: 11036 - DNA, 1063 bp, Glycine max
  Gm_smallRNAprecursor_3869
tttcaagaccaatacaatttacaattttcccaattggtttttgcaatggtgggacttctttggaccaatcccagagatattcccagaaacagtccaacaaggatttgctcaatttgagagacaatacaattcgcaggaatcacgaattccagcagatcttaaatacttttcaagctttgcactgtcatggatcttctcatggcaatatcgttacagcaagactgaaaagacaaaccaatatccatcactacaaagacacgcgtttgtaaaatggtggacacaatttgactcatccaaagcggatccagaacaagtaaaactctggttccaatcccatccagaattcctcaaagccgctgatccagaaacttctgtgtttttgaaccaaaagtctcatatggcagcatttttagcaggatcgaaatcaaaggaggtcttagctaaaaatctaaaggaagttctacaaatgttacagcaggaagaagaaagtttatcctcaaagaaggaagaaacaagttctgctgaagaagaagaagaagaccccttttaccaaaacgaagatgattgttttggtatctgtttagattaaatttaatttcggtcacaaaaccgtctgtttgtaattaatgtgtaattaatgctggacaatactacctgtcctgtagccattaaagtcccggtcgaaactacttgtcttgtaacaaacagtcaaatagtcccgatcaaaactaccggtcttagatttttggctatataaagagtcctcaagtatgttgtgaggcaccctttcatttagccatttttcaggtttctgaagaagaggtgctctgaaacaagattttgtaagcgcttctttcaagtttcaataaatttctatttttcatccctcttctctctctttaccgatcctgtgcggctctgacgccgcttcggtttctttttttttatgaaaacctagaatttgtaaaccggtctccggtgtgcccttgatatctgttttaccagtttatattttcctttcatttatcatattgcattcttacttcctatctgtccgtttgat

SEQ ID NO: 11037 - DNA, 1056 bp, Glycine max
  Gm_smallRNAprecursor_3870
caagaccaatacaatttacaattttcccaattggtttttgcaatggtgggacttctttggaccaatcccagagatattcccagaaacagtccaacaaggatttgctcaatttgagagacaatacaattcgcaggaatcacgaattccagcagatcttaaatacttttcaagctttgcactgtcatggatcttctcatggcaatatcgttacagcaagactgaaaagacaaaccaatatccatcactacaaagacacgcgtttgtaaaatggtggacacaatttgactcatccaaagcggatccagaacaagtaaaactctggttccaatcccatccagaattcctcaaagccgctgatccagaaacttctgtgtttttgaaccaaaagtctcatatggcagcatttttagcaggatcgaaatcaaaggaggtcttagctaaaaatctaaaggaagttctacaaatgttacagcaggaagaagaaagtttatcctcaaagaaggaagaaacaagttctgctgaagaagaagaagaagaccccttttaccaaaacgaagatgattgttttggtatctgtttagattaaatttaatttcggtcacaaaaccgtctgtttgtaattaatgtgtaattaatgctggacaatactacctgtcctgtagccattaaagtcccggtcgaaactacttgtcttgtaacaaacagtcaaatagtcccgatcaaaactaccggtcttagatttttggctatataaagagtcctcaagtatgttgtgaggcaccctttcatttagccatttttcaggtttctgaagaagaggtgctctgaaacaagattttgtaagcgcttctttcaagtttcaataaatttctatttttcatccctcttctctctctttaccgatcctgtgcggctctgacgccgcttcggtttctttttttttatgaaaacctagaatttgtaaaccggtctccggtgtgcccttgatatctgttttaccagtttatattttcctttcatttatcatattgcattcttacttcctatctgtccgtt

SEQ ID NO: 11038 - DNA, 1056 bp, Glycine max; identical to SEQ ID NO: 11037
  Gm_smallRNAprecursor_3871

SEQ ID NO: 11039 - DNA, 1057 bp, Glycine max
  Gm_smallRNAprecursor_3872
caagaccaatacaatttacaattttcccaattggtttttgcaatggtgggacttctttggaccaatcccagagatattcccagaaacagtccaacaaggatttgctcaatttgagagacaatacaattcgcaggaatcacgaattccagcagatcttaaatacttttcaagctttgcactgtcatggatcttctcatggcaatatcgttacagcaagactgaaaagacaaaccaatatccatcactacaaagacacgcgtttgtaaaatggtggacacaatttgactcatccaaagcggatccagaacaagtaaaactctggttccaatcccatccagaattcctcaaagccgctgatccagaaacttctgtgtttttgaaccaaaagtctcatatggcagcatttttagcaggatcgaaatcaaaggaggtcttagctaaaaatctaaaggaagttctacaaatgttacagcaggaagaagaaagtttatcctcaaagaaggaagaaacaagttctgctgaagaagaagaagaagaccccttttaccaaaacgaagatgattgttttggtatctgtttagattaaatttaatttcggtcacaaaaccgtctgtttgtaattaatgtgtaattaatgctggacaatactacctgtcctgtagccattaaagtcccggtcgaaactacttgtcttgtaacaaacagtcaaatagtcccgatcaaaactaccggtcttagatttttggctatataaagagtcctcaagtatgttgtgaggcaccctttcatttagccatttttcaggtttctgaagaagaggtgctctgaaacaagattttgtaagcgcttctttcaagtttcaataaatttctatttttcatccctcttctctctctttaccgatcctgtgcggctctgacgccgcttcggtttctttttttttatgaaaacctagaatttgtaaaccggtctccggtgtgcccttgatatctgttttaccagtttatattttcctttcatttatcatattgcattcttacttcctatctgtccgttt

SEQ ID NO: 11040 - DNA, 1057 bp, Glycine max; identical to SEQ ID NO: 11039
  Gm_smallRNAprecursor_3873

SEQ ID NO: 11041 - DNA, 1057 bp, Glycine max; identical to SEQ ID NO: 11039
  Gm_smallRNAprecursor_3874

SEQ ID NO: 11042 - DNA, 1057 bp, Glycine max; identical to SEQ ID NO: 11039
  Gm_smallRNAprecursor_3875

SEQ ID NO: 11043 - DNA, 1188 bp, Glycine max
  Gm_smallRNAprecursor_3876
aacagtccaacaaggatttgctcaatttgagagacaatacaattcgcaggaatcacgaattccagcagatcttaaatacttttcaagctttgcactgtcatggatcttctcatggcaatatcgttacagcaagactgaaaagacaaaccaatatccatcactacaaagacacgcgtttgtaaaatggtggacacaatttgactcatccaaagcggatccagaacaagtaaaactctggttccaatcccatccagaattcctcaaagccgctgatccagaaacttctgtgtttttgaaccaaaagtctcatatggcagcatttttagcaggatcgaaatcaaaggaggtcttagctaaaaatctaaaggaagttctacaaatgttacagcaggaagaagaaagtttatcctcaaagaaggaagaaacaagttctgctgaagaagaagaagaagaccccttttaccaaaacgaagatgattgttttggtatctgtttagattaaatttaatttcggtcacaaaaccgtctgtttgtaattaatgtgtaattaatgctggacaatactacctgtcctgtagccattaaagtcccggtcgaaactacttgtcttgtaacaaacagtcaaatagtcccgatcaaaactaccggtcttagatttttggctatataaagagtcctcaagtatgttgtgaggcaccctttcatttagccatttttcaggtttctgaagaagaggtgctctgaaacaagattttgtaagcgcttctttcaagtttcaataaatttctatttttcatccctcttctctctctttaccgatcctgtgcggctctgacgccgcttcggtttctttttttttatgaaaacctagaatttgtaaaccggtctccggtgtgcccttgatatctgttttaccagtttatattttcctttcatttatcatattgcattcttacttcctatctgtccgtttgatcttattccgctgacctatatatatatatatatatatcagggtgttacataaagtggatactactattttcattaagaagaaattaaatgattagttcaaagctacgttgatgatattatctttggatctactaatgactctttatgcaaagaattctctcaagccatgcaaagtgagtttgaaatgtcaatgatgggagaactaaatttctt

SEQ ID NO: 11044 - DNA, 1037 bp, Glycine max
  Gm_smallRNAprecursor_3877
tatgtttattatgttcctgaaattataaaaaatactatatatatatatatataaacttgaaaaacagatatcaagggcacaccggagaccggcttataaaccccaggttttcataaacaaagaaaccgaagcggcggcagagccgcacaggatcggtgaagggagaagagagaaggatgaaaaatagaaatttattgaatctagaaagaagcgcttacaaaattttgtttcagagcacctctcttcagaaacctgaaaaatggctaaatgaaagggtgcctcacaacatacttgaggactccttatatagccaaaaatctaagaccaatagttgccggtagttttgaccgggattatttgactgcttgttacaagacaagtagttttgatcgggactttaatggctacaagacaggtagtattgtccagcattaattacacattaattacaaacaaacggttttgtgatcgaaattaagtttaatctaaacagataccaaaacaatcatcttcgttttggtaaaaggggtcttcttcagcagaacttgtttcttccttctttgaggatgaaccttcttcttcctgttgtaacatttgcagaacttccttcagatttttagctaagacctcctttgatgtcaatcctgctaagaatgctgccagatgagacttttggttcaaaaacacagaagtttctgtatcagctgctttgaggaattctggatgggattggaaccagagttttacttgttctggatctgttttggatgagtcaaattatgtccaccattttacaaatgcgtgtctttgtagtgatggatattggtttgtcttttcagtcttgctgtaacgatattgccatgagaatatccatgacagtgcaaagcttgaaaagtatttaagatctgctggaattcgtgattcctgcgaattgtattgtctctcaaattgagcaaatccttgttggactgtttctggaaatatctctgggattggtccaaagaagtcccaccattgcaaaaaccaattgggaaaat

SEQ ID NO: 11045 - DNA, 1182 bp, Glycine max
  Gm_smallRNAprecursor_3878
tacaaaattttgtttcagagcacctctcttcagaaacctgaaaaatggctaaatgaaagggtgcctcacaacatacttgaggactccttatatagccaaaaatctaagaccaatagttgccggtagttttgaccgggattatttgactgcttgttacaagacaagtagttttgatcgggactttaatggctacaagacaggtagtattgtccagcattaattacacattaattacaaacaaacggttttgtgatcgaaattaagtttaatctaaacagataccaaaacaatcatcttcgttttggtaaaaggggtcttcttcagcagaacttgtttcttccttctttgaggatgaaccttcttcttcctgttgtaacatttgcagaacttccttcagatttttagctaagacctcctttgatgtcaatcctgctaagaatgctgccagatgagacttttggttcaaaaacacagaagtttctgtatcagctgctttgaggaattctggatgggattggaaccagagttttacttgttctggatctgttttggatgagtcaaattatgtccaccattttacaaatgcgtgtctttgtagtgatggatattggtttgtcttttcagtcttgctgtaacgatattgccatgagaatatccatgacagtgcaaagcttgaaaagtatttaagatctgctggaattcgtgattcctgcgaattgtattgtctctcaaattgagcaaatccttgttggactgtttctggaaatatctctgggattggtccaaagaagtcccaccattgcaaaaaccaattgggaaaattgtaaattgtattggtcttgaaatatattagccatgaatgcttgaagcgggtattttggttccaaaacaccttagtccaagcatcaacgtaatcccaataggtataacctactggatcaaatggaactgagaatctttttcctttgttcaagtccgaaccaaagtgtcttggttgaagaacttttagtatttggattgtcgagtgggtgtttaatgtttggtcttttgggtctttgaaatgtttgatagatactgagtttgaatctaccaaaatcaattcataaaaagttcttgtctttaggatggtggttggtttgtagtgaaatcctggtgggaaagccttggccgtcgccttgaagg

SEQ ID NO: 11046 - DNA, 1031 bp, Glycine max
  Gm_smallRNAprecursor_3879
tgttacaagacaagtagttttgatcgggactttaatggctacaagacaggtagtattgtccagcattaattacacattaattacaaacaaacggttttgtgatcgaaattaagtttaatctaaacagataccaaaacaatcatcttcgttttggtaaaaggggtcttcttcagcagaacttgtttcttccttctttgaggatgaaccttcttcttcctgttgtaacatttgcagaacttccttcagatttttagctaagacctcctttgatgtcaatcctgctaagaatgctgccagatgagacttttggttcaaaaacacagaagtttctgtatcagctgctttgaggaattctggatgggattggaaccagagttttacttgttctggatctgttttggatgagtcaaattatgtccaccattttacaaatgcgtgtctttgtagtgatggatattggtttgtcttttcagtcttgctgtaacgatattgccatgagaatatccatgacagtgcaaagcttgaaaagtatttaagatctgctggaattcgtgattcctgcgaattgtattgtctctcaaattgagcaaatccttgttggactgtttctggaaatatctctgggattggtccaaagaagtcccaccattgcaaaaaccaattgggaaaattgtaaattgtattggtcttgaaatatattagccatgaatgcttgaagcgggtattttggttccaaaacaccttagtccaagcatcaacgtaatcccaataggtataacctactggatcaaatggaactgagaatctttttcctttgttcaagtccgaaccaaagtgtcttggttgaagaacttttagtatttggattgtcgagtgggtgtttaatgtttggtcttttgggtctttgaaatgtttgatagatactgagtttgaatctaccaaaatcaattcataaaaagttcttgtctttaggatggtggttggtttgtagtgaaatcctggtgggaaagccttggccgtcgccttgaagg

SEQ ID NO: 11047 - DNA, 1031 bp, Glycine max; identical to SEQ ID NO: 11046
  Gm_smallRNAprecursor_3880

SEQ ID NO: 11048 - DNA, 1060 bp, Glycine max
  Gm_smallRNAprecursor_3881
ttttgatcgggactttaatggctacaagacaggtagtattgtccagcattaattacacattaattacaaacaaacggttttgtgatcgaaattaagtttaatctaaacagataccaaaacaatcatcttcgttttggtaaaaggggtcttcttcagcagaacttgtttcttccttctttgaggatgaaccttcttcttcctgttgtaacatttgcagaacttccttcagatttttagctaagacctcctttgatgtcaatcctgctaagaatgctgccagatgagacttttggttcaaaaacacagaagtttctgtatcagctgctttgaggaattctggatgggattggaaccagagttttacttgttctggatctgttttggatgagtcaaattatgtccaccattttacaaatgcgtgtctttgtagtgatggatattggtttgtcttttcagtcttgctgtaacgatattgccatgagaatatccatgacagtgcaaagcttgaaaagtatttaagatctgctggaattcgtgattcctgcgaattgtattgtctctcaaattgagcaaatccttgttggactgtttctggaaatatctctgggattggtccaaagaagtcccaccattgcaaaaaccaattgggaaaattgtaaattgtattggtcttgaaatatattagccatgaatgcttgaagcgggtattttggttccaaaacaccttagtccaagcatcaacgtaatcccaataggtataacctactggatcaaatggaactgagaatctttttcctttgttcaagtccgaaccaaagtgtcttggttgaagaacttttagtatttggattgtcgagtgggtgtttaatgtttggtcttttgggtctttgaaatgtttgatagatactgagtttgaatctaccaaaatcaattcataaaaagttcttgtctttaggatggtggttggtttgtagtgaaatcctggtgggaaagccttggccgtcgccttgaagggatttttgtcccaaaattcaggttccatctgcaaaacagttgtaaa

SEQ ID NO: 11049 - DNA, 1114 bp, Glycine max
  Gm_smallRNAprecursor_3882
ttttgatcgggactttaatggctacaagacaggtagtattgtccagcattaattacacattaattacaaacaaacggttttgtgatcgaaattaagtttaatctaaacagataccaaaacaatcatcttcgttttggtaaaaggggtcttcttcagcagaacttgtttcttccttctttgaggatgaaccttcttcttcctgttgtaacatttgcagaacttccttcagatttttagctaagacctcctttgatgtcaatcctgctaagaatgctgccagatgagacttttggttcaaaaacacagaagtttctgtatcagctgctttgaggaattctggatgggattggaaccagagttttacttgttctggatctgttttggatgagtcaaattatgtccaccattttacaaatgcgtgtctttgtagtgatggatattggtttgtcttttcagtcttgctgtaacgatattgccatgagaatatccatgacagtgcaaagcttgaaaagtatttaagatctgctggaattcgtgattcctgcgaattgtattgtctctcaaattgagcaaatccttgttggactgtttctggaaatatctctgggattggtccaaagaagtcccaccattgcaaaaaccaattgggaaaattgtaaattgtattggtcttgaaatatattagccatgaatgcttgaagcgggtattttggttccaaaacaccttagtccaagcatcaacgtaatcccaataggtataacctactggatcaaatggaactgagaatctttttcctttgttcaagtccgaaccaaagtgtcttggttgaagaacttttagtatttggattgtcgagtgggtgtttaatgtttggtcttttgggtctttgaaatgtttgatagatactgagtttgaatctaccaaaatcaattcataaaaagttcttgtctttaggatggtggttggtttgtagtgaaatcctggtgggaaagccttggccgtcgccttgaagggatttttgtcccaaaattcaggttccatctgcaaaacagttgtaaatttatttttataaatataattgttagtttgtttggtaggtggtgtttgagcctt

SEQ ID NO: 11050 - DNA, 1246 bp, Glycine max
  Gm_smallRNAprecursor_3883
tttaatggctacaagacaggtagtattgtccagcattaattacacattaattacaaacaaacggttttgtgatcgaaattaagtttaatctaaacagataccaaaacaatcatcttcgttttggtaaaaggggtcttcttcagcagaacttgtttcttccttctttgaggatgaaccttcttcttcctgttgtaacatttgcagaacttccttcagatttttagctaagacctcctttgatgtcaatcctgctaagaatgctgccagatgagacttttggttcaaaaacacagaagtttctgtatcagctgctttgaggaattctggatgggattggaaccagagttttacttgttctggatctgttttggatgagtcaaattatgtccaccattttacaaatgcgtgtctttgtagtgatggatattggtttgtcttttcagtcttgctgtaacgatattgccatgagaatatccatgacagtgcaaagcttgaaaagtatttaagatctgctggaattcgtgattcctgcgaattgtattgtctctcaaattgagcaaatccttgttggactgtttctggaaatatctctgggattggtccaaagaagtcccaccattgcaaaaaccaattgggaaaattgtaaattgtattggtcttgaaatatattagccatgaatgcttgaagcgggtattttggttccaaaacaccttagtccaagcatcaacgtaatcccaataggtataacctactggatcaaatggaactgagaatctttttcctttgttcaagtccgaaccaaagtgtcttggttgaagaacttttagtatttggattgtcgagtgggtgtttaatgtttggtcttttgggtctttgaaatgtttgatagatactgagtttgaatctaccaaaatcaattcataaaaagttcttgtctttaggatggtggttggtttgtagtgaaatcctggtgggaaagccttggccgtcgccttgaagggatttttgtcccaaaattcaggttccatctgcaaaacagttgtaaatttatttttataaatataattgttagtttgtttggtaggtggtgtttgagccttggctaaaggtagttttcctttagtattggtggctgttttggtcattgaggcattttggatcattgtttgtaaatttgattcagattcatcatcagattctgaggcaatgtctgcccaagattttttgattatttttggaaatttg

SEQ ID NO: 11051 - DNA, 1246 bp, Glycine max; identical to SEQ ID NO: 11050
  Gm_smallRNAprecursor_3884

SEQ ID NO: 11052 - DNA, 1138 bp, Glycine max
  Gm_smallRNAprecursor_3885
ccaaaacaatcatcttcgttttggtaaaaggggtcttcttcagcagaacttgtttcttccttctttgaggatgaaccttcttcttcctgttgtaacatttgcagaacttccttcagatttttagctaagacctcctttgatgtcaatcctgctaagaatgctgccagatgagacttttggttcaaaaacacagaagtttctgtatcagctgctttgaggaattctggatgggattggaaccagagttttacttgttctggatctgttttggatgagtcaaattatgtccaccattttacaaatgcgtgtctttgtagtgatggatattggtttgtcttttcagtcttgctgtaacgatattgccatgagaatatccatgacagtgcaaagcttgaaaagtatttaagatctgctggaattcgtgattcctgcgaattgtattgtctctcaaattgagcaaatccttgttggactgtttctggaaatatctctgggattggtccaaagaagtcccaccattgcaaaaaccaattgggaaaattgtaaattgtattggtcttgaaatatattagccatgaatgcttgaagcgggtattttggttccaaaacaccttagtccaagcatcaacgtaatcccaataggtataacctactggatcaaatggaactgagaatctttttcctttgttcaagtccgaaccaaagtgtcttggttgaagaacttttagtatttggattgtcgagtgggtgtttaatgtttggtcttttgggtctttgaaatgtttgatagatactgagtttgaatctaccaaaatcaattcataaaaagttcttgtctttaggatggtggttggtttgtagtgaaatcctggtgggaaagccttggccgtcgccttgaagggatttttgtcccaaaattcaggttccatctgcaaaacagttgtaaatttatttttataaatataattgttagtttgtttggtaggtggtgtttgagccttggctaaaggtagttttcctttagtattggtggctgttttggtcattgaggcattttggatcattgtttgtaaatttgattcagattcatcatcagattctgaggcaatgtctgcccaagattttttgattatttttg

SEQ ID NO: 11053 - DNA, 1077 bp, Glycine max
  Gm_smallRNAprecursor_3886
tgatgtcaatcctgctaagaatgctgccagatgagacttttggttcaaaaacacagaagtttctgtatcagctgctttgaggaattctggatgggattggaaccagagttttacttgttctggatctgttttggatgagtcaaattatgtccaccattttacaaatgcgtgtctttgtagtgatggatattggtttgtcttttcagtcttgctgtaacgatattgccatgagaatatccatgacagtgcaaagcttgaaaagtatttaagatctgctggaattcgtgattcctgcgaattgtattgtctctcaaattgagcaaatccttgttggactgtttctggaaatatctctgggattggtccaaagaagtcccaccattgcaaaaaccaattgggaaaattgtaaattgtattggtcttgaaatatattagccatgaatgcttgaagcgggtattttggttccaaaacaccttagtccaagcatcaacgtaatcccaataggtataacctactggatcaaatggaactgagaatctttttcctttgttcaagtccgaaccaaagtgtcttggttgaagaacttttagtatttggattgtcgagtgggtgtttaatgtttggtcttttgggtctttgaaatgtttgatagatactgagtttgaatctaccaaaatcaattcataaaaagttcttgtctttaggatggtggttggtttgtagtgaaatcctggtgggaaagccttggccgtcgccttgaagggatttttgtcccaaaattcaggttccatctgcaaaacagttgtaaatttatttttataaatataattgttagtttgtttggtaggtggtgtttgagccttggctaaaggtagttttcctttagtattggtggctgttttggtcattgaggcattttggatcattgtttgtaaatttgattcagattcatcatcagattctgaggcaatgtctgcccaagattttttgattatttttggaaatttggttagacccatgtcttgaagggcctgaagggtttcaattggccatgcatagttggccgatgtttgttt

SEQ ID NO: 11054 - DNA, 1174 bp, Glycine max
  Gm_smallRNAprecursor_3887
cgggtattttggttccaaaacaccttagtccaagcatcaacgtaatcccaataggtataacctactggatcaaatggaactgagaatctttttcctttgttcaagtccgaaccaaagtgtcttggttgaagaacttttagtatttggattgtcgagtgggtgtttaatgtttggtcttttgggtctttgaaatgtttgatagatactgagtttgaatctaccaaaatcaattcataaaaagttcttgtctttaggatggtggttggtttgtagtgaaatcctggtgggaaagccttggccgtcgccttgaagggatttttgtcccaaaattcaggttccatctgcaaaacagttgtaaatttatttttataaatataattgttagtttgtttggtaggtggtgtttgagccttggctaaaggtagttttcctttagtattggtggctgttttggtcattgaggcattttggatcattgtttgtaaatttgattcagattcatcatcagattctgaggcaatgtctgcccaagattttttgattatttttggaaatttggttagacccatgtcttgaagggcctgaagggtttcaattggccatgcatagttggccgatgtttgtttgacgattgccggtttgggagattcctgaatggatggctcaggtttgattgaggcaatctgggttgatgacccttctaaattggttttctgggtagatgacccagcctgggttggtgacccagaaaaggttgatgatttcttgatggttggctctagaagagccagtctggctcctttgcctgtactccttcctccccttagggagattcccgatgccttaggaggcattaccacttttctgtaagaattcacgggtaaggtagtcaggtaatgaatttgaggtgccctcgacgtattctatgtcaaaatcaaagacacttagaattgcttgtcatcttgcaaaaatttgttttgaggcaaggtttttaacatctttttgtagaatatctttggttgatttacaatcaaccctgattaaaaatttttggtttaataaatccgattgaaatttggaaatgcacaaaacaattgctaaaacatcctttttaacagttgaatattttaattgtgcaggattccaatgttttgatgtatatgcaatgacatga

SEQ ID NO: 11055 - DNA, 1173 bp, Glycine max
  Gm_smallRNAprecursor_3888
gggtattttggttccaaaacaccttagtccaagcatcaacgtaatcccaataggtataacctactggatcaaatggaactgagaatctttttcctttgttcaagtccgaaccaaagtgtcttggttgaagaacttttagtatttggattgtcgagtgggtgtttaatgtttggtcttttgggtctttgaaatgtttgatagatactgagtttgaatctaccaaaatcaattcataaaaagttcttgtctttaggatggtggttggtttgtagtgaaatcctggtgggaaagccttggccgtcgccttgaagggatttttgtcccaaaattcaggttccatctgcaaaacagttgtaaatttatttttataaatataattgttagtttgtttggtaggtggtgtttgagccttggctaaaggtagttttcctttagtattggtggctgttttggtcattgaggcattttggatcattgtttgtaaatttgattcagattcatcatcagattctgaggcaatgtctgcccaagattttttgattatttttggaaatttggttagacccatgtcttgaagggcctgaagggtttcaattggccatgcatagttggccgatgtttgtttgacgattgccggtttgggagattcctgaatggatggctcaggtttgattgaggcaatctgggttgatgacccttctaaattggttttctgggtagatgacccagcctgggttggtgacccagaaaaggttgatgatttcttgatggttggctctagaagagccagtctggctcctttgcctgtactccttcctccccttagggagattcccgatgccttaggaggcattaccacttttctgtaagaattcacgggtaaggtagtcaggtaatgaatttgaggtgccctcgacgtattctatgtcaaaatcaaagacacttagaattgcttgtcatcttgcaaaaatttgttttgaggcaaggtttttaacatctttttgtagaatatctttggttgatttacaatcaaccctgattaaaaatttttggtttaataaatccgattgaaatttggaaatgcacaaaacaattgctaaaacatcctttttaacagttgaatattttaattgtgcaggattccaatgttttgatgtatatgcaatgacatga

SEQ ID NO: 11056 - DNA, 1176 bp, Glycine max
  Gm_smallRNAprecursor_3889
gggtattttggttccaaaacaccttagtccaagcatcaacgtaatcccaataggtataacctactggatcaaatggaactgagaatctttttcctttgttcaagtccgaaccaaagtgtcttggttgaagaacttttagtatttggattgtcgagtgggtgtttaatgtttggtcttttgggtctttgaaatgtttgatagatactgagtttgaatctaccaaaatcaattcataaaaagttcttgtctttaggatggtggttggtttgtagtgaaatcctggtgggaaagccttggccgtcgccttgaagggatttttgtcccaaaattcaggttccatctgcaaaacagttgtaaatttatttttataaatataattgttagtttgtttggtaggtggtgtttgagccttggctaaaggtagttttcctttagtattggtggctgttttggtcattgaggcattttggatcattgtttgtaaatttgattcagattcatcatcagattctgaggcaatgtctgcccaagattttttgattatttttggaaatttggttagacccatgtcttgaagggcctgaagggtttcaattggccatgcatagttggccgatgtttgtttgacgattgccggtttgggagattcctgaatggatggctcaggtttgattgaggcaatctgggttgatgacccttctaaattggttttctgggtagatgacccagcctgggttggtgacccagaaaaggttgatgatttcttgatggttggctctagaagagccagtctggctcctttgcctgtactccttcctccccttagggagattcccgatgccttaggaggcattaccacttttctgtaagaattcacgggtaaggtagtcaggtaatgaatttgaggtgccctcgacgtattctatgtcaaaatcaaagacacttagaattgcttgtcatcttgcaaaaatttgttttgaggcaaggtttttaacatctttttgtagaatatctttggttgatttacaatcaaccctgattaaaaatttttggtttaataaatccgattgaaatttggaaatgcacaaaacaattgctaaaacatcctttttaacagttgaatattttaattgtgcaggattccaatgttttgatgtatatgcaatgacatgatct

SEQ ID NO: 11057 - DNA, 1129 bp, Glycine max
  Gm_smallRNAprecursor_3890
ctgcaaaacagttgtaaatttatttttataaatataattgttagtttgtttggtaggtggtgtttgagccttggctaaaggtagttttcctttagtattggtggctgttttggtcattgaggcattttggatcattgtttgtaaatttgattcagattcatcatcagattctgaggcaatgtctgcccaagattttttgattatttttggaaatttggttagacccatgtcttgaagggcctgaagggtttcaattggccatgcatagttggccgatgtttgtttgacgattgccggtttgggagattcctgaatggatggctcaggtttgattgaggcaatctgggttgatgacccttctaaattggttttctgggtagatgacccagcctgggttggtgacccagaaaaggttgatgatttcttgatggttggctctagaagagccagtctggctcctttgcctgtactccttcctccccttagggagattcccgatgccttaggaggcattaccacttttctgtaagaattcacgggtaaggtagtcaggtaatgaatttgaggtgccctcgacgtattctatgtcaaaatcaaagacacttagaattgcttgtcatcttgcaaaaatttgttttgaggcaaggtttttaacatctttttgtagaatatctttggttgatttacaatcaaccctgattaaaaatttttggtttaataaatccgattgaaatttggaaatgcacaaaacaattgctaaaacatcctttttaacagttgaatattttaattgtgcaggattccaatgttttgatgtatatgcaatgacatgatcttggccatggactctttgtttgaggatgccaccataacctatgtctgaagcatcagtttcgacaattttaaatgtctgtggaataggaagatacagacattttatggattggactttgactttgatttctttaactgtttgtgtatggaggtcagaccaaggaggcggatttttcttcagcctatcatgcaatggcttgacaatattgtttaagtaggggacaaattctcctacgtaatttagacaacctagaaatctttgtaattgggttttgtctaagatttggttgggaaa

SEQ ID NO: 11058 - DNA, 1115 bp, Glycine max
  Gm_smallRNAprecursor_3891
taaatttatttttataaatataattgttagtttgtttggtaggtggtgtttgagccttggctaaaggtagttttcctttagtattggtggctgttttggtcattgaggcattttggatcattgtttgtaaatttgattcagattcatcatcagattctgaggcaatgtctgcccaagattttttgattatttttggaaatttggttagacccatgtcttgaagggcctgaagggtttcaattggccatgcatagttggccgatgtttgtttgacgattgccggtttgggagattcctgaatggatggctcaggtttgattgaggcaatctgggttgatgacccttctaaattggttttctgggtagatgacccagcctgggttggtgacccagaaaaggttgatgatttcttgatggttggctctagaagagccagtctggctcctttgcctgtactccttcctccccttagggagattcccgatgccttaggaggcattaccacttttctgtaagaattcacgggtaaggtagtcaggtaatgaatttgaggtgccctcgacgtattctatgtcaaaatcaaagacacttagaattgcttgtcatcttgcaaaaatttgttttgaggcaaggtttttaacatctttttgtagaatatctttggttgatttacaatcaaccctgattaaaaatttttggtttaataaatccgattgaaatttggaaatgcacaaaacaattgctaaaacatcctttttaacagttgaatattttaattgtgcaggattccaatgttttgatgtatatgcaatgacatgatcttggccatggactctttgtttgaggatgccaccataacctatgtctgaagcatcagtttcgacaattttaaatgtctgtggaataggaagatacagacattttatggattggactttgactttgatttctttaactgtttgtgtatggaggtcagaccaaggaggcggatttttcttcagcctatcatgcaatggcttgacaatattgtttaagtaggggacaaattctcctacgtaatttagacaacctagaaatctttgtaattgggttttgtctaagatttggttgggaaa

SEQ ID NO: 11059 - DNA, 1071 bp, Glycine max
  Gm_smallRNAprecursor_3892
taaattggttttctgggtagatgacccagcctgggttggtgacccagaaaaggttgatgatttcttgatggttggctctagaagagccagtctggctcctttgcctgtactccttcctccccttagggagattcccgatgccttaggaggcattaccacttttctgtaagaattcacgggtaaggtagtcaggtaatgaatttgaggtgccctcgacgtattctatgtcaaaatcaaagacacttagaattgcttgtcatcttgcaaaaatttgttttgaggcaaggtttttaacatctttttgtagaatatctttggttgatttacaatcaaccctgattaaaaatttttggtttaataaatccgattgaaatttggaaatgcacaaaacaattgctaaaacatcctttttaacagttgaatattttaattgtgcaggattccaatgttttgatgtatatgcaatgacatgatcttggccatggactctttgtttgaggatgccaccataacctatgtctgaagcatcagtttcgacaattttaaatgtctgtggaataggaagatacagacattttatggattggactttgactttgatttctttaactgtttgtgtatggaggtcagaccaaggaggcggatttttcttcagcctatcatgcaatggcttgacaatattgtttaagtaggggacaaattctcctacgtaatttagacaacctagaaatctttgtaattgggttttgtctaagatttggttgggaaatttgctagcaaactctattgacctttctataggaatgattgtaccttgatatatattgtgaccaaggaatcggattcgagtttggaaaagattgatttttgatttggagactgccaaaccattttgtttgatgatatggatgaaggtttggagatgtttgaaatgttggtcaatgttttgggaaaagattaaagcatcatctatgtagacaatgacaaattttgaatagggattaaaaatatcattcataattttttgaaattctgaaggggcattcttcagtccgaatggcatcacgttcc

SEQ ID NO: 11060 - DNA, 1232 bp, Glycine max
  Gm_smallRNAprecursor_3893
aattgcttgtcatcttgcaaaaatttgttttgaggcaaggtttttaacatctttttgtagaatatctttggttgatttacaatcaaccctgattaaaaatttttggtttaataaatccgattgaaatttggaaatgcacaaaacaattgctaaaacatcctttttaacagttgaatattttaattgtgcaggattccaatgttttgatgtatatgcaatgacatgatcttggccatggactctttgtttgaggatgccaccataacctatgtctgaagcatcagtttcgacaattttaaatgtctgtggaataggaagatacagacattttatggattggactttgactttgatttctttaactgtttgtgtatggaggtcagaccaaggaggcggatttttcttcagcctatcatgcaatggcttgacaatattgtttaagtaggggacaaattctcctacgtaatttagacaacctagaaatctttgtaattgggttttgtctaagatttggttgggaaatttgctagcaaactctattgacctttctataggaatgattgtaccttgatatatattgtgaccaaggaatcggattcgagtttggaaaagattgatttttgatttggagactgccaaaccattttgtttgatgatatggatgaaggtttggagatgtttgaaatgttggtcaatgttttgggaaaagattaaagcatcatctatgtagacaatgacaaattttgaatagggattaaaaatatcattcataattttttgaaattctgaaggggcattcttcagtccgaatggcatcacgttccattcatattgcccgaaaggtacagtaaaggttgttttgtacctatctgattcttggatttggatttgccaaaatccagatttcatatcaaattttgaaaatatctttgcagaatttaatctgttaagcaaatcttttttgtttggaataggatatctaatccattgtaatgcttgatttagtggtttgtaatttatgactaagcggggtgttccacgctcaatctcagattgtttgttgacataaaaagccgcacaagaccacgggcttttgcttttccggattaggcctttatcaagcaaatccttgatttccttttgacagtattgaagaagttcttcattcatttggattggtctggcttttgcgggaatttgtttttccctaaagtctttctcataagggagat

SEQ ID NO: 11061 - DNA, 1076 bp, Glycine max
  Gm_smallRNAprecursor_3894
cccatctttcgggaagagttacttcatcccattttatttttctcgggagagaaacgttagcctttgtcatatcagtgataaacaaagttgtttctccttttgaggttttaacaagactctagatgcacaagtattcatgaccttgtactggatcctataaattaaggctgatgggattgatccttctttcatgtcaagaccatgaaagtggatgtttaagaacagagaatcaataatgtttctgtccatcagactcactgttttgtttggataacaattaaaatatattggaccttgtcctaggctggtttcgactgttccaattagggagtcttcaaattgattatgcctaatatctcttagacacattaaaactgctgcatctatgcccatatcaattaagggcttgatggctacttgtacacaaccgatgtgtagatatttatacttacggctatgttcataaattgaattttttgaaagtaaatgaaattcttcccctatatcttgtcctagaggaatattgttttctactgttttgattatgtaatcaaagttgtgtttgtccttaattgtttcaggaacgtatagttgatcctgagggatttctggaatgttccagtcatccatgttttgattgatatcttcgaatctgacttcctcatcgaagagattgtgtttgggggcgacctcttgggtctggttatcttgatcgtttaataaattggagtttcttgaagaagattatgaggaggaatttgatcgaaaagagatacgggaaaaagatcgcaatagtctagacacgattataacattctctaatatctttgcttcacttggtttcatagaaatatttccataaggctatatgttacagaacttcttggatctgaataaatgaaaaagattttttttttcaacagacaatatagtttgaacactactcctatagccaccagtatattatgtctcaatattttatttgaacaatacaccttagccttactgccctttctcaaccacgggacttactgctacagtatctttcaactaaaatatcagactgctgtgcttcc

SEQ ID NO: 11062 - DNA, 1159 bp, Glycine max
  Gm_smallRNAprecursor_3895
cccatctttcgggaagagttacttcatcccattttatttttctcgggagagaaacgttagcctttgtcatatcagtgataaacaaagttgtttctccttttgaggttttaacaagactctagatgcacaagtattcatgaccttgtactggatcctataaattaaggctgatgggattgatccttctttcatgtcaagaccatgaaagtggatgtttaagaacagagaatcaataatgtttctgtccatcagactcactgttttgtttggataacaattaaaatatattggaccttgtcctaggctggtttcgactgttccaattagggagtcttcaaattgattatgcctaatatctcttagacacattaaaactgctgcatctatgcccatatcaattaagggcttgatggctacttgtacacaaccgatgtgtagatatttatacttacggctatgttcataaattgaattttttgaaagtaaatgaaattcttcccctatatcttgtcctagaggaatattgttttctactgttttgattatgtaatcaaagttgtgtttgtccttaattgtttcaggaacgtatagttgatcctgagggatttctggaatgttccagtcatccatgttttgattgatatcttcgaatctgacttcctcatcgaagagattgtgtttgggggcgacctcttgggtctggttatcttgatcgtttaataaattggagtttcttgaagaagattatgaggaggaatttgatcgaaaagagatacgggaaaaagatcgcaatagtctagacacgattataacattctctaatatctttgcttcacttggtttcatagaaatatttccataaggctatatgttacagaacttcttggatctgaataaatgaaaaagattttttttttcaacagacaatatagtttgaacactactcctatagccaccagtatattatgtctcaatattttatttgaacaatacaccttagccttactgccctttctcaaccacgggacttactgctacagtatctttcaactaaaatatcagactgctgtgcttccagaaaatactgttcaaacacatactgtttaaattaaaattattgtacatggttcagatccataagttcagttaacatatgccc

SEQ ID NO: 11063 - DNA, 1056 bp, Glycine max
  Gm_smallRNAprecursor_3896
gaacgtatagttgatcctgagggatttctggaatgttccagtcatccatgttttgattgatatcttcgaatctgacttcctcatcgaagagattgtgtttgggggcgacctcttgggtctggttatcttgatcgtttaataaattggagtttcttgaagaagattatgaggaggaatttgatcgaaaagagatacgggaaaaagatcgcaatagtctagacacgattataacattctctaatatctttgcttcacttggtttcatagaaatatttccataaggctatatgttacagaacttcttggatctgaataaatgaaaaagattttttttttcaacagacaatatagtttgaacactactcctatagccaccagtatattatgtctcaatattttatttgaacaatacaccttagccttactgccctttctcaaccacgggacttactgctacagtatctttcaactaaaatatcagactgctgtgcttccagaaaatactgttcaaacacatactgtttaaattaaaattattgtacatggttcagatccataagttcagttaacatatgcccttacggacactattcctacttctccccattaggcaaagataactccggaaaggtaggatatcaagggcacaaatttcataatacatttttattttgatgataaatgagagatgaaggagatcaataatttaatgtttatgagagatgaaggatgatgatgtatgaaaattaaatacagataaaaataaaagaggagagagaaatatttattttaaaattgaatcataaattattataatattattacattaaacatcacacaaaagaatttaatagttttttgtctaaatattttttttgtctaaaatagtatatgcattagcattcccatatatatatatgtatgtatgtatgtatgtatgtatagaggttataataaactaaattatatgttgtatgctatttattttttatatgtaggaatcaaatataagtataaaaaaatttataataatttacgcatattatttaaacaatt

SEQ ID NO: 11064 - DNA, 1049 bp, Glycine max
  Gm_smallRNAprecursor_3897
gtatagttgatcctgagggatttctggaatgttccagtcatccatgttttgattgatatcttcgaatctgacttcctcatcgaagagattgtgtttgggggcgacctcttgggtctggttatcttgatcgtttaataaattggagtttcttgaagaagattatgaggaggaatttgatcgaaaagagatacgggaaaaagatcgcaatagtctagacacgattataacattctctaatatctttgcttcacttggtttcatagaaatatttccataaggctatatgttacagaacttcttggatctgaataaatgaaaaagattttttttttcaacagacaatatagtttgaacactactcctatagccaccagtatattatgtctcaatattttatttgaacaatacaccttagccttactgccctttctcaaccacgggacttactgctacagtatctttcaactaaaatatcagactgctgtgcttccagaaaatactgttcaaacacatactgtttaaattaaaattattgtacatggttcagatccataagttcagttaacatatgcccttacggacactattcctacttctccccattaggcaaagataactccggaaaggtaggatatcaagggcacaaatttcataatacatttttattttgatgataaatgagagatgaaggagatcaataatttaatgtttatgagagatgaaggatgatgatgtatgaaaattaaatacagataaaaataaaagaggagagagaaatatttattttaaaattgaatcataaattattataatattattacattaaacatcacacaaaagaatttaatagttttttgtctaaatattttttttgtctaaaatagtatatgcattagcattcccatatatatatatgtatgtatgtatgtatgtatgtatagaggttataataaactaaattatatgttgtatgctatttattttttatatgtaggaatcaaatataagtataaaaaaatttataataatttacgcatattatttaaaca

SEQ ID NO: 11065 - DNA, 1052 bp, Glycine max
  Gm_smallRNAprecursor_3898
gtatagttgatcctgagggatttctggaatgttccagtcatccatgttttgattgatatcttcgaatctgacttcctcatcgaagagattgtgtttgggggcgacctcttgggtctggttatcttgatcgtttaataaattggagtttcttgaagaagattatgaggaggaatttgatcgaaaagagatacgggaaaaagatcgcaatagtctagacacgattataacattctctaatatctttgcttcacttggtttcatagaaatatttccataaggctatatgttacagaacttcttggatctgaataaatgaaaaagattttttttttcaacagacaatatagtttgaacactactcctatagccaccagtatattatgtctcaatattttatttgaacaatacaccttagccttactgccctttctcaaccacgggacttactgctacagtatctttcaactaaaatatcagactgctgtgcttccagaaaatactgttcaaacacatactgtttaaattaaaattattgtacatggttcagatccataagttcagttaacatatgcccttacggacactattcctacttctccccattaggcaaagataactccggaaaggtaggatatcaagggcacaaatttcataatacatttttattttgatgataaatgagagatgaaggagatcaataatttaatgtttatgagagatgaaggatgatgatgtatgaaaattaaatacagataaaaataaaagaggagagagaaatatttattttaaaattgaatcataaattattataatattattacattaaacatcacacaaaagaatttaatagttttttgtctaaatattttttttgtctaaaatagtatatgcattagcattcccatatatatatatgtatgtatgtatgtatgtatgtatagaggttataataaactaaattatatgttgtatgctatttattttttatatgtaggaatcaaatataagtataaaaaaatttataataatttacgcatattatttaaacaatt

SEQ ID NO: 11066 - DNA, 1064 bp, Glycine max
  Gm_smallRNAprecursor_3899
gtatagttgatcctgagggatttctggaatgttccagtcatccatgttttgattgatatcttcgaatctgacttcctcatcgaagagattgtgtttgggggcgacctcttgggtctggttatcttgatcgtttaataaattggagtttcttgaagaagattatgaggaggaatttgatcgaaaagagatacgggaaaaagatcgcaatagtctagacacgattataacattctctaatatctttgcttcacttggtttcatagaaatatttccataaggctatatgttacagaacttcttggatctgaataaatgaaaaagattttttttttcaacagacaatatagtttgaacactactcctatagccaccagtatattatgtctcaatattttatttgaacaatacaccttagccttactgccctttctcaaccacgggacttactgctacagtatctttcaactaaaatatcagactgctgtgcttccagaaaatactgttcaaacacatactgtttaaattaaaattattgtacatggttcagatccataagttcagttaacatatgcccttacggacactattcctacttctccccattaggcaaagataactccggaaaggtaggatatcaagggcacaaatttcataatacatttttattttgatgataaatgagagatgaaggagatcaataatttaatgtttatgagagatgaaggatgatgatgtatgaaaattaaatacagataaaaataaaagaggagagagaaatatttattttaaaattgaatcataaattattataatattattacattaaacatcacacaaaagaatttaatagttttttgtctaaatattttttttgtctaaaatagtatatgcattagcattcccatatatatatatgtatgtatgtatgtatgtatgtatagaggttataataaactaaattatatgttgtatgctatttattttttatatgtaggaatcaaatataagtataaaaaaatttataataatttacgcatattatttaaacaattgagttaaatctt

SEQ ID NO: 11067 - DNA, 1079 bp, Glycine max
  Gm_smallRNAprecursor_3900
gaactatcatgatactaatctatcatgaaaactctagaaagacctaaagtaatgtagaaacattcaccaccattgagaggttggtgacttgagcctataaatatgcaattggtatgttgtaattgatcatccaagaaatcaatgacatagccttctttctaaaacaattctctaaaactatcaactatcaaccatcaactatcatctaattaactaccaacactggtatcagagctatgttcggtcatacattgggcgtagttatattacctacctaccattccaaaatcctcccaactacttcaaaaatttcctttgtactattaacctactccaataatattttttccaagctatggataacactactcaatcgtcaattatttctctccctatcttcaatggtgaaaattatgatttcttgcgtgttaaaatggaaacatatttttcatctcaagatttatgggacatagtagaagaaggcttcaccgttcccgcgaatacttcagctcttaatgcatctcaagaaaaagagttgaagaaaaataaacagaaaaattcaaaggcgttgttcaccttgcaacaagcggtgactgatccaattttcccaagaattatgggagctaagactgccaaagaagcgtgaaacacattgcaggaggagtttcaaggaagtgttaaggtacatgccgttaaacttcaatctctaagaggagattttgaactattgaagatgaaggagtctgagacagttaaagattactattctaaagttaaagaaatagttaatcaaatgagagcttttggggaagaaattcttgacaagaaaattgttgagaaaattctaattactatgccccaaaagtttgacccaatcgtgacaacgattgaggaaaccaaagatctgtccactctatcagagacataacttgtgggctctcttgaagcatatgagcaaagattgtataggcataaagaagatacacttgaaaatgccttccagtcaaagtttaaatttcagccccaaaacaaagaaaatggaggaaagaaaaattatggagaaacttccagaagaagag

SEQ ID NO: 11068 - DNA, 1119 bp, Glycine max
  Gm_smallRNAprecursor_3901
cttgtttctctcagcaccgagtccccatcaacccctccaagctttcacaatatccaaacaattcgattccaattatcatgaaactaccctaaaccaagaaaaacatagtggaggcagaaaattctgcacaaagctcatccaaattccacagtttttcctactcacatgccccagtaacattctcttcgttccgattcgttaaccattggattgccttgaaaattttactggaggttcctaatacagaaatctaaattttgaccgttgggatctgctatagaatgcctagaacacgagatgtactacctttcccgtgactagcactgcacaaccatttttctgcacatttggtcaaatttgctgcacaatttgacagcttttgctgcacaatttggcagatttcgaattctagcttgcttgtatccaatttcactcaaattggatcctacaagtcctaaaccatgtctaaatcatgtttaaaccaaaaacaaacttcagaccaaggcaaatcaaaatataggtatccaaaacccaccaatttagtgaattctcaaggtttgaaaggtgaaaatgagaattgggtaattttggggtaaactctcatcttcatcaagtctataacattgatttagacttgttcaaactggttttaaggtgaaaactccacctattcaaaatttgacctctcaacacccaatttaccctagaaatggctcttttcattcacatttgtcactcatttttctcatttgctctgcccaagctttcctacaagtcctaattggcattctaaactagaatcaactcaatttagactccaatttccactaaccccaaatttggcttttctaaccctcaaaatctcacatttttccacccacaacactaccattctcacatttgactctaagttaactctccccatcctctctaccagttttctatcaatattttaagcatacatatatcacaaagcatcattattaaaccctagatcagcatgggtcgttttatttacatcaaacatgtcaagtttagcatgatttcaacaaattccttcacaaataactaccctaaggcaataacctagtagaactacccatcatagctcccaaaaac

SEQ ID NO: 11069 - DNA, 1190 bp, Glycine max
  Gm_smallRNAprecursor_3902
tcaacctctaatcttgaggacttatcagatgaatatgagacttgttgggtcaaaaaccatgatagtgatactgtctcctcttccaggcccgaaggaagtaacctgtctccatcccacgaacctatattcaaacggaattggtaatctgcggattcatgtctaggttatttcttctttgagattttcatgtaatgtcttatgtccgtcttcaattatcactttacgtattgaaataatttttcctttaaattgaaattagcaatttttagtttacccacttttactgcagtagttgacatggtaacataactgtcaaaattcacaatactttgccatttacactacaatgtttctaaaaattaaatgtcgcatcgacaaaactgacatgaaatggacaactcataatgtctttgttcactctgaaaataattatggatgtttgctgctttaattacaagggaaaaatcacagtccaaattgacaatactctgcaatttgcacacgtctctaaaaattaaatgtctcacctgcaaaactgacatgaaatggatagttcataatctctttgtttactctgaaaatcatcatgaacgtatgctgctttaattacatgggaaaaatcacagtccaaattgacaacactctgcattatgagctgtccatttcatatcagttttgcaggtgagacatttaatttttagagacgtgtgcaaaactgacatgagatggacaactcataatctctttgttcactctgaaattataatggacgtttgctacatcacttactagggagaaagaaacattggattcctatacacatcaacgtggcagaatactcatacaactataaataacattacacatacacaatacaaacacacaatctcacacaacataatttcacaaataaaattcaatcttattactatgtcatttttgggagaaacaagcagtcagaccattgctaactccatattagctttctacaattgaaaaatgatgatgatgtttacacaatgttaatatacagtgagcaatactcgtgtgttggtcctatagaattattatgtaccattattagaacaccagatgctatactcaacctgcttcaatcaaccatcactcctactcatgatgtattacaacgggaagtggaacataccacatcaaggtgagtttttgggtta

SEQ ID NO: 11070 - DNA, 1116 bp, Glycine max
  Gm_smallRNAprecursor_3903
ttcataacccccacgagacaatacgtggggggcagtgttttacttctgggaggcctgtgcctttttccgtacatcctgcaaaagtttaacattaatgaaaatgattattacaataaattataagaattgattttgttgaggaaaacaactaaaatgacaaagtgcatacctcccatgaggggtctctgcgggtctgacaaaactgagtccatttctccttgctaatgccatatttttcacagacaatgtcgtccgcaccgtccttgtcgactacaagtgcccatttcctagtcaagtcagatttaaactgcctccagcgctcgccgacaatctgaagaattttcttctttgtcctactgtgagaagcttcagggatttgaaattccgcctgacaaacaataaattaggttttattgtaagtaaataacaaatttagactattaaagaaaatcaacgaagaaaactcaaataactgaatatcctcccatatcaaatccttctgagcagtagggacttccttccaggtgtcatatgtcacgtcgaccttatcacgagcgacaatccccaaatatgttcttaatttcttcttgtggggaccgtcggccttgccggtagcaggatcgacgttgaccacaggtctttctgccccaggtggtctagtggccaatgatcgtagccgtgtcgccttgcgtgtccgcttcaacgtagatggagacgcatcagcgtctgcaggaggaggaggaagaggaggaggaggcgaagcaggtggagtagccatggtcctttaaagagaaaaagttgagttagttaatattatcaaaaaacactatatgagttatgtaaatgaatgtaccgaaatgaaatattatattagaaaattacgttagacgatgttaattaattctccttcatcatgatcatttcgattagcatgaacgtcgtcagcttcttcttctccgatgttgttagaagtcatttgtgtagacaaaggactaacaccaattgttttcccgtttagaaccacagaccacctttcatcacaagggtcttgcacataaaatacttgcttagcttgttctgccatgatgaaagggtcattctggtaagctagtttct

SEQ ID NO: 11071 - DNA, 1157 bp, Glycine max
  Gm_smallRNAprecursor_3904
aagaccagtaaaacaactaccaagaagattcgcaccagaaatcatgtccaagattaaggaagagatcgaaaggctgctgaggtgtaaattcatcagggctgccaggtatgtcgaatggttagcaaatatagtccctgttattaagaagaatggaactcttagagtatgcatagattttagggatttaaataatgctacacctaaagatgagtatgctatgccagtagcggaaatgttggtagattcggcagctggcttcgaatttttaagcatgttagatggttattctggttataaccaaatatttattgctgaaagtgatgtgtcgaaaacagcatttcgatgccctggtactttaggcacttatgaatgggtggttatgccctttgggttgaaaaatgctggggccacttatcaaagggccatgaattccatgtttcatgattttattgacacatttatgcaagtttatattgatgatataatcatcaaatcctcttcagaagatagccatttggattaccttaggcaatctttcgaacgaatgaggaaacatggattaaaaatgaatccattaaaatgtgctttttgcgtgcgtgcaggagacttccttggttttgtggtgcataagaaaggcattgagataaatcaaaacaagacaaaggctattcttgagacgaagcctccttcgaccaaaaaacagcttcagtctttgctaggaaaaatcaacttcttgaggcgattcatttcgaatctaagtggcaaagttcaaattttttcgccattacttcgactcaagaaagatgaaccgttcaaatggaatgaagagcatcaaaaggctttcgatgaaattaaagaatatctgatcaagcctcccgtgttaatgcctcctagtcgaaacaagtctatgaagttgtatattgctgcgtctgataagaccattggtagcatgttggctcaggaagatgatgatggcatagaacatgcaatttattatcttagtcgtgtactaaatgatgcagaagctagatatactgccatagaaaaactttgtctttgtttgtatttctcttgtgcaaaacttaagcaatatataaagcctgttgatgtttatgtgtattctcattatgatattattaagcacatgttgtcaaaac

SEQ ID NO: 11072 - DNA, 1114 bp, Glycine max
  Gm_smallRNAprecursor_3905
aatctaagtggcaaagttcaaattttttcgccattacttcgactcaagaaagatgaaccgttcaaatggaatgaagagcatcaaaaggctttcgatgaaattaaagaatatctgatcaagcctcccgtgttaatgcctcctagtcgaaacaagtctatgaagttgtatattgctgcgtctgataagaccattggtagcatgttggctcaggaagatgatgatggcatagaacatgcaatttattatcttagtcgtgtactaaatgatgcagaagctagatatactgccatagaaaaactttgtctttgtttgtatttctcttgtgcaaaacttaagcaatatataaagcctgttgatgtttatgtgtattctcattatgatattattaagcacatgttgtcaaaacctattttacacagtagaattggaaaatgggctttagcattaacagaatattctttaacgtacaagcctttgaaatctgttaagggtcaaattgtggcagattttattgtagatcactcagtgatcgagatgccgcaagactatgtcgatacagagccttggattttgtatttcgatggatcgaaacataaacatggaactggaattggagttttaataatatcccccaataaagttccaactaagttcaaatataaaatcaaagggctttgttctaataatgaggctgagtatgaagctctaattacaggccttgaaattttaattagcctgggggcaagaaatgttaacataaggggtgattcagaattagtattgaagcaattaacacaagaatacaaatgtgttaatgaacacttaacaaaatattttgttatggcgagttctcttctgaatcatttcgattatattaacattgagcatatacctcgacaagaaaaccaagaagcaaatgatttagcccaaatagcttcagggtacaaaatgtcgaaggaaaagttaactcagttgatcgaaataaaagataaactggaattaccagagccattaagcactaaattgccaatgccaaaacttgtgggggcaagtacaccacaaaataatgaagatgaaagcatggatgatctccaggaaaaaattcaaattttgg

SEQ ID NO: 11073 - DNA, 1110 bp, Glycine max
  Gm_smallRNAprecursor_3906
tattgtagatcactcagtgatcgagatgccgcaagactatgtcgatacagagccttggattttgtatttcgatggatcgaaacataaacatggaactggaattggagttttaataatatcccccaataaagttccaactaagttcaaatataaaatcaaagggctttgttctaataatgaggctgagtatgaagctctaattacaggccttgaaattttaattagcctgggggcaagaaatgttaacataaggggtgattcagaattagtattgaagcaattaacacaagaatacaaatgtgttaatgaacacttaacaaaatattttgttatggcgagttctcttctgaatcatttcgattatattaacattgagcatatacctcgacaagaaaaccaagaagcaaatgatttagcccaaatagcttcagggtacaaaatgtcgaaggaaaagttaactcagttgatcgaaataaaagataaactggaattaccagagccattaagcactaaattgccaatgccaaaacttgtgggggcaagtacaccacaaaataatgaagatgaaagcatggatgatctccaggaaaaaattcaaattttggccattgacaatatgttagataatgattggagaaagtccattattgaatatttggaaaatccaataggcaatgtggctcgaaaggtcaaatatagggctttaaattacgtgattgtgggaaatgatttgtttaaaaagactgcagaaggagtgttgctgaaatgtctaagtgaatcagaagcatacttggcagtttcccatgttcacagtggggcctgtggatcacatcaagcaggccataaaatgaaatggcttttatttcgacaaggtttgtattggccttcgatgttaaaagactgcatagaatttgctaaaggttgtcaggaatgccaaaagcatgcagggatacagcatgtacctgctagtgagttacactccataatcaaaccttggcctttcagaggatgggctttggacctaattggtgaaatcaagcctgcctcttctaagaaccagcgttatattatagttggtatcgattactttacaaaatggatcgaagcagt

SEQ ID NO: 11074 - DNA, 1082 bp, Glycine max
  Gm_smallRNAprecursor_3907
cagtgatcgagatgccgcaagactatgtcgatacagagccttggattttgtatttcgatggatcgaaacataaacatggaactggaattggagttttaataatatcccccaataaagttccaactaagttcaaatataaaatcaaagggctttgttctaataatgaggctgagtatgaagctctaattacaggccttgaaattttaattagcctgggggcaagaaatgttaacataaggggtgattcagaattagtattgaagcaattaacacaagaatacaaatgtgttaatgaacacttaacaaaatattttgttatggcgagttctcttctgaatcatttcgattatattaacattgagcatatacctcgacaagaaaaccaagaagcaaatgatttagcccaaatagcttcagggtacaaaatgtcgaaggaaaagttaactcagttgatcgaaataaaagataaactggaattaccagagccattaagcactaaattgccaatgccaaaacttgtgggggcaagtacaccacaaaataatgaagatgaaagcatggatgatctccaggaaaaaattcaaattttggccattgacaatatgttagataatgattggagaaagtccattattgaatatttggaaaatccaataggcaatgtggctcgaaaggtcaaatatagggctttaaattacgtgattgtgggaaatgatttgtttaaaaagactgcagaaggagtgttgctgaaatgtctaagtgaatcagaagcatacttggcagtttcccatgttcacagtggggcctgtggatcacatcaagcaggccataaaatgaaatggcttttatttcgacaaggtttgtattggccttcgatgttaaaagactgcatagaatttgctaaaggttgtcaggaatgccaaaagcatgcagggatacagcatgtacctgctagtgagttacactccataatcaaaccttggcctttcagaggatgggctttggacctaattggtgaaatcaagcctgcctcttctaagaaccagcgttatattatagttggtatcgattactttacaaaa

SEQ ID NO: 11075 - DNA, 1086 bp, Glycine max
  Gm_smallRNAprecursor_3908
gtttctgaatcgagttagcggccttctcctgaagttcttggcgttttgcctgctctgtcacaattttttgccttagatcatcgacctgagacagcaaatccgtaatagttgcttcccaggaggagatgttatcatcgcaggctttgacctcagaagatccttcttttgcctctttggtgagacgttcgacttcacgttgagccgctcgggctttctcgagcagaaggatatgggcctgtttctgggcatcgagtctggcgccattttcgcattttttctgcacagtacttgcaaattgatcgataatggactcgatttggataactttgcccagaatctcatcagaagtaagggggttgtgcagtttcttcaaaaagttcaggtgcccaaaagcagcagaggggttctcttcaatggatttaagtacgtcttcccgtgcgtattccatagataacttcaggagcaggcaatcttggcgtactgaagaatttatttcggcatcagatgaggacgaagcaccaggattcttttcacttgaggtgttggcttgactggtgttcagcaggagtcgaagggctgcagcagggtcttcgtcttgcatttgaatgaatgtatcttctgcgatccctatgctagcggaaagcttagatgtcgaagacgccgggtaaatgtccgaaccaccagcttcagcctcttctatgggctcttcatcgaaaaagttttcttcggatgaacttttctgactcgatccatgaggactgctgggtccaatgccttgaccttcaccctgttcctcaacattcactgcatccgtctcaggagcgggagatgttcgagcatgcgagggtatttcttctacagaaacattttgttgtacctgattcgaattatcatggaaaaagggttaacaaatagtttcgtataagctatgatttaaaaacacattaagaggatgatacctcgacgacagattgttctcggggtgagttcggtcgatcgacagggttgcccatctcagcaatagaaggagtagcctctacttcagtgccatcaatgttggtcgaaggtggttggacgtcaacaggt

SEQ ID NO: 11076 - DNA, 1170 bp, Glycine max
  Gm_smallRNAprecursor_3909
gcctggaaccagatatgtactactcttcccatgactagcaatgcacaagcatttttctgcacatttggtcaagttggctgcacaatttgacagcattttgctgcacaatttggcagatttcgaaatccaacttgcccacatccaatttttctcaaattggatcctacaagtcctaaatcatgtataaatcatatttaaaccaaaaacaagcttcagatcaaggtaaatcaaaatctaggtatccaaaacccatcaatttagtggattttcaaggtttgaaaagtgaaaatgagaattgggtaattttgggctaaactctcatctcaatcaagtctataacattgacttagacttgctcaaactggttttaaggtgaaaaccccatccattcaaaatttgacctctcaacacccaatttaccctagaaatggctctcctctttcacatttgtcactcatttttctcatttgctccgcccaagcttttctacaagtcctaattgacattttaaactaggatcaacccgctttaaactccaatttccactaaccccaaatttggcttttcaaaaccctcaaaatctcacacttttccactcacatcactaccattctcacatttaaccctaagttaactctccccatcatctctaccagttttctagcaacaatttcagcatacaaatatcacaaagcatcatcataaaaacctaaaacagaatgggtagcttcactcacatcaaacatgtcaagtttagcatgctttcaacaaattccttcacaagtaactaccataaggcattaacctagtagaactacccatcatagctcccaaaaacccaatacccacaaatttcatgtgagaagaagtccacccatacctgaaattcgaagtcccacaacgtagaggtgtgcttcacgacttcgaaaatggcttctccttgcaatttggagtagaaatgtggaggaattttggagcttcaaagggaaacaatggtggaggagaaaggaagaataaaagcaacgtggaagatgaggaaaagcttctgaatttccctttttttttctcataaagcaatgccccttgtcccattttaagtggagcaaaaaggggctcacctttttcccttgatgtgacttcatactcagccacaaggagaggaaaattttg

SEQ ID NO: 11077 - DNA, 1053 bp, Glycine max
  Gm_smallRNAprecursor_3910
tgatacatcgatggtaattgaagaaaaaaaaagaggaaaagagaatggttatgcagacctcgcccattggtgttgacggctacagaaataaggttgttgctttggatttttggttctttttatttgtgcaaatgtgtgtgggttctttttcatatatatgcctcaattggttcagaaccatcaaatttgaagaagccactcattctatcatcatcaaatgacgtggcactaaaattgacctcactaacaacgttactttaaaatttaacggaaggactattttgcaatacttatgcaaaagatagggactattttgaatttttcattaagttagggactaatatgcaacaggggtacaaagttagggactaaattgcctatttactcgttttgttatcatcaaatgacgtggcatcttttaaaagacacgtccacatgtcatgccacgtcatcctttagtgccacgttggatagtccacatggcactaaaattgacctcactaacggcgttactttaaaatttaacggaaggactattttacaacacttatgcaaagataaggactattttgaatttaatattaagttagggactaatatgcaaaatggatacaatctcagggactaaattgcctattcactctttgcttatgacattctcatgtcagtgtcactatcttgtcccaaatcttacatatctctatttttatcatgtcttttagcatgatgcatctatacatatacagtacaaaacaattctccaaaaaatgacatacatcaagtgtaagccactggatcaaaagttgtttcaaaaaagttttaaatataggtacttaaagactgaggtgagttgagggaaaaactcactctttctctcttagcttttattgatttcaaaatgatacatatatacaagacacaagagagagagagaaagactattgacagtgacaattcactgttgccttttgaataaagcttaccaactaagctaccaaacatagataaatactaaaatattcaacactccccctcaagctggagcatataaat

SEQ ID NO: 11078 - DNA, 1053 bp, Glycine max; identical to SEQ ID NO: 11077
  Gm_smallRNAprecursor_3911

SEQ ID NO: 11079 - DNA, 1132 bp, Glycine max
  Gm_smallRNAprecursor_3912
ttacaagattggtgcttaccactttggttccgactttgcaatggctcaaaggaaaacccattctcctagtaagaaacttttatcatactattttttttatgtattagtgttataattcaaaattctaagttatgctcttggttggtaattggtattgcagcatattggtggcgaatgtttgggtcacaaactccaaatttgcagaagctagctattaaaattttgagtttgacttgcagtgcttcaggatgtgaaagaaattggagtgtgtttgagcaagtaattgtgacaaaactctaactatactttttaattttatttaattttgatgatcaagttttatttggagtatatttgagattgaaatcaacatttatttgttatgttgtagattcattccaaaaaaagaaataggcttgagcacaagaggttgcatgatttggtgtttgtcaaatacaaccaacaattgaagcaaagatataatgcaagagatgaattgatccaatttctcttaatgatattgatgtatgcaatgaatggctcgtgggagagatggatcaagatgatgataatgatgctggaaatgatttggtatttgaagatgatgatgctctaaattgggcaactgtgtatcaggcttcgggggttggagagtgtaggatgtatactaggcggaaaaagcaaaaaacaagtgttgctgctgcccaaacttctaaaaaataggcaatggttgttggatcttcatcaaggaagcaaaaagcagtccaagaaaatgatgaggatctagatgttgaggagaatattgatgttgaatctgaagaagaagaaatcatggtcaattttgaggcgtctgatggggaagagggagagggagatgctccattaccatatgataacaacgaagatgattatgttgggattggagaagatgattagagcctcaaccttcactttgcactttgcattatgtttttatcattttcttattttgaaatttgaactcttcaatgagtttatttggtgttggtacttgattattgtatgaactcatgaaacttttttagtttatttgaatgcaatcctttgtttttttcaatttcaatgagtttatatatatgttttttttttgtcc

SEQ ID NO: 11080 - DNA, 1092 bp, Glycine max
  Gm_smallRNAprecursor_3913
gagtttgacttgcagtgcttcaggatgtgaaagaaattggagtgtgtttgagcaagtaattgtgacaaaactctaactatactttttaattttatttaattttgatgatcaagttttatttggagtatatttgagattgaaatcaacatttatttgttatgttgtagattcattccaaaaaaagaaataggcttgagcacaagaggttgcatgatttggtgtttgtcaaatacaaccaacaattgaagcaaagatataatgcaagagatgaattgatccaatttctcttaatgatattgatgtatgcaatgaatggctcgtgggagagatggatcaagatgatgataatgatgctggaaatgatttggtatttgaagatgatgatgctctaaattgggcaactgtgtatcaggcttcgggggttggagagtgtaggatgtatactaggcggaaaaagcaaaaaacaagtgttgctgctgcccaaacttctaaaaaataggcaatggttgttggatcttcatcaaggaagcaaaaagcagtccaagaaaatgatgaggatctagatgttgaggagaatattgatgttgaatctgaagaagaagaaatcatggtcaattttgaggcgtctgatggggaagagggagagggagatgctccattaccatatgataacaacgaagatgattatgttgggattggagaagatgattagagcctcaaccttcactttgcactttgcattatgtttttatcattttcttattttgaaatttgaactcttcaatgagtttatttggtgttggtacttgattattgtatgaactcatgaaacttttttagtttatttgaatgcaatcctttgtttttttcaatttcaatgagtttatatatatgttttttttttgtccgccatgacattcgccattttccgctacgtcatccgccatatttttatggcggaatttttactttccgccatgaaccgccattcgccattaacaacattggcatgtttatatggtggaactttagccttccaccattgataacactaatatatactccctttggactcaaatataagcaaaaata

SEQ ID NO: 11081 - DNA, 1092 bp, Glycine max; identical to SEQ ID NO: 11080
  Gm_smallRNAprecursor_3914

SEQ ID NO: 11082 - DNA, 1040 bp, Glycine max
  Gm_smallRNAprecursor_3915
agttgagaatgttggaatcaacaaagtgctcattgatggaggagcggctgtcaacttaatgcctcgatctatgctctacaagatcgggaaacatgatactgatctatctgcccacaacattgtgctttcgaattatgagggtaaaactggctattcgttgggagccattcaagtagatgttgctgtaggcagtatagttcgaccaactcttttcctggtgatacagtctaaggctaattttaacttgctattaggaagggagtggattcatggagttggggctgtgccatctacccttcaccagaaactcattatctggagggaggatgggattgttgaaaatatagaggcggatcaaagcttctataagtcagaggtcgatagtgttactgcacaaacctttgacaaaaagttggctaacatagcaccttgtggtgacaaggaggctgttgtcgaatcaagtgacaatgttatccactctgtcaaactccatcctacctatgggtttatatgggagagggaggaaattgatgctgttccctctgaagatggagtcattccaccaactgggtggaatatatatgaagattaatatgactgaggccactgcatgggccagaattacggcttatatggccgaaaatagactaaatacggcctttgaggctgagtctcaacaaaatatggcagttgaagccaagatcgaagatcatgaaaacaaagaaacaaaggatcgaagactggattgcatttatgacgatgagccgctgggttttgagaaaaatcccataagtgaggtgccaaagatgcaggctcaagatcctttggaggagatcgacattggagatggctcgataaaaaggccaacgtatatcagtgccaacatcaccttaagtctaaaagaaaagctggtgcctcttcttagggaatttaaagactgttttgcttgggattaccacgaaatgcctgggttaagcagagaaatggtcgaaatgaaattaccaattaaggagggaaaaagaccagtaaaacaactacca

SEQ ID NO: 11083 - DNA, 1157 bp, Glycine max
  Gm_smallRNAprecursor_3916
aagaccagtaaaacaactaccaagaagattcgcaccagaaatcatgtccaaaatcaaggaagagatcgaaaggctgctgaggtgtaaattcatcagatctgccaggtatgtcgaatggttagcaaatatagtccctgtcattaaaaagaatggaactcttagagtatgcatagattttagggatttaaataatgctacacctaaagatgaatatgctatgccagtagcggaaatgttggtagattcggcagctggcttcgaatttttaagcatgttagatggttattctggttataaccaaatttttattgctgaaaatgatgtgtcaaaaacagcgtttcgatgcccaggtgctttaggcacttatgaatgggtggttatgccctttgggttgaaaaatgctggggccacttatcaaagggccatgaattctatgtttcatgattttattgacacatttatgcaaatctatattgatgatataatcatcaaatcctcctcagaagatagccatttggattatcttaggcaatctttcgaacgaatgaggaaacatggattaaaaatgaatccattaaagtgtgctttttgtgtgcgtgcaggagatttccttggttttgtggtgcataaaaaaggcattgagataaatcaaaataagacaaaggctattcttgagacgaagcctccttcgaccaaaaaacagcttcagtctttgctaggaaaaatcaatttcttgaggcgattcatttcgaatctaagtggcaaagctcaaattttttcgccattacttcgactcaagaaagatgaaccattcaaatggaatgaagagcatcaaaaggctttcgatgaaattaaagaatatctgatcaagcctcctgtgttaatgcctcctagtcgaaacaagtccatgaagttgtatattgctgcgtctgacaagaccattggtagcatgttggctcaggaagatgataatggcatagaacatgcaatttattatcttagtcgtgtactaaatgatgcagaaactagatatactgccatagaaaaactctgtctttgtctgtatttctcttgtgcaaaacttaagcaatatataaagcctgttgatgtttatgtgtattctcattatgatattattaagcacatgttgtcaaaac

SEQ ID NO: 11084 - DNA, 1175 bp, Glycine max
  Gm_smallRNAprecursor_3917
aagagatcgaaaggctgctgaggtgtaaattcatcagatctgccaggtatgtcgaatggttagcaaatatagtccctgtcattaaaaagaatggaactcttagagtatgcatagattttagggatttaaataatgctacacctaaagatgaatatgctatgccagtagcggaaatgttggtagattcggcagctggcttcgaatttttaagcatgttagatggttattctggttataaccaaatttttattgctgaaaatgatgtgtcaaaaacagcgtttcgatgcccaggtgctttaggcacttatgaatgggtggttatgccctttgggttgaaaaatgctggggccacttatcaaagggccatgaattctatgtttcatgattttattgacacatttatgcaaatctatattgatgatataatcatcaaatcctcctcagaagatagccatttggattatcttaggcaatctttcgaacgaatgaggaaacatggattaaaaatgaatccattaaagtgtgctttttgtgtgcgtgcaggagatttccttggttttgtggtgcataaaaaaggcattgagataaatcaaaataagacaaaggctattcttgagacgaagcctccttcgaccaaaaaacagcttcagtctttgctaggaaaaatcaatttcttgaggcgattcatttcgaatctaagtggcaaagctcaaattttttcgccattacttcgactcaagaaagatgaaccattcaaatggaatgaagagcatcaaaaggctttcgatgaaattaaagaatatctgatcaagcctcctgtgttaatgcctcctagtcgaaacaagtccatgaagttgtatattgctgcgtctgacaagaccattggtagcatgttggctcaggaagatgataatggcatagaacatgcaatttattatcttagtcgtgtactaaatgatgcagaaactagatatactgccatagaaaaactctgtctttgtctgtatttctcttgtgcaaaacttaagcaatatataaagcctgttgatgtttatgtgtattctcattatgatattattaagcacatgttgtcaaaacctattttacacaatagaattggaaaatgggctttagcattaacagaatattctttaacgtacaagcctttgaaatct

SEQ ID NO: 11085 - DNA, 1082 bp, Glycine max
  Gm_smallRNAprecursor_3918
ctctgatcgaaatgccgcaagactatgtggatacagagccttggattttgtatttcgatggttcgaaacacaaacatggaactggaattggagttttaataatatcccccaataaagttccaactaaattcaaatataaaatcaaagggctttgttctaataatgaggctgagtatgaggctttaattacaggccttgaaattttaattagtctgggggcaagaaatgttaacataaggggtgattcagaattagtagtgaagcaattaacacaagaatacaaatgtgttaatgaacacttagcaaaatattttgttatggccagttctcttctgaatcatttcgattacattaacattgagcatatacctcgactagaaaaccaagaagcaaatgatttagcccaaatagcttcagggtacaaaatgtcgaaggaaaagttaactcagttgatcgaaataaaagataaactgatgttaccagagccattaagcactaaattgccaatgccaaaacttgtgggggcaagtataccacaaaataatgaatatgaaagcatgaatgatctccaggaaaaaattcaaattttggccattgacaatatgatagataatgattggagaaagtccattattgaatatttggaaaatccaataggcaatgtggctcgaaagatcaaatatagggctttaaattacgtgattgtgggaaatgatttgtttaaaaagactgcagaaggagtgttgctgaaatgtctaagtgaatcagaagcatacttggcagtttcccatgttcacagtggggcttgtggatcacatcaagcaggccataaaatgaaatggcttttatttcgacaaggtttgtattggccttcgatgttaaaagactgtatagaatttgctaaaggctgtcaggaatgccaaaagcatgcagggatacagcatgtacctgctagtgagttacactccataatcaaaccttggcctttcagaggatgggctttggacttaattggtgaaatcaagcctgcttcttctaagaaccagcgttatattatagttggtatcgattacttcacaaaa

SEQ ID NO: 11086 - DNA, 1046 bp, Glycine max
  Gm_smallRNAprecursor_3919
tctctgtagctgtcaacaccaatgggcgaggtctgcataaccattctcttttcttctttttttttttcttcaattaccatcaatgtatcattttgggttctgatttttgtgtgtgttttgaataggaagagaaaaaaccagaggaaaacaaagtggaggagaaaaaagcaaatgaagaagaaaagaaagaagaagagaaaaaaccagaggaatcaaaagatgacaaggaatccaaggaggaatctgcgctgccaaaaatcgtgctaggcacaacctttgcaatgcatggacactttaagcatgatttctggcatcttttaagttagggactattttgcaacacttatgcaaaagatagggactattttgaatttttcattaagttagggactaatatgcaataggggtacaaagtcagggactaaattatctatttactcgttttgttatcatcaaatgacgtgacatcaggcacgtccacgtgtcatgtcacgtcatcctttagtgccacgtggatagtccacgtggcactaaaattgacctcactaacggcgttactttaaaatttaacggaaggactattttgcaacacttatgcaaagatagggactattttgaatttaatattaagttagggactaatatgcaaaatgggtacaatctcagggactaaattgcctattcactctttattaaactttgaaaagtttgaatttgcactttatcaatctttaaattagaactttgttattacatatatttactcattatgaatgtccacttttatttataaatttgattatacaatttaattaaaaaatatatttacaatcaataattattaagcaggtaaaaaaggaaaaaaaacagcatttttctcgtttagttagcaaatctgtgatcgaaataaatagtgaccgaattagcaaccgaactgcatttttaatctgaaacaaatagtgactgaattatatcctttttaatgtattttactataaagagtcaccgaattagcgaccggcaataattttataaaataaattttt

SEQ ID NO: 11087 - DNA, 1190 bp, Glycine max
  Gm_smallRNAprecursor_3920
tcaattgtaaagattgaaaaaaatattgttgacctgcatcgaatgattgtcggtagtagatttcatccagtaattgatcgttggttagttgaagggtgttgtgcattctacgcttgagtgtatcaaaagaacagttgttaggaactcgcattggtgttggaatgagactttgaaaataaacaccagtttggttgtaactaatcgatccatttggaaaaaatgaaagttaatctggagttagtaatggtttgactgcttgtttctcccaaaaatgacatagtaataagattgaatttggtttgtgaaattatgttgtgtgagattgtgtgtttgtattgtgtctgtgttttgttatttatagttgtatgagtattctgccacgttgatgtgtattggaatccaatgtttctttttccctagtaagtgatgtagcagacgtccattataatttcagagtgaacaaagagattatgagttgtccatctcatgtcagttttgaacacgtctctaaaaattaaatgtatcacctgtaaaactgacatgaaatggacagctcacaatgcagagtgttgttaatttggactgtgatttttcccatgtaattaatgtaacagacgttcatgatgattttcagagtgaataaagagattatgagttgtccatttcatagcagttttgcaggtgagacatttaatttttagagacgtgtgcaaattggagagtattgtcaatttggattgtgatttttcccttgtaattaaagcatcaaacgtccataatcattttcaaagtgaataaagagattatgagttgtccatttcatgtcagctttgtcgatgagacatttaatttttaaaaacagtgtaatgtaaatgacaaagtattgtgaattttgacagttatgttaccatgtcaactactgcagtaaaagtgggtaaactgaaaattgctaatttaaatttaaaggaaaaattattttaatacgtaaagtgataactgaagacagacataagatattacatgaaaatctcaaagaagaaataacttagacatgaatgatccgtagattaccaatcccgtttgaatataggttcgtgggatggagacaggttacttccttcgggcccggaagaggagtccgtatcactatcatggtttttgagccaacaagtctcgtattcacctgataa

SEQ ID NO: 11088 - DNA, 1185 bp, Glycine max
  Gm_smallRNAprecursor_3921
ctatattgatcgacaccattttgttcatcagcaacacaatgtacaaccaccagtcggtgtactcaaggttggcatgacctttgatgacaaagcacaatgtattcgagcaatcaaagaatacaacatcagaaatcattttgattacagaacaatttactctgaccaaagaaggctaaactttttttgcaagttacataaaaatggttgtacatggagcttgggcgcatgcaattcaaagaggcataacaaatggattatcaagagtatcagaggtcatcacacttgtctcgtgccgatgctcagacaagatcatcgccaactcgacaaacacgtcatagtacagatcatccaaccaattgtcaaaacaaacccaaccgtctccatcaagacgttgattgcagagatcaaaacgttcatgaattataccccgtcctacaagaagacaaggttagcaaagcaaaaaacattggggatgattcatggaaactgggaagaatcatatgccaaactgccaaaacttttcggagctttgcaatcttgtgttcccgggacagtggtcgctgctcaaacagaatccttgtatgaggggggagaaatagtaccgggcaaaagattgattaaatgtgtcttttggtcatttggtccatgcattaatggttttgcatatttcaaacccattgtacaagtagatggtacatggctttatggaaagtatattggcacactgttgatagctaccatacaagatggagctaactatatcttcctgattgcctatgccattgtagaaggtgagacaacttcagcttggggttttttctaaagaatttgagaaaacatgttactccgcaaattaacatttctcttatttcagactgacacccctcaattataagttcctacaacaacccaagtaacttatgggtccaggacagatcccatttcttttgcctgcgccacattgcaaaaaaatttcttcgtggtaactcaaactacaaacatttaaagaaaccacttatgttggctggtgagaatctattttatttattcgttataattttctttcaatcaaattttataacataatacgttgattgaatatttacaggttacgcatacacggagaagatgcactagcgacatcttggggatattcgtgcgaataagccaagtgcagctgaatgg

SEQ ID NO: 11089 - DNA, 1051 bp, Glycine max
  Gm_smallRNAprecursor_3922
actagcgacatcttggggatattcgtgcgaataagccaagtgcagctgaatggcttgatcaattacccaaacaaaaatgggtacaatgctttgatgaggggaaacgttggggacatatgactaccaatttgtcagagtctgttaattccatattcaaaaacacaagacatttgctggtgtcatcgttggctgaggagacctatttcaagaccgcacaactctttgctaatagaggtcgacaaacttaggcaatgatcaactccggctcacagtattatgaagtcgtctttgatgcaatcaatagtggtcaacaagaatctaatacacacattgtaaaggaattcgacagacacaatcacacttttattataacagagactcaatccccacttgaaacacccagaccacctggaaggtttagagtaatgttacaatcccaaaagtatgattgtggtgaatttcaggctaaacatttatcgtgttctcacgtcatggctacctgtaaatctgtcaatgttgatcccatgacctatgtgccaatgatattcactttacaacacattttgcacatctacgacaactcctttgatttattgccacacgaatcaatgtggcaagaatatgaaggagatcagtggggtcctgatccaaggagaaagaggactgcaaagggtcatcccgtttcaactcgcattcctactcagatggacgaagacgaaaatgaacgagcaaatagaaaaaaatgtgaactttgccgacaacatggtcatagtagaaataattgttctaatgtatcctcatcttagtttttccttagacaaatgtcattgtttaaatattttattgatgacgtagtataatgttcttatataaataaattgttaaaagctttagttttatcatttttaattaaatcaaataacacaaacaaactaattatatttagtaaaatagttaaattaaaaattttaaaattcagattattatacaaaataaatatattattacacaaaattcagattttaaaatatatattcacccaaaaaatatc

SEQ ID NO: 11090 - DNA, 1052 bp, Glycine max
  Gm_smallRNAprecursor_3923
actagcgacatcttggggatattcgtgcgaataagccaagtgcagctgaatggcttgatcaattacccaaacaaaaatgggtacaatgctttgatgaggggaaacgttggggacatatgactaccaatttgtcagagtctgttaattccatattcaaaaacacaagacatttgctggtgtcatcgttggctgaggagacctatttcaagaccgcacaactctttgctaatagaggtcgacaaacttaggcaatgatcaactccggctcacagtattatgaagtcgtctttgatgcaatcaatagtggtcaacaagaatctaatacacacattgtaaaggaattcgacagacacaatcacacttttattataacagagactcaatccccacttgaaacacccagaccacctggaaggtttagagtaatgttacaatcccaaaagtatgattgtggtgaatttcaggctaaacatttatcgtgttctcacgtcatggctacctgtaaatctgtcaatgttgatcccatgacctatgtgccaatgatattcactttacaacacattttgcacatctacgacaactcctttgatttattgccacacgaatcaatgtggcaagaatatgaaggagatcagtggggtcctgatccaaggagaaagaggactgcaaagggtcatcccgtttcaactcgcattcctactcagatggacgaagacgaaaatgaacgagcaaatagaaaaaaatgtgaactttgccgacaacatggtcatagtagaaataattgttctaatgtatcctcatcttagtttttccttagacaaatgtcattgtttaaatattttattgatgacgtagtataatgttcttatataaataaattgttaaaagctttagttttatcatttttaattaaatcaaataacacaaacaaactaattatatttagtaaaatagttaaattaaaaattttaaaattcagattattatacaaaataaatatattattacacaaaattcagattttaaaatatatattcacccaaaaaatatct

SEQ ID NO: 11091 - DNA, 1190 bp, Glycine max
  Gm_smallRNAprecursor_3924
aattgtaaagattgaaaaaaatattgttgacctgcatctatgaatggttgtcgatagtagatttcatccagtaattgatcgttggttaattgaagggtgttgtgcattctacgcttgagtgtatcaaaagaacagttgttaggaactcgcattggtgttggagtgagactttgaaaataaacaccaatttggttgtgagtgattgatccatttggaaaaatgaaagttaatatggagttagcaatggtctgactgcttgtttctcccaaaaatgacatagtaataagattgaatttggtttgtgaaattatgttctgtgagattgtgtgtttgtattgtgtatgtgttgtgttatttatagttgtatgagtattctgccacgttgatgtgtattggaatccaatgtttctttttccctagtaagtgatgtagaaaacgtccattataatttcatagtgaacaaagagattatgagttgttcatctcatgtcagttttgcacacgtctctaaaaattaaatgtctcacctgcaaaactgacatgaaatgaacaattcataatgcagagtgttgtcaatttggattgtaatttttctcatgtaattaaagtagcagacgttcatgatgattttcaaagtgaacaaagagattataagttgtccatttcatgttagttttgcaggtgagacatttaatttttagagacgtgtgaaaattggagagtattgtcaatttggactgtgatttttcccttgtaattaaagcagcaaacatccataattattttcaaagtgaacaaagagattatgagttgtccatttcatgtcagttttatcgatgagacatttaatttttagatacagtgtagtgtaaatggcaaagtattgtgaattttggcagttatgttaccatgtcaactactgcagtaaaagtggtaaactgaaaattgcaaaactgaaaattgcaaatttaaatttaaaggaaaaattatttcaatacgtaaagtgataactgaagacggacataagacattacatgaaaatgtcaaagaagaaataacttagacatgaatgatctgtagattaccaatcccgtttgaatataggttcgtgggatggagacaggttacttccttcgggcccgaaagaggagtcagtactatcatggtttttgacccaacaagtctcgtat

SEQ ID NO: 11092 - DNA, 1048 bp, Glycine max
  Gm_smallRNAprecursor_3925
aacctcgtgttctaaccatgatctgcaaatcatgaaaaacacgtatttttttatgtcaaataaactattcatataattaaaaacctacatatatttacataaatcttcagccttatgttataaaccctaatcacactaccctaagcattgttgactaccctaaactaaaccctacacactcaaccactaaacatatatcttacaatcaactaggtcctaaccctaataccaaattttttatgcaaatacaaaataacaaaaatttaacctaatatataatatttaattaattttttttacttacctccatgaaagcataaatatttgaattattataaagcaaaatttataaaaaaaataaaacaacttcatttataaaaaaaactaattttggaaaaaataattccttcttccggaagaaggttctttcggagaggctaccggaagaaggttcttccggagaagctaccggaagaagttctttcggagaagctaccaaaagaaggttcttctggaagaacaatttgttctatcggaagaacttttgttctaccggaagaaccttcttccggagaagctaccggaagaacttcttccgggagtatcggaacggttgctcttcgccattttcaggcgatttccatgtcttctaccctaaagccatcatcacctaaactaactaaacagttgatgtaatcgtaccccgcaagggcattggatagaagactccaagtagattgtgccagagatccaagggaaggccctagggttctcatgagccttagggtagatttcgagcccatgggctaagtatgagcccgcttatctttgtaaatattagaataggtttttccttcgtttgggccttgtattttggtcattctagtagtatagggttttagccttgtattttgggactttttgagtagtctttgtagtaaggactttttttttgtattttcatgttttttggcataggggtgagcttagctattatagggggtgtgtagctaagctctagcttctcatctcaaggaggtgagcttag

SEQ ID NO: 11093 - DNA, 1049 bp, Glycine max
  Gm_smallRNAprecursor_3926
tttgaggtgcccttgatgtattctatttcaaaataaaaaacactcaagattgcttgccatctggcaaaaatttgttttgatgcaagatttttaacatctttttgaagaatatctttggctgacttgcaatcaacccttattaaaagattttggtttagtaaatcagattgaaatttggaaatgcacaaaacaattgctaaaacttcctttttaacagttgaatattttagttgtgcaggattccagtgttttgatgtatatgcaatgacatgatcttgaccatgtactctttgtttgaggatgccaccataacctatgtctgatgcatcggtttcgacaattttaaatgcctgaggaataggaagatacaaacattttatagattggactttgagtttgatttctttaactgtttgggtatggagatcagaccaaggaggcagatttttcttcagcctatcatgcaatggcttgacaatattatttaaataggggacaaattctcctacataatttagacaatctagaaatctttgtaactgggttttgtctaagatttggttgggaaatttgctagcaaactctattgacctttctattggaatgattgtaccttgatatatgtgatgaccaaggaatcgaattagagtttggaaaagattgatttttgatttggagactgccaacccattctgtttgatgatatggataaaagtcaggagatgtttgaagtgttggtcaatgttttgggaaaagattaaaacatcatctatgtagacaatgacatattttgaatagggattaaaaatatcattcataattttttgaaattctgaaggggcattcttcagtccgaatggcattacattccattcatattgcccaaaaggtatagtaaacgctgttttgtacctatctgattcttggatttggatttgccaaaatccagatttcatatcaaattttgaaaatatttttgcagaatttaatctgttaagtaaatcttttttgtttggaataggatacctaatccattgtaatgcttgatt

SEQ ID NO: 11094 - DNA, 1049 bp, Glycine max; identical to SEQ ID NO: 11093
  Gm_smallRNAprecursor_3927

SEQ ID NO: 11095 - DNA, 1050 bp, Glycine max
  Gm_smallRNAprecursor_3928
tttgaggtgcccttgatgtattctatttcaaaataaaaaacactcaagattgcttgccatctggcaaaaatttgttttgatgcaagatttttaacatctttttgaagaatatctttggctgacttgcaatcaacccttattaaaagattttggtttagtaaatcagattgaaatttggaaatgcacaaaacaattgctaaaacttcctttttaacagttgaatattttagttgtgcaggattccagtgttttgatgtatatgcaatgacatgatcttgaccatgtactctttgtttgaggatgccaccataacctatgtctgatgcatcggtttcgacaattttaaatgcctgaggaataggaagatacaaacattttatagattggactttgagtttgatttctttaactgtttgggtatggagatcagaccaaggaggcagatttttcttcagcctatcatgcaatggcttgacaatattatttaaataggggacaaattctcctacataatttagacaatctagaaatctttgtaactgggttttgtctaagatttggttgggaaatttgctagcaaactctattgacctttctattggaatgattgtaccttgatatatgtgatgaccaaggaatcgaattagagtttggaaaagattgatttttgatttggagactgccaacccattctgtttgatgatatggataaaagtcaggagatgtttgaagtgttggtcaatgttttgggaaaagattaaaacatcatctatgtagacaatgacatattttgaatagggattaaaaatatcattcataattttttgaaattctgaaggggcattcttcagtccgaatggcattacattccattcatattgcccaaaaggtatagtaaacgctgttttgtacctatctgattcttggatttggatttgccaaaatccagatttcatatcaaattttgaaaatatttttgcagaatttaatctgttaagtaaatcttttttgtttggaataggatacctaatccattgtaatgcttgattc

SEQ ID NO: 11096 - DNA, 1050 bp, Glycine max; identical to SEQ ID NO: 11095
  Gm_smallRNAprecursor_3929

SEQ ID NO: 11097 - DNA, 1131 bp, Glycine max
  Gm_smallRNAprecursor_3930
tgataatatgggaaaaagtcgcaccaacacttggaacccttttatgaactacaaacttaagcaaatttactcttactctctttagtttgcatttgaattttctctaaaatgtcttcttttatgagattagctttctgtgaaacttcttttcaaagaatcacttttacaaaattcaattttctaaaaatatgcacattgctaccttgtaagaattcaatttcctaggacaaggtccagtatattttaattttccccatcagagcctgatggggaagtaggaatattatccgtaaggacgtatgttaacaaattttatggatctgacaccttgtatagtatgagtcatattttattttaatttgtacagtagatgtttgaacagtacttcctggaagtacaacagtctaatattttagttgaatggtactgtagtagtaagacccgtggtggataaagggcagtaaggctaaggtgtactgtttaaccaaaatatcaagacataatatactggtggctataggatttccgttcaaactatttttcaaaaaaaaaagagtttttcttaaaaataattcagatccgaaaaattttgttacatatttacttacggagatatttctatggaaccaatgagggcaaagatattagagaatgttataatcatgtctagactattgcgatctttttcccgtatctcttttcgatcaaattcctcctcatcatcttcttcaagaaactccaatttattaaacgatcaagataaccagacccaagaggtcgcccccaaacacaatatctttgatgaggaagtccgattcgaagatatcaatcaaaacatggatgactggaacatcccagaaatccctcaagatcaactgtacgttcctgaaacaattaaagataaacacaattttgactacataatcaaaacagtagaaaaaaatattcctctagggcaagacataggggaagaattccatttactttcaaaaaattcaatttatgaacatagtcgaaagtataaatatttacacatcggctgtgtacaagtagccatcaagcccttaatagacatgggcatagatgcaacagtgttaatgtgtctaagagatattaggcataataaatttg

SEQ ID NO: 11098 - DNA, 1037 bp, Glycine max
  Gm_smallRNAprecursor_3931
gatattgatcaatattttaaacacctccagactttcatccatatcattaaacaaaatggtttggcagtctccaaatcaaagataaatcttttccagacacggatacgattccttgggcacaatatataccaaggcacaatcattccaatagaaagatcaatagagtttgccagtaaattccctaaccaaaatcttagacaagacccagttacaacgatttctggggtgcctaaattatgtaggagaatttgtcccctatctaaacaatattgtcaaaccattacatgataggctgaaaaagaatccgcctccttggtctgacctccatactcaaacagtcaaagaaatcaaagtcaaagtccaatccataaaatgtctgtatcttcccattccaccggcattcaaaattgtcgaaattgatgcatcagacatcggttacggtggtatccttaaacagcaaatacacggtcaagaacatgtcattgcatatacttcaaaacattggaatcctgcacaattaaaatattcaactgttaaaaaggaagttttagcaattgttttgtgcatttccaaatttcaatctgatttattgaatcaaaaatttttagtgagggttgactgcaaatcagccaaagacattttacaaaaggatgtaaaaaaccttgcctcaaaacaaatttttgcaagatggcaggcaattttcagcgtatttgattttaacatagaatatatcaagggctcttcaaactctctacttgactacctcacccgtgaatttttacagaaaattcccgatgcctcctaaggtgtctagctcctccggcagaggaggaagatccgatactaaaggaaaagatgttatattggctctaccatagccaataaccaagaaggcaactacatcatcttctgggtcacctactcagactgggtcatcaacccagaaaggaaagcttgaagggtcattgacccagataaaacctgagtcatcaactcaagaatccctaaaaccaacaacaacaaaacagactgtggtt

SEQ ID NO: 11099 - DNA, 1033 bp, Glycine max
  Gm_smallRNAprecursor_3932
caaggcaaccgccaaagtattccccccaggattccattataggccaacagccacaaataaaaccagaaaattctacgaattcatcctaatagatacaaactcagtatctattaaacacttcaaagaccccaaagatccaaatgtaaatacccattccacaatccaaatcctaaaggttatgcagccacgacattatagctcaaacttaaaccaacccaaaacattttctgcaccttttgatcctgcaggatataattattgggactacatcgacgcctggaccaatgtgttctggcatcaaaatagtaaatttaagcattcatggctaatttacttcaagaataacactgtgtataattttccaaattggctcctccaatggtggaactacttcggactaattccgcagatatttccagaagaagtccaacagggattccaacaattcaccaagctcttcaatagcaaggaatcgagaattccggcagatttaaagtacttttccagttttgccttgtcatggattttttcatggcaatacagatatggaaaaaccgaaaacatcaaacaatatccaccattgcagagacatgcctttgtaaagtggtggtcacaatttgatacctcaaaggctgctccagaacaagtcaagaactggtttcaaagcaaccctgagtttctcaagcctactgatccagagacatcattgtttctaaatcaaaagtctcaacttgcagcattcttagcaagctcaaaatctaaagagagtcttgcccagaatcttaaggaagttctccagctacttcaacaggaagaagaagaagaaccccccaagaaggaagccgaatcatccgaaaaaaatgatgaccaagaagatgatccattctaccagaatgaggatgactgttttggtatatcgttagacgatgattagttgtagtaatcatgaattattgtaactaattattcggttcccgataataatgtaatttgaaaaagtttttgtaacagttccggtaaacattaccgatac

SEQ ID NO: 11100 - DNA, 1031 bp, Glycine max
  Gm_smallRNAprecursor_3933
aaggcaaccgccaaagtattccccccaggattccattataggccaacagccacaaataaaaccagaaaattctacgaattcatcctaatagatacaaactcagtatctattaaacacttcaaagaccccaaagatccaaatgtaaatacccattccacaatccaaatcctaaaggttatgcagccacgacattatagctcaaacttaaaccaacccaaaacattttctgcaccttttgatcctgcaggatataattattgggactacatcgacgcctggaccaatgtgttctggcatcaaaatagtaaatttaagcattcatggctaatttacttcaagaataacactgtgtataattttccaaattggctcctccaatggtggaactacttcggactaattccgcagatatttccagaagaagtccaacagggattccaacaattcaccaagctcttcaatagcaaggaatcgagaattccggcagatttaaagtacttttccagttttgccttgtcatggattttttcatggcaatacagatatggaaaaaccgaaaacatcaaacaatatccaccattgcagagacatgcctttgtaaagtggtggtcacaatttgatacctcaaaggctgctccagaacaagtcaagaactggtttcaaagcaaccctgagtttctcaagcctactgatccagagacatcattgtttctaaatcaaaagtctcaacttgcagcattcttagcaagctcaaaatctaaagagagtcttgcccagaatcttaaggaagttctccagctacttcaacaggaagaagaagaagaaccccccaagaaggaagccgaatcatccgaaaaaaatgatgaccaagaagatgatccattctaccagaatgaggatgactgttttggtatatcgttagacgatgattagttgtagtaatcatgaattattgtaactaattattcggttcccgataataatgtaatttgaaaaagtttttgtaacagttccggtaaacattaccgata

SEQ ID NO: 11101 - DNA, 1032 bp, Glycine max
  Gm_smallRNAprecursor_3934
aaggcaaccgccaaagtattccccccaggattccattataggccaacagccacaaataaaaccagaaaattctacgaattcatcctaatagatacaaactcagtatctattaaacacttcaaagaccccaaagatccaaatgtaaatacccattccacaatccaaatcctaaaggttatgcagccacgacattatagctcaaacttaaaccaacccaaaacattttctgcaccttttgatcctgcaggatataattattgggactacatcgacgcctggaccaatgtgttctggcatcaaaatagtaaatttaagcattcatggctaatttacttcaagaataacactgtgtataattttccaaattggctcctccaatggtggaactacttcggactaattccgcagatatttccagaagaagtccaacagggattccaacaattcaccaagctcttcaatagcaaggaatcgagaattccggcagatttaaagtacttttccagttttgccttgtcatggattttttcatggcaatacagatatggaaaaaccgaaaacatcaaacaatatccaccattgcagagacatgcctttgtaaagtggtggtcacaatttgatacctcaaaggctgctccagaacaagtcaagaactggtttcaaagcaaccctgagtttctcaagcctactgatccagagacatcattgtttctaaatcaaaagtctcaacttgcagcattcttagcaagctcaaaatctaaagagagtcttgcccagaatcttaaggaagttctccagctacttcaacaggaagaagaagaagaaccccccaagaaggaagccgaatcatccgaaaaaaatgatgaccaagaagatgatccattctaccagaatgaggatgactgttttggtatatcgttagacgatgattagttgtagtaatcatgaattattgtaactaattattcggttcccgataataatgtaatttgaaaaagtttttgtaacagttccggtaaacattaccgatac

SEQ ID NO: 11102 - DNA, 1163 bp, Glycine max
  Gm_smallRNAprecursor_3935
actaattccgcagatatttccagaagaagtccaacagggattccaacaattcaccaagctcttcaatagcaaggaatcgagaattccggcagatttaaagtacttttccagttttgccttgtcatggattttttcatggcaatacagatatggaaaaaccgaaaacatcaaacaatatccaccattgcagagacatgcctttgtaaagtggtggtcacaatttgatacctcaaaggctgctccagaacaagtcaagaactggtttcaaagcaaccctgagtttctcaagcctactgatccagagacatcattgtttctaaatcaaaagtctcaacttgcagcattcttagcaagctcaaaatctaaagagagtcttgcccagaatcttaaggaagttctccagctacttcaacaggaagaagaagaagaaccccccaagaaggaagccgaatcatccgaaaaaaatgatgaccaagaagatgatccattctaccagaatgaggatgactgttttggtatatcgttagacgatgattagttgtagtaatcatgaattattgtaactaattattcggttcccgataataatgtaatttgaaaaagtttttgtaacagttccggtaaacattaccgatactgttgaaacagtaaaacattgggtctatttaaaggagtcctcgttccctttgtgaggcaccttttcaaatagtctcaaaaccaggtcttagagagagaagccctgcctagggaaaacctctttgtaagcttttctttcgatttcaataaattcaaagttttatttttcacatctcccctctcccttcaccgatcctgtgcggctctgccgccgcttcggtttctttgttttcaaaaacctgggtttgtaagccggattccggtgtgcccttgataactatcttacaggttttaaatttctgcatttgtcatcttgcattactcttacttcttatctgtccgtttgatcttattccgctgatctctggtatatatatatatatattaaatatggcttactttcgttacacaagtataaaatggtagacttattcacaaattattaggtggcaatgaaaacaaatgacatttaaaaaaacaacacattcaaagatggtcttgactccaggaccgtcttgaaatgtggc

SEQ ID NO: 11103 - DNA, 1073 bp, Glycine max
  Gm_smallRNAprecursor_3936
gagaagaatgcttctttggggagaggttttgtgaaaatatcaataagttgattcttagtatcaacaaactctaatacacaatctccctttagaacatgatctctaagaaaatggtgcctaatttctatatgtttagttctagagtgttgaaatggattcttggagagattgattgcacttgtattgtcacacataatgggtatatgatcaagaaagattccatagtcaaatagttgttgcttcatccataaaatttgggcacaacaactgccggcagaaatatattccgcttctggagtggataaagcaacactattttttttcttacagtgccaagaaactagagcagatccaataaattgacatgtcccactcgtgctctttctatcagttttggatccggcaaagtcagaatcagagtatcctattaagttacatgttgagttctaggataccataaacctatgtttgtagtgcctaccaaatatctaatgatccttttaacagcactaagatgtgattgtttaggatttgattgaaatctagcacacatacacacactaaacattacatcaggcctgctagtagataaataaagaagtgatccgatcatacctcgatattgcttaacatctattgactgaccggtttcatctttatctagatagcaagcagtgttcattggtgtagccatgtgcttagcattttccatgtcgaatttgtggattaactctttgcaatacttggattgattgacaaagattccatccttagtttgtttaatttgcaatccaagaaagaagttaagttctcccatcattgacatttcaaactcactttgcatgtcatgggagaattccttgcacaagaattcgttagtggatccaaaaataatgtcatcaacataaatttgaactaataaaatatcatgtacattcacacttgccactggtaatcgattaccataaccatgtaatcaattacacaaagcattttatgaaaagatatgactcttcacaattgaatttgaatttcaatgttcagatacactggtaattgattaccaataagtt

SEQ ID NO: 11104 - DNA, 1072 bp, Glycine max
  Gm_smallRNAprecursor_3937
cttccataggcaacgcctacgactactgcgttccaccttcatgtatcgtttatatttatttttattaaatacatatttcaaagcctctggtggcagcacctacattagaacgataacagtgattaatgttgtgaaactaaaatcaaaatccgataaaggagtaatactatattaaccctcggctggcagcacctaccaatggctttttctattgcagcatatcttcatcaacatccacggtaaaatacatggcgtctggctgttgcggctgacattgccgatagctgtctataggcaggagttgtgaaggaaacatggaaagtagtattttagtctgtggcagaaaacatgatcaccatattttcataaaccttcatggcgcttctgaattctttgatcccatctgcaaaatatattttgttttgatagcttcgaactctaacaaaaaactcgtcgccgttaacattgaggaccacataaattgggtatttgggataccaattgatgtggtagtttaatggaacttgaatgtagttctgcaacaaaacaagttattatcatttttggaccaacataatggaacttgaatgtagttctgcaacaaaactgagctctgataccaaatgatgagcacccaactgctttgcttcaaaaatcggatcttccacgatggaattagcgcacgaagaagacaaacccacccgtcgttctccaaaagggggctgattgtttcctttgcttttgaaaaaaccttttgaggaaagcaaaaaagtagtcgagggacgctttggctcttcaatcgcgcatggggggaaactagacggagaaaacgaggcatccatttactaccggtagcaaggaataaataaggaccgttagattttcttttcgctaatcggacggttcacgttgattactttgcaaatacttttcatttcgcataactttcgcacggtgcgaaagttgtttaactttcgcaccctagacatcgtccctaatcttaaatatccttttttgcgagtagaaccaaatcaatcaaattattgagttccattctttactatccaaattc

SEQ ID NO: 11105 - DNA, 1079 bp, Glycine max
  Gm_smallRNAprecursor_3938
gaacctagaactatcatgatactaatctatcatgaaaactctagaaagacctaaagtaatgtagaaacattcaccaccattgagaggttggtgacttgagcctataaatagacaattggtatgttgtaattgataatccaagaaatcaatgacatagccttctttctaaaacaattctctaaaactatcaactatcaactatcatctaataaactaccaacagtggtatcagagctacgttcggtcatacattgggcgtagttatattacctacctatcattccaaaatcctcccaactacttaaaaaatttcctttgtactattaacccactctaataatgttttttctaagctatggataacactactcaatcgtcaactatttctgtccctatcttcaatggtgaaaattatgatttctggcgtattaaaatggaaacatatttttcatctcaagatttatgggacatagtagaagaaggcttcagtgttcctgtggatacttcagctcttaatgcatctcaagaaaaagagttgaagaaaaataaacagaaaaattcaaaggcgttgttcaccttgcaacaagcggtgactgatccaattttcccaagaattatgggagctaagactgccaaagaagcgtggaacacattgcaggaggagtttcaaggaaatgttaaggtacgtgccgttaaacttcaatctctaagaagagattttgaattattgaagatgaaggagtctgagacagttaaagattactattctaaagttaaagaaatagttaatcaaatgagagcttttggggaagatattcttgacaagaaaattgttgagaaaattctaattactatgccccaaaagtttgacccaatcgtgacaacgattgaggaaatcaaagatctgttcactctatcagagacagaacttgtgggctctcttgaagcatatgagcaaagactgtataggcataaagaagatacacttgaaaatgtcttccagtcaaagtttaaatttcagccccaaaacaaagaaaatggaggaaagaaaaattatggagaaacttccagaagaagag

SEQ ID NO: 11106 - DNA, 1104 bp, Glycine max
  Gm_smallRNAprecursor_3939
caaaagaatattctacactaatgttagactattatacacacgattacacacgcaataaaccaaatgattaaattaaaatcgaaagtatatttataataataaagtatagacgtacgtgtgcgcacttgtgctaaacgcaactttgaagagacaagataaagagcgcagtagaagaatgtttcacgttcacataataaatactacactactgaaagctagctacttcagtaataatttcacacgcattgcgtactcatctacgtttcatcatgtcacaccaagtgaatgtgaagtgaaacaaacttcacagtgacataactgagacaccacccactctttctctttgcttattctataaatcagaaaccaactcacaactactttttggaccaccacatacacaatacaattaagctcatcatctggtcctgaaattggtgaagaaagttgttttgtggtggatgagtactgagtagtggtgccttattgtgggtggagagttccaaagggatcgcattgatctaattcttgtagatgtttacacttgcaagctttgcatgcaattcctggattcagatgtgattcagtggttcacttattggatcatgcgatcccttaggaactttccatcaactctaaacatcttgttgatccatttgaggtaaaactgaatcttcttatatgtgaaaactctactctaagtgtttcatcttctcctactctatctaaggattgtatatcttgtcatcatgtataaattaattgtgtagattttaattttcttggtacgatttatagacatgcatatagctaatgaatgtcattcaagtaacaattgcaaaggtggtgtctaattagtctacctcttgatttagttctccagaattatgccatttcaagaagtttttttattttatttgctatagtaaatttgttcgaaatcaataattaccccatacactataatttttgcagattgtattcatgtcaaaatgttatagaatgaaatacaacagccaagttgattaatctttagagtcataaaaaaatactctgttcctgacttccagttgtattcatgaatgcttgatattcttttcttat

SEQ ID NO: 11107 - DNA, 1102 bp, Glycine max
  Gm_smallRNAprecursor_3940
aaaagaatattctacactaatgttagactattatacacacgattacacacgcaataaaccaaatgattaaattaaaatcgaaagtatatttataataataaagtatagacgtacgtgtgcgcacttgtgctaaacgcaactttgaagagacaagataaagagcgcagtagaagaatgtttcacgttcacataataaatactacactactgaaagctagctacttcagtaataatttcacacgcattgcgtactcatctacgtttcatcatgtcacaccaagtgaatgtgaagtgaaacaaacttcacagtgacataactgagacaccacccactctttctctttgcttattctataaatcagaaaccaactcacaactactttttggaccaccacatacacaatacaattaagctcatcatctggtcctgaaattggtgaagaaagttgttttgtggtggatgagtactgagtagtggtgccttattgtgggtggagagttccaaagggatcgcattgatctaattcttgtagatgtttacacttgcaagctttgcatgcaattcctggattcagatgtgattcagtggttcacttattggatcatgcgatcccttaggaactttccatcaactctaaacatcttgttgatccatttgaggtaaaactgaatcttcttatatgtgaaaactctactctaagtgtttcatcttctcctactctatctaaggattgtatatcttgtcatcatgtataaattaattgtgtagattttaattttcttggtacgatttatagacatgcatatagctaatgaatgtcattcaagtaacaattgcaaaggtggtgtctaattagtctacctcttgatttagttctccagaattatgccatttcaagaagtttttttattttatttgctatagtaaatttgttcgaaatcaataattaccccatacactataatttttgcagattgtattcatgtcaaaatgttatagaatgaaatacaacagccaagttgattaatctttagagtcataaaaaaatactctgttcctgacttccagttgtattcatgaatgcttgatattcttttctta

SEQ ID NO: 11108 - DNA, 1102 bp, Glycine max; identical to SEQ ID NO: 11107
  Gm_smallRNAprecursor_3941

SEQ ID NO: 11109 - DNA, 1103 bp, Glycine max
  Gm_smallRNAprecursor_3942
aaaagaatattctacactaatgttagactattatacacacgattacacacgcaataaaccaaatgattaaattaaaatcgaaagtatatttataataataaagtatagacgtacgtgtgcgcacttgtgctaaacgcaactttgaagagacaagataaagagcgcagtagaagaatgtttcacgttcacataataaatactacactactgaaagctagctacttcagtaataatttcacacgcattgcgtactcatctacgtttcatcatgtcacaccaagtgaatgtgaagtgaaacaaacttcacagtgacataactgagacaccacccactctttctctttgcttattctataaatcagaaaccaactcacaactactttttggaccaccacatacacaatacaattaagctcatcatctggtcctgaaattggtgaagaaagttgttttgtggtggatgagtactgagtagtggtgccttattgtgggtggagagttccaaagggatcgcattgatctaattcttgtagatgtttacacttgcaagctttgcatgcaattcctggattcagatgtgattcagtggttcacttattggatcatgcgatcccttaggaactttccatcaactctaaacatcttgttgatccatttgaggtaaaactgaatcttcttatatgtgaaaactctactctaagtgtttcatcttctcctactctatctaaggattgtatatcttgtcatcatgtataaattaattgtgtagattttaattttcttggtacgatttatagacatgcatatagctaatgaatgtcattcaagtaacaattgcaaaggtggtgtctaattagtctacctcttgatttagttctccagaattatgccatttcaagaagtttttttattttatttgctatagtaaatttgttcgaaatcaataattaccccatacactataatttttgcagattgtattcatgtcaaaatgttatagaatgaaatacaacagccaagttgattaatctttagagtcataaaaaaatactctgttcctgacttccagttgtattcatgaatgcttgatattcttttcttat

SEQ ID NO: 11110 - DNA, 1103 bp, Glycine max; identical to SEQ ID NO: 11109
  Gm_smallRNAprecursor_3943

SEQ ID NO: 11111 - DNA, 1103 bp, Glycine max; identical to SEQ ID NO: 11109
  Gm_smallRNAprecursor_3944

SEQ ID NO: 11112 - DNA, 1103 bp, Glycine max; identical to SEQ ID NO: 11109
  Gm_smallRNAprecursor_3945

SEQ ID NO: 11113 - DNA, 1058 bp, Glycine max
  Gm_smallRNAprecursor_3946
tacttcaaaatgaacagagtctataactttccaaattggttcttacaatggtggaatttctttggtccaattctagagattttgccagagcaggttcaacaaggatttgctcaatttaaaaaacaatacaatttttaggaatcacgaattccagtagaccttagatatttttccagttttgttctgtcatggattttttcatggcaatatcgttatagaaaactgagataacaaactaatatccatcactacaaaggcatgcatttgtaaaatggtggacttagtttgattcgtccaaggctgatccagaacaagtgaagctttggtttcaattccatccagaatttctcaaagcagctgatccagagacttctgtgtttttgaaccaaaagtcccatatggctgcatttttagcaggatcaaaatcaaaagaggtactgactaaaaatcttaaagaagttatgcaaatgttgcaacaaaaagaagaaagttcatcctcaaagaaggaagaaacaagttctgttgaagaagaagatcctttttacccgaacaaagatgattgttttggtatttgtttagattaaaatttaattgtaattacagtcacataattgtttgtatttttaaatattgtaatagttccggacaatactacctgtcctgtagcaaataagtaccggtcaaaactaccagtcatgtaacaaatagtcaaatagtttcggtcaaaactatcgaaaactactagtcttatagaaaacttttggctatataaggagtcctcaatcatattgtgaggcactctttgattcagccatttttaggagtcttgagagaaaggtgctttcataagaacaactttgtaaactcttctttcaatttcaataaatttgaagttttctaacatctctcttctccgccccttctgtcaatcctgtgcgactctgtcgtcgctttggtttctttgtttgcgataacctgggatttgtaagcctgtaaaggtgtgcccttgatatctgtttctgaaactgcatcttcatcatctattatactgcatcatt

SEQ ID NO: 11114 - DNA, 1188 bp, Glycine max
  Gm_smallRNAprecursor_3947
atgtttcccctttaatgttatgccatgaatgtttaggggttgtgaaggagactctggaactggttgctgcatcccgaattataggccttcttgtcggggataagcgtcgaccctaaatgcatgtcgattattccactgttgaatcattggggcgaataattgcccccaattttcgtcatgtttcccctttaatgttatgccatgaatgtttaggggttgtgaaggagactctggaactggttgctgcatcccgaattgtctcaagactctgtctggttggtgccactcaataacttggaaacaaattagtggcaccaccgcgtaccacgcgatacttccgactaaacaaacgggaggcaacaatgatataacggttgatgggtaaggctcccacacaaactgcatataacaacatagttgtgaacattgtagtaaaataagacataattttttattttacaaatacaatagcatgcttcttacctcatgacgtttcataatatccaacttgcgacgaaaaactttcacatcatcattgccgatatgttggtttccacgtcgcagccacctacaaagaataaaatttaatataccctaaaaccatttattctattgaaatgaaagacgctgttaaaaattactcacctgtgccctagtggtgtattttctatttgggaaggagtcctctttggagccaaggttggacatcgttcccatgcccacaattgtagtaagatgcacatacctccgattgatttagttttataatcggtggcactgcacatctctctatatagaaaaccaagtacggcagctccccatgcatatctgccacattcttcaaagtcacgtaaaaattgaaggtaccttaccgaaactctgttactggttttgtcaatgaacaagacacctccaataaatctcagtatccatgcacgggcaaaccttcgtacttgttcttcgtcgtcatcattatttatttgatcaaaatggtgagccaaccaacttaatttaaccacactacctttaatttcaccttcttgtggtctgactcccaataattcctcacataaatcagcccaatcaagatttgttggaccgattaatggtaaaccatccacacttatacctaacaacacagagacgtcttgtagagtgatagtacactctccgcatctcatgtgaaac

SEQ ID NO: 11115 - DNA, 1190 bp, Glycine max
  Gm_smallRNAprecursor_3948
acctctaatcttgaggacttatcagatgaatacgagacttgttggatcaaaaatcatgatagtgatactgactcctcttccgggcccgaaggaagtaacctgtctccatcccacgaacctatattcaaacgagattggtaatctacggatcattcatgtctaagttatttcttctttgaaattttcatgtaatgtcttatgtccgtcttcagttatcactttacgtattgaaataatttttcctttaaatttaaattagcaattttcagtttacccacttttactgcagtagttgacatggtaacataactgtcaaaattcacaatactttgccatttacactacactgtttctaaaaattaaatgtctcattgacaaaactgacatgaaatggacaactcataatctctttgttcactctaaaaataattatggacgtttgttgctttaattacaagggaaaaatcacagtccaaattgacaatactctgcaattttcacacgtctctaaaaattaaatgtctcacctgcaaaactgacatgaaatagatagctcataatctctttgttcactctgaaaatcatcatgaacgtctgctgctttaattacatgggaaaaatcacagttcaaattgacaacattctgcattatgagctgtctatttcatgtcagttttgcaagtgagacatttaatttttagagacgtgtgcaaaactaacatgagatggacaactcataatctctttgttcactctgaaattataatggacgttagctccatcacttactaggggaaaaaacattggattccaatacacatcaacgtggcagaatactcatacaactataaataacacaacgcatacataatacaaacacacaatctcacacaacatagtttcacaacccaaatacaatcttattactatgtcatttttgggagaaacaagcagtcagaccattgctaactccagattagctttcatttttccaaattgatcaatcattcacaaccaaactggtgtttattttcaaagtctcactccaacaccaatgggagttcctaacaattgttcttttgatacactcaagcgtagaatgcacaacacccttcaactaaccaacgatcaattactggatgaaatctactaccaacaaccattcatagatgcaggtcaataatattttt

SEQ ID NO: 11116 - DNA, 1035 bp, Glycine max
  Gm_smallRNAprecursor_3949
attgattagtgaatttattgtattatattttattttgcagtaacaatgacatcttcatcgtcatgttcatcacatattagcattaagtctggccccatcgatgctgatgtattatagatgcaacctaagcatgtttcagaacatgtttgaaatggggaagaggatcggaatacatatcagacgagctgtccccacgtatcaaggggaagaagaaattccagagcaaatttttccttttcttcgacaatctggtttcacctggattatgaagatgggatacttaaaaataaatgtctcattaattagtgctctgatagaaagatggaggccggaaacacatacgtttcacatgagatgcggagagtgtactattactctccaagacgtctctgtattgttaggtatgagtgtgaatggtttaccattaatcggtccaactaatcttgattgggctgatttatgtgaggaattattgggagtcagaccacaagaaggtgaaattaaaggtagtgtggttaaattaagttggctggctcaccattttgcacaaataaataacgacgatgatgaagaacaagtataaaggtttgcccgtgcatggatactgagattcattggaggtgtctttttcgttgaaaaaaacagtaacaaagtttcgctaaggtatcttcaatttttacgtgactttgaagattgtggcacatatgcatggggagctgccgtacttggttttctatacagagagatgtgcagtgccaccgattataaaactaaatcaatcggaggtatgtgcatcttactacaaatgtgggcatgggaacgatgtccaaccttggctccaaagaggactccttcccaggtagaaaataaaccactggggcacagattagtcatttttaacagcgtcttttatttcaatagaataaatggttttagggtatattaaattttaatctttgtaggtggctgcgacgtggaaaccaacatatcggcaatgatgatgtgagagtttttcgtcgcaagttggatattatg

SEQ ID NO: 11117 - DNA, 1036 bp, Glycine max
  Gm_smallRNAprecursor_3950
agaccacaagaaggtgaaattaaaggtagtgtggttaaattaagttggctggctcaccattttgcacaaataaataacgacgatgatgaagaacaagtataaaggtttgcccgtgcatggatactgagattcattggaggtgtctttttcgttgaaaaaaacagtaacaaagtttcgctaaggtatcttcaatttttacgtgactttgaagattgtggcacatatgcatggggagctgccgtacttggttttctatacagagagatgtgcagtgccaccgattataaaactaaatcaatcggaggtatgtgcatcttactacaaatgtgggcatgggaacgatgtccaaccttggctccaaagaggactccttcccaggtagaaaataaaccactggggcacagattagtcatttttaacagcgtcttttatttcaatagaataaatggttttagggtatattaaattttaatctttgtaggtggctgcgacgtggaaaccaacatatcggcaatgatgatgtgagagtttttcgtcgcaagttggatattatgaaacgtcatgaggtaagaacatggtattgtatttgtaaaataaaaaattatatatgttattttactaaaatgttcacaactatgttgttatatgcaatttgtgtgggagccgtacccatcaaccgttatatcattgttgcctcccgtttgtttagtcggaagtctcacgtggtacgcggtggtgccactaatttgtttccaagttattgagtggcaccaaccggacagagtattgagacaatttgggatgcaacaaccaattccagagtctccttcgtaacccttaaacattcatggcataacattaaaagggaaacatgacgaaaattaggggcaattgttcgccccaatgattcatcagtggaataatcgccatgcatttagggtcgacgcttatccccgacaagaaggcctattgagctttaactcggattacatggtctggtataggcgaaagacaaagatgtttgttgacccacaaa

SEQ ID NO: 11118 - DNA, 1107 bp, Glycine max
  Gm_smallRNAprecursor_3951
cattgttgtgagtcaaagaaatacaaacctaaaaaatatggtaaataacagctacgattgggatgacaataatggcaaggcaaagacagcagtgtagattgaactcctcagtacgtgggacaattcattggttctaacatatttttcagcagaaactacctacaaacaaaaaacacataatatcttctatatctatatttctataggaaggagttctagcaaagtagctaaaggtcattggcatgtatgagacaatcacacatttagtatctttgtataaagtttacactatgaaatactgtaaatttaagccgtatacttcattcccctcaaaagtacttccttcatttgtttatacttcaaacttcaaaccacaggatcataggtgtagctacgtacctagctaggttctctctttattttgaaggatctctctacacacacatgtcatgggtgtggttcagaacttgagatgtttcgttgcaaaggtgaggttgagaggaatgttgtctggctcgaggtcatggaggaggaggagagtattgagatgagtgaaagtttccaatggaaatttaccctcttaacacaaaaaaaaaaattgattcgcggaccaggcttcattccccacacccaacttttttttttattcctttcagtttctttctctccgttttcatatctttcttacatgcccttatggtaaggctttctcttcgttgaatctttctctcaatttgcacacacacacaataacatttactcacttagacctgaagggatcaactttgtaacaagatatgaatcttctaggcatcatgtaggcaaaactatcaaattttaagtgtaatcattaaaagaaacaatttctttacaaaaatataggacctcaagaataattctactccattcaaacatttatatctaccatattaaacttcaggatcaagttgaagaattgaatgagggtataaaataaactaataaataaaacatatcataaaaaaaaatacatactctttgttatcaagcttcacctcagttcccccatattcaggcaaaataacagtatcacctttcttaacagccacaggaattagcttcccattg

SEQ ID NO: 11119 - DNA, 1107 bp, Glycine max; identical to SEQ ID NO: 11118
  Gm_smallRNAprecursor_3952

SEQ ID NO: 11120 - DNA, 1107 bp, Glycine max; identical to SEQ ID NO: 11118
  Gm_smallRNAprecursor_3953

SEQ ID NO: 11121 - DNA, 1111 bp, Glycine max
  Gm_smallRNAprecursor_3954
gccgaaatcgaagagaattgtcggttagggcatcaacgatggtgagcttgcgcttgagagggttggaagaagggggtcttgggggcaaggggctcttcaatttggcaggggagggagtaacgagattgggatcggagggaaggtcgttctctttggagggtttgtgtttgtgagaagagggacggagtttggcaaagctggtagttggggttgggcttggcgaagaaggaagctctgctgcgtcgctgaaagggtttcttgggagcatgaaacgcttcatttttttggggggcagaggaagaaggagagagaaaggcgatgggaatgggtattttgacggcggggactacaaaggtgagtagagagcatgcgcaagacaaacgttcaataatgcataaacctattgggctggtgtgcaaaaagattaaatgcaacgaaggcggttttcattaaaacccgtcgttgttattttgtcaagaataacgaaaatgccaaccaagcacattctaagacggttattaacgaccgtcttagtatgtacgtcgtagaaaacaattttttgttacttaattacaagtttgccaccgcgtcacattctaagacggtcgcaaataaccgtcttagaatgtgcgtcgtaaaatgcttctcttctagtagtgcttgagcaacgagggtaaaactaaaatggaaccatattaaaattgatactgaaatagatactgaattataggcagcttatttacaaactgacaaagtaactagttcctaactgaattaaaaccaactcttatctaattgctcctttgataaccagctgctaataacatcactaacatctcgttaacacactctgtcctgtggacttcaacaattttgttttacctacaactttcatatgttaccaaagattacagttgtacttgtagtgacttacaaacatgtttatgaatttgtaaaatctgtcctttttgttagaattgatgtctcatgagaaagacatatgacttatgtagggactaataagtaaataattaacgattaaaggctaaattgtaattggacttaataagaaaagtttctagagttagctgctacctgatgggagtagtgg

SEQ ID NO: 11122 - DNA, 1047 bp, Glycine max
  Gm_smallRNAprecursor_3955
acaaaagtacagtacttttctagaaatactgtacttccagaaatatacatacacatacacacacacacacacacacacacactgatctctagtatcagagcctgatggggaagtaggaataatttctgtaagggcatatgttaactgaattcatggatctgaactgtgtatagtaattttaatttacacagtatatgtttgaacagtattttctggaagcacaaaaatctgatattttagttgaatgatactgtaacagtaagtcccgtggatgagaaagggcagtaaggctaaggtgtattgttcaaataaaatattaagacataatatactggtggctataggagtagtgttcaaactatattgtccgtaaaaaacaatcttctttatttttcagatcctagaagttcagtaacatataaccttatggaaacatttctatggaaccatatgacgacaaagatactatggaaccctagaatttcatctgctttcaaaaaattcaatttatgaacatagccgtaaatacaagtatttacatatcggttgtgtacaagtagccatcaagcccttaattgatttgggcatagatgtttcaattttaatgtgccttagagatattaggcataacaagtttgaagattccttaattggaacagtagaaacaagcttaggacaaggtccagtatacttcaactattatccaaacaaaacggtgagtctaatggacagaaacattcttgactctctgtttttaaatatccactttcatggccttgacatgaaagaaggatcaatcccagcagctttgatatataggattcagtacaaagtaatgaatacttgtgcttctagagtcctgttaaaacctcaaagaggagaaacaactttgtttatcactgatatgacaaaggctaatgtttctctcccgagaaaaataaaatgggatgaagtaactcttcccgaaagatggattatggataaggccacaccgcctgctccccgacccgctccaaccatagagcaaattaagcaagataactccgg

SEQ ID NO: 11123 - DNA, 1047 bp, Glycine max
  Gm_smallRNAprecursor_3956
agacataatatactggtggctataagagtagtgttcaaagtatattgtctgaaaaaaaaatcttctttatttttcagatcctagaagttcagtaacatataaccttatggaaacatttctatggaaccatatgacggcaaagatactagaggatgaatccaatatgtctcgccttttacgttctttctctcgcatttcttttagattaaactcatcttcatcctcttcttcaatgaattcaaccaataatttactcaatgaacaagataaccagacccacgaggtcgtcccaaaacacaatcacttcgatgaggaagtccgattcgaagacaaaaatcaaaatatggatgattggaacattccagaaatccctcaggataagctgtacattcctgaaacaaataaagacaaacataattttgactatataatcaaaacagtagaaaataatattcctctaggacaagatataggggaagaattttatctgttttcaaaaaattcaatttatgaacatagccgtaaatacaagtatttacatatcgattgtgtacaagtagccatcaagcccttaattgatttaggcatagatgctgcagttttaatgtgctttagagatattaggcataacaagtttgaagattccttaattggaacagtagaaacaagtttaggacaaggtccaatatacttcaactgttatccaaaaaaaacggtgagtctaatggacagaaatattcttgactctctgtttttaaatatccactttcatggccttgacatgaaagaaggatcaatcccaacaactttaatctataggattcagtaaaaagtaatgaatacttgtgcttctggcgtcctgttaaaacctcaaagaggagaaacaactttgtttatcactgatatgacaaaggctaacgtttctctcccgagaaaaataaaatgggatgaagtaaatcttctcgaaagatgggttatggataaggccacaccgtctgttccccgacccactccaaccatagagcaaattaagcaagataactccgg

SEQ ID NO: 11124 - DNA, 1049 bp, Glycine max
  Gm_smallRNAprecursor_3957
tttgaggtgcccttgatgtattctatttcaaaatcaaagacacttaaaattgcttgccatcttgcaaatatttgttttgaggcaaggtttttaacatccttttgtaaaatatctttggctgacttgcaatcaaccctaattaaaattttttggtttaataaatctgattgaaatttggaaatgcacaaaacaaatgctaaaacttcctttttaacaattgaatatttcaattgtgtaggattccaatgttttgatgtatatgcaatgacatgatcttgaccatgtactctttgtttgaggattccaccataacctatgtctgatgcatcgatttcaactattttaaatgcctgaggaataggaagatacaaacattttatagattggactttgagtttgatttctttaactgtttgggtatggagatcagaccaaggagatggatttttcttcagcctatcatacaatggcttgacaatattgtttaaataggggacaaattctcctacataatttagacaacctagaaatctttgtaactggatcttgtctaagatttggttgggaaatttttttgcaaactctattgacctttcaattggaatgattgtacattgatatatcttgtgaccaaagaattgaattcgagtttggaaaagattgatttttgatttggagactgccaaaccattcaatttgatgatatggatgaaagtctggagatgtttgaagtattggtcaatgttttgggaaaagattaaaacatcatctatgtagacaatgacaaattttgaatagggattaaaaatatcattcataattttttgaaattctaaaggggcattcttcagtccgaatggcatcacattctattcatattgcctgaaaggtacaaaaaacgttgttttgtacttatctgattcttggattttgatttgccaaaatccagatttcatatcaaattttgaaaatatctttgcagaatttaatctgttaagtaaatcttttttgtttcgaataggatacctaatccattgtaatgcttgatt

SEQ ID NO: 11125 - DNA, 1049 bp, Glycine max; identical to SEQ ID NO: 11124
  Gm_smallRNAprecursor_3958

SEQ ID NO: 11126 - DNA, 1050 bp, Glycine max
  Gm_smallRNAprecursor_3959
tttgaggtgcccttgatgtattctatttcaaaatcaaagacacttaaaattgcttgccatcttgcaaatatttgttttgaggcaaggtttttaacatccttttgtaaaatatctttggctgacttgcaatcaaccctaattaaaattttttggtttaataaatctgattgaaatttggaaatgcacaaaacaaatgctaaaacttcctttttaacaattgaatatttcaattgtgtaggattccaatgttttgatgtatatgcaatgacatgatcttgaccatgtactctttgtttgaggattccaccataacctatgtctgatgcatcgatttcaactattttaaatgcctgaggaataggaagatacaaacattttatagattggactttgagtttgatttctttaactgtttgggtatggagatcagaccaaggagatggatttttcttcagcctatcatacaatggcttgacaatattgtttaaataggggacaaattctcctacataatttagacaacctagaaatctttgtaactggatcttgtctaagatttggttgggaaatttttttgcaaactctattgacctttcaattggaatgattgtacattgatatatcttgtgaccaaagaattgaattcgagtttggaaaagattgatttttgatttggagactgccaaaccattcaatttgatgatatggatgaaagtctggagatgtttgaagtattggtcaatgttttgggaaaagattaaaacatcatctatgtagacaatgacaaattttgaatagggattaaaaatatcattcataattttttgaaattctaaaggggcattcttcagtccgaatggcatcacattctattcatattgcctgaaaggtacaaaaaacgttgttttgtacttatctgattcttggattttgatttgccaaaatccagatttcatatcaaattttgaaaatatctttgcagaatttaatctgttaagtaaatcttttttgtttcgaataggatacctaatccattgtaatgcttgattc

SEQ ID NO: 11127 - DNA, 1050 bp, Glycine max; identical to SEQ ID NO: 11126
  Gm_smallRNAprecursor_3960

SEQ ID NO: 11128 - DNA, 1047 bp, Glycine max
  Gm_smallRNAprecursor_3961
ttgaggtgcccttgatgtattctatttcaaaatcaaagacacttaaaattgcttgccatcttgcaaatatttgttttgaggcaaggtttttaacatccttttgtaaaatatctttggctgacttgcaatcaaccctaattaaaattttttggtttaataaatctgattgaaatttggaaatgcacaaaacaaatgctaaaacttcctttttaacaattgaatatttcaattgtgtaggattccaatgttttgatgtatatgcaatgacatgatcttgaccatgtactctttgtttgaggattccaccataacctatgtctgatgcatcgatttcaactattttaaatgcctgaggaataggaagatacaaacattttatagattggactttgagtttgatttctttaactgtttgggtatggagatcagaccaaggagatggatttttcttcagcctatcatacaatggcttgacaatattgtttaaataggggacaaattctcctacataatttagacaacctagaaatctttgtaactggatcttgtctaagatttggttgggaaatttttttgcaaactctattgacctttcaattggaatgattgtacattgatatatcttgtgaccaaagaattgaattcgagtttggaaaagattgatttttgatttggagactgccaaaccattcaatttgatgatatggatgaaagtctggagatgtttgaagtattggtcaatgttttgggaaaagattaaaacatcatctatgtagacaatgacaaattttgaatagggattaaaaatatcattcataattttttgaaattctaaaggggcattcttcagtccgaatggcatcacattctattcatattgcctgaaaggtacaaaaaacgttgttttgtacttatctgattcttggattttgatttgccaaaatccagatttcatatcaaattttgaaaatatctttgcagaatttaatctgttaagtaaatcttttttgtttcgaataggatacctaatccattgtaatgcttgat

SEQ ID NO: 11129 - DNA, 1048 bp, Glycine max
  Gm_smallRNAprecursor_3962
ttgaggtgcccttgatgtattctatttcaaaatcaaagacacttaaaattgcttgccatcttgcaaatatttgttttgaggcaaggtttttaacatccttttgtaaaatatctttggctgacttgcaatcaaccctaattaaaattttttggtttaataaatctgattgaaatttggaaatgcacaaaacaaatgctaaaacttcctttttaacaattgaatatttcaattgtgtaggattccaatgttttgatgtatatgcaatgacatgatcttgaccatgtactctttgtttgaggattccaccataacctatgtctgatgcatcgatttcaactattttaaatgcctgaggaataggaagatacaaacattttatagattggactttgagtttgatttctttaactgtttgggtatggagatcagaccaaggagatggatttttcttcagcctatcatacaatggcttgacaatattgtttaaataggggacaaattctcctacataatttagacaacctagaaatctttgtaactggatcttgtctaagatttggttgggaaatttttttgcaaactctattgacctttcaattggaatgattgtacattgatatatcttgtgaccaaagaattgaattcgagtttggaaaagattgatttttgatttggagactgccaaaccattcaatttgatgatatggatgaaagtctggagatgtttgaagtattggtcaatgttttgggaaaagattaaaacatcatctatgtagacaatgacaaattttgaatagggattaaaaatatcattcataattttttgaaattctaaaggggcattcttcagtccgaatggcatcacattctattcatattgcctgaaaggtacaaaaaacgttgttttgtacttatctgattcttggattttgatttgccaaaatccagatttcatatcaaattttgaaaatatctttgcagaatttaatctgttaagtaaatcttttttgtttcgaataggatacctaatccattgtaatgcttgatt

SEQ ID NO: 11130 - DNA, 1049 bp, Glycine max
  Gm_smallRNAprecursor_3963
ttgaggtgcccttgatgtattctatttcaaaatcaaagacacttaaaattgcttgccatcttgcaaatatttgttttgaggcaaggtttttaacatccttttgtaaaatatctttggctgacttgcaatcaaccctaattaaaattttttggtttaataaatctgattgaaatttggaaatgcacaaaacaaatgctaaaacttcctttttaacaattgaatatttcaattgtgtaggattccaatgttttgatgtatatgcaatgacatgatcttgaccatgtactctttgtttgaggattccaccataacctatgtctgatgcatcgatttcaactattttaaatgcctgaggaataggaagatacaaacattttatagattggactttgagtttgatttctttaactgtttgggtatggagatcagaccaaggagatggatttttcttcagcctatcatacaatggcttgacaatattgtttaaataggggacaaattctcctacataatttagacaacctagaaatctttgtaactggatcttgtctaagatttggttgggaaatttttttgcaaactctattgacctttcaattggaatgattgtacattgatatatcttgtgaccaaagaattgaattcgagtttggaaaagattgatttttgatttggagactgccaaaccattcaatttgatgatatggatgaaagtctggagatgtttgaagtattggtcaatgttttgggaaaagattaaaacatcatctatgtagacaatgacaaattttgaatagggattaaaaatatcattcataattttttgaaattctaaaggggcattcttcagtccgaatggcatcacattctattcatattgcctgaaaggtacaaaaaacgttgttttgtacttatctgattcttggattttgatttgccaaaatccagatttcatatcaaattttgaaaatatctttgcagaatttaatctgttaagtaaatcttttttgtttcgaataggatacctaatccattgtaatgcttgattc

SEQ ID NO: 11131 - DNA, 1232 bp, Glycine max
  Gm_smallRNAprecursor_3964
aattgcttgccatcttgcaaatatttgttttgaggcaaggtttttaacatccttttgtaaaatatctttggctgacttgcaatcaaccctaattaaaattttttggtttaataaatctgattgaaatttggaaatgcacaaaacaaatgctaaaacttcctttttaacaattgaatatttcaattgtgtaggattccaatgttttgatgtatatgcaatgacatgatcttgaccatgtactctttgtttgaggattccaccataacctatgtctgatgcatcgatttcaactattttaaatgcctgaggaataggaagatacaaacattttatagattggactttgagtttgatttctttaactgtttgggtatggagatcagaccaaggagatggatttttcttcagcctatcatacaatggcttgacaatattgtttaaataggggacaaattctcctacataatttagacaacctagaaatctttgtaactggatcttgtctaagatttggttgggaaatttttttgcaaactctattgacctttcaattggaatgattgtacattgatatatcttgtgaccaaagaattgaattcgagtttggaaaagattgatttttgatttggagactgccaaaccattcaatttgatgatatggatgaaagtctggagatgtttgaagtattggtcaatgttttgggaaaagattaaaacatcatctatgtagacaatgacaaattttgaatagggattaaaaatatcattcataattttttgaaattctaaaggggcattcttcagtccgaatggcatcacattctattcatattgcctgaaaggtacaaaaaacgttgttttgtacttatctgattcttggattttgatttgccaaaatccagatttcatatcaaattttgaaaatatctttgcagaatttaatctgttaagtaaatcttttttgtttcgaataggatacctaatccattgtaatgcttgattcagtggtttgtaatttatgactaagcggggtgttcctcattcaagctcagattgtttattgacataaaaagccacacaagaccatgggcttttgctttttcggattaggccattatcaagcaaatccttgatttccttttggcagtattgaaggagttcttcgttcatttgagttggtctggcttttgtgggaatttttttcccctaaattctttctcataagggagatc

SEQ ID NO: 11132 - DNA, 1080 bp, Glycine max
  Gm_smallRNAprecursor_3965
cactccaacatatgaccatggtagctacggcttaccaaacctcccatgaatgttcagaagaaaccattatagacatcttagtggcagggttttctggacaactgaaaggatggtgggataattatctcactaatgaggagaaataaaaaatttacagcgcagtcaaaacggatctcaacggaaaagtcattagtaatgacgatgataaagagattcctgacgctgtcaataccttaatttttacaatagctcaacattttattggagacccatccttatggaaagataggtctgcagaattattatcaaaccttaagtgtagaaccttagcagattttaggtggtacagagatactttcctaactagggtttacacaagagaagatagtcaacaaccattctggaaagaaaaatttctagctagtcttcccagatcattagaagacaaggttattgataaaattcatagtcaatctgccaatggagacattccatatgaaaacttaagctatggccaattaatttcctatgtccaaaaggtagccttaaaaatctgccaggatgacaaaattcagaggcaattagccaaagaaaaagctcaaacaaagaaggatttaggttccttctgtgaacaatttggcttaccagcctgcccaaaacaaaagaagaaacaaacctctaggaaagaaatccaggatcataaaccagccaatagaataagattttcaaaaagaagatactctaaaaaacccttaactagtaaggaaatagaaaatcctaagcaaaaaataaaataaaaaataacatgctacaattgtggaaaaaaaggccacattagtaagtattgtagactaaagaaaaaattaaggaaccttaacctagaacccacaatcgaagaacaaataaacaatttactcatagaaacttagaaggaagaaacagaaattgaaacttcatcctctgtactttccgacgaaaatctaaacttaatccaacaagatgaccaattatcatcaacggatgatgatgataagcaaattaatactctaacaagagaacaagatctcttgtttgaagcaa

SEQ ID NO: 11133 - DNA, 1143 bp, Glycine max
  Gm_smallRNAprecursor_3966
ccatccaaatatctaatgaaggaataactacaagttatttaggaaggaaaattatatttaatttttctactaaaccaatctccagaaatataaatcttatagaaaataatattaaccaaattaacttcttaaaagaagaagtatcgtttaataatatccaagtacaactaggaaaaccccaaataaaggagaaaatccaatctttattaagtcatatagaatcaactttttgttctgaattgccacatgcattttgggacagaaagaaacatattgttgatcttccttatgagaaaggttttagggaaaaacaaattcccacaaaagctagaccaatccaaatgaatgaagaactccttcaatattgccaaaaggaaattaaagatttacttgataaaggtttaattcggaaaagtagaagtccatggtcttgtgcggctttttaggtcaacaaacaatccgagattgagcgaggaacaccccgcttagtcataaattacaaaccgttaaatcaagcattacaatggatcaggtatcctattccaaataaaaaagacatacttaacagattaaattctgcaaaggtattttcaaaatttgacatgaaatccggattctggcaaatccaaatccaagaatcagataggtacaaaacggcgtttactgtacctttcgggcaatatgagtggaatgtaatgccattcggactgaagaatgccccttcagaatttcaaaaaatcatgaatgatattttcaatccttattcaaaattcgtcattgtttacatttatgatgttttaatcttctcccaagatattgatcaacatttcaaaaacctctagactttcatccatatcattaaacagaatggtttggcagtctccaaatcaaagatcaatcttttccagacacggatacgattccttggacacaatatataccaaggtacaatcatcccaatagaaagatcaatagagtttgctagcaaattccctaaccaaatcttggataagacccagttacaacgatttctggggtgcctaaattatgtaggagaatatgtcccctatctaaacaatattgtcaaaccattacatgataggctgaaaaagaatctgcctccttggtctgacctccatactc

SEQ ID NO: 11134 - DNA, 1182 bp, Glycine max
  Gm_smallRNAprecursor_3967
aagacataggcctcaccagagtaccaacattggccaaaaagacctgggcagaaatggcctcagaatcagacgatgattctgaaacagacctgcaaaaacaaattcaaaaagccaaacagaccaaaactgtctgtaaccaaaaaccaagccaaccgttgactcaacgagaatcaacaccacaacccagcaacagctatatttcaaaaaacaaattcttcaatgtcttacaaatggaaccagaatattgggacaagaatcctttcaaggcaaccgccaaagtattccccccgggatttcattataggccaacagccacaaacaaaaccagaaaattctatgaattcattctaatagatacaaacttcgtatctattaaacatttcaaggaccccaaagatccaaatctaaacacccactccacaatccagatcctaaaggtgatgcagccacgacattatggctcaaacttaaaccaacccaaaaaattttctgcaccttttgaccctgcaggatataattattgggattacattgacgcctggaccaatgtgttctggcatcaaaatagtaaattcaagcattcatggctaatttacttcaaaaataacaccgtgtataattttccaaattggttcctccaatggtggaactacttcggaccaattccacagatatttccagaagaagtccaacagggattccaacaattcagcaagctcttcaacagcaaggaatcaagaattccgacagacttaaaatacttttccagttttgccatgtcatggattttttcatggcaatacagatatggaaaaaccgaaaatagcaagcagtatccaccgttgcagagacacgcctttgtaaaatggtggtcacaattcgatacctcaaatgctgctccagaacaagtcaagaactggtttcagagcaaccctgagtttctcaaacctgctgatccagagacatctttgtttctgaatcagaagtctcaacttgcagcattcttggcaagctcaaaatctaaagaaagtcttgctcagaatcttaaggaagttctccaactacttcaacaggaagaagaagaagaaccccccaagaaggaagccgaatcatccgaaaataatgatgaccaagaagatgatccattctaccagaatgaggatgactgttttggtatatcgt

SEQ ID NO: 11135 - DNA, 1105 bp, Glycine max
  Gm_smallRNAprecursor_3968
tcgagaatgtttctgtccatcagactcactgttttgtttggataacaattaaaatatactggaccctgtcctaggctagtttcgactgttccaattaaggagtcttcaaatttattatgcctaatatctcttagacacattaacactgctgcatctatgcccatgtctattaagggcttgatggctacttgtacacagccgatgtgtaaatatttatactttcgactatgttcataaattgaattttttgaaagtaaatggaattcttcccctatgtcttgccctagaggaatattgttttctactgttttgattatgtaatcaaagttgtgtttatctttcattgtttcaggaacgtatagttgatcctgagggatttctgggatgttccagtcatccatgctttgattgatatcttcgaatcggacttcctcatcgaagagattgtgtttaggggcgacctcttgggtctggttatcttgatcacttaataagtttgaatttctggaagaagttgatgaagaggaattagaccgaaaggaaatacgtgaaaaagaacgcaggagtttagacatgattataaaatcctctaatatcttcgccctcatttggttccatagaaatatttccgtaagtatatacgtaacaaaatttttcaggatctgaattatttttaagaaaaaactctttttttttaattagtttgaacggcaatcctatagccaccagtatattatgtcttgatattttggttaaacagtacacctcagccttactgccctttatccaccacgggtcttactgctacagtaccactcaactaaaatattagactgttgtacttccaggaagtactgttcaaacatctactgtacaaattaaaatataatattactcatactatacaaggtttcagtttcagatccataaaatttgttaacatacgtccttacggacagtattcctacttccccatcaggctctgataccagagatcagtagaataagatcaaacggatagataggaagtaagaatgcagtatgataaatgaaaggaaaatataaacttgtaaaacagatatcaagggcacaccggaatccggct

SEQ ID NO: 11136 - DNA, 1110 bp, Glycine max
  Gm_smallRNAprecursor_3969
actgtatctaccgtgtcggtaatgtttaccagaactgttacaaaaactttttacaaattacattattatcgggtaccgagtaattagttacaataattcatgattactacaactaactaatcatcgtctaacgatataccaaaacagtcatcctcattctggtagaatggatcatcttcttggtcatcattattttcggatgattcggcttccttcttggggggttcttcttcttcttcctattgaagtagttggagaacttccttaagattctgagtaagactttctttagattttgagcttgccaaaaatgctacaagttgagacttctgattcagaaacaaagatgtctctggatcagcaggtttgagaaactcagggttgctctgaaaccagttcttgacttgttctggagcagcctttgaggtatcgaattgtgaccaccactttacaaaggtgtgtctctgcaatggtggatactgcttgctattttcggtttttccatatctgtattgccatgaaaaaatccatgacaaggaaaaactggaaaagtattttaagtctgtcggaattcttgattccttgttgttgaagagcttgctgaattgttggaatccctgttggacttcttctggaaatatctgtggaattggtccgaagtagttccaccattggaggaaccaatttggaaaattatacacggtgttatttttgaagtaaattagccatgaatgcttgaatttactattttgatgccagaacacattggtccaggcgtcaatgtaatcccaataattatatcctgcagggtcaaaaggtgcagaaaattttttgggttggtttaagtttgagccataatgtcgtggctgcatcacctttaggatctggattgtggagtgggtgtttagatttggatctttggggtccttgaaatgtttaatagatacgaagtttgtatctattagaatgaattcatagaattttctggttttgtttgtggctgttggcctataatgaaatcccggggggaatactttggcggttgccttgaaaggattcttgtcccaatattctggttccatttgtaagacattgaagaatttgtttttt

SEQ ID NO: 11137 - DNA, 1070 bp, Glycine max
  Gm_smallRNAprecursor_3970
caactaactaatcatcgtctaacgatataccaaaacagtcatcctcattctggtagaatggatcatcttcttggtcatcattattttcggatgattcggcttccttcttggggggttcttcttcttcttcctattgaagtagttggagaacttccttaagattctgagtaagactttctttagattttgagcttgccaaaaatgctacaagttgagacttctgattcagaaacaaagatgtctctggatcagcaggtttgagaaactcagggttgctctgaaaccagttcttgacttgttctggagcagcctttgaggtatcgaattgtgaccaccactttacaaaggtgtgtctctgcaatggtggatactgcttgctattttcggtttttccatatctgtattgccatgaaaaaatccatgacaaggaaaaactggaaaagtattttaagtctgtcggaattcttgattccttgttgttgaagagcttgctgaattgttggaatccctgttggacttcttctggaaatatctgtggaattggtccgaagtagttccaccattggaggaaccaatttggaaaattatacacggtgttatttttgaagtaaattagccatgaatgcttgaatttactattttgatgccagaacacattggtccaggcgtcaatgtaatcccaataattatatcctgcagggtcaaaaggtgcagaaaattttttgggttggtttaagtttgagccataatgtcgtggctgcatcacctttaggatctggattgtggagtgggtgtttagatttggatctttggggtccttgaaatgtttaatagatacgaagtttgtatctattagaatgaattcatagaattttctggttttgtttgtggctgttggcctataatgaaatcccggggggaatactttggcggttgccttgaaaggattcttgtcccaatattctggttccatttgtaagacattgaagaatttgttttttgaaatatagctgttgctgggttgtggtgttgattctcgttgagtcaacggttggcttggtttttggtta

SEQ ID NO: 11138 - DNA, 1195 bp, Glycine max
  Gm_smallRNAprecursor_3971
caactaactaatcatcgtctaacgatataccaaaacagtcatcctcattctggtagaatggatcatcttcttggtcatcattattttcggatgattcggcttccttcttggggggttcttcttcttcttcctattgaagtagttggagaacttccttaagattctgagtaagactttctttagattttgagcttgccaaaaatgctacaagttgagacttctgattcagaaacaaagatgtctctggatcagcaggtttgagaaactcagggttgctctgaaaccagttcttgacttgttctggagcagcctttgaggtatcgaattgtgaccaccactttacaaaggtgtgtctctgcaatggtggatactgcttgctattttcggtttttccatatctgtattgccatgaaaaaatccatgacaaggaaaaactggaaaagtattttaagtctgtcggaattcttgattccttgttgttgaagagcttgctgaattgttggaatccctgttggacttcttctggaaatatctgtggaattggtccgaagtagttccaccattggaggaaccaatttggaaaattatacacggtgttatttttgaagtaaattagccatgaatgcttgaatttactattttgatgccagaacacattggtccaggcgtcaatgtaatcccaataattatatcctgcagggtcaaaaggtgcagaaaattttttgggttggtttaagtttgagccataatgtcgtggctgcatcacctttaggatctggattgtggagtgggtgtttagatttggatctttggggtccttgaaatgtttaatagatacgaagtttgtatctattagaatgaattcatagaattttctggttttgtttgtggctgttggcctataatgaaatcccggggggaatactttggcggttgccttgaaaggattcttgtcccaatattctggttccatttgtaagacattgaagaatttgttttttgaaatatagctgttgctgggttgtggtgttgattctcgttgagtcaacggttggcttggtttttggttacagacagttttggtctgtttggctttttgaatttgtttttgcaggtctatttcagaatcatcgtctaattctgaggccatttctgcccaggtctttttggccaatgttggtactctggtgaggcc

SEQ ID NO: 11139 - DNA, 1197 bp, Glycine max
  Gm_smallRNAprecursor_3972
caactaactaatcatcgtctaacgatataccaaaacagtcatcctcattctggtagaatggatcatcttcttggtcatcattattttcggatgattcggcttccttcttggggggttcttcttcttcttcctattgaagtagttggagaacttccttaagattctgagtaagactttctttagattttgagcttgccaaaaatgctacaagttgagacttctgattcagaaacaaagatgtctctggatcagcaggtttgagaaactcagggttgctctgaaaccagttcttgacttgttctggagcagcctttgaggtatcgaattgtgaccaccactttacaaaggtgtgtctctgcaatggtggatactgcttgctattttcggtttttccatatctgtattgccatgaaaaaatccatgacaaggaaaaactggaaaagtattttaagtctgtcggaattcttgattccttgttgttgaagagcttgctgaattgttggaatccctgttggacttcttctggaaatatctgtggaattggtccgaagtagttccaccattggaggaaccaatttggaaaattatacacggtgttatttttgaagtaaattagccatgaatgcttgaatttactattttgatgccagaacacattggtccaggcgtcaatgtaatcccaataattatatcctgcagggtcaaaaggtgcagaaaattttttgggttggtttaagtttgagccataatgtcgtggctgcatcacctttaggatctggattgtggagtgggtgtttagatttggatctttggggtccttgaaatgtttaatagatacgaagtttgtatctattagaatgaattcatagaattttctggttttgtttgtggctgttggcctataatgaaatcccggggggaatactttggcggttgccttgaaaggattcttgtcccaatattctggttccatttgtaagacattgaagaatttgttttttgaaatatagctgttgctgggttgtggtgttgattctcgttgagtcaacggttggcttggtttttggttacagacagttttggtctgtttggctttttgaatttgtttttgcaggtctatttcagaatcatcgtctaattctgaggccatttctgcccaggtctttttggccaatgttggtactctggtgaggccta

SEQ ID NO: 11140 - DNA, 1067 bp, Glycine max
  Gm_smallRNAprecursor_3973
gccaaaaatgctacaagttgagacttctgattcagaaacaaagatgtctctggatcagcaggtttgagaaactcagggttgctctgaaaccagttcttgacttgttctggagcagcctttgaggtatcgaattgtgaccaccactttacaaaggtgtgtctctgcaatggtggatactgcttgctattttcggtttttccatatctgtattgccatgaaaaaatccatgacaaggaaaaactggaaaagtattttaagtctgtcggaattcttgattccttgttgttgaagagcttgctgaattgttggaatccctgttggacttcttctggaaatatctgtggaattggtccgaagtagttccaccattggaggaaccaatttggaaaattatacacggtgttatttttgaagtaaattagccatgaatgcttgaatttactattttgatgccagaacacattggtccaggcgtcaatgtaatcccaataattatatcctgcagggtcaaaaggtgcagaaaattttttgggttggtttaagtttgagccataatgtcgtggctgcatcacctttaggatctggattgtggagtgggtgtttagatttggatctttggggtccttgaaatgtttaatagatacgaagtttgtatctattagaatgaattcatagaattttctggttttgtttgtggctgttggcctataatgaaatcccggggggaatactttggcggttgccttgaaaggattcttgtcccaatattctggttccatttgtaagacattgaagaatttgttttttgaaatatagctgttgctgggttgtggtgttgattctcgttgagtcaacggttggcttggtttttggttacagacagttttggtctgtttggctttttgaatttgtttttgcaggtctatttcagaatcatcgtctaattctgaggccatttctgcccaggtctttttggccaatgttggtactctggtgaggcctatgtcttttaaggccaggagagtttgtattgaccaggcatagtcagccacggtctgttttgttgt

SEQ ID NO: 11141 - DNA, 1063 bp, Glycine max
  Gm_smallRNAprecursor_3974
caaaaatgctacaagttgagacttctgattcagaaacaaagatgtctctggatcagcaggtttgagaaactcagggttgctctgaaaccagttcttgacttgttctggagcagcctttgaggtatcgaattgtgaccaccactttacaaaggtgtgtctctgcaatggtggatactgcttgctattttcggtttttccatatctgtattgccatgaaaaaatccatgacaaggaaaaactggaaaagtattttaagtctgtcggaattcttgattccttgttgttgaagagcttgctgaattgttggaatccctgttggacttcttctggaaatatctgtggaattggtccgaagtagttccaccattggaggaaccaatttggaaaattatacacggtgttatttttgaagtaaattagccatgaatgcttgaatttactattttgatgccagaacacattggtccaggcgtcaatgtaatcccaataattatatcctgcagggtcaaaaggtgcagaaaattttttgggttggtttaagtttgagccataatgtcgtggctgcatcacctttaggatctggattgtggagtgggtgtttagatttggatctttggggtccttgaaatgtttaatagatacgaagtttgtatctattagaatgaattcatagaattttctggttttgtttgtggctgttggcctataatgaaatcccggggggaatactttggcggttgccttgaaaggattcttgtcccaatattctggttccatttgtaagacattgaagaatttgttttttgaaatatagctgttgctgggttgtggtgttgattctcgttgagtcaacggttggcttggtttttggttacagacagttttggtctgtttggctttttgaatttgtttttgcaggtctatttcagaatcatcgtctaattctgaggccatttctgcccaggtctttttggccaatgttggtactctggtgaggcctatgtcttttaaggccaggagagtttgtattgaccaggcatagtcagccacggtctgttttgtt

SEQ ID NO: 11142 - DNA, 1121 bp, Glycine max
  Gm_smallRNAprecursor_3975
tggttttggggattcctgagttgatgactcaggtttaatggtagttatctgggtcaatgacccttcaagctttcctttctgggttgatgacccagtctgggtaggtgacccagaagatgacgcagttgccttcttggttattggctctggtagagccaatagaacatcttttcctttagtactggatcttcctcctctgccggaggagctaaacaccttaggaggcatcgggaattttctataaaaattcacgggtgaggtagtcaggtagagagtttgaagagcccttgatatattctatgttaaaatcaaagacgcttaaaattgcttgccatcttgcaaaaatttgttttgaggcaaggtttttgacatccttttgtaaaatgtctttggctgatttgcagtcaacccttactaaaaaattttgattcaataaatcatattgaaatttggaaatgcacaaaacaattgctaaaacttctttttttaacagttaaatattttaattgtgcaggattccaatgttttgaagtatatgcaatgacatgttcttcaccatgtacttgctgtttgaggatgccaccataaccgatatctgatgcatcagtttcgacaattttgaatgcctgtggaatgggaagatacacacattttatggattggactttgactttgatttctttaactgtttgagtatggaggtcagaccaaggaggcggattctttttcaacctatcatgtaatggtttgacaatattgtttagataggggacaaattctcctacataatttaggcaccccagaaatcgttgtaactgggtcttatccaagatttggttagggaatttgctagcaaactctattgatctttctattgggatgattgtaccttggtatatattgtgtccaaggaatcgtatccgtgtctggaaaagattgatctttgatttggagactgccaaaccattctgtttaatgatatggatgaaagtctggaggtgtttgaaatgttgatcaatatctggggagaagattaaaacatcatcaatgtaaacaatgacgaattttgaataagaattgaaaatatcattcatgattttttgaaattctgaaggggcatt

SEQ ID NO: 11143 - DNA, 1121 bp, Glycine max; identical to SEQ ID NO: 11142
  Gm_smallRNAprecursor_3976

SEQ ID NO: 11144 - DNA, 1160 bp, Glycine max
  Gm_smallRNAprecursor_3977
gtgtctggaaaagattgatctttgatttggagactgccaaaccattctgtttaatgatatggatgaaagtctggaggtgtttgaaatgttgatcaatatctggggagaagattaaaacatcatcaatgtaaacaatgacgaattttgaataagaattgaaaatatcattcatgattttttgaaattctgaaggggcattcttcagtccgaatggcattacattccactcatattgcccgaaaggtacagtaaacgccgttttgtacctatctgattcttggatttggatttgccagcatccggatttcatgtcaaattttgaaaatacctttgcagaatttaatctgttaagtaggtcttttttatttggaataggatacctgatccattgtaatgcttgatttaacggtttgtaatttatgactaagcgtggtgttcctcgctcaatctcggattgtttgttgacataaaaagccgcacaagaccatggacttttacttttccgaattaaacctttatcaagtaaatctttaatttacttttggcaatattgaaggagttcttcattcatttggattggtctagcttttgtgggaattttttttccctaaaatatttctgataaggaagatcaacaatatgtttctttctgtcccaaaatgcatgtggcaattcagaacaaacagttgattctatatgacttaataaagattggattttctcctttatttggggttttcctagttgtacttggatattattaaacgatacttcttcttttaagaagttaatttggttaatcttattttctataagatttatatttctggagattggtttagtagaaaaattaaatataattttccttcctaaataacttgtagttattccttcattagatattaggatgggaaataaagctcttatgaagggagttcctaggattacttcgtttttaaggttttttaccagaagaaagtttgtgttaatcctaagaccttggatttcaataattgcatttgagaatttaaaattaatttttaattttgagccgtttgttgtactaagtttctccgaggttttctcaaagaattttgtaggaattaatccttctaaaatacagtttgagtcagcccctgtgtcgaatagggccattgttt

SEQ ID NO: 11145 - DNA, 1095 bp, Glycine max
  Gm_smallRNAprecursor_3978
tgaatggaacgtaatgccattcggactgaagaatgccccttcagaatttcaaaaaattatgaatgatatttttaatccctattcaaaatttgtcattgtctacatagatgatgttttaatcttttcccaaaacattgaccaacatttcaaacatctccaaaccttcatccatatcatcaaacaaaatggtttggcagtctccaaatcaaaaatcaatcttttccaaacacgaattcgattccttggtcacaatatatatcaaggtacaatcattccaatcgaaaggtcaatagagtttgctagcaaattccccaaccaaatcttagacaaaacccagttacaaagatttctaggttgtctaaattacgtaggtgaatttgtcccctacttaaataatattgtcaagccattacatgatagactgaagaaaaatccgcctccttggtctgacctccatacacaaacagttaaagaaatcaaagtcaaagtccaatccattaaatgtctgtatcttcctattccacaggcattcaaaattgtcgaaactgatgcttcagacataggttatggtggcatcctcaaacaaagagtccatggccaagatcatgtcattgcatatacatcaaaacattggaatcctgcacaattaaaatattcaactgttaaaaaagaggttttagcaattgttttgtgcatttccaaatttcaatcggatttattaaaccaaaaatttttaatcagggttgattgtaaatcagccaaagatattttacagaaagatgttaaaaaccttgcctcaaaacaaatttttgcacgatggcaagcaattttaagtgtctttgattttgacatagaatacatcaagggcacctcaaattcactacctgactaccttacccgtgaattcttacagaaaagtggtaatgcctcctaaggcatcgggaatctccctacggggaggaaggagtacaggcaaaggagccaggctggctcttccagagccaaccatcaagaaatcatctacctcatctgggtcaccaacccaggctgggtcatctacccagaaaaccaatttagaagggtcatcaacccaga

SEQ ID NO: 11146 - DNA, 1095 bp, Glycine max; identical to SEQ ID NO: 11145
  Gm_smallRNAprecursor_3979

SEQ ID NO: 11147 - DNA, 1095 bp, Glycine max; identical to SEQ ID NO: 11145
  Gm_smallRNAprecursor_3980

SEQ ID NO: 11148 - DNA, 1095 bp, Glycine max; identical to SEQ ID NO: 11145
  Gm_smallRNAprecursor_3981

SEQ ID NO: 11149 - DNA, 1035 bp, Glycine max
  Gm_smallRNAprecursor_3982
attgtctacatagatgatgttttaatcttttcccaaaacattgaccaacatttcaaacatctccaaaccttcatccatatcatcaaacaaaatggtttggcagtctccaaatcaaaaatcaatcttttccaaacacgaattcgattccttggtcacaatatatatcaaggtacaatcattccaatcgaaaggtcaatagagtttgctagcaaattccccaaccaaatcttagacaaaacccagttacaaagatttctaggttgtctaaattacgtaggtgaatttgtcccctacttaaataatattgtcaagccattacatgatagactgaagaaaaatccgcctccttggtctgacctccatacacaaacagttaaagaaatcaaagtcaaagtccaatccattaaatgtctgtatcttcctattccacaggcattcaaaattgtcgaaactgatgcttcagacataggttatggtggcatcctcaaacaaagagtccatggccaagatcatgtcattgcatatacatcaaaacattggaatcctgcacaattaaaatattcaactgttaaaaaagaggttttagcaattgttttgtgcatttccaaatttcaatcggatttattaaaccaaaaatttttaatcagggttgattgtaaatcagccaaagatattttacagaaagatgttaaaaaccttgcctcaaaacaaatttttgcacgatggcaagcaattttaagtgtctttgattttgacatagaatacatcaagggcacctcaaattcactacctgactaccttacccgtgaattcttacagaaaagtggtaatgcctcctaaggcatcgggaatctccctacggggaggaaggagtacaggcaaaggagccaggctggctcttccagagccaaccatcaagaaatcatctacctcatctgggtcaccaacccaggctgggtcatctacccagaaaaccaatttagaagggtcatcaacccagattgcctcaatcaaacctgagccatccactcagga

SEQ ID NO: 11150 - DNA, 1035 bp, Glycine max; identical to SEQ ID NO: 11149
  Gm_smallRNAprecursor_3983

SEQ ID NO: 11151 - DNA, 1113 bp, Glycine max
  Gm_smallRNAprecursor_3984
attgtctacatagatgatgttttaatcttttcccaaaacattgaccaacatttcaaacatctccaaaccttcatccatatcatcaaacaaaatggtttggcagtctccaaatcaaaaatcaatcttttccaaacacgaattcgattccttggtcacaatatatatcaaggtacaatcattccaatcgaaaggtcaatagagtttgctagcaaattccccaaccaaatcttagacaaaacccagttacaaagatttctaggttgtctaaattacgtaggtgaatttgtcccctacttaaataatattgtcaagccattacatgatagactgaagaaaaatccgcctccttggtctgacctccatacacaaacagttaaagaaatcaaagtcaaagtccaatccattaaatgtctgtatcttcctattccacaggcattcaaaattgtcgaaactgatgcttcagacataggttatggtggcatcctcaaacaaagagtccatggccaagatcatgtcattgcatatacatcaaaacattggaatcctgcacaattaaaatattcaactgttaaaaaagaggttttagcaattgttttgtgcatttccaaatttcaatcggatttattaaaccaaaaatttttaatcagggttgattgtaaatcagccaaagatattttacagaaagatgttaaaaaccttgcctcaaaacaaatttttgcacgatggcaagcaattttaagtgtctttgattttgacatagaatacatcaagggcacctcaaattcactacctgactaccttacccgtgaattcttacagaaaagtggtaatgcctcctaaggcatcgggaatctccctacggggaggaaggagtacaggcaaaggagccaggctggctcttccagagccaaccatcaagaaatcatctacctcatctgggtcaccaacccaggctgggtcatctacccagaaaaccaatttagaagggtcatcaacccagattgcctcaatcaaacctgagccatccactcaggaatctcccaaaccggcaaccgccaaacaaacatcggccgactatgcatggccaattgaaacccttcaggcccttcaaga

SEQ ID NO: 11152 - DNA, 1113 bp, Glycine max; identical to SEQ ID NO: 11151
  Gm_smallRNAprecursor_3985

SEQ ID NO: 11153 - DNA, 1114 bp, Glycine max
  Gm_smallRNAprecursor_3986
attgtctacatagatgatgttttaatcttttcccaaaacattgaccaacatttcaaacatctccaaaccttcatccatatcatcaaacaaaatggtttggcagtctccaaatcaaaaatcaatcttttccaaacacgaattcgattccttggtcacaatatatatcaaggtacaatcattccaatcgaaaggtcaatagagtttgctagcaaattccccaaccaaatcttagacaaaacccagttacaaagatttctaggttgtctaaattacgtaggtgaatttgtcccctacttaaataatattgtcaagccattacatgatagactgaagaaaaatccgcctccttggtctgacctccatacacaaacagttaaagaaatcaaagtcaaagtccaatccattaaatgtctgtatcttcctattccacaggcattcaaaattgtcgaaactgatgcttcagacataggttatggtggcatcctcaaacaaagagtccatggccaagatcatgtcattgcatatacatcaaaacattggaatcctgcacaattaaaatattcaactgttaaaaaagaggttttagcaattgttttgtgcatttccaaatttcaatcggatttattaaaccaaaaatttttaatcagggttgattgtaaatcagccaaagatattttacagaaagatgttaaaaaccttgcctcaaaacaaatttttgcacgatggcaagcaattttaagtgtctttgattttgacatagaatacatcaagggcacctcaaattcactacctgactaccttacccgtgaattcttacagaaaagtggtaatgcctcctaaggcatcgggaatctccctacggggaggaaggagtacaggcaaaggagccaggctggctcttccagagccaaccatcaagaaatcatctacctcatctgggtcaccaacccaggctgggtcatctacccagaaaaccaatttagaagggtcatcaacccagattgcctcaatcaaacctgagccatccactcaggaatctcccaaaccggcaaccgccaaacaaacatcggccgactatgcatggccaattgaaacccttcaggcccttcaagac

SEQ ID NO: 11154 - DNA, 1114 bp, Glycine max; identical to SEQ ID NO: 11153
  Gm_smallRNAprecursor_3987

SEQ ID NO: 11155 - DNA, 1141 bp, Glycine max
  Gm_smallRNAprecursor_3988
aaaccttcatccatatcatcaaacaaaatggtttggcagtctccaaatcaaaaatcaatcttttccaaacacgaattcgattccttggtcacaatatatatcaaggtacaatcattccaatcgaaaggtcaatagagtttgctagcaaattccccaaccaaatcttagacaaaacccagttacaaagatttctaggttgtctaaattacgtaggtgaatttgtcccctacttaaataatattgtcaagccattacatgatagactgaagaaaaatccgcctccttggtctgacctccatacacaaacagttaaagaaatcaaagtcaaagtccaatccattaaatgtctgtatcttcctattccacaggcattcaaaattgtcgaaactgatgcttcagacataggttatggtggcatcctcaaacaaagagtccatggccaagatcatgtcattgcatatacatcaaaacattggaatcctgcacaattaaaatattcaactgttaaaaaagaggttttagcaattgttttgtgcatttccaaatttcaatcggatttattaaaccaaaaatttttaatcagggttgattgtaaatcagccaaagatattttacagaaagatgttaaaaaccttgcctcaaaacaaatttttgcacgatggcaagcaattttaagtgtctttgattttgacatagaatacatcaagggcacctcaaattcactacctgactaccttacccgtgaattcttacagaaaagtggtaatgcctcctaaggcatcgggaatctccctacggggaggaaggagtacaggcaaaggagccaggctggctcttccagagccaaccatcaagaaatcatctacctcatctgggtcaccaacccaggctgggtcatctacccagaaaaccaatttagaagggtcatcaacccagattgcctcaatcaaacctgagccatccactcaggaatctcccaaaccggcaaccgccaaacaaacatcggccgactatgcatggccaattgaaacccttcaggcccttcaagacatgggtctgaccaaatttccaaaaataatcaaaaaatcttgggcagacattgcctcagaatctgatgatgaatctgaatcaaatttacaaa

SEQ ID NO: 11156 - DNA, 1192 bp, Glycine max
  Gm_smallRNAprecursor_3989
aaagtggtaatgcctcctaaggcatcgggaatctccctacggggaggaaggagtacaggcaaaggagccaggctggctcttccagagccaaccatcaagaaatcatctacctcatctgggtcaccaacccaggctgggtcatctacccagaaaaccaatttagaagggtcatcaacccagattgcctcaatcaaacctgagccatccactcaggaatctcccaaaccggcaaccgccaaacaaacatcggccgactatgcatggccaattgaaacccttcaggcccttcaagacatgggtctgaccaaatttccaaaaataatcaaaaaatcttgggcagacattgcctcagaatctgatgatgaatctgaatcaaatttacaaacaatgatccaaaatgcgtcaatgaccaaaacaaccaccaatactaaaggaaaactacctttagccaaagctcaaacaccacctaccaaacaaactaacaattatatttataaaaataaattgttaactgttttgcagatggaacctgaattttgggacaaaaatcccttcaaggcgacggccaaggctttcccaccaggatttcactacaaaccaaccactatcctgaagacaagaactttttatgaattgattttggtagattcgaactcagtatctatcaaacatttcaaagatccaaaagaccaaaccttaaacacccactcaaccatccaaatactaaaagttcttcaaccaagacactttggttcggacttgaacaaaggaaagagattttcagttccatttgatccagtaggttatacctattgggattacgttgatgcttggactaaggtgttttggcaccaaaatacccgcttcaaacattcatggctgatatatttcaagaccaacacaatttacaattttcccaattggtttttgcaatggtgggacttctttggaccaatcccagagatattcccagaaacggtccaacaaggattttcccaatttaagaaacaatacaattcgcaggaatcacgaattccagcagatcttaaatacttttcaagctttgcactgtcatggatattctcatggcaatatcgttacagcaagactgagaagacaaaccaatatccatcactacaaaggcacgcatttgtaaaatggtggacacaatttgactcatccaaagcggatg

SEQ ID NO: 11157 - DNA, 1158 bp, Glycine max
  Gm_smallRNAprecursor_3990
ctaaggcatcgggaatctccctacggggaggaaggagtacaggcaaaggagccaggctggctcttccagagccaaccatcaagaaatcatctacctcatctgggtcaccaacccaggctgggtcatctacccagaaaaccaatttagaagggtcatcaacccagattgcctcaatcaaacctgagccatccactcaggaatctcccaaaccggcaaccgccaaacaaacatcggccgactatgcatggccaattgaaacccttcaggcccttcaagacatgggtctgaccaaatttccaaaaataatcaaaaaatcttgggcagacattgcctcagaatctgatgatgaatctgaatcaaatttacaaacaatgatccaaaatgcgtcaatgaccaaaacaaccaccaatactaaaggaaaactacctttagccaaagctcaaacaccacctaccaaacaaactaacaattatatttataaaaataaattgttaactgttttgcagatggaacctgaattttgggacaaaaatcccttcaaggcgacggccaaggctttcccaccaggatttcactacaaaccaaccactatcctgaagacaagaactttttatgaattgattttggtagattcgaactcagtatctatcaaacatttcaaagatccaaaagaccaaaccttaaacacccactcaaccatccaaatactaaaagttcttcaaccaagacactttggttcggacttgaacaaaggaaagagattttcagttccatttgatccagtaggttatacctattgggattacgttgatgcttggactaaggtgttttggcaccaaaatacccgcttcaaacattcatggctgatatatttcaagaccaacacaatttacaattttcccaattggtttttgcaatggtgggacttctttggaccaatcccagagatattcccagaaacggtccaacaaggattttcccaatttaagaaacaatacaattcgcaggaatcacgaattccagcagatcttaaatacttttcaagctttgcactgtcatggatattctcatggcaatatcgttacagcaagactgagaagacaaaccaatatccatcactacaaaggcacgcatttgtaaaatggtggacacaatttg

SEQ ID NO: 11158 - DNA, 1167 bp, Glycine max
  Gm_smallRNAprecursor_3991
ctaaggcatcgggaatctccctacggggaggaaggagtacaggcaaaggagccaggctggctcttccagagccaaccatcaagaaatcatctacctcatctgggtcaccaacccaggctgggtcatctacccagaaaaccaatttagaagggtcatcaacccagattgcctcaatcaaacctgagccatccactcaggaatctcccaaaccggcaaccgccaaacaaacatcggccgactatgcatggccaattgaaacccttcaggcccttcaagacatgggtctgaccaaatttccaaaaataatcaaaaaatcttgggcagacattgcctcagaatctgatgatgaatctgaatcaaatttacaaacaatgatccaaaatgcgtcaatgaccaaaacaaccaccaatactaaaggaaaactacctttagccaaagctcaaacaccacctaccaaacaaactaacaattatatttataaaaataaattgttaactgttttgcagatggaacctgaattttgggacaaaaatcccttcaaggcgacggccaaggctttcccaccaggatttcactacaaaccaaccactatcctgaagacaagaactttttatgaattgattttggtagattcgaactcagtatctatcaaacatttcaaagatccaaaagaccaaaccttaaacacccactcaaccatccaaatactaaaagttcttcaaccaagacactttggttcggacttgaacaaaggaaagagattttcagttccatttgatccagtaggttatacctattgggattacgttgatgcttggactaaggtgttttggcaccaaaatacccgcttcaaacattcatggctgatatatttcaagaccaacacaatttacaattttcccaattggtttttgcaatggtgggacttctttggaccaatcccagagatattcccagaaacggtccaacaaggattttcccaatttaagaaacaatacaattcgcaggaatcacgaattccagcagatcttaaatacttttcaagctttgcactgtcatggatattctcatggcaatatcgttacagcaagactgagaagacaaaccaatatccatcactacaaaggcacgcatttgtaaaatggtggacacaatttgactcatcca

SEQ ID NO: 11159 - DNA, 1208 bp, Glycine max
  Gm_smallRNAprecursor_3992
ctaaggcatcgggaatctccctacggggaggaaggagtacaggcaaaggagccaggctggctcttccagagccaaccatcaagaaatcatctacctcatctgggtcaccaacccaggctgggtcatctacccagaaaaccaatttagaagggtcatcaacccagattgcctcaatcaaacctgagccatccactcaggaatctcccaaaccggcaaccgccaaacaaacatcggccgactatgcatggccaattgaaacccttcaggcccttcaagacatgggtctgaccaaatttccaaaaataatcaaaaaatcttgggcagacattgcctcagaatctgatgatgaatctgaatcaaatttacaaacaatgatccaaaatgcgtcaatgaccaaaacaaccaccaatactaaaggaaaactacctttagccaaagctcaaacaccacctaccaaacaaactaacaattatatttataaaaataaattgttaactgttttgcagatggaacctgaattttgggacaaaaatcccttcaaggcgacggccaaggctttcccaccaggatttcactacaaaccaaccactatcctgaagacaagaactttttatgaattgattttggtagattcgaactcagtatctatcaaacatttcaaagatccaaaagaccaaaccttaaacacccactcaaccatccaaatactaaaagttcttcaaccaagacactttggttcggacttgaacaaaggaaagagattttcagttccatttgatccagtaggttatacctattgggattacgttgatgcttggactaaggtgttttggcaccaaaatacccgcttcaaacattcatggctgatatatttcaagaccaacacaatttacaattttcccaattggtttttgcaatggtgggacttctttggaccaatcccagagatattcccagaaacggtccaacaaggattttcccaatttaagaaacaatacaattcgcaggaatcacgaattccagcagatcttaaatacttttcaagctttgcactgtcatggatattctcatggcaatatcgttacagcaagactgagaagacaaaccaatatccatcactacaaaggcacgcatttgtaaaatggtggacacaatttgactcatccaaagcggatgcagaacaagtaaaactatggttccaatcccat

SEQ ID NO: 11160 - DNA, 1208 bp, Glycine max; identical to SEQ ID NO: 11159
  Gm_smallRNAprecursor_3993

SEQ ID NO: 11161 - DNA, 1211 bp, Glycine max
  Gm_smallRNAprecursor_3994
ctaaggcatcgggaatctccctacggggaggaaggagtacaggcaaaggagccaggctggctcttccagagccaaccatcaagaaatcatctacctcatctgggtcaccaacccaggctgggtcatctacccagaaaaccaatttagaagggtcatcaacccagattgcctcaatcaaacctgagccatccactcaggaatctcccaaaccggcaaccgccaaacaaacatcggccgactatgcatggccaattgaaacccttcaggcccttcaagacatgggtctgaccaaatttccaaaaataatcaaaaaatcttgggcagacattgcctcagaatctgatgatgaatctgaatcaaatttacaaacaatgatccaaaatgcgtcaatgaccaaaacaaccaccaatactaaaggaaaactacctttagccaaagctcaaacaccacctaccaaacaaactaacaattatatttataaaaataaattgttaactgttttgcagatggaacctgaattttgggacaaaaatcccttcaaggcgacggccaaggctttcccaccaggatttcactacaaaccaaccactatcctgaagacaagaactttttatgaattgattttggtagattcgaactcagtatctatcaaacatttcaaagatccaaaagaccaaaccttaaacacccactcaaccatccaaatactaaaagttcttcaaccaagacactttggttcggacttgaacaaaggaaagagattttcagttccatttgatccagtaggttatacctattgggattacgttgatgcttggactaaggtgttttggcaccaaaatacccgcttcaaacattcatggctgatatatttcaagaccaacacaatttacaattttcccaattggtttttgcaatggtgggacttctttggaccaatcccagagatattcccagaaacggtccaacaaggattttcccaatttaagaaacaatacaattcgcaggaatcacgaattccagcagatcttaaatacttttcaagctttgcactgtcatggatattctcatggcaatatcgttacagcaagactgagaagacaaaccaatatccatcactacaaaggcacgcatttgtaaaatggtggacacaatttgactcatccaaagcggatgcagaacaagtaaaactatggttccaatcccatcca

SEQ ID NO: 11162 - DNA, 1098 bp, Glycine max
  Gm_smallRNAprecursor_3995
ggaatctccctacggggaggaaggagtacaggcaaaggagccaggctggctcttccagagccaaccatcaagaaatcatctacctcatctgggtcaccaacccaggctgggtcatctacccagaaaaccaatttagaagggtcatcaacccagattgcctcaatcaaacctgagccatccactcaggaatctcccaaaccggcaaccgccaaacaaacatcggccgactatgcatggccaattgaaacccttcaggcccttcaagacatgggtctgaccaaatttccaaaaataatcaaaaaatcttgggcagacattgcctcagaatctgatgatgaatctgaatcaaatttacaaacaatgatccaaaatgcgtcaatgaccaaaacaaccaccaatactaaaggaaaactacctttagccaaagctcaaacaccacctaccaaacaaactaacaattatatttataaaaataaattgttaactgttttgcagatggaacctgaattttgggacaaaaatcccttcaaggcgacggccaaggctttcccaccaggatttcactacaaaccaaccactatcctgaagacaagaactttttatgaattgattttggtagattcgaactcagtatctatcaaacatttcaaagatccaaaagaccaaaccttaaacacccactcaaccatccaaatactaaaagttcttcaaccaagacactttggttcggacttgaacaaaggaaagagattttcagttccatttgatccagtaggttatacctattgggattacgttgatgcttggactaaggtgttttggcaccaaaatacccgcttcaaacattcatggctgatatatttcaagaccaacacaatttacaattttcccaattggtttttgcaatggtgggacttctttggaccaatcccagagatattcccagaaacggtccaacaaggattttcccaatttaagaaacaatacaattcgcaggaatcacgaattccagcagatcttaaatacttttcaagctttgcactgtcatggatattctcatggcaatatcgttacagcaagactgagaagacaaaccaa

SEQ ID NO: 11163 - DNA, 1190 bp, Glycine max
  Gm_smallRNAprecursor_3996
acaggcaaaggagccaggctggctcttccagagccaaccatcaagaaatcatctacctcatctgggtcaccaacccaggctgggtcatctacccagaaaaccaatttagaagggtcatcaacccagattgcctcaatcaaacctgagccatccactcaggaatctcccaaaccggcaaccgccaaacaaacatcggccgactatgcatggccaattgaaacccttcaggcccttcaagacatgggtctgaccaaatttccaaaaataatcaaaaaatcttgggcagacattgcctcagaatctgatgatgaatctgaatcaaatttacaaacaatgatccaaaatgcgtcaatgaccaaaacaaccaccaatactaaaggaaaactacctttagccaaagctcaaacaccacctaccaaacaaactaacaattatatttataaaaataaattgttaactgttttgcagatggaacctgaattttgggacaaaaatcccttcaaggcgacggccaaggctttcccaccaggatttcactacaaaccaaccactatcctgaagacaagaactttttatgaattgattttggtagattcgaactcagtatctatcaaacatttcaaagatccaaaagaccaaaccttaaacacccactcaaccatccaaatactaaaagttcttcaaccaagacactttggttcggacttgaacaaaggaaagagattttcagttccatttgatccagtaggttatacctattgggattacgttgatgcttggactaaggtgttttggcaccaaaatacccgcttcaaacattcatggctgatatatttcaagaccaacacaatttacaattttcccaattggtttttgcaatggtgggacttctttggaccaatcccagagatattcccagaaacggtccaacaaggattttcccaatttaagaaacaatacaattcgcaggaatcacgaattccagcagatcttaaatacttttcaagctttgcactgtcatggatattctcatggcaatatcgttacagcaagactgagaagacaaaccaatatccatcactacaaaggcacgcatttgtaaaatggtggacacaatttgactcatccaaagcggatgcagaacaagtaaaactatggttccaatcccatccagaattcctcaaagcagc

SEQ ID NO: 11164 - DNA, 1041 bp, Glycine max
  Gm_smallRNAprecursor_3997
ctgggtcatctacccagaaaaccaatttagaagggtcatcaacccagattgcctcaatcaaacctgagccatccactcaggaatctcccaaaccggcaaccgccaaacaaacatcggccgactatgcatggccaattgaaacccttcaggcccttcaagacatgggtctgaccaaatttccaaaaataatcaaaaaatcttgggcagacattgcctcagaatctgatgatgaatctgaatcaaatttacaaacaatgatccaaaatgcgtcaatgaccaaaacaaccaccaatactaaaggaaaactacctttagccaaagctcaaacaccacctaccaaacaaactaacaattatatttataaaaataaattgttaactgttttgcagatggaacctgaattttgggacaaaaatcccttcaaggcgacggccaaggctttcccaccaggatttcactacaaaccaaccactatcctgaagacaagaactttttatgaattgattttggtagattcgaactcagtatctatcaaacatttcaaagatccaaaagaccaaaccttaaacacccactcaaccatccaaatactaaaagttcttcaaccaagacactttggttcggacttgaacaaaggaaagagattttcagttccatttgatccagtaggttatacctattgggattacgttgatgcttggactaaggtgttttggcaccaaaatacccgcttcaaacattcatggctgatatatttcaagaccaacacaatttacaattttcccaattggtttttgcaatggtgggacttctttggaccaatcccagagatattcccagaaacggtccaacaaggattttcccaatttaagaaacaatacaattcgcaggaatcacgaattccagcagatcttaaatacttttcaagctttgcactgtcatggatattctcatggcaatatcgttacagcaagactgagaagacaaaccaatatccatcactacaaaggcacgcatttgtaaaatggtggacacaatttg

SEQ ID NO: 11165 - DNA, 1082 bp, Glycine max
  Gm_smallRNAprecursor_3998
atctacccagaaaaccaatttagaagggtcatcaacccagattgcctcaatcaaacctgagccatccactcaggaatctcccaaaccggcaaccgccaaacaaacatcggccgactatgcatggccaattgaaacccttcaggcccttcaagacatgggtctgaccaaatttccaaaaataatcaaaaaatcttgggcagacattgcctcagaatctgatgatgaatctgaatcaaatttacaaacaatgatccaaaatgcgtcaatgaccaaaacaaccaccaatactaaaggaaaactacctttagccaaagctcaaacaccacctaccaaacaaactaacaattatatttataaaaataaattgttaactgttttgcagatggaacctgaattttgggacaaaaatcccttcaaggcgacggccaaggctttcccaccaggatttcactacaaaccaaccactatcctgaagacaagaactttttatgaattgattttggtagattcgaactcagtatctatcaaacatttcaaagatccaaaagaccaaaccttaaacacccactcaaccatccaaatactaaaagttcttcaaccaagacactttggttcggacttgaacaaaggaaagagattttcagttccatttgatccagtaggttatacctattgggattacgttgatgcttggactaaggtgttttggcaccaaaatacccgcttcaaacattcatggctgatatatttcaagaccaacacaatttacaattttcccaattggtttttgcaatggtgggacttctttggaccaatcccagagatattcccagaaacggtccaacaaggattttcccaatttaagaaacaatacaattcgcaggaatcacgaattccagcagatcttaaatacttttcaagctttgcactgtcatggatattctcatggcaatatcgttacagcaagactgagaagacaaaccaatatccatcactacaaaggcacgcatttgtaaaatggtggacacaatttgactcatccaaagcggatgcagaacaagtaaaactatggttccaatccc

SEQ ID NO: 11166 - DNA, 1148 bp, Glycine max
  Gm_smallRNAprecursor_3999
tgcctcaatcaaacctgagccatccactcaggaatctcccaaaccggcaaccgccaaacaaacatcggccgactatgcatggccaattgaaacccttcaggcccttcaagacatgggtctgaccaaatttccaaaaataatcaaaaaatcttgggcagacattgcctcagaatctgatgatgaatctgaatcaaatttacaaacaatgatccaaaatgcgtcaatgaccaaaacaaccaccaatactaaaggaaaactacctttagccaaagctcaaacaccacctaccaaacaaactaacaattatatttataaaaataaattgttaactgttttgcagatggaacctgaattttgggacaaaaatcccttcaaggcgacggccaaggctttcccaccaggatttcactacaaaccaaccactatcctgaagacaagaactttttatgaattgattttggtagattcgaactcagtatctatcaaacatttcaaagatccaaaagaccaaaccttaaacacccactcaaccatccaaatactaaaagttcttcaaccaagacactttggttcggacttgaacaaaggaaagagattttcagttccatttgatccagtaggttatacctattgggattacgttgatgcttggactaaggtgttttggcaccaaaatacccgcttcaaacattcatggctgatatatttcaagaccaacacaatttacaattttcccaattggtttttgcaatggtgggacttctttggaccaatcccagagatattcccagaaacggtccaacaaggattttcccaatttaagaaacaatacaattcgcaggaatcacgaattccagcagatcttaaatacttttcaagctttgcactgtcatggatattctcatggcaatatcgttacagcaagactgagaagacaaaccaatatccatcactacaaaggcacgcatttgtaaaatggtggacacaatttgactcatccaaagcggatgcagaacaagtaaaactatggttccaatcccatccagaattcctcaaagcagctgatccagagacttctgtgtttttgaaccaaaagtctcatctggcagcatttttagcaggatcgacatcaaaggaggtcttagcta

SEQ ID NO: 11167 - DNA, 1149 bp, Glycine max
  Gm_smallRNAprecursor_4000
tgcctcaatcaaacctgagccatccactcaggaatctcccaaaccggcaaccgccaaacaaacatcggccgactatgcatggccaattgaaacccttcaggcccttcaagacatgggtctgaccaaatttccaaaaataatcaaaaaatcttgggcagacattgcctcagaatctgatgatgaatctgaatcaaatttacaaacaatgatccaaaatgcgtcaatgaccaaaacaaccaccaatactaaaggaaaactacctttagccaaagctcaaacaccacctaccaaacaaactaacaattatatttataaaaataaattgttaactgttttgcagatggaacctgaattttgggacaaaaatcccttcaaggcgacggccaaggctttcccaccaggatttcactacaaaccaaccactatcctgaagacaagaactttttatgaattgattttggtagattcgaactcagtatctatcaaacatttcaaagatccaaaagaccaaaccttaaacacccactcaaccatccaaatactaaaagttcttcaaccaagacactttggttcggacttgaacaaaggaaagagattttcagttccatttgatccagtaggttatacctattgggattacgttgatgcttggactaaggtgttttggcaccaaaatacccgcttcaaacattcatggctgatatatttcaagaccaacacaatttacaattttcccaattggtttttgcaatggtgggacttctttggaccaatcccagagatattcccagaaacggtccaacaaggattttcccaatttaagaaacaatacaattcgcaggaatcacgaattccagcagatcttaaatacttttcaagctttgcactgtcatggatattctcatggcaatatcgttacagcaagactgagaagacaaaccaatatccatcactacaaaggcacgcatttgtaaaatggtggacacaatttgactcatccaaagcggatgcagaacaagtaaaactatggttccaatcccatccagaattcctcaaagcagctgatccagagacttctgtgtttttgaaccaaaagtctcatctggcagcatttttagcaggatcgacatcaaaggaggtcttagctaa

SEQ ID NO: 11168 - DNA, 1249 bp, Glycine max
  Gm_smallRNAprecursor_4001
tgcctcaatcaaacctgagccatccactcaggaatctcccaaaccggcaaccgccaaacaaacatcggccgactatgcatggccaattgaaacccttcaggcccttcaagacatgggtctgaccaaatttccaaaaataatcaaaaaatcttgggcagacattgcctcagaatctgatgatgaatctgaatcaaatttacaaacaatgatccaaaatgcgtcaatgaccaaaacaaccaccaatactaaaggaaaactacctttagccaaagctcaaacaccacctaccaaacaaactaacaattatatttataaaaataaattgttaactgttttgcagatggaacctgaattttgggacaaaaatcccttcaaggcgacggccaaggctttcccaccaggatttcactacaaaccaaccactatcctgaagacaagaactttttatgaattgattttggtagattcgaactcagtatctatcaaacatttcaaagatccaaaagaccaaaccttaaacacccactcaaccatccaaatactaaaagttcttcaaccaagacactttggttcggacttgaacaaaggaaagagattttcagttccatttgatccagtaggttatacctattgggattacgttgatgcttggactaaggtgttttggcaccaaaatacccgcttcaaacattcatggctgatatatttcaagaccaacacaatttacaattttcccaattggtttttgcaatggtgggacttctttggaccaatcccagagatattcccagaaacggtccaacaaggattttcccaatttaagaaacaatacaattcgcaggaatcacgaattccagcagatcttaaatacttttcaagctttgcactgtcatggatattctcatggcaatatcgttacagcaagactgagaagacaaaccaatatccatcactacaaaggcacgcatttgtaaaatggtggacacaatttgactcatccaaagcggatgcagaacaagtaaaactatggttccaatcccatccagaattcctcaaagcagctgatccagagacttctgtgtttttgaaccaaaagtctcatctggcagcatttttagcaggatcgacatcaaaggaggtcttagctaaaaatctgaaggaagttctacaaatgttacaacaggaagaagaagcttcatcctcaaagaaggaagaaacaagttctgctgaagaagacgaagaagatccc

SEQ ID NO: 11169 - DNA, 1134 bp, Glycine max
  Gm_smallRNAprecursor_4002
caaacctgagccatccactcaggaatctcccaaaccggcaaccgccaaacaaacatcggccgactatgcatggccaattgaaacccttcaggcccttcaagacatgggtctgaccaaatttccaaaaataatcaaaaaatcttgggcagacattgcctcagaatctgatgatgaatctgaatcaaatttacaaacaatgatccaaaatgcgtcaatgaccaaaacaaccaccaatactaaaggaaaactacctttagccaaagctcaaacaccacctaccaaacaaactaacaattatatttataaaaataaattgttaactgttttgcagatggaacctgaattttgggacaaaaatcccttcaaggcgacggccaaggctttcccaccaggatttcactacaaaccaaccactatcctgaagacaagaactttttatgaattgattttggtagattcgaactcagtatctatcaaacatttcaaagatccaaaagaccaaaccttaaacacccactcaaccatccaaatactaaaagttcttcaaccaagacactttggttcggacttgaacaaaggaaagagattttcagttccatttgatccagtaggttatacctattgggattacgttgatgcttggactaaggtgttttggcaccaaaatacccgcttcaaacattcatggctgatatatttcaagaccaacacaatttacaattttcccaattggtttttgcaatggtgggacttctttggaccaatcccagagatattcccagaaacggtccaacaaggattttcccaatttaagaaacaatacaattcgcaggaatcacgaattccagcagatcttaaatacttttcaagctttgcactgtcatggatattctcatggcaatatcgttacagcaagactgagaagacaaaccaatatccatcactacaaaggcacgcatttgtaaaatggtggacacaatttgactcatccaaagcggatgcagaacaagtaaaactatggttccaatcccatccagaattcctcaaagcagctgatccagagacttctgtgtttttgaaccaaaagtctcatctggcagcatttttagcaggatcgacatcaaaggaggtctt

SEQ ID NO: 11170 - DNA, 1129 bp, Glycine max
  Gm_smallRNAprecursor_4003
agccatccactcaggaatctcccaaaccggcaaccgccaaacaaacatcggccgactatgcatggccaattgaaacccttcaggcccttcaagacatgggtctgaccaaatttccaaaaataatcaaaaaatcttgggcagacattgcctcagaatctgatgatgaatctgaatcaaatttacaaacaatgatccaaaatgcgtcaatgaccaaaacaaccaccaatactaaaggaaaactacctttagccaaagctcaaacaccacctaccaaacaaactaacaattatatttataaaaataaattgttaactgttttgcagatggaacctgaattttgggacaaaaatcccttcaaggcgacggccaaggctttcccaccaggatttcactacaaaccaaccactatcctgaagacaagaactttttatgaattgattttggtagattcgaactcagtatctatcaaacatttcaaagatccaaaagaccaaaccttaaacacccactcaaccatccaaatactaaaagttcttcaaccaagacactttggttcggacttgaacaaaggaaagagattttcagttccatttgatccagtaggttatacctattgggattacgttgatgcttggactaaggtgttttggcaccaaaatacccgcttcaaacattcatggctgatatatttcaagaccaacacaatttacaattttcccaattggtttttgcaatggtgggacttctttggaccaatcccagagatattcccagaaacggtccaacaaggattttcccaatttaagaaacaatacaattcgcaggaatcacgaattccagcagatcttaaatacttttcaagctttgcactgtcatggatattctcatggcaatatcgttacagcaagactgagaagacaaaccaatatccatcactacaaaggcacgcatttgtaaaatggtggacacaatttgactcatccaaagcggatgcagaacaagtaaaactatggttccaatcccatccagaattcctcaaagcagctgatccagagacttctgtgtttttgaaccaaaagtctcatctggcagcatttttagcaggatcgacatcaaaggaggtcttagc

SEQ ID NO: 11171 - DNA, 1107 bp, Glycine max
  Gm_smallRNAprecursor_4004
aaccggcaaccgccaaacaaacatcggccgactatgcatggccaattgaaacccttcaggcccttcaagacatgggtctgaccaaatttccaaaaataatcaaaaaatcttgggcagacattgcctcagaatctgatgatgaatctgaatcaaatttacaaacaatgatccaaaatgcgtcaatgaccaaaacaaccaccaatactaaaggaaaactacctttagccaaagctcaaacaccacctaccaaacaaactaacaattatatttataaaaataaattgttaactgttttgcagatggaacctgaattttgggacaaaaatcccttcaaggcgacggccaaggctttcccaccaggatttcactacaaaccaaccactatcctgaagacaagaactttttatgaattgattttggtagattcgaactcagtatctatcaaacatttcaaagatccaaaagaccaaaccttaaacacccactcaaccatccaaatactaaaagttcttcaaccaagacactttggttcggacttgaacaaaggaaagagattttcagttccatttgatccagtaggttatacctattgggattacgttgatgcttggactaaggtgttttggcaccaaaatacccgcttcaaacattcatggctgatatatttcaagaccaacacaatttacaattttcccaattggtttttgcaatggtgggacttctttggaccaatcccagagatattcccagaaacggtccaacaaggattttcccaatttaagaaacaatacaattcgcaggaatcacgaattccagcagatcttaaatacttttcaagctttgcactgtcatggatattctcatggcaatatcgttacagcaagactgagaagacaaaccaatatccatcactacaaaggcacgcatttgtaaaatggtggacacaatttgactcatccaaagcggatgcagaacaagtaaaactatggttccaatcccatccagaattcctcaaagcagctgatccagagacttctgtgtttttgaaccaaaagtctcatctggcagcatttttagcaggatcgacatcaaaggaggtcttagcta

SEQ ID NO: 11172 - DNA, 1107 bp, Glycine max; identical to SEQ ID NO: 11171
  Gm_smallRNAprecursor_4005

SEQ ID NO: 11173 - DNA, 1108 bp, Glycine max
  Gm_smallRNAprecursor_4006
aaccggcaaccgccaaacaaacatcggccgactatgcatggccaattgaaacccttcaggcccttcaagacatgggtctgaccaaatttccaaaaataatcaaaaaatcttgggcagacattgcctcagaatctgatgatgaatctgaatcaaatttacaaacaatgatccaaaatgcgtcaatgaccaaaacaaccaccaatactaaaggaaaactacctttagccaaagctcaaacaccacctaccaaacaaactaacaattatatttataaaaataaattgttaactgttttgcagatggaacctgaattttgggacaaaaatcccttcaaggcgacggccaaggctttcccaccaggatttcactacaaaccaaccactatcctgaagacaagaactttttatgaattgattttggtagattcgaactcagtatctatcaaacatttcaaagatccaaaagaccaaaccttaaacacccactcaaccatccaaatactaaaagttcttcaaccaagacactttggttcggacttgaacaaaggaaagagattttcagttccatttgatccagtaggttatacctattgggattacgttgatgcttggactaaggtgttttggcaccaaaatacccgcttcaaacattcatggctgatatatttcaagaccaacacaatttacaattttcccaattggtttttgcaatggtgggacttctttggaccaatcccagagatattcccagaaacggtccaacaaggattttcccaatttaagaaacaatacaattcgcaggaatcacgaattccagcagatcttaaatacttttcaagctttgcactgtcatggatattctcatggcaatatcgttacagcaagactgagaagacaaaccaatatccatcactacaaaggcacgcatttgtaaaatggtggacacaatttgactcatccaaagcggatgcagaacaagtaaaactatggttccaatcccatccagaattcctcaaagcagctgatccagagacttctgtgtttttgaaccaaaagtctcatctggcagcatttttagcaggatcgacatcaaaggaggtcttagctaa

SEQ ID NO: 11174 - DNA, 1108 bp, Glycine max; identical to SEQ ID NO: 11173
  Gm_smallRNAprecursor_4007

SEQ ID NO: 11175 - DNA, 1102 bp, Glycine max
  Gm_smallRNAprecursor_4008
cggcaaccgccaaacaaacatcggccgactatgcatggccaattgaaacccttcaggcccttcaagacatgggtctgaccaaatttccaaaaataatcaaaaaatcttgggcagacattgcctcagaatctgatgatgaatctgaatcaaatttacaaacaatgatccaaaatgcgtcaatgaccaaaacaaccaccaatactaaaggaaaactacctttagccaaagctcaaacaccacctaccaaacaaactaacaattatatttataaaaataaattgttaactgttttgcagatggaacctgaattttgggacaaaaatcccttcaaggcgacggccaaggctttcccaccaggatttcactacaaaccaaccactatcctgaagacaagaactttttatgaattgattttggtagattcgaactcagtatctatcaaacatttcaaagatccaaaagaccaaaccttaaacacccactcaaccatccaaatactaaaagttcttcaaccaagacactttggttcggacttgaacaaaggaaagagattttcagttccatttgatccagtaggttatacctattgggattacgttgatgcttggactaaggtgttttggcaccaaaatacccgcttcaaacattcatggctgatatatttcaagaccaacacaatttacaattttcccaattggtttttgcaatggtgggacttctttggaccaatcccagagatattcccagaaacggtccaacaaggattttcccaatttaagaaacaatacaattcgcaggaatcacgaattccagcagatcttaaatacttttcaagctttgcactgtcatggatattctcatggcaatatcgttacagcaagactgagaagacaaaccaatatccatcactacaaaggcacgcatttgtaaaatggtggacacaatttgactcatccaaagcggatgcagaacaagtaaaactatggttccaatcccatccagaattcctcaaagcagctgatccagagacttctgtgtttttgaaccaaaagtctcatctggcagcatttttagcaggatcgacatcaaaggaggtcttagc

SEQ ID NO: 11176 - DNA, 1123 bp, Glycine max
  Gm_smallRNAprecursor_4009
aacaaacatcggccgactatgcatggccaattgaaacccttcaggcccttcaagacatgggtctgaccaaatttccaaaaataatcaaaaaatcttgggcagacattgcctcagaatctgatgatgaatctgaatcaaatttacaaacaatgatccaaaatgcgtcaatgaccaaaacaaccaccaatactaaaggaaaactacctttagccaaagctcaaacaccacctaccaaacaaactaacaattatatttataaaaataaattgttaactgttttgcagatggaacctgaattttgggacaaaaatcccttcaaggcgacggccaaggctttcccaccaggatttcactacaaaccaaccactatcctgaagacaagaactttttatgaattgattttggtagattcgaactcagtatctatcaaacatttcaaagatccaaaagaccaaaccttaaacacccactcaaccatccaaatactaaaagttcttcaaccaagacactttggttcggacttgaacaaaggaaagagattttcagttccatttgatccagtaggttatacctattgggattacgttgatgcttggactaaggtgttttggcaccaaaatacccgcttcaaacattcatggctgatatatttcaagaccaacacaatttacaattttcccaattggtttttgcaatggtgggacttctttggaccaatcccagagatattcccagaaacggtccaacaaggattttcccaatttaagaaacaatacaattcgcaggaatcacgaattccagcagatcttaaatacttttcaagctttgcactgtcatggatattctcatggcaatatcgttacagcaagactgagaagacaaaccaatatccatcactacaaaggcacgcatttgtaaaatggtggacacaatttgactcatccaaagcggatgcagaacaagtaaaactatggttccaatcccatccagaattcctcaaagcagctgatccagagacttctgtgtttttgaaccaaaagtctcatctggcagcatttttagcaggatcgacatcaaaggaggtcttagctaaaaatctgaaggaagttctacaaatgttaca

SEQ ID NO: 11177 - DNA, 1080 bp, Glycine max
  Gm_smallRNAprecursor_4010
ccaaaaataatcaaaaaatcttgggcagacattgcctcagaatctgatgatgaatctgaatcaaatttacaaacaatgatccaaaatgcgtcaatgaccaaaacaaccaccaatactaaaggaaaactacctttagccaaagctcaaacaccacctaccaaacaaactaacaattatatttataaaaataaattgttaactgttttgcagatggaacctgaattttgggacaaaaatcccttcaaggcgacggccaaggctttcccaccaggatttcactacaaaccaaccactatcctgaagacaagaactttttatgaattgattttggtagattcgaactcagtatctatcaaacatttcaaagatccaaaagaccaaaccttaaacacccactcaaccatccaaatactaaaagttcttcaaccaagacactttggttcggacttgaacaaaggaaagagattttcagttccatttgatccagtaggttatacctattgggattacgttgatgcttggactaaggtgttttggcaccaaaatacccgcttcaaacattcatggctgatatatttcaagaccaacacaatttacaattttcccaattggtttttgcaatggtgggacttctttggaccaatcccagagatattcccagaaacggtccaacaaggattttcccaatttaagaaacaatacaattcgcaggaatcacgaattccagcagatcttaaatacttttcaagctttgcactgtcatggatattctcatggcaatatcgttacagcaagactgagaagacaaaccaatatccatcactacaaaggcacgcatttgtaaaatggtggacacaatttgactcatccaaagcggatgcagaacaagtaaaactatggttccaatcccatccagaattcctcaaagcagctgatccagagacttctgtgtttttgaaccaaaagtctcatctggcagcatttttagcaggatcgacatcaaaggaggtcttagctaaaaatctgaaggaagttctacaaatgttacaacaggaagaagaagcttcatcctcaaagaag

SEQ ID NO: 11178 - DNA, 1062 bp, Glycine max
  Gm_smallRNAprecursor_4011
tcttgggcagacattgcctcagaatctgatgatgaatctgaatcaaatttacaaacaatgatccaaaatgcgtcaatgaccaaaacaaccaccaatactaaaggaaaactacctttagccaaagctcaaacaccacctaccaaacaaactaacaattatatttataaaaataaattgttaactgttttgcagatggaacctgaattttgggacaaaaatcccttcaaggcgacggccaaggctttcccaccaggatttcactacaaaccaaccactatcctgaagacaagaactttttatgaattgattttggtagattcgaactcagtatctatcaaacatttcaaagatccaaaagaccaaaccttaaacacccactcaaccatccaaatactaaaagttcttcaaccaagacactttggttcggacttgaacaaaggaaagagattttcagttccatttgatccagtaggttatacctattgggattacgttgatgcttggactaaggtgttttggcaccaaaatacccgcttcaaacattcatggctgatatatttcaagaccaacacaatttacaattttcccaattggtttttgcaatggtgggacttctttggaccaatcccagagatattcccagaaacggtccaacaaggattttcccaatttaagaaacaatacaattcgcaggaatcacgaattccagcagatcttaaatacttttcaagctttgcactgtcatggatattctcatggcaatatcgttacagcaagactgagaagacaaaccaatatccatcactacaaaggcacgcatttgtaaaatggtggacacaatttgactcatccaaagcggatgcagaacaagtaaaactatggttccaatcccatccagaattcctcaaagcagctgatccagagacttctgtgtttttgaaccaaaagtctcatctggcagcatttttagcaggatcgacatcaaaggaggtcttagctaaaaatctgaaggaagttctacaaatgttacaacaggaagaagaagcttcatcctcaaagaag

SEQ ID NO: 11179 - DNA, 1146 bp, Glycine max
  Gm_smallRNAprecursor_4012
aatgatccaaaatgcgtcaatgaccaaaacaaccaccaatactaaaggaaaactacctttagccaaagctcaaacaccacctaccaaacaaactaacaattatatttataaaaataaattgttaactgttttgcagatggaacctgaattttgggacaaaaatcccttcaaggcgacggccaaggctttcccaccaggatttcactacaaaccaaccactatcctgaagacaagaactttttatgaattgattttggtagattcgaactcagtatctatcaaacatttcaaagatccaaaagaccaaaccttaaacacccactcaaccatccaaatactaaaagttcttcaaccaagacactttggttcggacttgaacaaaggaaagagattttcagttccatttgatccagtaggttatacctattgggattacgttgatgcttggactaaggtgttttggcaccaaaatacccgcttcaaacattcatggctgatatatttcaagaccaacacaatttacaattttcccaattggtttttgcaatggtgggacttctttggaccaatcccagagatattcccagaaacggtccaacaaggattttcccaatttaagaaacaatacaattcgcaggaatcacgaattccagcagatcttaaatacttttcaagctttgcactgtcatggatattctcatggcaatatcgttacagcaagactgagaagacaaaccaatatccatcactacaaaggcacgcatttgtaaaatggtggacacaatttgactcatccaaagcggatgcagaacaagtaaaactatggttccaatcccatccagaattcctcaaagcagctgatccagagacttctgtgtttttgaaccaaaagtctcatctggcagcatttttagcaggatcgacatcaaaggaggtcttagctaaaaatctgaaggaagttctacaaatgttacaacaggaagaagaagcttcatcctcaaagaaggaagaaacaagttctgctgaagaagacgaagaagatcccttttaccaaaacgaagatgattgttttggtatctgtttagattaaatttaatttcggtcacaaaaccgtctgtttgtaattaatgtgtaattaatgctgga

SEQ ID NO: 11180 - DNA, 1169 bp, Glycine max
  Gm_smallRNAprecursor_4013
cgacggccaaggctttcccaccaggatttcactacaaaccaaccactatcctgaagacaagaactttttatgaattgattttggtagattcgaactcagtatctatcaaacatttcaaagatccaaaagaccaaaccttaaacacccactcaaccatccaaatactaaaagttcttcaaccaagacactttggttcggacttgaacaaaggaaagagattttcagttccatttgatccagtaggttatacctattgggattacgttgatgcttggactaaggtgttttggcaccaaaatacccgcttcaaacattcatggctgatatatttcaagaccaacacaatttacaattttcccaattggtttttgcaatggtgggacttctttggaccaatcccagagatattcccagaaacggtccaacaaggattttcccaatttaagaaacaatacaattcgcaggaatcacgaattccagcagatcttaaatacttttcaagctttgcactgtcatggatattctcatggcaatatcgttacagcaagactgagaagacaaaccaatatccatcactacaaaggcacgcatttgtaaaatggtggacacaatttgactcatccaaagcggatgcagaacaagtaaaactatggttccaatcccatccagaattcctcaaagcagctgatccagagacttctgtgtttttgaaccaaaagtctcatctggcagcatttttagcaggatcgacatcaaaggaggtcttagctaaaaatctgaaggaagttctacaaatgttacaacaggaagaagaagcttcatcctcaaagaaggaagaaacaagttctgctgaagaagacgaagaagatcccttttaccaaaacgaagatgattgttttggtatctgtttagattaaatttaatttcggtcacaaaaccgtctgtttgtaattaatgtgtaattaatgctggacaatactacctgtcctgtagccattaaagtcccggtcaaaactacttgtcttgtaacaaacagtcaaatagtcccggtcaaaactaccggcaactaccggtcttagatttttggctatataaggagtcctcaagcatgttgtgaggcaccctttcatttagccatttttccaggtttcggaagagaggtgctctga

SEQ ID NO: 11181 - DNA, 1173 bp, Glycine max
  Gm_smallRNAprecursor_4014
cgacggccaaggctttcccaccaggatttcactacaaaccaaccactatcctgaagacaagaactttttatgaattgattttggtagattcgaactcagtatctatcaaacatttcaaagatccaaaagaccaaaccttaaacacccactcaaccatccaaatactaaaagttcttcaaccaagacactttggttcggacttgaacaaaggaaagagattttcagttccatttgatccagtaggttatacctattgggattacgttgatgcttggactaaggtgttttggcaccaaaatacccgcttcaaacattcatggctgatatatttcaagaccaacacaatttacaattttcccaattggtttttgcaatggtgggacttctttggaccaatcccagagatattcccagaaacggtccaacaaggattttcccaatttaagaaacaatacaattcgcaggaatcacgaattccagcagatcttaaatacttttcaagctttgcactgtcatggatattctcatggcaatatcgttacagcaagactgagaagacaaaccaatatccatcactacaaaggcacgcatttgtaaaatggtggacacaatttgactcatccaaagcggatgcagaacaagtaaaactatggttccaatcccatccagaattcctcaaagcagctgatccagagacttctgtgtttttgaaccaaaagtctcatctggcagcatttttagcaggatcgacatcaaaggaggtcttagctaaaaatctgaaggaagttctacaaatgttacaacaggaagaagaagcttcatcctcaaagaaggaagaaacaagttctgctgaagaagacgaagaagatcccttttaccaaaacgaagatgattgttttggtatctgtttagattaaatttaatttcggtcacaaaaccgtctgtttgtaattaatgtgtaattaatgctggacaatactacctgtcctgtagccattaaagtcccggtcaaaactacttgtcttgtaacaaacagtcaaatagtcccggtcaaaactaccggcaactaccggtcttagatttttggctatataaggagtcctcaagcatgttgtgaggcaccctttcatttagccatttttccaggtttcggaagagaggtgctctgaaaca

SEQ ID NO: 11182 - DNA, 1078 bp, Glycine max
  Gm_smallRNAprecursor_4015
attcgaactcagtatctatcaaacatttcaaagatccaaaagaccaaaccttaaacacccactcaaccatccaaatactaaaagttcttcaaccaagacactttggttcggacttgaacaaaggaaagagattttcagttccatttgatccagtaggttatacctattgggattacgttgatgcttggactaaggtgttttggcaccaaaatacccgcttcaaacattcatggctgatatatttcaagaccaacacaatttacaattttcccaattggtttttgcaatggtgggacttctttggaccaatcccagagatattcccagaaacggtccaacaaggattttcccaatttaagaaacaatacaattcgcaggaatcacgaattccagcagatcttaaatacttttcaagctttgcactgtcatggatattctcatggcaatatcgttacagcaagactgagaagacaaaccaatatccatcactacaaaggcacgcatttgtaaaatggtggacacaatttgactcatccaaagcggatgcagaacaagtaaaactatggttccaatcccatccagaattcctcaaagcagctgatccagagacttctgtgtttttgaaccaaaagtctcatctggcagcatttttagcaggatcgacatcaaaggaggtcttagctaaaaatctgaaggaagttctacaaatgttacaacaggaagaagaagcttcatcctcaaagaaggaagaaacaagttctgctgaagaagacgaagaagatcccttttaccaaaacgaagatgattgttttggtatctgtttagattaaatttaatttcggtcacaaaaccgtctgtttgtaattaatgtgtaattaatgctggacaatactacctgtcctgtagccattaaagtcccggtcaaaactacttgtcttgtaacaaacagtcaaatagtcccggtcaaaactaccggcaactaccggtcttagatttttggctatataaggagtcctcaagcatgttgtgaggcaccctttcatttagccatttttccaggtttcggaagagaggtgct

SEQ ID NO: 11183 - DNA, 1079 bp, Glycine max
  Gm_smallRNAprecursor_4016
attcgaactcagtatctatcaaacatttcaaagatccaaaagaccaaaccttaaacacccactcaaccatccaaatactaaaagttcttcaaccaagacactttggttcggacttgaacaaaggaaagagattttcagttccatttgatccagtaggttatacctattgggattacgttgatgcttggactaaggtgttttggcaccaaaatacccgcttcaaacattcatggctgatatatttcaagaccaacacaatttacaattttcccaattggtttttgcaatggtgggacttctttggaccaatcccagagatattcccagaaacggtccaacaaggattttcccaatttaagaaacaatacaattcgcaggaatcacgaattccagcagatcttaaatacttttcaagctttgcactgtcatggatattctcatggcaatatcgttacagcaagactgagaagacaaaccaatatccatcactacaaaggcacgcatttgtaaaatggtggacacaatttgactcatccaaagcggatgcagaacaagtaaaactatggttccaatcccatccagaattcctcaaagcagctgatccagagacttctgtgtttttgaaccaaaagtctcatctggcagcatttttagcaggatcgacatcaaaggaggtcttagctaaaaatctgaaggaagttctacaaatgttacaacaggaagaagaagcttcatcctcaaagaaggaagaaacaagttctgctgaagaagacgaagaagatcccttttaccaaaacgaagatgattgttttggtatctgtttagattaaatttaatttcggtcacaaaaccgtctgtttgtaattaatgtgtaattaatgctggacaatactacctgtcctgtagccattaaagtcccggtcaaaactacttgtcttgtaacaaacagtcaaatagtcccggtcaaaactaccggcaactaccggtcttagatttttggctatataaggagtcctcaagcatgttgtgaggcaccctttcatttagccatttttccaggtttcggaagagaggtgctc

SEQ ID NO: 11184 - DNA, 1058 bp, Glycine max
  Gm_smallRNAprecursor_4017
accttaaacacccactcaaccatccaaatactaaaagttcttcaaccaagacactttggttcggacttgaacaaaggaaagagattttcagttccatttgatccagtaggttatacctattgggattacgttgatgcttggactaaggtgttttggcaccaaaatacccgcttcaaacattcatggctgatatatttcaagaccaacacaatttacaattttcccaattggtttttgcaatggtgggacttctttggaccaatcccagagatattcccagaaacggtccaacaaggattttcccaatttaagaaacaatacaattcgcaggaatcacgaattccagcagatcttaaatacttttcaagctttgcactgtcatggatattctcatggcaatatcgttacagcaagactgagaagacaaaccaatatccatcactacaaaggcacgcatttgtaaaatggtggacacaatttgactcatccaaagcggatgcagaacaagtaaaactatggttccaatcccatccagaattcctcaaagcagctgatccagagacttctgtgtttttgaaccaaaagtctcatctggcagcatttttagcaggatcgacatcaaaggaggtcttagctaaaaatctgaaggaagttctacaaatgttacaacaggaagaagaagcttcatcctcaaagaaggaagaaacaagttctgctgaagaagacgaagaagatcccttttaccaaaacgaagatgattgttttggtatctgtttagattaaatttaatttcggtcacaaaaccgtctgtttgtaattaatgtgtaattaatgctggacaatactacctgtcctgtagccattaaagtcccggtcaaaactacttgtcttgtaacaaacagtcaaatagtcccggtcaaaactaccggcaactaccggtcttagatttttggctatataaggagtcctcaagcatgttgtgaggcaccctttcatttagccatttttccaggtttcggaagagaggtgctctgaaacaagatttttgtaagcgcttc

SEQ ID NO: 11185 - DNA, 1036 bp, Glycine max
  Gm_smallRNAprecursor_4018
tccaaatactaaaagttcttcaaccaagacactttggttcggacttgaacaaaggaaagagattttcagttccatttgatccagtaggttatacctattgggattacgttgatgcttggactaaggtgttttggcaccaaaatacccgcttcaaacattcatggctgatatatttcaagaccaacacaatttacaattttcccaattggtttttgcaatggtgggacttctttggaccaatcccagagatattcccagaaacggtccaacaaggattttcccaatttaagaaacaatacaattcgcaggaatcacgaattccagcagatcttaaatacttttcaagctttgcactgtcatggatattctcatggcaatatcgttacagcaagactgagaagacaaaccaatatccatcactacaaaggcacgcatttgtaaaatggtggacacaatttgactcatccaaagcggatgcagaacaagtaaaactatggttccaatcccatccagaattcctcaaagcagctgatccagagacttctgtgtttttgaaccaaaagtctcatctggcagcatttttagcaggatcgacatcaaaggaggtcttagctaaaaatctgaaggaagttctacaaatgttacaacaggaagaagaagcttcatcctcaaagaaggaagaaacaagttctgctgaagaagacgaagaagatcccttttaccaaaacgaagatgattgttttggtatctgtttagattaaatttaatttcggtcacaaaaccgtctgtttgtaattaatgtgtaattaatgctggacaatactacctgtcctgtagccattaaagtcccggtcaaaactacttgtcttgtaacaaacagtcaaatagtcccggtcaaaactaccggcaactaccggtcttagatttttggctatataaggagtcctcaagcatgttgtgaggcaccctttcatttagccatttttccaggtttcggaagagaggtgctctgaaacaagatttttgtaagcgcttc

SEQ ID NO: 11186 - DNA, 1055 bp, Glycine max
  Gm_smallRNAprecursor_4019
tcttcaaccaagacactttggttcggacttgaacaaaggaaagagattttcagttccatttgatccagtaggttatacctattgggattacgttgatgcttggactaaggtgttttggcaccaaaatacccgcttcaaacattcatggctgatatatttcaagaccaacacaatttacaattttcccaattggtttttgcaatggtgggacttctttggaccaatcccagagatattcccagaaacggtccaacaaggattttcccaatttaagaaacaatacaattcgcaggaatcacgaattccagcagatcttaaatacttttcaagctttgcactgtcatggatattctcatggcaatatcgttacagcaagactgagaagacaaaccaatatccatcactacaaaggcacgcatttgtaaaatggtggacacaatttgactcatccaaagcggatgcagaacaagtaaaactatggttccaatcccatccagaattcctcaaagcagctgatccagagacttctgtgtttttgaaccaaaagtctcatctggcagcatttttagcaggatcgacatcaaaggaggtcttagctaaaaatctgaaggaagttctacaaatgttacaacaggaagaagaagcttcatcctcaaagaaggaagaaacaagttctgctgaagaagacgaagaagatcccttttaccaaaacgaagatgattgttttggtatctgtttagattaaatttaatttcggtcacaaaaccgtctgtttgtaattaatgtgtaattaatgctggacaatactacctgtcctgtagccattaaagtcccggtcaaaactacttgtcttgtaacaaacagtcaaatagtcccggtcaaaactaccggcaactaccggtcttagatttttggctatataaggagtcctcaagcatgttgtgaggcaccctttcatttagccatttttccaggtttcggaagagaggtgctctgaaacaagatttttgtaagcgcttctttctagattcaataaatttctatttttcatcctt

SEQ ID NO: 11187 - DNA, 1215 bp, Glycine max
  Gm_smallRNAprecursor_4020
tcttcaaccaagacactttggttcggacttgaacaaaggaaagagattttcagttccatttgatccagtaggttatacctattgggattacgttgatgcttggactaaggtgttttggcaccaaaatacccgcttcaaacattcatggctgatatatttcaagaccaacacaatttacaattttcccaattggtttttgcaatggtgggacttctttggaccaatcccagagatattcccagaaacggtccaacaaggattttcccaatttaagaaacaatacaattcgcaggaatcacgaattccagcagatcttaaatacttttcaagctttgcactgtcatggatattctcatggcaatatcgttacagcaagactgagaagacaaaccaatatccatcactacaaaggcacgcatttgtaaaatggtggacacaatttgactcatccaaagcggatgcagaacaagtaaaactatggttccaatcccatccagaattcctcaaagcagctgatccagagacttctgtgtttttgaaccaaaagtctcatctggcagcatttttagcaggatcgacatcaaaggaggtcttagctaaaaatctgaaggaagttctacaaatgttacaacaggaagaagaagcttcatcctcaaagaaggaagaaacaagttctgctgaagaagacgaagaagatcccttttaccaaaacgaagatgattgttttggtatctgtttagattaaatttaatttcggtcacaaaaccgtctgtttgtaattaatgtgtaattaatgctggacaatactacctgtcctgtagccattaaagtcccggtcaaaactacttgtcttgtaacaaacagtcaaatagtcccggtcaaaactaccggcaactaccggtcttagatttttggctatataaggagtcctcaagcatgttgtgaggcaccctttcatttagccatttttccaggtttcggaagagaggtgctctgaaacaagatttttgtaagcgcttctttctagattcaataaatttctatttttcatccttctctcttctcccttcaccgatcctgtgcggctctgccgccgcttcggtttctttgtttatgaaaacctgggttttgtaagccggtctccggtgtgaccttgatatctgttttcaaagtttatattttcatcaaatatactgcattcttacttcctatctg

SEQ ID NO: 11188 - DNA, 1216 bp, Glycine max
  Gm_smallRNAprecursor_4021
tcttcaaccaagacactttggttcggacttgaacaaaggaaagagattttcagttccatttgatccagtaggttatacctattgggattacgttgatgcttggactaaggtgttttggcaccaaaatacccgcttcaaacattcatggctgatatatttcaagaccaacacaatttacaattttcccaattggtttttgcaatggtgggacttctttggaccaatcccagagatattcccagaaacggtccaacaaggattttcccaatttaagaaacaatacaattcgcaggaatcacgaattccagcagatcttaaatacttttcaagctttgcactgtcatggatattctcatggcaatatcgttacagcaagactgagaagacaaaccaatatccatcactacaaaggcacgcatttgtaaaatggtggacacaatttgactcatccaaagcggatgcagaacaagtaaaactatggttccaatcccatccagaattcctcaaagcagctgatccagagacttctgtgtttttgaaccaaaagtctcatctggcagcatttttagcaggatcgacatcaaaggaggtcttagctaaaaatctgaaggaagttctacaaatgttacaacaggaagaagaagcttcatcctcaaagaaggaagaaacaagttctgctgaagaagacgaagaagatcccttttaccaaaacgaagatgattgttttggtatctgtttagattaaatttaatttcggtcacaaaaccgtctgtttgtaattaatgtgtaattaatgctggacaatactacctgtcctgtagccattaaagtcccggtcaaaactacttgtcttgtaacaaacagtcaaatagtcccggtcaaaactaccggcaactaccggtcttagatttttggctatataaggagtcctcaagcatgttgtgaggcaccctttcatttagccatttttccaggtttcggaagagaggtgctctgaaacaagatttttgtaagcgcttctttctagattcaataaatttctatttttcatccttctctcttctcccttcaccgatcctgtgcggctctgccgccgcttcggtttctttgtttatgaaaacctgggttttgtaagccggtctccggtgtgaccttgatatctgttttcaaagtttatattttcatcaaatatactgcattcttacttcctatctgt

SEQ ID NO: 11189 - DNA, 1053 bp, Glycine max
  Gm_smallRNAprecursor_4022
cttcaaccaagacactttggttcggacttgaacaaaggaaagagattttcagttccatttgatccagtaggttatacctattgggattacgttgatgcttggactaaggtgttttggcaccaaaatacccgcttcaaacattcatggctgatatatttcaagaccaacacaatttacaattttcccaattggtttttgcaatggtgggacttctttggaccaatcccagagatattcccagaaacggtccaacaaggattttcccaatttaagaaacaatacaattcgcaggaatcacgaattccagcagatcttaaatacttttcaagctttgcactgtcatggatattctcatggcaatatcgttacagcaagactgagaagacaaaccaatatccatcactacaaaggcacgcatttgtaaaatggtggacacaatttgactcatccaaagcggatgcagaacaagtaaaactatggttccaatcccatccagaattcctcaaagcagctgatccagagacttctgtgtttttgaaccaaaagtctcatctggcagcatttttagcaggatcgacatcaaaggaggtcttagctaaaaatctgaaggaagttctacaaatgttacaacaggaagaagaagcttcatcctcaaagaaggaagaaacaagttctgctgaagaagacgaagaagatcccttttaccaaaacgaagatgattgttttggtatctgtttagattaaatttaatttcggtcacaaaaccgtctgtttgtaattaatgtgtaattaatgctggacaatactacctgtcctgtagccattaaagtcccggtcaaaactacttgtcttgtaacaaacagtcaaatagtcccggtcaaaactaccggcaactaccggtcttagatttttggctatataaggagtcctcaagcatgttgtgaggcaccctttcatttagccatttttccaggtttcggaagagaggtgctctgaaacaagatttttgtaagcgcttctttctagattcaataaatttctatttttcatcct

SEQ ID NO: 11190 - DNA, 1054 bp, Glycine max
  Gm_smallRNAprecursor_4023
cttcaaccaagacactttggttcggacttgaacaaaggaaagagattttcagttccatttgatccagtaggttatacctattgggattacgttgatgcttggactaaggtgttttggcaccaaaatacccgcttcaaacattcatggctgatatatttcaagaccaacacaatttacaattttcccaattggtttttgcaatggtgggacttctttggaccaatcccagagatattcccagaaacggtccaacaaggattttcccaatttaagaaacaatacaattcgcaggaatcacgaattccagcagatcttaaatacttttcaagctttgcactgtcatggatattctcatggcaatatcgttacagcaagactgagaagacaaaccaatatccatcactacaaaggcacgcatttgtaaaatggtggacacaatttgactcatccaaagcggatgcagaacaagtaaaactatggttccaatcccatccagaattcctcaaagcagctgatccagagacttctgtgtttttgaaccaaaagtctcatctggcagcatttttagcaggatcgacatcaaaggaggtcttagctaaaaatctgaaggaagttctacaaatgttacaacaggaagaagaagcttcatcctcaaagaaggaagaaacaagttctgctgaagaagacgaagaagatcccttttaccaaaacgaagatgattgttttggtatctgtttagattaaatttaatttcggtcacaaaaccgtctgtttgtaattaatgtgtaattaatgctggacaatactacctgtcctgtagccattaaagtcccggtcaaaactacttgtcttgtaacaaacagtcaaatagtcccggtcaaaactaccggcaactaccggtcttagatttttggctatataaggagtcctcaagcatgttgtgaggcaccctttcatttagccatttttccaggtttcggaagagaggtgctctgaaacaagatttttgtaagcgcttctttctagattcaataaatttctatttttcatcctt

SEQ ID NO: 11191 - DNA, 1041 bp, Glycine max
  Gm_smallRNAprecursor_4024
accaagacactttggttcggacttgaacaaaggaaagagattttcagttccatttgatccagtaggttatacctattgggattacgttgatgcttggactaaggtgttttggcaccaaaatacccgcttcaaacattcatggctgatatatttcaagaccaacacaatttacaattttcccaattggtttttgcaatggtgggacttctttggaccaatcccagagatattcccagaaacggtccaacaaggattttcccaatttaagaaacaatacaattcgcaggaatcacgaattccagcagatcttaaatacttttcaagctttgcactgtcatggatattctcatggcaatatcgttacagcaagactgagaagacaaaccaatatccatcactacaaaggcacgcatttgtaaaatggtggacacaatttgactcatccaaagcggatgcagaacaagtaaaactatggttccaatcccatccagaattcctcaaagcagctgatccagagacttctgtgtttttgaaccaaaagtctcatctggcagcatttttagcaggatcgacatcaaaggaggtcttagctaaaaatctgaaggaagttctacaaatgttacaacaggaagaagaagcttcatcctcaaagaaggaagaaacaagttctgctgaagaagacgaagaagatcccttttaccaaaacgaagatgattgttttggtatctgtttagattaaatttaatttcggtcacaaaaccgtctgtttgtaattaatgtgtaattaatgctggacaatactacctgtcctgtagccattaaagtcccggtcaaaactacttgtcttgtaacaaacagtcaaatagtcccggtcaaaactaccggcaactaccggtcttagatttttggctatataaggagtcctcaagcatgttgtgaggcaccctttcatttagccatttttccaggtttcggaagagaggtgctctgaaacaagatttttgtaagcgcttctttctagattcaataaatttctatttt

SEQ ID NO: 11192 - DNA, 1031 bp, Glycine max
  Gm_smallRNAprecursor_4025
gacactttggttcggacttgaacaaaggaaagagattttcagttccatttgatccagtaggttatacctattgggattacgttgatgcttggactaaggtgttttggcaccaaaatacccgcttcaaacattcatggctgatatatttcaagaccaacacaatttacaattttcccaattggtttttgcaatggtgggacttctttggaccaatcccagagatattcccagaaacggtccaacaaggattttcccaatttaagaaacaatacaattcgcaggaatcacgaattccagcagatcttaaatacttttcaagctttgcactgtcatggatattctcatggcaatatcgttacagcaagactgagaagacaaaccaatatccatcactacaaaggcacgcatttgtaaaatggtggacacaatttgactcatccaaagcggatgcagaacaagtaaaactatggttccaatcccatccagaattcctcaaagcagctgatccagagacttctgtgtttttgaaccaaaagtctcatctggcagcatttttagcaggatcgacatcaaaggaggtcttagctaaaaatctgaaggaagttctacaaatgttacaacaggaagaagaagcttcatcctcaaagaaggaagaaacaagttctgctgaagaagacgaagaagatcccttttaccaaaacgaagatgattgttttggtatctgtttagattaaatttaatttcggtcacaaaaccgtctgtttgtaattaatgtgtaattaatgctggacaatactacctgtcctgtagccattaaagtcccggtcaaaactacttgtcttgtaacaaacagtcaaatagtcccggtcaaaactaccggcaactaccggtcttagatttttggctatataaggagtcctcaagcatgttgtgaggcaccctttcatttagccatttttccaggtttcggaagagaggtgctctgaaacaagatttttgtaagcgcttctttctagattcaataaatttct

SEQ ID NO: 11193 - DNA, 1138 bp, Glycine max
  Gm_smallRNAprecursor_4026
ggttcggacttgaacaaaggaaagagattttcagttccatttgatccagtaggttatacctattgggattacgttgatgcttggactaaggtgttttggcaccaaaatacccgcttcaaacattcatggctgatatatttcaagaccaacacaatttacaattttcccaattggtttttgcaatggtgggacttctttggaccaatcccagagatattcccagaaacggtccaacaaggattttcccaatttaagaaacaatacaattcgcaggaatcacgaattccagcagatcttaaatacttttcaagctttgcactgtcatggatattctcatggcaatatcgttacagcaagactgagaagacaaaccaatatccatcactacaaaggcacgcatttgtaaaatggtggacacaatttgactcatccaaagcggatgcagaacaagtaaaactatggttccaatcccatccagaattcctcaaagcagctgatccagagacttctgtgtttttgaaccaaaagtctcatctggcagcatttttagcaggatcgacatcaaaggaggtcttagctaaaaatctgaaggaagttctacaaatgttacaacaggaagaagaagcttcatcctcaaagaaggaagaaacaagttctgctgaagaagacgaagaagatcccttttaccaaaacgaagatgattgttttggtatctgtttagattaaatttaatttcggtcacaaaaccgtctgtttgtaattaatgtgtaattaatgctggacaatactacctgtcctgtagccattaaagtcccggtcaaaactacttgtcttgtaacaaacagtcaaatagtcccggtcaaaactaccggcaactaccggtcttagatttttggctatataaggagtcctcaagcatgttgtgaggcaccctttcatttagccatttttccaggtttcggaagagaggtgctctgaaacaagatttttgtaagcgcttctttctagattcaataaatttctatttttcatccttctctcttctcccttcaccgatcctgtgcggctctgccgccgcttcggtttctttgtttatgaaaacctgggttttgtaagccggtctccggtgtgaccttga

SEQ ID NO: 11194 - DNA, 1139 bp, Glycine max
  Gm_smallRNAprecursor_4027
ggttcggacttgaacaaaggaaagagattttcagttccatttgatccagtaggttatacctattgggattacgttgatgcttggactaaggtgttttggcaccaaaatacccgcttcaaacattcatggctgatatatttcaagaccaacacaatttacaattttcccaattggtttttgcaatggtgggacttctttggaccaatcccagagatattcccagaaacggtccaacaaggattttcccaatttaagaaacaatacaattcgcaggaatcacgaattccagcagatcttaaatacttttcaagctttgcactgtcatggatattctcatggcaatatcgttacagcaagactgagaagacaaaccaatatccatcactacaaaggcacgcatttgtaaaatggtggacacaatttgactcatccaaagcggatgcagaacaagtaaaactatggttccaatcccatccagaattcctcaaagcagctgatccagagacttctgtgtttttgaaccaaaagtctcatctggcagcatttttagcaggatcgacatcaaaggaggtcttagctaaaaatctgaaggaagttctacaaatgttacaacaggaagaagaagcttcatcctcaaagaaggaagaaacaagttctgctgaagaagacgaagaagatcccttttaccaaaacgaagatgattgttttggtatctgtttagattaaatttaatttcggtcacaaaaccgtctgtttgtaattaatgtgtaattaatgctggacaatactacctgtcctgtagccattaaagtcccggtcaaaactacttgtcttgtaacaaacagtcaaatagtcccggtcaaaactaccggcaactaccggtcttagatttttggctatataaggagtcctcaagcatgttgtgaggcaccctttcatttagccatttttccaggtttcggaagagaggtgctctgaaacaagatttttgtaagcgcttctttctagattcaataaatttctatttttcatccttctctcttctcccttcaccgatcctgtgcggctctgccgccgcttcggtttctttgtttatgaaaacctgggttttgtaagccggtctccggtgtgaccttgat

SEQ ID NO: 11195 - DNA, 1141 bp, Glycine max
  Gm_smallRNAprecursor_4028
ggttcggacttgaacaaaggaaagagattttcagttccatttgatccagtaggttatacctattgggattacgttgatgcttggactaaggtgttttggcaccaaaatacccgcttcaaacattcatggctgatatatttcaagaccaacacaatttacaattttcccaattggtttttgcaatggtgggacttctttggaccaatcccagagatattcccagaaacggtccaacaaggattttcccaatttaagaaacaatacaattcgcaggaatcacgaattccagcagatcttaaatacttttcaagctttgcactgtcatggatattctcatggcaatatcgttacagcaagactgagaagacaaaccaatatccatcactacaaaggcacgcatttgtaaaatggtggacacaatttgactcatccaaagcggatgcagaacaagtaaaactatggttccaatcccatccagaattcctcaaagcagctgatccagagacttctgtgtttttgaaccaaaagtctcatctggcagcatttttagcaggatcgacatcaaaggaggtcttagctaaaaatctgaaggaagttctacaaatgttacaacaggaagaagaagcttcatcctcaaagaaggaagaaacaagttctgctgaagaagacgaagaagatcccttttaccaaaacgaagatgattgttttggtatctgtttagattaaatttaatttcggtcacaaaaccgtctgtttgtaattaatgtgtaattaatgctggacaatactacctgtcctgtagccattaaagtcccggtcaaaactacttgtcttgtaacaaacagtcaaatagtcccggtcaaaactaccggcaactaccggtcttagatttttggctatataaggagtcctcaagcatgttgtgaggcaccctttcatttagccatttttccaggtttcggaagagaggtgctctgaaacaagatttttgtaagcgcttctttctagattcaataaatttctatttttcatccttctctcttctcccttcaccgatcctgtgcggctctgccgccgcttcggtttctttgtttatgaaaacctgggttttgtaagccggtctccggtgtgaccttgatat

SEQ ID NO: 11196 - DNA, 1187 bp, Glycine max
  Gm_smallRNAprecursor_4029
ggttcggacttgaacaaaggaaagagattttcagttccatttgatccagtaggttatacctattgggattacgttgatgcttggactaaggtgttttggcaccaaaatacccgcttcaaacattcatggctgatatatttcaagaccaacacaatttacaattttcccaattggtttttgcaatggtgggacttctttggaccaatcccagagatattcccagaaacggtccaacaaggattttcccaatttaagaaacaatacaattcgcaggaatcacgaattccagcagatcttaaatacttttcaagctttgcactgtcatggatattctcatggcaatatcgttacagcaagactgagaagacaaaccaatatccatcactacaaaggcacgcatttgtaaaatggtggacacaatttgactcatccaaagcggatgcagaacaagtaaaactatggttccaatcccatccagaattcctcaaagcagctgatccagagacttctgtgtttttgaaccaaaagtctcatctggcagcatttttagcaggatcgacatcaaaggaggtcttagctaaaaatctgaaggaagttctacaaatgttacaacaggaagaagaagcttcatcctcaaagaaggaagaaacaagttctgctgaagaagacgaagaagatcccttttaccaaaacgaagatgattgttttggtatctgtttagattaaatttaatttcggtcacaaaaccgtctgtttgtaattaatgtgtaattaatgctggacaatactacctgtcctgtagccattaaagtcccggtcaaaactacttgtcttgtaacaaacagtcaaatagtcccggtcaaaactaccggcaactaccggtcttagatttttggctatataaggagtcctcaagcatgttgtgaggcaccctttcatttagccatttttccaggtttcggaagagaggtgctctgaaacaagatttttgtaagcgcttctttctagattcaataaatttctatttttcatccttctctcttctcccttcaccgatcctgtgcggctctgccgccgcttcggtttctttgtttatgaaaacctgggttttgtaagccggtctccggtgtgaccttgatatctgttttcaaagtttatattttcatcaaatatactgcattcttact

SEQ ID NO: 11197 - DNA, 1080 bp, Glycine max
  Gm_smallRNAprecursor_4030
tcaaacattcatggctgatatatttcaagaccaacacaatttacaattttcccaattggtttttgcaatggtgggacttctttggaccaatcccagagatattcccagaaacggtccaacaaggattttcccaatttaagaaacaatacaattcgcaggaatcacgaattccagcagatcttaaatacttttcaagctttgcactgtcatggatattctcatggcaatatcgttacagcaagactgagaagacaaaccaatatccatcactacaaaggcacgcatttgtaaaatggtggacacaatttgactcatccaaagcggatgcagaacaagtaaaactatggttccaatcccatccagaattcctcaaagcagctgatccagagacttctgtgtttttgaaccaaaagtctcatctggcagcatttttagcaggatcgacatcaaaggaggtcttagctaaaaatctgaaggaagttctacaaatgttacaacaggaagaagaagcttcatcctcaaagaaggaagaaacaagttctgctgaagaagacgaagaagatcccttttaccaaaacgaagatgattgttttggtatctgtttagattaaatttaatttcggtcacaaaaccgtctgtttgtaattaatgtgtaattaatgctggacaatactacctgtcctgtagccattaaagtcccggtcaaaactacttgtcttgtaacaaacagtcaaatagtcccggtcaaaactaccggcaactaccggtcttagatttttggctatataaggagtcctcaagcatgttgtgaggcaccctttcatttagccatttttccaggtttcggaagagaggtgctctgaaacaagatttttgtaagcgcttctttctagattcaataaatttctatttttcatccttctctcttctcccttcaccgatcctgtgcggctctgccgccgcttcggtttctttgtttatgaaaacctgggttttgtaagccggtctccggtgtgaccttgatatctgttttcaaagtttatattttcatcaaatatactgcattcttacttcctatct

SEQ ID NO: 11198 - DNA, 1081 bp, Glycine max
  Gm_smallRNAprecursor_4031
tcaaacattcatggctgatatatttcaagaccaacacaatttacaattttcccaattggtttttgcaatggtgggacttctttggaccaatcccagagatattcccagaaacggtccaacaaggattttcccaatttaagaaacaatacaattcgcaggaatcacgaattccagcagatcttaaatacttttcaagctttgcactgtcatggatattctcatggcaatatcgttacagcaagactgagaagacaaaccaatatccatcactacaaaggcacgcatttgtaaaatggtggacacaatttgactcatccaaagcggatgcagaacaagtaaaactatggttccaatcccatccagaattcctcaaagcagctgatccagagacttctgtgtttttgaaccaaaagtctcatctggcagcatttttagcaggatcgacatcaaaggaggtcttagctaaaaatctgaaggaagttctacaaatgttacaacaggaagaagaagcttcatcctcaaagaaggaagaaacaagttctgctgaagaagacgaagaagatcccttttaccaaaacgaagatgattgttttggtatctgtttagattaaatttaatttcggtcacaaaaccgtctgtttgtaattaatgtgtaattaatgctggacaatactacctgtcctgtagccattaaagtcccggtcaaaactacttgtcttgtaacaaacagtcaaatagtcccggtcaaaactaccggcaactaccggtcttagatttttggctatataaggagtcctcaagcatgttgtgaggcaccctttcatttagccatttttccaggtttcggaagagaggtgctctgaaacaagatttttgtaagcgcttctttctagattcaataaatttctatttttcatccttctctcttctcccttcaccgatcctgtgcggctctgccgccgcttcggtttctttgtttatgaaaacctgggttttgtaagccggtctccggtgtgaccttgatatctgttttcaaagtttatattttcatcaaatatactgcattcttacttcctatctg

SEQ ID NO: 11199 - DNA, 1082 bp, Glycine max
  Gm_smallRNAprecursor_4032
tcaaacattcatggctgatatatttcaagaccaacacaatttacaattttcccaattggtttttgcaatggtgggacttctttggaccaatcccagagatattcccagaaacggtccaacaaggattttcccaatttaagaaacaatacaattcgcaggaatcacgaattccagcagatcttaaatacttttcaagctttgcactgtcatggatattctcatggcaatatcgttacagcaagactgagaagacaaaccaatatccatcactacaaaggcacgcatttgtaaaatggtggacacaatttgactcatccaaagcggatgcagaacaagtaaaactatggttccaatcccatccagaattcctcaaagcagctgatccagagacttctgtgtttttgaaccaaaagtctcatctggcagcatttttagcaggatcgacatcaaaggaggtcttagctaaaaatctgaaggaagttctacaaatgttacaacaggaagaagaagcttcatcctcaaagaaggaagaaacaagttctgctgaagaagacgaagaagatcccttttaccaaaacgaagatgattgttttggtatctgtttagattaaatttaatttcggtcacaaaaccgtctgtttgtaattaatgtgtaattaatgctggacaatactacctgtcctgtagccattaaagtcccggtcaaaactacttgtcttgtaacaaacagtcaaatagtcccggtcaaaactaccggcaactaccggtcttagatttttggctatataaggagtcctcaagcatgttgtgaggcaccctttcatttagccatttttccaggtttcggaagagaggtgctctgaaacaagatttttgtaagcgcttctttctagattcaataaatttctatttttcatccttctctcttctcccttcaccgatcctgtgcggctctgccgccgcttcggtttctttgtttatgaaaacctgggttttgtaagccggtctccggtgtgaccttgatatctgttttcaaagtttatattttcatcaaatatactgcattcttacttcctatctgt

SEQ ID NO: 11200 - DNA, 1057 bp, Glycine max
  Gm_smallRNAprecursor_4033
atttcaagaccaacacaatttacaattttcccaattggtttttgcaatggtgggacttctttggaccaatcccagagatattcccagaaacggtccaacaaggattttcccaatttaagaaacaatacaattcgcaggaatcacgaattccagcagatcttaaatacttttcaagctttgcactgtcatggatattctcatggcaatatcgttacagcaagactgagaagacaaaccaatatccatcactacaaaggcacgcatttgtaaaatggtggacacaatttgactcatccaaagcggatgcagaacaagtaaaactatggttccaatcccatccagaattcctcaaagcagctgatccagagacttctgtgtttttgaaccaaaagtctcatctggcagcatttttagcaggatcgacatcaaaggaggtcttagctaaaaatctgaaggaagttctacaaatgttacaacaggaagaagaagcttcatcctcaaagaaggaagaaacaagttctgctgaagaagacgaagaagatcccttttaccaaaacgaagatgattgttttggtatctgtttagattaaatttaatttcggtcacaaaaccgtctgtttgtaattaatgtgtaattaatgctggacaatactacctgtcctgtagccattaaagtcccggtcaaaactacttgtcttgtaacaaacagtcaaatagtcccggtcaaaactaccggcaactaccggtcttagatttttggctatataaggagtcctcaagcatgttgtgaggcaccctttcatttagccatttttccaggtttcggaagagaggtgctctgaaacaagatttttgtaagcgcttctttctagattcaataaatttctatttttcatccttctctcttctcccttcaccgatcctgtgcggctctgccgccgcttcggtttctttgtttatgaaaacctgggttttgtaagccggtctccggtgtgaccttgatatctgttttcaaagtttatattttcatcaaatatactgcattcttacttcctat

SEQ ID NO: 11201 - DNA, 1064 bp, Glycine max
  Gm_smallRNAprecursor_4034
atttcaagaccaacacaatttacaattttcccaattggtttttgcaatggtgggacttctttggaccaatcccagagatattcccagaaacggtccaacaaggattttcccaatttaagaaacaatacaattcgcaggaatcacgaattccagcagatcttaaatacttttcaagctttgcactgtcatggatattctcatggcaatatcgttacagcaagactgagaagacaaaccaatatccatcactacaaaggcacgcatttgtaaaatggtggacacaatttgactcatccaaagcggatgcagaacaagtaaaactatggttccaatcccatccagaattcctcaaagcagctgatccagagacttctgtgtttttgaaccaaaagtctcatctggcagcatttttagcaggatcgacatcaaaggaggtcttagctaaaaatctgaaggaagttctacaaatgttacaacaggaagaagaagcttcatcctcaaagaaggaagaaacaagttctgctgaagaagacgaagaagatcccttttaccaaaacgaagatgattgttttggtatctgtttagattaaatttaatttcggtcacaaaaccgtctgtttgtaattaatgtgtaattaatgctggacaatactacctgtcctgtagccattaaagtcccggtcaaaactacttgtcttgtaacaaacagtcaaatagtcccggtcaaaactaccggcaactaccggtcttagatttttggctatataaggagtcctcaagcatgttgtgaggcaccctttcatttagccatttttccaggtttcggaagagaggtgctctgaaacaagatttttgtaagcgcttctttctagattcaataaatttctatttttcatccttctctcttctcccttcaccgatcctgtgcggctctgccgccgcttcggtttctttgtttatgaaaacctgggttttgtaagccggtctccggtgtgaccttgatatctgttttcaaagtttatattttcatcaaatatactgcattcttacttcctatctgtccg

SEQ ID NO: 11202 - DNA, 1059 bp, Glycine max
  Gm_smallRNAprecursor_4035
tttcaagaccaacacaatttacaattttcccaattggtttttgcaatggtgggacttctttggaccaatcccagagatattcccagaaacggtccaacaaggattttcccaatttaagaaacaatacaattcgcaggaatcacgaattccagcagatcttaaatacttttcaagctttgcactgtcatggatattctcatggcaatatcgttacagcaagactgagaagacaaaccaatatccatcactacaaaggcacgcatttgtaaaatggtggacacaatttgactcatccaaagcggatgcagaacaagtaaaactatggttccaatcccatccagaattcctcaaagcagctgatccagagacttctgtgtttttgaaccaaaagtctcatctggcagcatttttagcaggatcgacatcaaaggaggtcttagctaaaaatctgaaggaagttctacaaatgttacaacaggaagaagaagcttcatcctcaaagaaggaagaaacaagttctgctgaagaagacgaagaagatcccttttaccaaaacgaagatgattgttttggtatctgtttagattaaatttaatttcggtcacaaaaccgtctgtttgtaattaatgtgtaattaatgctggacaatactacctgtcctgtagccattaaagtcccggtcaaaactacttgtcttgtaacaaacagtcaaatagtcccggtcaaaactaccggcaactaccggtcttagatttttggctatataaggagtcctcaagcatgttgtgaggcaccctttcatttagccatttttccaggtttcggaagagaggtgctctgaaacaagatttttgtaagcgcttctttctagattcaataaatttctatttttcatccttctctcttctcccttcaccgatcctgtgcggctctgccgccgcttcggtttctttgtttatgaaaacctgggttttgtaagccggtctccggtgtgaccttgatatctgttttcaaagtttatattttcatcaaatatactgcattcttacttcctatctg

SEQ ID NO: 11203 - DNA, 1060 bp, Glycine max
  Gm_smallRNAprecursor_4036
tttcaagaccaacacaatttacaattttcccaattggtttttgcaatggtgggacttctttggaccaatcccagagatattcccagaaacggtccaacaaggattttcccaatttaagaaacaatacaattcgcaggaatcacgaattccagcagatcttaaatacttttcaagctttgcactgtcatggatattctcatggcaatatcgttacagcaagactgagaagacaaaccaatatccatcactacaaaggcacgcatttgtaaaatggtggacacaatttgactcatccaaagcggatgcagaacaagtaaaactatggttccaatcccatccagaattcctcaaagcagctgatccagagacttctgtgtttttgaaccaaaagtctcatctggcagcatttttagcaggatcgacatcaaaggaggtcttagctaaaaatctgaaggaagttctacaaatgttacaacaggaagaagaagcttcatcctcaaagaaggaagaaacaagttctgctgaagaagacgaagaagatcccttttaccaaaacgaagatgattgttttggtatctgtttagattaaatttaatttcggtcacaaaaccgtctgtttgtaattaatgtgtaattaatgctggacaatactacctgtcctgtagccattaaagtcccggtcaaaactacttgtcttgtaacaaacagtcaaatagtcccggtcaaaactaccggcaactaccggtcttagatttttggctatataaggagtcctcaagcatgttgtgaggcaccctttcatttagccatttttccaggtttcggaagagaggtgctctgaaacaagatttttgtaagcgcttctttctagattcaataaatttctatttttcatccttctctcttctcccttcaccgatcctgtgcggctctgccgccgcttcggtttctttgtttatgaaaacctgggttttgtaagccggtctccggtgtgaccttgatatctgttttcaaagtttatattttcatcaaatatactgcattcttacttcctatctgt

SEQ ID NO: 11204 - DNA, 1060 bp, Glycine max; identical to SEQ ID NO: 11203
  Gm_smallRNAprecursor_4037

SEQ ID NO: 11205 - DNA, 1063 bp, Glycine max
  Gm_smallRNAprecursor_4038
tttcaagaccaacacaatttacaattttcccaattggtttttgcaatggtgggacttctttggaccaatcccagagatattcccagaaacggtccaacaaggattttcccaatttaagaaacaatacaattcgcaggaatcacgaattccagcagatcttaaatacttttcaagctttgcactgtcatggatattctcatggcaatatcgttacagcaagactgagaagacaaaccaatatccatcactacaaaggcacgcatttgtaaaatggtggacacaatttgactcatccaaagcggatgcagaacaagtaaaactatggttccaatcccatccagaattcctcaaagcagctgatccagagacttctgtgtttttgaaccaaaagtctcatctggcagcatttttagcaggatcgacatcaaaggaggtcttagctaaaaatctgaaggaagttctacaaatgttacaacaggaagaagaagcttcatcctcaaagaaggaagaaacaagttctgctgaagaagacgaagaagatcccttttaccaaaacgaagatgattgttttggtatctgtttagattaaatttaatttcggtcacaaaaccgtctgtttgtaattaatgtgtaattaatgctggacaatactacctgtcctgtagccattaaagtcccggtcaaaactacttgtcttgtaacaaacagtcaaatagtcccggtcaaaactaccggcaactaccggtcttagatttttggctatataaggagtcctcaagcatgttgtgaggcaccctttcatttagccatttttccaggtttcggaagagaggtgctctgaaacaagatttttgtaagcgcttctttctagattcaataaatttctatttttcatccttctctcttctcccttcaccgatcctgtgcggctctgccgccgcttcggtttctttgtttatgaaaacctgggttttgtaagccggtctccggtgtgaccttgatatctgttttcaaagtttatattttcatcaaatatactgcattcttacttcctatctgtccg

SEQ ID NO: 11206 - DNA, 1056 bp, Glycine max
  Gm_smallRNAprecursor_4039
caagaccaacacaatttacaattttcccaattggtttttgcaatggtgggacttctttggaccaatcccagagatattcccagaaacggtccaacaaggattttcccaatttaagaaacaatacaattcgcaggaatcacgaattccagcagatcttaaatacttttcaagctttgcactgtcatggatattctcatggcaatatcgttacagcaagactgagaagacaaaccaatatccatcactacaaaggcacgcatttgtaaaatggtggacacaatttgactcatccaaagcggatgcagaacaagtaaaactatggttccaatcccatccagaattcctcaaagcagctgatccagagacttctgtgtttttgaaccaaaagtctcatctggcagcatttttagcaggatcgacatcaaaggaggtcttagctaaaaatctgaaggaagttctacaaatgttacaacaggaagaagaagcttcatcctcaaagaaggaagaaacaagttctgctgaagaagacgaagaagatcccttttaccaaaacgaagatgattgttttggtatctgtttagattaaatttaatttcggtcacaaaaccgtctgtttgtaattaatgtgtaattaatgctggacaatactacctgtcctgtagccattaaagtcccggtcaaaactacttgtcttgtaacaaacagtcaaatagtcccggtcaaaactaccggcaactaccggtcttagatttttggctatataaggagtcctcaagcatgttgtgaggcaccctttcatttagccatttttccaggtttcggaagagaggtgctctgaaacaagatttttgtaagcgcttctttctagattcaataaatttctatttttcatccttctctcttctcccttcaccgatcctgtgcggctctgccgccgcttcggtttctttgtttatgaaaacctgggttttgtaagccggtctccggtgtgaccttgatatctgttttcaaagtttatattttcatcaaatatactgcattcttacttcctatctg

SEQ ID NO: 11207 - DNA, 1056 bp, Glycine max; identical to SEQ ID NO: 11206
  Gm_smallRNAprecursor_4040

SEQ ID NO: 11208 - DNA, 1057 bp, Glycine max
  Gm_smallRNAprecursor_4041
caagaccaacacaatttacaattttcccaattggtttttgcaatggtgggacttctttggaccaatcccagagatattcccagaaacggtccaacaaggattttcccaatttaagaaacaatacaattcgcaggaatcacgaattccagcagatcttaaatacttttcaagctttgcactgtcatggatattctcatggcaatatcgttacagcaagactgagaagacaaaccaatatccatcactacaaaggcacgcatttgtaaaatggtggacacaatttgactcatccaaagcggatgcagaacaagtaaaactatggttccaatcccatccagaattcctcaaagcagctgatccagagacttctgtgtttttgaaccaaaagtctcatctggcagcatttttagcaggatcgacatcaaaggaggtcttagctaaaaatctgaaggaagttctacaaatgttacaacaggaagaagaagcttcatcctcaaagaaggaagaaacaagttctgctgaagaagacgaagaagatcccttttaccaaaacgaagatgattgttttggtatctgtttagattaaatttaatttcggtcacaaaaccgtctgtttgtaattaatgtgtaattaatgctggacaatactacctgtcctgtagccattaaagtcccggtcaaaactacttgtcttgtaacaaacagtcaaatagtcccggtcaaaactaccggcaactaccggtcttagatttttggctatataaggagtcctcaagcatgttgtgaggcaccctttcatttagccatttttccaggtttcggaagagaggtgctctgaaacaagatttttgtaagcgcttctttctagattcaataaatttctatttttcatccttctctcttctcccttcaccgatcctgtgcggctctgccgccgcttcggtttctttgtttatgaaaacctgggttttgtaagccggtctccggtgtgaccttgatatctgttttcaaagtttatattttcatcaaatatactgcattcttacttcctatctgt

SEQ ID NO: 11209 - DNA, 1057 bp, Glycine max; identical to SEQ ID NO: 11208
  Gm_smallRNAprecursor_4042

SEQ ID NO: 11210 - DNA, 1057 bp, Glycine max; identical to SEQ ID NO: 11208
  Gm_smallRNAprecursor_4043

SEQ ID NO: 11211 - DNA, 1057 bp, Glycine max; identical to SEQ ID NO: 11208
  Gm_smallRNAprecursor_4044

SEQ ID NO: 11212 - DNA, 1155 bp, Glycine max
  Gm_smallRNAprecursor_4045
tgggacttctttggaccaatcccagagatattcccagaaacggtccaacaaggattttcccaatttaagaaacaatacaattcgcaggaatcacgaattccagcagatcttaaatacttttcaagctttgcactgtcatggatattctcatggcaatatcgttacagcaagactgagaagacaaaccaatatccatcactacaaaggcacgcatttgtaaaatggtggacacaatttgactcatccaaagcggatgcagaacaagtaaaactatggttccaatcccatccagaattcctcaaagcagctgatccagagacttctgtgtttttgaaccaaaagtctcatctggcagcatttttagcaggatcgacatcaaaggaggtcttagctaaaaatctgaaggaagttctacaaatgttacaacaggaagaagaagcttcatcctcaaagaaggaagaaacaagttctgctgaagaagacgaagaagatcccttttaccaaaacgaagatgattgttttggtatctgtttagattaaatttaatttcggtcacaaaaccgtctgtttgtaattaatgtgtaattaatgctggacaatactacctgtcctgtagccattaaagtcccggtcaaaactacttgtcttgtaacaaacagtcaaatagtcccggtcaaaactaccggcaactaccggtcttagatttttggctatataaggagtcctcaagcatgttgtgaggcaccctttcatttagccatttttccaggtttcggaagagaggtgctctgaaacaagatttttgtaagcgcttctttctagattcaataaatttctatttttcatccttctctcttctcccttcaccgatcctgtgcggctctgccgccgcttcggtttctttgtttatgaaaacctgggttttgtaagccggtctccggtgtgaccttgatatctgttttcaaagtttatattttcatcaaatatactgcattcttacttcctatctgtccgttgatcttactccgctgacctctggtatcagagcctgatggggaagtaggaatagtgtccgtaagggcatatgttaactgaacttatggatctgaagcatgtacagtaattttaatttaaacagtatgtgtttgaacagta

SEQ ID NO: 11213 - DNA, 1142 bp, Glycine max
  Gm_smallRNAprecursor_4046
gaccaatcccagagatattcccagaaacggtccaacaaggattttcccaatttaagaaacaatacaattcgcaggaatcacgaattccagcagatcttaaatacttttcaagctttgcactgtcatggatattctcatggcaatatcgttacagcaagactgagaagacaaaccaatatccatcactacaaaggcacgcatttgtaaaatggtggacacaatttgactcatccaaagcggatgcagaacaagtaaaactatggttccaatcccatccagaattcctcaaagcagctgatccagagacttctgtgtttttgaaccaaaagtctcatctggcagcatttttagcaggatcgacatcaaaggaggtcttagctaaaaatctgaaggaagttctacaaatgttacaacaggaagaagaagcttcatcctcaaagaaggaagaaacaagttctgctgaagaagacgaagaagatcccttttaccaaaacgaagatgattgttttggtatctgtttagattaaatttaatttcggtcacaaaaccgtctgtttgtaattaatgtgtaattaatgctggacaatactacctgtcctgtagccattaaagtcccggtcaaaactacttgtcttgtaacaaacagtcaaatagtcccggtcaaaactaccggcaactaccggtcttagatttttggctatataaggagtcctcaagcatgttgtgaggcaccctttcatttagccatttttccaggtttcggaagagaggtgctctgaaacaagatttttgtaagcgcttctttctagattcaataaatttctatttttcatccttctctcttctcccttcaccgatcctgtgcggctctgccgccgcttcggtttctttgtttatgaaaacctgggttttgtaagccggtctccggtgtgaccttgatatctgttttcaaagtttatattttcatcaaatatactgcattcttacttcctatctgtccgttgatcttactccgctgacctctggtatcagagcctgatggggaagtaggaatagtgtccgtaagggcatatgttaactgaacttatggatctgaagcatgtacagtaattttaatttaaacagtatgtgtttgaacagta

SEQ ID NO: 11214 - DNA, 1198 bp, Glycine max
  Gm_smallRNAprecursor_4047
aacggtccaacaaggattttcccaatttaagaaacaatacaattcgcaggaatcacgaattccagcagatcttaaatacttttcaagctttgcactgtcatggatattctcatggcaatatcgttacagcaagactgagaagacaaaccaatatccatcactacaaaggcacgcatttgtaaaatggtggacacaatttgactcatccaaagcggatgcagaacaagtaaaactatggttccaatcccatccagaattcctcaaagcagctgatccagagacttctgtgtttttgaaccaaaagtctcatctggcagcatttttagcaggatcgacatcaaaggaggtcttagctaaaaatctgaaggaagttctacaaatgttacaacaggaagaagaagcttcatcctcaaagaaggaagaaacaagttctgctgaagaagacgaagaagatcccttttaccaaaacgaagatgattgttttggtatctgtttagattaaatttaatttcggtcacaaaaccgtctgtttgtaattaatgtgtaattaatgctggacaatactacctgtcctgtagccattaaagtcccggtcaaaactacttgtcttgtaacaaacagtcaaatagtcccggtcaaaactaccggcaactaccggtcttagatttttggctatataaggagtcctcaagcatgttgtgaggcaccctttcatttagccatttttccaggtttcggaagagaggtgctctgaaacaagatttttgtaagcgcttctttctagattcaataaatttctatttttcatccttctctcttctcccttcaccgatcctgtgcggctctgccgccgcttcggtttctttgtttatgaaaacctgggttttgtaagccggtctccggtgtgaccttgatatctgttttcaaagtttatattttcatcaaatatactgcattcttacttcctatctgtccgttgatcttactccgctgacctctggtatcagagcctgatggggaagtaggaatagtgtccgtaagggcatatgttaactgaacttatggatctgaagcatgtacagtaattttaatttaaacagtatgtgtttgaacagtattttctggaagcacagcagtctgatattttagttgaatgatattgtagcagtaagtcccgtggatgagaaagcgcagtaag

SEQ ID NO: 11215 - DNA, 1097 bp, Glycine max
  Gm_smallRNAprecursor_4048
agacgaagaagatcccttttaccaaaacgaagatgattgttttggtatctgtttagattaaatttaatttcggtcacaaaaccgtctgtttgtaattaatgtgtaattaatgctggacaatactacctgtcctgtagccattaaagtcccggtcaaaactacttgtcttgtaacaaacagtcaaatagtcccggtcaaaactaccggcaactaccggtcttagatttttggctatataaggagtcctcaagcatgttgtgaggcaccctttcatttagccatttttccaggtttcggaagagaggtgctctgaaacaagatttttgtaagcgcttctttctagattcaataaatttctatttttcatccttctctcttctcccttcaccgatcctgtgcggctctgccgccgcttcggtttctttgtttatgaaaacctgggttttgtaagccggtctccggtgtgaccttgatatctgttttcaaagtttatattttcatcaaatatactgcattcttacttcctatctgtccgttgatcttactccgctgacctctggtatcagagcctgatggggaagtaggaatagtgtccgtaagggcatatgttaactgaacttatggatctgaagcatgtacagtaattttaatttaaacagtatgtgtttgaacagtattttctggaagcacagcagtctgatattttagttgaatgatattgtagcagtaagtcccgtggatgagaaagcgcagtaaggctaaggtgtattgttcaaataaaatatggagacataatatactggtggctataggagtaatgttcaaactatattgtctgtgaaaaaaaaaaatcttctttttcatttattcagatccaagaagttctgtaacatatagccttatggaaagattcctatggaaccaaatgaaggcaaagatattagagaatgttttaattatgtctagattattgcgatccttttcccgtatctcttttcgctcaaattcctcctcttcatcttcttcaagaaacaccaatctcttaaatgatcaagataaccagacccaagaggtcgccccaaaacacaatctcttcg

SEQ ID NO: 11216 - DNA, 1097 bp, Glycine max; identical to SEQ ID NO: 11215
  Gm_smallRNAprecursor_4049

SEQ ID NO: 11217 - DNA, 1098 bp, Glycine max
  Gm_smallRNAprecursor_4050
agacgaagaagatcccttttaccaaaacgaagatgattgttttggtatctgtttagattaaatttaatttcggtcacaaaaccgtctgtttgtaattaatgtgtaattaatgctggacaatactacctgtcctgtagccattaaagtcccggtcaaaactacttgtcttgtaacaaacagtcaaatagtcccggtcaaaactaccggcaactaccggtcttagatttttggctatataaggagtcctcaagcatgttgtgaggcaccctttcatttagccatttttccaggtttcggaagagaggtgctctgaaacaagatttttgtaagcgcttctttctagattcaataaatttctatttttcatccttctctcttctcccttcaccgatcctgtgcggctctgccgccgcttcggtttctttgtttatgaaaacctgggttttgtaagccggtctccggtgtgaccttgatatctgttttcaaagtttatattttcatcaaatatactgcattcttacttcctatctgtccgttgatcttactccgctgacctctggtatcagagcctgatggggaagtaggaatagtgtccgtaagggcatatgttaactgaacttatggatctgaagcatgtacagtaattttaatttaaacagtatgtgtttgaacagtattttctggaagcacagcagtctgatattttagttgaatgatattgtagcagtaagtcccgtggatgagaaagcgcagtaaggctaaggtgtattgttcaaataaaatatggagacataatatactggtggctataggagtaatgttcaaactatattgtctgtgaaaaaaaaaaatcttctttttcatttattcagatccaagaagttctgtaacatatagccttatggaaagattcctatggaaccaaatgaaggcaaagatattagagaatgttttaattatgtctagattattgcgatccttttcccgtatctcttttcgctcaaattcctcctcttcatcttcttcaagaaacaccaatctcttaaatgatcaagataaccagacccaagaggtcgccccaaaacacaatctcttcga

SEQ ID NO: 11218 - DNA, 1098 bp, Glycine max; identical to SEQ ID NO: 11217
  Gm_smallRNAprecursor_4051

SEQ ID NO: 11219 - DNA, 1175 bp, Glycine max
  Gm_smallRNAprecursor_4052
agaagatcccttttaccaaaacgaagatgattgttttggtatctgtttagattaaatttaatttcggtcacaaaaccgtctgtttgtaattaatgtgtaattaatgctggacaatactacctgtcctgtagccattaaagtcccggtcaaaactacttgtcttgtaacaaacagtcaaatagtcccggtcaaaactaccggcaactaccggtcttagatttttggctatataaggagtcctcaagcatgttgtgaggcaccctttcatttagccatttttccaggtttcggaagagaggtgctctgaaacaagatttttgtaagcgcttctttctagattcaataaatttctatttttcatccttctctcttctcccttcaccgatcctgtgcggctctgccgccgcttcggtttctttgtttatgaaaacctgggttttgtaagccggtctccggtgtgaccttgatatctgttttcaaagtttatattttcatcaaatatactgcattcttacttcctatctgtccgttgatcttactccgctgacctctggtatcagagcctgatggggaagtaggaatagtgtccgtaagggcatatgttaactgaacttatggatctgaagcatgtacagtaattttaatttaaacagtatgtgtttgaacagtattttctggaagcacagcagtctgatattttagttgaatgatattgtagcagtaagtcccgtggatgagaaagcgcagtaaggctaaggtgtattgttcaaataaaatatggagacataatatactggtggctataggagtaatgttcaaactatattgtctgtgaaaaaaaaaaatcttctttttcatttattcagatccaagaagttctgtaacatatagccttatggaaagattcctatggaaccaaatgaaggcaaagatattagagaatgttttaattatgtctagattattgcgatccttttcccgtatctcttttcgctcaaattcctcctcttcatcttcttcaagaaacaccaatctcttaaatgatcaagataaccagacccaagaggtcgccccaaaacacaatctcttcgatgaggaagtccgattcgaagatattaatcaaaacatggatgactggaacattccagaaatccctcaggatcaactatacgttc

SEQ ID NO: 11220 - DNA, 1157 bp, Glycine max
  Gm_smallRNAprecursor_4053
atagtgtccgtaagggcatatgttaactgaacttatggatctgaagcatgtacagtaattttaatttaaacagtatgtgtttgaacagtattttctggaagcacagcagtctgatattttagttgaatgatattgtagcagtaagtcccgtggatgagaaagcgcagtaaggctaaggtgtattgttcaaataaaatatggagacataatatactggtggctataggagtaatgttcaaactatattgtctgtgaaaaaaaaaaatcttctttttcatttattcagatccaagaagttctgtaacatatagccttatggaaagattcctatggaaccaaatgaaggcaaagatattagagaatgttttaattatgtctagattattgcgatccttttcccgtatctcttttcgctcaaattcctcctcttcatcttcttcaagaaacaccaatctcttaaatgatcaagataaccagacccaagaggtcgccccaaaacacaatctcttcgatgaggaagtccgattcgaagatattaatcaaaacatggatgactggaacattccagaaatccctcaggatcaactatacgttcctgaaacaattaaagacaaacacaactttgattacataatcaaaacagtagaaaacaatattcctctaggacaagatataggggaagaatttcatctactttcaaaaaattcaatttatgaacatagccgtaaggatacaccttagccttactgccctttctcatccacgggacttactgctacagtatcattcaactaaaatatcagactactgtgcttccagaaaatactgttcaaacacatactgtttaaattaaaattactgtacatgcttcagatccataagttcagttaacatatgcccttacggacactattcctacttccgctgacctctggaagtaagaatgcagtatatttgatgaaaatataaactttgaaaacagatatcaaggtcacaccggagaccggcttacaaaacccaggttttcataaacaaagaaaccgaagcggcggcagagccgcacaggatcggtgaagggagaagagagaaggatgaaaaatagaaatttattgaatctagaaagaagcgcttacaaaaatcttgtttcagagcacctc

SEQ ID NO: 11221 - DNA, 1150 bp, Glycine max
  Gm_smallRNAprecursor_4054
gcagtaaggctaaggtgtattgttcaaataaaatatggagacataatatactggtggctataggagtaatgttcaaactatattgtctgtgaaaaaaaaaaatcttctttttcatttattcagatccaagaagttctgtaacatatagccttatggaaagattcctatggaaccaaatgaaggcaaagatattagagaatgttttaattatgtctagattattgcgatccttttcccgtatctcttttcgctcaaattcctcctcttcatcttcttcaagaaacaccaatctcttaaatgatcaagataaccagacccaagaggtcgccccaaaacacaatctcttcgatgaggaagtccgattcgaagatattaatcaaaacatggatgactggaacattccagaaatccctcaggatcaactatacgttcctgaaacaattaaagacaaacacaactttgattacataatcaaaacagtagaaaacaatattcctctaggacaagatataggggaagaatttcatctactttcaaaaaattcaatttatgaacatagccgtaaggatacaccttagccttactgccctttctcatccacgggacttactgctacagtatcattcaactaaaatatcagactactgtgcttccagaaaatactgttcaaacacatactgtttaaattaaaattactgtacatgcttcagatccataagttcagttaacatatgcccttacggacactattcctacttccgctgacctctggaagtaagaatgcagtatatttgatgaaaatataaactttgaaaacagatatcaaggtcacaccggagaccggcttacaaaacccaggttttcataaacaaagaaaccgaagcggcggcagagccgcacaggatcggtgaagggagaagagagaaggatgaaaaatagaaatttattgaatctagaaagaagcgcttacaaaaatcttgtttcagagcacctctcttccgaaacctggaaaaatggctaaatgaaagggtgcctcacaacatgcttgaggactccttatatagccaaaaatctaagaccggtagttgccggtagttttgaccgggactatttgactgtttgttacaagacaagtagttttgaccgggac

SEQ ID NO: 11222 - DNA, 1120 bp, Glycine max
  Gm_smallRNAprecursor_4055
acataatatactggtggctataggagtaatgttcaaactatattgtctgtgaaaaaaaaaaatcttctttttcatttattcagatccaagaagttctgtaacatatagccttatggaaagattcctatggaaccaaatgaaggcaaagatattagagaatgttttaattatgtctagattattgcgatccttttcccgtatctcttttcgctcaaattcctcctcttcatcttcttcaagaaacaccaatctcttaaatgatcaagataaccagacccaagaggtcgccccaaaacacaatctcttcgatgaggaagtccgattcgaagatattaatcaaaacatggatgactggaacattccagaaatccctcaggatcaactatacgttcctgaaacaattaaagacaaacacaactttgattacataatcaaaacagtagaaaacaatattcctctaggacaagatataggggaagaatttcatctactttcaaaaaattcaatttatgaacatagccgtaaggatacaccttagccttactgccctttctcatccacgggacttactgctacagtatcattcaactaaaatatcagactactgtgcttccagaaaatactgttcaaacacatactgtttaaattaaaattactgtacatgcttcagatccataagttcagttaacatatgcccttacggacactattcctacttccgctgacctctggaagtaagaatgcagtatatttgatgaaaatataaactttgaaaacagatatcaaggtcacaccggagaccggcttacaaaacccaggttttcataaacaaagaaaccgaagcggcggcagagccgcacaggatcggtgaagggagaagagagaaggatgaaaaatagaaatttattgaatctagaaagaagcgcttacaaaaatcttgtttcagagcacctctcttccgaaacctggaaaaatggctaaatgaaagggtgcctcacaacatgcttgaggactccttatatagccaaaaatctaagaccggtagttgccggtagttttgaccgggactatttgactgtttgttacaagacaagtagttttgaccgggactttaatggct

SEQ ID NO: 11223 - DNA, 1056 bp, Glycine max
  Gm_smallRNAprecursor_4056
gattcctatggaaccaaatgaaggcaaagatattagagaatgttttaattatgtctagattattgcgatccttttcccgtatctcttttcgctcaaattcctcctcttcatcttcttcaagaaacaccaatctcttaaatgatcaagataaccagacccaagaggtcgccccaaaacacaatctcttcgatgaggaagtccgattcgaagatattaatcaaaacatggatgactggaacattccagaaatccctcaggatcaactatacgttcctgaaacaattaaagacaaacacaactttgattacataatcaaaacagtagaaaacaatattcctctaggacaagatataggggaagaatttcatctactttcaaaaaattcaatttatgaacatagccgtaaggatacaccttagccttactgccctttctcatccacgggacttactgctacagtatcattcaactaaaatatcagactactgtgcttccagaaaatactgttcaaacacatactgtttaaattaaaattactgtacatgcttcagatccataagttcagttaacatatgcccttacggacactattcctacttccgctgacctctggaagtaagaatgcagtatatttgatgaaaatataaactttgaaaacagatatcaaggtcacaccggagaccggcttacaaaacccaggttttcataaacaaagaaaccgaagcggcggcagagccgcacaggatcggtgaagggagaagagagaaggatgaaaaatagaaatttattgaatctagaaagaagcgcttacaaaaatcttgtttcagagcacctctcttccgaaacctggaaaaatggctaaatgaaagggtgcctcacaacatgcttgaggactccttatatagccaaaaatctaagaccggtagttgccggtagttttgaccgggactatttgactgtttgttacaagacaagtagttttgaccgggactttaatggctacaggacaggtagtattgtccagcattaattacacattaattacaaacagacggt

SEQ ID NO: 11224 - DNA, 1049 bp, Glycine max
  Gm_smallRNAprecursor_4057
cctatggaaccaaatgaaggcaaagatattagagaatgttttaattatgtctagattattgcgatccttttcccgtatctcttttcgctcaaattcctcctcttcatcttcttcaagaaacaccaatctcttaaatgatcaagataaccagacccaagaggtcgccccaaaacacaatctcttcgatgaggaagtccgattcgaagatattaatcaaaacatggatgactggaacattccagaaatccctcaggatcaactatacgttcctgaaacaattaaagacaaacacaactttgattacataatcaaaacagtagaaaacaatattcctctaggacaagatataggggaagaatttcatctactttcaaaaaattcaatttatgaacatagccgtaaggatacaccttagccttactgccctttctcatccacgggacttactgctacagtatcattcaactaaaatatcagactactgtgcttccagaaaatactgttcaaacacatactgtttaaattaaaattactgtacatgcttcagatccataagttcagttaacatatgcccttacggacactattcctacttccgctgacctctggaagtaagaatgcagtatatttgatgaaaatataaactttgaaaacagatatcaaggtcacaccggagaccggcttacaaaacccaggttttcataaacaaagaaaccgaagcggcggcagagccgcacaggatcggtgaagggagaagagagaaggatgaaaaatagaaatttattgaatctagaaagaagcgcttacaaaaatcttgtttcagagcacctctcttccgaaacctggaaaaatggctaaatgaaagggtgcctcacaacatgcttgaggactccttatatagccaaaaatctaagaccggtagttgccggtagttttgaccgggactatttgactgtttgttacaagacaagtagttttgaccgggactttaatggctacaggacaggtagtattgtccagcattaattacacattaattacaaacagac

SEQ ID NO: 11225 - DNA, 1052 bp, Glycine max
  Gm_smallRNAprecursor_4058
cctatggaaccaaatgaaggcaaagatattagagaatgttttaattatgtctagattattgcgatccttttcccgtatctcttttcgctcaaattcctcctcttcatcttcttcaagaaacaccaatctcttaaatgatcaagataaccagacccaagaggtcgccccaaaacacaatctcttcgatgaggaagtccgattcgaagatattaatcaaaacatggatgactggaacattccagaaatccctcaggatcaactatacgttcctgaaacaattaaagacaaacacaactttgattacataatcaaaacagtagaaaacaatattcctctaggacaagatataggggaagaatttcatctactttcaaaaaattcaatttatgaacatagccgtaaggatacaccttagccttactgccctttctcatccacgggacttactgctacagtatcattcaactaaaatatcagactactgtgcttccagaaaatactgttcaaacacatactgtttaaattaaaattactgtacatgcttcagatccataagttcagttaacatatgcccttacggacactattcctacttccgctgacctctggaagtaagaatgcagtatatttgatgaaaatataaactttgaaaacagatatcaaggtcacaccggagaccggcttacaaaacccaggttttcataaacaaagaaaccgaagcggcggcagagccgcacaggatcggtgaagggagaagagagaaggatgaaaaatagaaatttattgaatctagaaagaagcgcttacaaaaatcttgtttcagagcacctctcttccgaaacctggaaaaatggctaaatgaaagggtgcctcacaacatgcttgaggactccttatatagccaaaaatctaagaccggtagttgccggtagttttgaccgggactatttgactgtttgttacaagacaagtagttttgaccgggactttaatggctacaggacaggtagtattgtccagcattaattacacattaattacaaacagacggt

SEQ ID NO: 11226 - DNA, 1064 bp, Glycine max
  Gm_smallRNAprecursor_4059
cctatggaaccaaatgaaggcaaagatattagagaatgttttaattatgtctagattattgcgatccttttcccgtatctcttttcgctcaaattcctcctcttcatcttcttcaagaaacaccaatctcttaaatgatcaagataaccagacccaagaggtcgccccaaaacacaatctcttcgatgaggaagtccgattcgaagatattaatcaaaacatggatgactggaacattccagaaatccctcaggatcaactatacgttcctgaaacaattaaagacaaacacaactttgattacataatcaaaacagtagaaaacaatattcctctaggacaagatataggggaagaatttcatctactttcaaaaaattcaatttatgaacatagccgtaaggatacaccttagccttactgccctttctcatccacgggacttactgctacagtatcattcaactaaaatatcagactactgtgcttccagaaaatactgttcaaacacatactgtttaaattaaaattactgtacatgcttcagatccataagttcagttaacatatgcccttacggacactattcctacttccgctgacctctggaagtaagaatgcagtatatttgatgaaaatataaactttgaaaacagatatcaaggtcacaccggagaccggcttacaaaacccaggttttcataaacaaagaaaccgaagcggcggcagagccgcacaggatcggtgaagggagaagagagaaggatgaaaaatagaaatttattgaatctagaaagaagcgcttacaaaaatcttgtttcagagcacctctcttccgaaacctggaaaaatggctaaatgaaagggtgcctcacaacatgcttgaggactccttatatagccaaaaatctaagaccggtagttgccggtagttttgaccgggactatttgactgtttgttacaagacaagtagttttgaccgggactttaatggctacaggacaggtagtattgtccagcattaattacacattaattacaaacagacggttttgtgaccgaa

SEQ ID NO: 11227 - DNA, 1046 bp, Glycine max
  Gm_smallRNAprecursor_4060
acttccgctgacctctggaagtaagaatgcagtatatttgatgaaaatataaactttgaaaacagatatcaaggtcacaccggagaccggcttacaaaacccaggttttcataaacaaagaaaccgaagcggcggcagagccgcacaggatcggtgaagggagaagagagaaggatgaaaaatagaaatttattgaatctagaaagaagcgcttacaaaaatcttgtttcagagcacctctcttccgaaacctggaaaaatggctaaatgaaagggtgcctcacaacatgcttgaggactccttatatagccaaaaatctaagaccggtagttgccggtagttttgaccgggactatttgactgtttgttacaagacaagtagttttgaccgggactttaatggctacaggacaggtagtattgtccagcattaattacacattaattacaaacagacggttttgtgaccgaaattaaatttaatctaaacagataccaaaacaatcatcttcgttttggtaaaagggatcttcttcgtcttcttcagcagaacttgtttcttccttctttgaggatgaagcttcttcttcctgttgtaacatttgtagaacttccttcagatttttagctaagacctcctttgatgtcgatcctgctaaaaatgctgccagatgagacttttggttcaaaaacacagaagtctctggatcagctgctttgaggaattctggatgggattggaaccatagttttacttgttctgcatccgctttggatgagtcaaattgtgtccaccattttacaaatgcgtgcctttgtagtgatggatattggtttgtcttctcagtcttgctgtaacgatattgccatgagaatatccatgacagtgcaaagcttgaaaagtatttaagatctgctggaattcgtgattcctgcgaattgtattgtttcttaaattgggaaaatccttgttggaccgtttctgggaatatctttgggattggtccaaagaagtcccaccattgcaaaaaccaattgggaaaat

SEQ ID NO: 11228 - DNA, 1173 bp, Glycine max
  Gm_smallRNAprecursor_4061
gaatgcagtatatttgatgaaaatataaactttgaaaacagatatcaaggtcacaccggagaccggcttacaaaacccaggttttcataaacaaagaaaccgaagcggcggcagagccgcacaggatcggtgaagggagaagagagaaggatgaaaaatagaaatttattgaatctagaaagaagcgcttacaaaaatcttgtttcagagcacctctcttccgaaacctggaaaaatggctaaatgaaagggtgcctcacaacatgcttgaggactccttatatagccaaaaatctaagaccggtagttgccggtagttttgaccgggactatttgactgtttgttacaagacaagtagttttgaccgggactttaatggctacaggacaggtagtattgtccagcattaattacacattaattacaaacagacggttttgtgaccgaaattaaatttaatctaaacagataccaaaacaatcatcttcgttttggtaaaagggatcttcttcgtcttcttcagcagaacttgtttcttccttctttgaggatgaagcttcttcttcctgttgtaacatttgtagaacttccttcagatttttagctaagacctcctttgatgtcgatcctgctaaaaatgctgccagatgagacttttggttcaaaaacacagaagtctctggatcagctgctttgaggaattctggatgggattggaaccatagttttacttgttctgcatccgctttggatgagtcaaattgtgtccaccattttacaaatgcgtgcctttgtagtgatggatattggtttgtcttctcagtcttgctgtaacgatattgccatgagaatatccatgacagtgcaaagcttgaaaagtatttaagatctgctggaattcgtgattcctgcgaattgtattgtttcttaaattgggaaaatccttgttggaccgtttctgggaatatctttgggattggtccaaagaagtcccaccattgcaaaaaccaattgggaaaattgtaaattgtgttggtcttgaaatatatcagccatgaatgtttgaagcgggtattttggtgccaaaacaccttagtccaagcatcaacgtaatcccaataggtataacctactggatcaaatggaactgaaaatctctttcctttgttcaa

SEQ ID NO: 11229 - DNA, 1158 bp, Glycine max
  Gm_smallRNAprecursor_4062
gatgaaaatataaactttgaaaacagatatcaaggtcacaccggagaccggcttacaaaacccaggttttcataaacaaagaaaccgaagcggcggcagagccgcacaggatcggtgaagggagaagagagaaggatgaaaaatagaaatttattgaatctagaaagaagcgcttacaaaaatcttgtttcagagcacctctcttccgaaacctggaaaaatggctaaatgaaagggtgcctcacaacatgcttgaggactccttatatagccaaaaatctaagaccggtagttgccggtagttttgaccgggactatttgactgtttgttacaagacaagtagttttgaccgggactttaatggctacaggacaggtagtattgtccagcattaattacacattaattacaaacagacggttttgtgaccgaaattaaatttaatctaaacagataccaaaacaatcatcttcgttttggtaaaagggatcttcttcgtcttcttcagcagaacttgtttcttccttctttgaggatgaagcttcttcttcctgttgtaacatttgtagaacttccttcagatttttagctaagacctcctttgatgtcgatcctgctaaaaatgctgccagatgagacttttggttcaaaaacacagaagtctctggatcagctgctttgaggaattctggatgggattggaaccatagttttacttgttctgcatccgctttggatgagtcaaattgtgtccaccattttacaaatgcgtgcctttgtagtgatggatattggtttgtcttctcagtcttgctgtaacgatattgccatgagaatatccatgacagtgcaaagcttgaaaagtatttaagatctgctggaattcgtgattcctgcgaattgtattgtttcttaaattgggaaaatccttgttggaccgtttctgggaatatctttgggattggtccaaagaagtcccaccattgcaaaaaccaattgggaaaattgtaaattgtgttggtcttgaaatatatcagccatgaatgtttgaagcgggtattttggtgccaaaacaccttagtccaagcatcaacgtaatcccaataggtataacctactggatcaaatggaactgaaaatctctttcctttgttcaa

SEQ ID NO: 11230 - DNA, 1182 bp, Glycine max
  Gm_smallRNAprecursor_4063
tgtttcagagcacctctcttccgaaacctggaaaaatggctaaatgaaagggtgcctcacaacatgcttgaggactccttatatagccaaaaatctaagaccggtagttgccggtagttttgaccgggactatttgactgtttgttacaagacaagtagttttgaccgggactttaatggctacaggacaggtagtattgtccagcattaattacacattaattacaaacagacggttttgtgaccgaaattaaatttaatctaaacagataccaaaacaatcatcttcgttttggtaaaagggatcttcttcgtcttcttcagcagaacttgtttcttccttctttgaggatgaagcttcttcttcctgttgtaacatttgtagaacttccttcagatttttagctaagacctcctttgatgtcgatcctgctaaaaatgctgccagatgagacttttggttcaaaaacacagaagtctctggatcagctgctttgaggaattctggatgggattggaaccatagttttacttgttctgcatccgctttggatgagtcaaattgtgtccaccattttacaaatgcgtgcctttgtagtgatggatattggtttgtcttctcagtcttgctgtaacgatattgccatgagaatatccatgacagtgcaaagcttgaaaagtatttaagatctgctggaattcgtgattcctgcgaattgtattgtttcttaaattgggaaaatccttgttggaccgtttctgggaatatctttgggattggtccaaagaagtcccaccattgcaaaaaccaattgggaaaattgtaaattgtgttggtcttgaaatatatcagccatgaatgtttgaagcgggtattttggtgccaaaacaccttagtccaagcatcaacgtaatcccaataggtataacctactggatcaaatggaactgaaaatctctttcctttgttcaagtccgaaccaaagtgtcttggttgaagaacttttagtatttggatggttgagtgggtgtttaaggtttggtcttttggatctttgaaatgtttgatagatactgagttcgaatctaccaaaatcaattcataaaaagttcttgtcttcaggatagtggttggtttgtagtgaaatcctggtgggaaagccttggccgtcgccttgaagg

SEQ ID NO: 11231 - DNA, 1031 bp, Glycine max
  Gm_smallRNAprecursor_4064
acaagtagttttgaccgggactttaatggctacaggacaggtagtattgtccagcattaattacacattaattacaaacagacggttttgtgaccgaaattaaatttaatctaaacagataccaaaacaatcatcttcgttttggtaaaagggatcttcttcgtcttcttcagcagaacttgtttcttccttctttgaggatgaagcttcttcttcctgttgtaacatttgtagaacttccttcagatttttagctaagacctcctttgatgtcgatcctgctaaaaatgctgccagatgagacttttggttcaaaaacacagaagtctctggatcagctgctttgaggaattctggatgggattggaaccatagttttacttgttctgcatccgctttggatgagtcaaattgtgtccaccattttacaaatgcgtgcctttgtagtgatggatattggtttgtcttctcagtcttgctgtaacgatattgccatgagaatatccatgacagtgcaaagcttgaaaagtatttaagatctgctggaattcgtgattcctgcgaattgtattgtttcttaaattgggaaaatccttgttggaccgtttctgggaatatctttgggattggtccaaagaagtcccaccattgcaaaaaccaattgggaaaattgtaaattgtgttggtcttgaaatatatcagccatgaatgtttgaagcgggtattttggtgccaaaacaccttagtccaagcatcaacgtaatcccaataggtataacctactggatcaaatggaactgaaaatctctttcctttgttcaagtccgaaccaaagtgtcttggttgaagaacttttagtatttggatggttgagtgggtgtttaaggtttggtcttttggatctttgaaatgtttgatagatactgagttcgaatctaccaaaatcaattcataaaaagttcttgtcttcaggatagtggttggtttgtagtgaaatcctggtgggaaagccttggccgtcgccttgaagg

SEQ ID NO: 11232 - DNA, 1031 bp, Glycine max; identical to SEQ ID NO: 11231
  Gm_smallRNAprecursor_4065

SEQ ID NO: 11233 - DNA, 1114 bp, Glycine max
  Gm_smallRNAprecursor_4066
ggactttaatggctacaggacaggtagtattgtccagcattaattacacattaattacaaacagacggttttgtgaccgaaattaaatttaatctaaacagataccaaaacaatcatcttcgttttggtaaaagggatcttcttcgtcttcttcagcagaacttgtttcttccttctttgaggatgaagcttcttcttcctgttgtaacatttgtagaacttccttcagatttttagctaagacctcctttgatgtcgatcctgctaaaaatgctgccagatgagacttttggttcaaaaacacagaagtctctggatcagctgctttgaggaattctggatgggattggaaccatagttttacttgttctgcatccgctttggatgagtcaaattgtgtccaccattttacaaatgcgtgcctttgtagtgatggatattggtttgtcttctcagtcttgctgtaacgatattgccatgagaatatccatgacagtgcaaagcttgaaaagtatttaagatctgctggaattcgtgattcctgcgaattgtattgtttcttaaattgggaaaatccttgttggaccgtttctgggaatatctttgggattggtccaaagaagtcccaccattgcaaaaaccaattgggaaaattgtaaattgtgttggtcttgaaatatatcagccatgaatgtttgaagcgggtattttggtgccaaaacaccttagtccaagcatcaacgtaatcccaataggtataacctactggatcaaatggaactgaaaatctctttcctttgttcaagtccgaaccaaagtgtcttggttgaagaacttttagtatttggatggttgagtgggtgtttaaggtttggtcttttggatctttgaaatgtttgatagatactgagttcgaatctaccaaaatcaattcataaaaagttcttgtcttcaggatagtggttggtttgtagtgaaatcctggtgggaaagccttggccgtcgccttgaagggatttttgtcccaaaattcaggttccatctgcaaaacagttaacaatttatttttataaatataattgttagtttgtttggtaggtggtgtttgagcttt

SEQ ID NO: 11234 - DNA, 1146 bp, Glycine max
  Gm_smallRNAprecursor_4067
tacaggacaggtagtattgtccagcattaattacacattaattacaaacagacggttttgtgaccgaaattaaatttaatctaaacagataccaaaacaatcatcttcgttttggtaaaagggatcttcttcgtcttcttcagcagaacttgtttcttccttctttgaggatgaagcttcttcttcctgttgtaacatttgtagaacttccttcagatttttagctaagacctcctttgatgtcgatcctgctaaaaatgctgccagatgagacttttggttcaaaaacacagaagtctctggatcagctgctttgaggaattctggatgggattggaaccatagttttacttgttctgcatccgctttggatgagtcaaattgtgtccaccattttacaaatgcgtgcctttgtagtgatggatattggtttgtcttctcagtcttgctgtaacgatattgccatgagaatatccatgacagtgcaaagcttgaaaagtatttaagatctgctggaattcgtgattcctgcgaattgtattgtttcttaaattgggaaaatccttgttggaccgtttctgggaatatctttgggattggtccaaagaagtcccaccattgcaaaaaccaattgggaaaattgtaaattgtgttggtcttgaaatatatcagccatgaatgtttgaagcgggtattttggtgccaaaacaccttagtccaagcatcaacgtaatcccaataggtataacctactggatcaaatggaactgaaaatctctttcctttgttcaagtccgaaccaaagtgtcttggttgaagaacttttagtatttggatggttgagtgggtgtttaaggtttggtcttttggatctttgaaatgtttgatagatactgagttcgaatctaccaaaatcaattcataaaaagttcttgtcttcaggatagtggttggtttgtagtgaaatcctggtgggaaagccttggccgtcgccttgaagggatttttgtcccaaaattcaggttccatctgcaaaacagttaacaatttatttttataaatataattgttagtttgtttggtaggtggtgtttgagctttggctaaaggtagttttcctttagtattggtggctgttttggtcat

SEQ ID NO: 11235 - DNA, 1146 bp, Glycine max; identical to SEQ ID NO: 11234
  Gm_smallRNAprecursor_4068

SEQ ID NO: 11236 - DNA, 1147 bp, Glycine max
  Gm_smallRNAprecursor_4069
tacaggacaggtagtattgtccagcattaattacacattaattacaaacagacggttttgtgaccgaaattaaatttaatctaaacagataccaaaacaatcatcttcgttttggtaaaagggatcttcttcgtcttcttcagcagaacttgtttcttccttctttgaggatgaagcttcttcttcctgttgtaacatttgtagaacttccttcagatttttagctaagacctcctttgatgtcgatcctgctaaaaatgctgccagatgagacttttggttcaaaaacacagaagtctctggatcagctgctttgaggaattctggatgggattggaaccatagttttacttgttctgcatccgctttggatgagtcaaattgtgtccaccattttacaaatgcgtgcctttgtagtgatggatattggtttgtcttctcagtcttgctgtaacgatattgccatgagaatatccatgacagtgcaaagcttgaaaagtatttaagatctgctggaattcgtgattcctgcgaattgtattgtttcttaaattgggaaaatccttgttggaccgtttctgggaatatctttgggattggtccaaagaagtcccaccattgcaaaaaccaattgggaaaattgtaaattgtgttggtcttgaaatatatcagccatgaatgtttgaagcgggtattttggtgccaaaacaccttagtccaagcatcaacgtaatcccaataggtataacctactggatcaaatggaactgaaaatctctttcctttgttcaagtccgaaccaaagtgtcttggttgaagaacttttagtatttggatggttgagtgggtgtttaaggtttggtcttttggatctttgaaatgtttgatagatactgagttcgaatctaccaaaatcaattcataaaaagttcttgtcttcaggatagtggttggtttgtagtgaaatcctggtgggaaagccttggccgtcgccttgaagggatttttgtcccaaaattcaggttccatctgcaaaacagttaacaatttatttttataaatataattgttagtttgtttggtaggtggtgtttgagctttggctaaaggtagttttcctttagtattggtggctgttttggtcatt

SEQ ID NO: 11237 - DNA, 1147 bp, Glycine max; identical to SEQ ID NO: 11236
  Gm_smallRNAprecursor_4070

SEQ ID NO: 11238 - DNA, 1246 bp, Glycine max
  Gm_smallRNAprecursor_4071
tacaggacaggtagtattgtccagcattaattacacattaattacaaacagacggttttgtgaccgaaattaaatttaatctaaacagataccaaaacaatcatcttcgttttggtaaaagggatcttcttcgtcttcttcagcagaacttgtttcttccttctttgaggatgaagcttcttcttcctgttgtaacatttgtagaacttccttcagatttttagctaagacctcctttgatgtcgatcctgctaaaaatgctgccagatgagacttttggttcaaaaacacagaagtctctggatcagctgctttgaggaattctggatgggattggaaccatagttttacttgttctgcatccgctttggatgagtcaaattgtgtccaccattttacaaatgcgtgcctttgtagtgatggatattggtttgtcttctcagtcttgctgtaacgatattgccatgagaatatccatgacagtgcaaagcttgaaaagtatttaagatctgctggaattcgtgattcctgcgaattgtattgtttcttaaattgggaaaatccttgttggaccgtttctgggaatatctttgggattggtccaaagaagtcccaccattgcaaaaaccaattgggaaaattgtaaattgtgttggtcttgaaatatatcagccatgaatgtttgaagcgggtattttggtgccaaaacaccttagtccaagcatcaacgtaatcccaataggtataacctactggatcaaatggaactgaaaatctctttcctttgttcaagtccgaaccaaagtgtcttggttgaagaacttttagtatttggatggttgagtgggtgtttaaggtttggtcttttggatctttgaaatgtttgatagatactgagttcgaatctaccaaaatcaattcataaaaagttcttgtcttcaggatagtggttggtttgtagtgaaatcctggtgggaaagccttggccgtcgccttgaagggatttttgtcccaaaattcaggttccatctgcaaaacagttaacaatttatttttataaatataattgttagtttgtttggtaggtggtgtttgagctttggctaaaggtagttttcctttagtattggtggctgttttggtcattgacgcattttggatcattgtttgtaaatttgattcagattcatcatcagattctgaggcaatgtctgcccaagattttttgattatttttggaaatttg

SEQ ID NO: 11239 - DNA, 1246 bp, Glycine max; identical to SEQ ID NO: 11238
  Gm_smallRNAprecursor_4072

SEQ ID NO: 11240 - DNA, 1138 bp, Glycine max
  Gm_smallRNAprecursor_4073
tcatcttcgttttggtaaaagggatcttcttcgtcttcttcagcagaacttgtttcttccttctttgaggatgaagcttcttcttcctgttgtaacatttgtagaacttccttcagatttttagctaagacctcctttgatgtcgatcctgctaaaaatgctgccagatgagacttttggttcaaaaacacagaagtctctggatcagctgctttgaggaattctggatgggattggaaccatagttttacttgttctgcatccgctttggatgagtcaaattgtgtccaccattttacaaatgcgtgcctttgtagtgatggatattggtttgtcttctcagtcttgctgtaacgatattgccatgagaatatccatgacagtgcaaagcttgaaaagtatttaagatctgctggaattcgtgattcctgcgaattgtattgtttcttaaattgggaaaatccttgttggaccgtttctgggaatatctttgggattggtccaaagaagtcccaccattgcaaaaaccaattgggaaaattgtaaattgtgttggtcttgaaatatatcagccatgaatgtttgaagcgggtattttggtgccaaaacaccttagtccaagcatcaacgtaatcccaataggtataacctactggatcaaatggaactgaaaatctctttcctttgttcaagtccgaaccaaagtgtcttggttgaagaacttttagtatttggatggttgagtgggtgtttaaggtttggtcttttggatctttgaaatgtttgatagatactgagttcgaatctaccaaaatcaattcataaaaagttcttgtcttcaggatagtggttggtttgtagtgaaatcctggtgggaaagccttggccgtcgccttgaagggatttttgtcccaaaattcaggttccatctgcaaaacagttaacaatttatttttataaatataattgttagtttgtttggtaggtggtgtttgagctttggctaaaggtagttttcctttagtattggtggctgttttggtcattgacgcattttggatcattgtttgtaaatttgattcagattcatcatcagattctgaggcaatgtctgcccaagattttttgattatttttg

SEQ ID NO: 11241 - DNA, 1157 bp, Glycine max
  Gm_smallRNAprecursor_4074
ggatgaagcttcttcttcctgttgtaacatttgtagaacttccttcagatttttagctaagacctcctttgatgtcgatcctgctaaaaatgctgccagatgagacttttggttcaaaaacacagaagtctctggatcagctgctttgaggaattctggatgggattggaaccatagttttacttgttctgcatccgctttggatgagtcaaattgtgtccaccattttacaaatgcgtgcctttgtagtgatggatattggtttgtcttctcagtcttgctgtaacgatattgccatgagaatatccatgacagtgcaaagcttgaaaagtatttaagatctgctggaattcgtgattcctgcgaattgtattgtttcttaaattgggaaaatccttgttggaccgtttctgggaatatctttgggattggtccaaagaagtcccaccattgcaaaaaccaattgggaaaattgtaaattgtgttggtcttgaaatatatcagccatgaatgtttgaagcgggtattttggtgccaaaacaccttagtccaagcatcaacgtaatcccaataggtataacctactggatcaaatggaactgaaaatctctttcctttgttcaagtccgaaccaaagtgtcttggttgaagaacttttagtatttggatggttgagtgggtgtttaaggtttggtcttttggatctttgaaatgtttgatagatactgagttcgaatctaccaaaatcaattcataaaaagttcttgtcttcaggatagtggttggtttgtagtgaaatcctggtgggaaagccttggccgtcgccttgaagggatttttgtcccaaaattcaggttccatctgcaaaacagttaacaatttatttttataaatataattgttagtttgtttggtaggtggtgtttgagctttggctaaaggtagttttcctttagtattggtggctgttttggtcattgacgcattttggatcattgtttgtaaatttgattcagattcatcatcagattctgaggcaatgtctgcccaagattttttgattatttttggaaatttggtcagacccatgtcttgaagggcctgaagggtttcaattggccatgcatagtcggccgatgtttgtttggcggttgccg

SEQ ID NO: 11242 - DNA, 1124 bp, Glycine max
  Gm_smallRNAprecursor_4075
ccttcagatttttagctaagacctcctttgatgtcgatcctgctaaaaatgctgccagatgagacttttggttcaaaaacacagaagtctctggatcagctgctttgaggaattctggatgggattggaaccatagttttacttgttctgcatccgctttggatgagtcaaattgtgtccaccattttacaaatgcgtgcctttgtagtgatggatattggtttgtcttctcagtcttgctgtaacgatattgccatgagaatatccatgacagtgcaaagcttgaaaagtatttaagatctgctggaattcgtgattcctgcgaattgtattgtttcttaaattgggaaaatccttgttggaccgtttctgggaatatctttgggattggtccaaagaagtcccaccattgcaaaaaccaattgggaaaattgtaaattgtgttggtcttgaaatatatcagccatgaatgtttgaagcgggtattttggtgccaaaacaccttagtccaagcatcaacgtaatcccaataggtataacctactggatcaaatggaactgaaaatctctttcctttgttcaagtccgaaccaaagtgtcttggttgaagaacttttagtatttggatggttgagtgggtgtttaaggtttggtcttttggatctttgaaatgtttgatagatactgagttcgaatctaccaaaatcaattcataaaaagttcttgtcttcaggatagtggttggtttgtagtgaaatcctggtgggaaagccttggccgtcgccttgaagggatttttgtcccaaaattcaggttccatctgcaaaacagttaacaatttatttttataaatataattgttagtttgtttggtaggtggtgtttgagctttggctaaaggtagttttcctttagtattggtggctgttttggtcattgacgcattttggatcattgtttgtaaatttgattcagattcatcatcagattctgaggcaatgtctgcccaagattttttgattatttttggaaatttggtcagacccatgtcttgaagggcctgaagggtttcaattggccatgcatagtcggccgatgtttgtttggcggttgccgatttggga

SEQ ID NO: 11243 - DNA, 1130 bp, Glycine max
  Gm_smallRNAprecursor_4076
ccttcagatttttagctaagacctcctttgatgtcgatcctgctaaaaatgctgccagatgagacttttggttcaaaaacacagaagtctctggatcagctgctttgaggaattctggatgggattggaaccatagttttacttgttctgcatccgctttggatgagtcaaattgtgtccaccattttacaaatgcgtgcctttgtagtgatggatattggtttgtcttctcagtcttgctgtaacgatattgccatgagaatatccatgacagtgcaaagcttgaaaagtatttaagatctgctggaattcgtgattcctgcgaattgtattgtttcttaaattgggaaaatccttgttggaccgtttctgggaatatctttgggattggtccaaagaagtcccaccattgcaaaaaccaattgggaaaattgtaaattgtgttggtcttgaaatatatcagccatgaatgtttgaagcgggtattttggtgccaaaacaccttagtccaagcatcaacgtaatcccaataggtataacctactggatcaaatggaactgaaaatctctttcctttgttcaagtccgaaccaaagtgtcttggttgaagaacttttagtatttggatggttgagtgggtgtttaaggtttggtcttttggatctttgaaatgtttgatagatactgagttcgaatctaccaaaatcaattcataaaaagttcttgtcttcaggatagtggttggtttgtagtgaaatcctggtgggaaagccttggccgtcgccttgaagggatttttgtcccaaaattcaggttccatctgcaaaacagttaacaatttatttttataaatataattgttagtttgtttggtaggtggtgtttgagctttggctaaaggtagttttcctttagtattggtggctgttttggtcattgacgcattttggatcattgtttgtaaatttgattcagattcatcatcagattctgaggcaatgtctgcccaagattttttgattatttttggaaatttggtcagacccatgtcttgaagggcctgaagggtttcaattggccatgcatagtcggccgatgtttgtttggcggttgccgatttgggagattcc

SEQ ID NO: 11244 - DNA, 1077 bp, Glycine max
  Gm_smallRNAprecursor_4077
tgatgtcgatcctgctaaaaatgctgccagatgagacttttggttcaaaaacacagaagtctctggatcagctgctttgaggaattctggatgggattggaaccatagttttacttgttctgcatccgctttggatgagtcaaattgtgtccaccattttacaaatgcgtgcctttgtagtgatggatattggtttgtcttctcagtcttgctgtaacgatattgccatgagaatatccatgacagtgcaaagcttgaaaagtatttaagatctgctggaattcgtgattcctgcgaattgtattgtttcttaaattgggaaaatccttgttggaccgtttctgggaatatctttgggattggtccaaagaagtcccaccattgcaaaaaccaattgggaaaattgtaaattgtgttggtcttgaaatatatcagccatgaatgtttgaagcgggtattttggtgccaaaacaccttagtccaagcatcaacgtaatcccaataggtataacctactggatcaaatggaactgaaaatctctttcctttgttcaagtccgaaccaaagtgtcttggttgaagaacttttagtatttggatggttgagtgggtgtttaaggtttggtcttttggatctttgaaatgtttgatagatactgagttcgaatctaccaaaatcaattcataaaaagttcttgtcttcaggatagtggttggtttgtagtgaaatcctggtgggaaagccttggccgtcgccttgaagggatttttgtcccaaaattcaggttccatctgcaaaacagttaacaatttatttttataaatataattgttagtttgtttggtaggtggtgtttgagctttggctaaaggtagttttcctttagtattggtggctgttttggtcattgacgcattttggatcattgtttgtaaatttgattcagattcatcatcagattctgaggcaatgtctgcccaagattttttgattatttttggaaatttggtcagacccatgtcttgaagggcctgaagggtttcaattggccatgcatagtcggccgatgtttgttt

SEQ ID NO: 11245 - DNA, 1076 bp, Glycine max
  Gm_smallRNAprecursor_4078
ttgaggaattctggatgggattggaaccatagttttacttgttctgcatccgctttggatgagtcaaattgtgtccaccattttacaaatgcgtgcctttgtagtgatggatattggtttgtcttctcagtcttgctgtaacgatattgccatgagaatatccatgacagtgcaaagcttgaaaagtatttaagatctgctggaattcgtgattcctgcgaattgtattgtttcttaaattgggaaaatccttgttggaccgtttctgggaatatctttgggattggtccaaagaagtcccaccattgcaaaaaccaattgggaaaattgtaaattgtgttggtcttgaaatatatcagccatgaatgtttgaagcgggtattttggtgccaaaacaccttagtccaagcatcaacgtaatcccaataggtataacctactggatcaaatggaactgaaaatctctttcctttgttcaagtccgaaccaaagtgtcttggttgaagaacttttagtatttggatggttgagtgggtgtttaaggtttggtcttttggatctttgaaatgtttgatagatactgagttcgaatctaccaaaatcaattcataaaaagttcttgtcttcaggatagtggttggtttgtagtgaaatcctggtgggaaagccttggccgtcgccttgaagggatttttgtcccaaaattcaggttccatctgcaaaacagttaacaatttatttttataaatataattgttagtttgtttggtaggtggtgtttgagctttggctaaaggtagttttcctttagtattggtggctgttttggtcattgacgcattttggatcattgtttgtaaatttgattcagattcatcatcagattctgaggcaatgtctgcccaagattttttgattatttttggaaatttggtcagacccatgtcttgaagggcctgaagggtttcaattggccatgcatagtcggccgatgtttgtttggcggttgccgatttgggagattcctgagtggatggctcaggtttgattgaggcaatctgggttgatgacccttc

SEQ ID NO: 11246 - DNA, 1069 bp, Glycine max
  Gm_smallRNAprecursor_4079
attggaaccatagttttacttgttctgcatccgctttggatgagtcaaattgtgtccaccattttacaaatgcgtgcctttgtagtgatggatattggtttgtcttctcagtcttgctgtaacgatattgccatgagaatatccatgacagtgcaaagcttgaaaagtatttaagatctgctggaattcgtgattcctgcgaattgtattgtttcttaaattgggaaaatccttgttggaccgtttctgggaatatctttgggattggtccaaagaagtcccaccattgcaaaaaccaattgggaaaattgtaaattgtgttggtcttgaaatatatcagccatgaatgtttgaagcgggtattttggtgccaaaacaccttagtccaagcatcaacgtaatcccaataggtataacctactggatcaaatggaactgaaaatctctttcctttgttcaagtccgaaccaaagtgtcttggttgaagaacttttagtatttggatggttgagtgggtgtttaaggtttggtcttttggatctttgaaatgtttgatagatactgagttcgaatctaccaaaatcaattcataaaaagttcttgtcttcaggatagtggttggtttgtagtgaaatcctggtgggaaagccttggccgtcgccttgaagggatttttgtcccaaaattcaggttccatctgcaaaacagttaacaatttatttttataaatataattgttagtttgtttggtaggtggtgtttgagctttggctaaaggtagttttcctttagtattggtggctgttttggtcattgacgcattttggatcattgtttgtaaatttgattcagattcatcatcagattctgaggcaatgtctgcccaagattttttgattatttttggaaatttggtcagacccatgtcttgaagggcctgaagggtttcaattggccatgcatagtcggccgatgtttgtttggcggttgccgatttgggagattcctgagtggatggctcaggtttgattgaggcaatctgggttgatgacccttctaaattggtttt

SEQ ID NO: 11247 - DNA, 1174 bp, Glycine max
  Gm_smallRNAprecursor_4080
cgggtattttggtgccaaaacaccttagtccaagcatcaacgtaatcccaataggtataacctactggatcaaatggaactgaaaatctctttcctttgttcaagtccgaaccaaagtgtcttggttgaagaacttttagtatttggatggttgagtgggtgtttaaggtttggtcttttggatctttgaaatgtttgatagatactgagttcgaatctaccaaaatcaattcataaaaagttcttgtcttcaggatagtggttggtttgtagtgaaatcctggtgggaaagccttggccgtcgccttgaagggatttttgtcccaaaattcaggttccatctgcaaaacagttaacaatttatttttataaatataattgttagtttgtttggtaggtggtgtttgagctttggctaaaggtagttttcctttagtattggtggctgttttggtcattgacgcattttggatcattgtttgtaaatttgattcagattcatcatcagattctgaggcaatgtctgcccaagattttttgattatttttggaaatttggtcagacccatgtcttgaagggcctgaagggtttcaattggccatgcatagtcggccgatgtttgtttggcggttgccgatttgggagattcctgagtggatggctcaggtttgattgaggcaatctgggttgatgacccttctaaattggttttctgggtagatgacccagcctgggttggtgacccagaagaggtagatgatttcttgatggttggctctggaagagccagcctgtactccttcctccccgtagggagattcccgatgccttaggaggcattaccacttttctgtaagaattcacgggtaaggtagtcaggtagtgaatttgaggtgcccttgatgtattctatgtcaaaatcaaagacacttaaaattgcttgccatcgtgcaaaaatttgttttgaggcaaggtttttaacatctttctgtaaaatatctttggctgatttacaatcaaccctgattaaaaatttttggtttaataaatccgattgaaatttggaaatgcacaaaacaattgctaaaacctcttttttaacagttgaatattttaattgtgcaggattccaatgtttcgatgtatatgcaatgacatgatcttggccatgga

SEQ ID NO: 11248 - DNA, 1173 bp, Glycine max
  Gm_smallRNAprecursor_4081
gggtattttggtgccaaaacaccttagtccaagcatcaacgtaatcccaataggtataacctactggatcaaatggaactgaaaatctctttcctttgttcaagtccgaaccaaagtgtcttggttgaagaacttttagtatttggatggttgagtgggtgtttaaggtttggtcttttggatctttgaaatgtttgatagatactgagttcgaatctaccaaaatcaattcataaaaagttcttgtcttcaggatagtggttggtttgtagtgaaatcctggtgggaaagccttggccgtcgccttgaagggatttttgtcccaaaattcaggttccatctgcaaaacagttaacaatttatttttataaatataattgttagtttgtttggtaggtggtgtttgagctttggctaaaggtagttttcctttagtattggtggctgttttggtcattgacgcattttggatcattgtttgtaaatttgattcagattcatcatcagattctgaggcaatgtctgcccaagattttttgattatttttggaaatttggtcagacccatgtcttgaagggcctgaagggtttcaattggccatgcatagtcggccgatgtttgtttggcggttgccgatttgggagattcctgagtggatggctcaggtttgattgaggcaatctgggttgatgacccttctaaattggttttctgggtagatgacccagcctgggttggtgacccagaagaggtagatgatttcttgatggttggctctggaagagccagcctgtactccttcctccccgtagggagattcccgatgccttaggaggcattaccacttttctgtaagaattcacgggtaaggtagtcaggtagtgaatttgaggtgcccttgatgtattctatgtcaaaatcaaagacacttaaaattgcttgccatcgtgcaaaaatttgttttgaggcaaggtttttaacatctttctgtaaaatatctttggctgatttacaatcaaccctgattaaaaatttttggtttaataaatccgattgaaatttggaaatgcacaaaacaattgctaaaacctcttttttaacagttgaatattttaattgtgcaggattccaatgtttcgatgtatatgcaatgacatgatcttggccatgga

SEQ ID NO: 11249 - DNA, 1176 bp, Glycine max
  Gm_smallRNAprecursor_4082
gggtattttggtgccaaaacaccttagtccaagcatcaacgtaatcccaataggtataacctactggatcaaatggaactgaaaatctctttcctttgttcaagtccgaaccaaagtgtcttggttgaagaacttttagtatttggatggttgagtgggtgtttaaggtttggtcttttggatctttgaaatgtttgatagatactgagttcgaatctaccaaaatcaattcataaaaagttcttgtcttcaggatagtggttggtttgtagtgaaatcctggtgggaaagccttggccgtcgccttgaagggatttttgtcccaaaattcaggttccatctgcaaaacagttaacaatttatttttataaatataattgttagtttgtttggtaggtggtgtttgagctttggctaaaggtagttttcctttagtattggtggctgttttggtcattgacgcattttggatcattgtttgtaaatttgattcagattcatcatcagattctgaggcaatgtctgcccaagattttttgattatttttggaaatttggtcagacccatgtcttgaagggcctgaagggtttcaattggccatgcatagtcggccgatgtttgtttggcggttgccgatttgggagattcctgagtggatggctcaggtttgattgaggcaatctgggttgatgacccttctaaattggttttctgggtagatgacccagcctgggttggtgacccagaagaggtagatgatttcttgatggttggctctggaagagccagcctgtactccttcctccccgtagggagattcccgatgccttaggaggcattaccacttttctgtaagaattcacgggtaaggtagtcaggtagtgaatttgaggtgcccttgatgtattctatgtcaaaatcaaagacacttaaaattgcttgccatcgtgcaaaaatttgttttgaggcaaggtttttaacatctttctgtaaaatatctttggctgatttacaatcaaccctgattaaaaatttttggtttaataaatccgattgaaatttggaaatgcacaaaacaattgctaaaacctcttttttaacagttgaatattttaattgtgcaggattccaatgtttcgatgtatatgcaatgacatgatcttggccatggactc

SEQ ID NO: 11250 - DNA, 1129 bp, Glycine max
  Gm_smallRNAprecursor_4083
attcaggttccatctgcaaaacagttaacaatttatttttataaatataattgttagtttgtttggtaggtggtgtttgagctttggctaaaggtagttttcctttagtattggtggctgttttggtcattgacgcattttggatcattgtttgtaaatttgattcagattcatcatcagattctgaggcaatgtctgcccaagattttttgattatttttggaaatttggtcagacccatgtcttgaagggcctgaagggtttcaattggccatgcatagtcggccgatgtttgtttggcggttgccgatttgggagattcctgagtggatggctcaggtttgattgaggcaatctgggttgatgacccttctaaattggttttctgggtagatgacccagcctgggttggtgacccagaagaggtagatgatttcttgatggttggctctggaagagccagcctgtactccttcctccccgtagggagattcccgatgccttaggaggcattaccacttttctgtaagaattcacgggtaaggtagtcaggtagtgaatttgaggtgcccttgatgtattctatgtcaaaatcaaagacacttaaaattgcttgccatcgtgcaaaaatttgttttgaggcaaggtttttaacatctttctgtaaaatatctttggctgatttacaatcaaccctgattaaaaatttttggtttaataaatccgattgaaatttggaaatgcacaaaacaattgctaaaacctcttttttaacagttgaatattttaattgtgcaggattccaatgtttcgatgtatatgcaatgacatgatcttggccatggactctttgtttgaggatgccaccataacctatgtcagaagcatcagtttcgacaattttgaatgcctgtggaataggaagatacagacatttaatggattggactttgactttgatttctttaaccgtttgtgtatggaggtcagaccaaggaggcggatttttcttcagcctatcatgtaatggcttgacaatattatttaaataggggacaaattctcctacgtaatttagacaacctagaaatctttgtaactgggttttgtctaagatttggttggggaa

SEQ ID NO: 11251 - DNA, 1115 bp, Glycine max
  Gm_smallRNAprecursor_4084
tgcaaaacagttaacaatttatttttataaatataattgttagtttgtttggtaggtggtgtttgagctttggctaaaggtagttttcctttagtattggtggctgttttggtcattgacgcattttggatcattgtttgtaaatttgattcagattcatcatcagattctgaggcaatgtctgcccaagattttttgattatttttggaaatttggtcagacccatgtcttgaagggcctgaagggtttcaattggccatgcatagtcggccgatgtttgtttggcggttgccgatttgggagattcctgagtggatggctcaggtttgattgaggcaatctgggttgatgacccttctaaattggttttctgggtagatgacccagcctgggttggtgacccagaagaggtagatgatttcttgatggttggctctggaagagccagcctgtactccttcctccccgtagggagattcccgatgccttaggaggcattaccacttttctgtaagaattcacgggtaaggtagtcaggtagtgaatttgaggtgcccttgatgtattctatgtcaaaatcaaagacacttaaaattgcttgccatcgtgcaaaaatttgttttgaggcaaggtttttaacatctttctgtaaaatatctttggctgatttacaatcaaccctgattaaaaatttttggtttaataaatccgattgaaatttggaaatgcacaaaacaattgctaaaacctcttttttaacagttgaatattttaattgtgcaggattccaatgtttcgatgtatatgcaatgacatgatcttggccatggactctttgtttgaggatgccaccataacctatgtcagaagcatcagtttcgacaattttgaatgcctgtggaataggaagatacagacatttaatggattggactttgactttgatttctttaaccgtttgtgtatggaggtcagaccaaggaggcggatttttcttcagcctatcatgtaatggcttgacaatattatttaaataggggacaaattctcctacgtaatttagacaacctagaaatctttgtaactgggttttgtctaagatttggttggggaa

SEQ ID NO: 11252 - DNA, 1121 bp, Glycine max
  Gm_smallRNAprecursor_4085
gccgatgtttgtttggcggttgccgatttgggagattcctgagtggatggctcaggtttgattgaggcaatctgggttgatgacccttctaaattggttttctgggtagatgacccagcctgggttggtgacccagaagaggtagatgatttcttgatggttggctctggaagagccagcctgtactccttcctccccgtagggagattcccgatgccttaggaggcattaccacttttctgtaagaattcacgggtaaggtagtcaggtagtgaatttgaggtgcccttgatgtattctatgtcaaaatcaaagacacttaaaattgcttgccatcgtgcaaaaatttgttttgaggcaaggtttttaacatctttctgtaaaatatctttggctgatttacaatcaaccctgattaaaaatttttggtttaataaatccgattgaaatttggaaatgcacaaaacaattgctaaaacctcttttttaacagttgaatattttaattgtgcaggattccaatgtttcgatgtatatgcaatgacatgatcttggccatggactctttgtttgaggatgccaccataacctatgtcagaagcatcagtttcgacaattttgaatgcctgtggaataggaagatacagacatttaatggattggactttgactttgatttctttaaccgtttgtgtatggaggtcagaccaaggaggcggatttttcttcagcctatcatgtaatggcttgacaatattatttaaataggggacaaattctcctacgtaatttagacaacctagaaatctttgtaactgggttttgtctaagatttggttggggaatttgctagcaaactctattgacctttcgattggaatgattgtaccttgatatatattgtgaccaaggaatcgaattcgagtttggaaaagattgatttttgatttggagactgccaaaccattttgtttgatgatatgtatgaaggtttggagatgtttgaaatgttggtcaatgttttgggaaaagattaaaacatcatctatgtagacaatgacaaattttgaataaggattaaaaatatcattcataattttttgaaattctgaaggggcatt

SEQ ID NO: 11253 - DNA, 1121 bp, Glycine max; identical to SEQ ID NO: 11252
  Gm_smallRNAprecursor_4086

SEQ ID NO: 11254 - DNA, 1036 bp, Glycine max
  Gm_smallRNAprecursor_4087
atgacccagcctgggttggtgacccagaagaggtagatgatttcttgatggttggctctggaagagccagcctgtactccttcctccccgtagggagattcccgatgccttaggaggcattaccacttttctgtaagaattcacgggtaaggtagtcaggtagtgaatttgaggtgcccttgatgtattctatgtcaaaatcaaagacacttaaaattgcttgccatcgtgcaaaaatttgttttgaggcaaggtttttaacatctttctgtaaaatatctttggctgatttacaatcaaccctgattaaaaatttttggtttaataaatccgattgaaatttggaaatgcacaaaacaattgctaaaacctcttttttaacagttgaatattttaattgtgcaggattccaatgtttcgatgtatatgcaatgacatgatcttggccatggactctttgtttgaggatgccaccataacctatgtcagaagcatcagtttcgacaattttgaatgcctgtggaataggaagatacagacatttaatggattggactttgactttgatttctttaaccgtttgtgtatggaggtcagaccaaggaggcggatttttcttcagcctatcatgtaatggcttgacaatattatttaaataggggacaaattctcctacgtaatttagacaacctagaaatctttgtaactgggttttgtctaagatttggttggggaatttgctagcaaactctattgacctttcgattggaatgattgtaccttgatatatattgtgaccaaggaatcgaattcgagtttggaaaagattgatttttgatttggagactgccaaaccattttgtttgatgatatgtatgaaggtttggagatgtttgaaatgttggtcaatgttttgggaaaagattaaaacatcatctatgtagacaatgacaaattttgaataaggattaaaaatatcattcataattttttgaaattctgaaggggcattcttcagtccgaatggcatcacgtt

SEQ ID NO: 11255 - DNA, 1038 bp, Glycine max
  Gm_smallRNAprecursor_4088
atgacccagcctgggttggtgacccagaagaggtagatgatttcttgatggttggctctggaagagccagcctgtactccttcctccccgtagggagattcccgatgccttaggaggcattaccacttttctgtaagaattcacgggtaaggtagtcaggtagtgaatttgaggtgcccttgatgtattctatgtcaaaatcaaagacacttaaaattgcttgccatcgtgcaaaaatttgttttgaggcaaggtttttaacatctttctgtaaaatatctttggctgatttacaatcaaccctgattaaaaatttttggtttaataaatccgattgaaatttggaaatgcacaaaacaattgctaaaacctcttttttaacagttgaatattttaattgtgcaggattccaatgtttcgatgtatatgcaatgacatgatcttggccatggactctttgtttgaggatgccaccataacctatgtcagaagcatcagtttcgacaattttgaatgcctgtggaataggaagatacagacatttaatggattggactttgactttgatttctttaaccgtttgtgtatggaggtcagaccaaggaggcggatttttcttcagcctatcatgtaatggcttgacaatattatttaaataggggacaaattctcctacgtaatttagacaacctagaaatctttgtaactgggttttgtctaagatttggttggggaatttgctagcaaactctattgacctttcgattggaatgattgtaccttgatatatattgtgaccaaggaatcgaattcgagtttggaaaagattgatttttgatttggagactgccaaaccattttgtttgatgatatgtatgaaggtttggagatgtttgaaatgttggtcaatgttttgggaaaagattaaaacatcatctatgtagacaatgacaaattttgaataaggattaaaaatatcattcataattttttgaaattctgaaggggcattcttcagtccgaatggcatcacgttcc

SEQ ID NO: 11256 - DNA, 1178 bp, Glycine max
  Gm_smallRNAprecursor_4089
gatgatttcttgatggttggctctggaagagccagcctgtactccttcctccccgtagggagattcccgatgccttaggaggcattaccacttttctgtaagaattcacgggtaaggtagtcaggtagtgaatttgaggtgcccttgatgtattctatgtcaaaatcaaagacacttaaaattgcttgccatcgtgcaaaaatttgttttgaggcaaggtttttaacatctttctgtaaaatatctttggctgatttacaatcaaccctgattaaaaatttttggtttaataaatccgattgaaatttggaaatgcacaaaacaattgctaaaacctcttttttaacagttgaatattttaattgtgcaggattccaatgtttcgatgtatatgcaatgacatgatcttggccatggactctttgtttgaggatgccaccataacctatgtcagaagcatcagtttcgacaattttgaatgcctgtggaataggaagatacagacatttaatggattggactttgactttgatttctttaaccgtttgtgtatggaggtcagaccaaggaggcggatttttcttcagcctatcatgtaatggcttgacaatattatttaaataggggacaaattctcctacgtaatttagacaacctagaaatctttgtaactgggttttgtctaagatttggttggggaatttgctagcaaactctattgacctttcgattggaatgattgtaccttgatatatattgtgaccaaggaatcgaattcgagtttggaaaagattgatttttgatttggagactgccaaaccattttgtttgatgatatgtatgaaggtttggagatgtttgaaatgttggtcaatgttttgggaaaagattaaaacatcatctatgtagacaatgacaaattttgaataaggattaaaaatatcattcataattttttgaaattctgaaggggcattcttcagtccgaatggcatcacgttccattcatattgcccgaaaggtacagtaaacgctgttttgtacctatctgattcttggatttggatttgccaaaatccagatttcatatcaaattttgaaaatatctttgcagaatttaatctgttaagcaaatcttttttgtttggaataggatatctaatccattgtaatgcttg

SEQ ID NO: 11257 - DNA, 1080 bp, Glycine max
  Gm_smallRNAprecursor_4090
gatgtttgaaatgttggtcaatgttttgggaaaagattaaaacatcatctatgtagacaatgacaaattttgaataaggattaaaaatatcattcataattttttgaaattctgaaggggcattcttcagtccgaatggcatcacgttccattcatattgcccgaaaggtacagtaaacgctgttttgtacctatctgattcttggatttggatttgccaaaatccagatttcatatcaaattttgaaaatatctttgcagaatttaatctgttaagcaaatcttttttgtttggaataggatatctaatccattgtaatgcttgatttaatggtttgtaatttatgactaagcggggtgttccacgctcaatctcagattgtttgttaacataaaaagccgcacaagaccatgggcttttgcttttctggattaggcctttatcaagcaaatccttgatttccttttgatagtattgaagaagttcttcattcatttggattggtctggcttttgtgggaatttgtttttccctaaagtctttctcataagggagatcgacaatatgtttctttctgtcccaaaatgcatgtggcaattcagaacaaacggtcgattcaatatgatttaataaagattgaattctttcttttacttggggttttcccagttgtatctgaatattattaaaaggtacttcttcttttaagaagttaatttgattaatcttatgtatatatgtatatatatatatatatatatatgtatgtattgtgataaatgatattgttttggttgtttgaaatgtgttgtttgaagaccatgcgtgtggaaatgatattgttgtggttgtttgaattgttgttgatgttgctattgaggattttaattgatatgtgatgataatgataattatgatgatgttgatttgagatgacattgttaataaagaccatgtcaacatgaattgttattattgatgaatatgtgaatatgaaatgaggttgttgttgttgttgataacgtcattgagatgagatgatatttatgttgtgaatgacatggaaatatgatttgttg

SEQ ID NO: 11258 - DNA, 1159 bp, Glycine max
  Gm_smallRNAprecursor_4091
gaatttatgttgtgacaaaatcacttctattttcataagcaaaaattaagggagttctttttataaaaattgaaattatcgaatattagagtgtggataccgtagcgacgaggcgggtcgttacagcacaagtattcattactttgtactgaatcctatagatcaaagctgctgggattgatcctttttcatgtcaaggtcatgaaagtggatatttaaaaacagagagtcaagaatgtttctgtccattagactcaccgttttgtttggataacagttgaagtatattggaccttatcctaagcttgtttctactgttccaattaaggaatcttcaaacttgttatgcctaatatctctaaggcacattaaaaatgcagcatctatgcccaaatcaattaaggacttgatggctacttatacacaaccgatatgtaaatacttgtatttacggctatgttcataaatagaattttttgaaagcagatgaaattcttcccctatatcttgtcctagaggaatattgttttctactatttttattatatagtcaaaattatgtttgtctttaattgtttcaggaatgtacaccttatcctgaggtatttctggaatgttccagttatccatattttgatttatgtcttcgaatcggacttcctcatcgaagagattgtgttttgggacgacctcgtgggtctggttatcttgttcattgagtaaattattggttgaattcattgaagaagaggatgaagatgagtttgatctaaaaaaatgcgagagaaagaacgtaaaaggcgagacattggattcatcctctagtatctttgccgtcatatggttccatagaaatgtttccaaaaggttatatgttactaaacttcttggatctgaaaaataaagaagatttttattttattttattttattttttacggacaatatagtttgaacactactcctatagccaccagtatattatgttttaatattttatttgaacaatacaccttagccttactgccctttctcatccacgggacttactgttaccgtatcattcaactaaaatatcagactgttgtgcttccagaaaatattgttcaaacatatactgtttaaattaaaattactatacacagttcagatccatgaa

SEQ ID NO: 11259 - DNA, 1098 bp, Glycine max
  Gm_smallRNAprecursor_4092
gtctccctgcgaggaggtcgaggtacaggaaaagtatctaggttggctcttccagagttgtccactaaaaaatcatcctcagcttcttctgggtcaccaacctaggctgggtcatctacccagaaaaccaatttaaaagggtcatcgacccagattatctcaatcaaacctgagccatccactcaggaatctcccaaaccggcaaccgccaaacaaacatcggccgactatgtctgaccaattgaaacccttcaggccctctaagacatgagtctaaccaaatttccaaaaataatcaaaaaatcttggacatatattgcctcagaatctaacgatgattctgaatcaaatttacaaacaatgatccaaaatgcatcaatgatcaaaacaactaccaatcctaaagggaaactaccactagccaaagtacaaacaccacctaccaaacaaactaacaatcatatttataaaaataaatttttaactgttttgcagatggaacctgaattttgggacaaaaatcccttcaaggcaacgaccaaggctttcccatcaggatttcactacaaaccaactaccatcctgaagtcaagaactttttatgaattgattttggtagattcaaatttagtatctatcaaacatttcaaagacccaaaagaccaaacattaaacacccactccacaatccaaatactaaaagttcttcaaccaagacactttggttcggacttaaacaaaggaaagagattttcagtaccatttgacctggtaggttatacctattgggattatgttgatgcttggactaaggtgttttggcaccaaaatacccgcttcaagcattcatggttgatatatttcaagaccaacacaatttacaattttccaaattgttttttacaatggtgggatttctttggtccaattccagagatattcccggaaacaatccaacaaggatttgctcaatttgaaagacaatacaatttgcaggaatcacgaattctagtagatcttaaatatttctcaagtttttctctgtcatggattttctcatggcaatatcgttacagcaagactgaaaaaacaaaccaa

SEQ ID NO: 11260 - DNA, 1035 bp, Glycine max
  Gm_smallRNAprecursor_4093
taaggtataaattattttgtgaatttagtgtattatattttattttgtagtatcaatggcatcttcgttgtcatgtctatcaaatattaaaattaagtctgacccgatcgatagtgatgtattctggatgcaagctaaacatgtttggaatggagaagaagaccgcaaattacacatcagtcgagttgtccccatttatcaaggggaagaagaaataccagagcaaatttttcctttccttcgacaatctggtttttactggattatgaagatgagatacttaaaaataaatgtctcattaattagtgttttgatagaaagatggaggctagaaacacatacgtttcacatgagatgcagagagtgtactattactcttcaagacgtctctgtattgttaggcccacgtgtggatggtttaccattaatcggcccaacaaatcttaattgggctaatttatgtgagaaattattggaagtcagaccacaagaaggtgaaattaaaggtagtgtggttaaattaagttggctggctcaccattttgcacaaataaataaccacgacgacaaagaacaagtacgaagatttgcccgtgcatggatactaagattcattggaggtgtcttgttcgttgacaaaagcagtaacaaagtttcgctaaggtacctttaattgttacgtgactttggagactgtagcacatatgcatggagacctgccgtacttgcttttctatacagagagatgtgcaatgccaccgattataaaactaaatcaatcgaaggtatgtgcatcttactacaaatgtgggcatgggaacgatgtataaccttggctccaaagaggactccttcccaagtagaaaataaaccactcgggcacaggttagtcatttttaaaagcgtctttcatttcaaaagaataaatggttttagggtatattaaattttaatctttgtaggtggttgcgacgtggaaatcaacatatcggcaatgacgatgtaagagtttttcgtcgcaagttggatattatg

SEQ ID NO: 11261 - DNA, 1119 bp, Glycine max
  Gm_smallRNAprecursor_4094
acgcttcccctcatcaaagcattgtacccatttttgtttgggtaattgatcaagccattcagctgcacttggcttattcgcacgaatatccccaagatgtcgccagtgcatcttctctgtgtatgcgtaccctgtaaatatttaatcaatgtattatgttataaaatttgattgaaagaaaattataacgaataaataaaatagattctcaccagccaacataagtggtttctttaaatgtttgcagtttgagttaccacgaagaaagttttgtgcaatgtggcgcaggcaaaagaaatgggatgtgtcctggacccataagttacttgggttgttgtaggcacttataattgaggggtgtcggtctgaaataagagaaatgttaatttgcagagtaacatgtcttctcaaattctttagaaaaaacccccaagctgaagttgtctccccttctacaatggcataggcaatcgggaagatatggttagctccatcttgtgcggtagctatcaacagtgtgccagtatactttccgtaaagccatgtaccgtctacttgtacaatgggtttgcaatatgcaaaaccattaatgcatggaccaaatgaccaaaagacacgtttaaacaatcttttgcccggtactatttctcccccctcatacaaggattctgtttgagcagcgaccacagtcccgggaacacaagattgcaaagctccgaaaagttttggcagtttggcatatgattcttcccagtttccatgaatcatctccaatgctttttgctttgctaaccatgtcttcttgtaggatggggtataattcatgaacgttttaatctctgcaatcaatgtcttgatggagacagttgggtttgttttgacaattggttggatgatctgtgctatgacgtgtttgtcgagttggcgatgatcttgtgtaagcatcggcacgagacaagtgtgatgacctctgatactcttgataatccatttgttatgcctctttgaattgcatgcgcccaagctccatgtacaaccattttcatgtaacttgcagacgaagtgtagccttctttggtcagagtaaattgttctgcaatcaaaatgatttctgatgtt

SEQ ID NO: 11262 - DNA, 1200 bp, Glycine max
  Gm_smallRNAprecursor_4095
acgcttcccctcatcaaagcattgtacccatttttgtttgggtaattgatcaagccattcagctgcacttggcttattcgcacgaatatccccaagatgtcgccagtgcatcttctctgtgtatgcgtaccctgtaaatatttaatcaatgtattatgttataaaatttgattgaaagaaaattataacgaataaataaaatagattctcaccagccaacataagtggtttctttaaatgtttgcagtttgagttaccacgaagaaagttttgtgcaatgtggcgcaggcaaaagaaatgggatgtgtcctggacccataagttacttgggttgttgtaggcacttataattgaggggtgtcggtctgaaataagagaaatgttaatttgcagagtaacatgtcttctcaaattctttagaaaaaacccccaagctgaagttgtctccccttctacaatggcataggcaatcgggaagatatggttagctccatcttgtgcggtagctatcaacagtgtgccagtatactttccgtaaagccatgtaccgtctacttgtacaatgggtttgcaatatgcaaaaccattaatgcatggaccaaatgaccaaaagacacgtttaaacaatcttttgcccggtactatttctcccccctcatacaaggattctgtttgagcagcgaccacagtcccgggaacacaagattgcaaagctccgaaaagttttggcagtttggcatatgattcttcccagtttccatgaatcatctccaatgctttttgctttgctaaccatgtcttcttgtaggatggggtataattcatgaacgttttaatctctgcaatcaatgtcttgatggagacagttgggtttgttttgacaattggttggatgatctgtgctatgacgtgtttgtcgagttggcgatgatcttgtgtaagcatcggcacgagacaagtgtgatgacctctgatactcttgataatccatttgttatgcctctttgaattgcatgcgcccaagctccatgtacaaccattttcatgtaacttgcagacgaagtgtagccttctttggtcagagtaaattgttctgcaatcaaaatgatttctgatgttgtattctttgattgctcgaatacattgtgatttgtcatcgaaggtcatgccaacctcgagtacatcgactgatggttgtac

SEQ ID NO: 11263 - DNA, 1075 bp, Glycine max
  Gm_smallRNAprecursor_4096
gtgtatgcgtaccctgtaaatatttaatcaatgtattatgttataaaatttgattgaaagaaaattataacgaataaataaaatagattctcaccagccaacataagtggtttctttaaatgtttgcagtttgagttaccacgaagaaagttttgtgcaatgtggcgcaggcaaaagaaatgggatgtgtcctggacccataagttacttgggttgttgtaggcacttataattgaggggtgtcggtctgaaataagagaaatgttaatttgcagagtaacatgtcttctcaaattctttagaaaaaacccccaagctgaagttgtctccccttctacaatggcataggcaatcgggaagatatggttagctccatcttgtgcggtagctatcaacagtgtgccagtatactttccgtaaagccatgtaccgtctacttgtacaatgggtttgcaatatgcaaaaccattaatgcatggaccaaatgaccaaaagacacgtttaaacaatcttttgcccggtactatttctcccccctcatacaaggattctgtttgagcagcgaccacagtcccgggaacacaagattgcaaagctccgaaaagttttggcagtttggcatatgattcttcccagtttccatgaatcatctccaatgctttttgctttgctaaccatgtcttcttgtaggatggggtataattcatgaacgttttaatctctgcaatcaatgtcttgatggagacagttgggtttgttttgacaattggttggatgatctgtgctatgacgtgtttgtcgagttggcgatgatcttgtgtaagcatcggcacgagacaagtgtgatgacctctgatactcttgataatccatttgttatgcctctttgaattgcatgcgcccaagctccatgtacaaccattttcatgtaacttgcagacgaagtgtagccttctttggtcagagtaaattgttctgcaatcaaaatgatttctgatgttgtattctttgattgctcgaatacattgtgatttgtcatcgaaggtcatgccaacctcgagtacatcgactgatg

SEQ ID NO: 11264 - DNA, 1077 bp, Glycine max
  Gm_smallRNAprecursor_4097
gtgtatgcgtaccctgtaaatatttaatcaatgtattatgttataaaatttgattgaaagaaaattataacgaataaataaaatagattctcaccagccaacataagtggtttctttaaatgtttgcagtttgagttaccacgaagaaagttttgtgcaatgtggcgcaggcaaaagaaatgggatgtgtcctggacccataagttacttgggttgttgtaggcacttataattgaggggtgtcggtctgaaataagagaaatgttaatttgcagagtaacatgtcttctcaaattctttagaaaaaacccccaagctgaagttgtctccccttctacaatggcataggcaatcgggaagatatggttagctccatcttgtgcggtagctatcaacagtgtgccagtatactttccgtaaagccatgtaccgtctacttgtacaatgggtttgcaatatgcaaaaccattaatgcatggaccaaatgaccaaaagacacgtttaaacaatcttttgcccggtactatttctcccccctcatacaaggattctgtttgagcagcgaccacagtcccgggaacacaagattgcaaagctccgaaaagttttggcagtttggcatatgattcttcccagtttccatgaatcatctccaatgctttttgctttgctaaccatgtcttcttgtaggatggggtataattcatgaacgttttaatctctgcaatcaatgtcttgatggagacagttgggtttgttttgacaattggttggatgatctgtgctatgacgtgtttgtcgagttggcgatgatcttgtgtaagcatcggcacgagacaagtgtgatgacctctgatactcttgataatccatttgttatgcctctttgaattgcatgcgcccaagctccatgtacaaccattttcatgtaacttgcagacgaagtgtagccttctttggtcagagtaaattgttctgcaatcaaaatgatttctgatgttgtattctttgattgctcgaatacattgtgatttgtcatcgaaggtcatgccaacctcgagtacatcgactgatggt

SEQ ID NO: 11265 - DNA, 1078 bp, Glycine max
  Gm_smallRNAprecursor_4098
gtgtatgcgtaccctgtaaatatttaatcaatgtattatgttataaaatttgattgaaagaaaattataacgaataaataaaatagattctcaccagccaacataagtggtttctttaaatgtttgcagtttgagttaccacgaagaaagttttgtgcaatgtggcgcaggcaaaagaaatgggatgtgtcctggacccataagttacttgggttgttgtaggcacttataattgaggggtgtcggtctgaaataagagaaatgttaatttgcagagtaacatgtcttctcaaattctttagaaaaaacccccaagctgaagttgtctccccttctacaatggcataggcaatcgggaagatatggttagctccatcttgtgcggtagctatcaacagtgtgccagtatactttccgtaaagccatgtaccgtctacttgtacaatgggtttgcaatatgcaaaaccattaatgcatggaccaaatgaccaaaagacacgtttaaacaatcttttgcccggtactatttctcccccctcatacaaggattctgtttgagcagcgaccacagtcccgggaacacaagattgcaaagctccgaaaagttttggcagtttggcatatgattcttcccagtttccatgaatcatctccaatgctttttgctttgctaaccatgtcttcttgtaggatggggtataattcatgaacgttttaatctctgcaatcaatgtcttgatggagacagttgggtttgttttgacaattggttggatgatctgtgctatgacgtgtttgtcgagttggcgatgatcttgtgtaagcatcggcacgagacaagtgtgatgacctctgatactcttgataatccatttgttatgcctctttgaattgcatgcgcccaagctccatgtacaaccattttcatgtaacttgcagacgaagtgtagccttctttggtcagagtaaattgttctgcaatcaaaatgatttctgatgttgtattctttgattgctcgaatacattgtgatttgtcatcgaaggtcatgccaacctcgagtacatcgactgatggtt

SEQ ID NO: 11266 - DNA, 1063 bp, Glycine max
  Gm_smallRNAprecursor_4099
cgtaccctgtaaatatttaatcaatgtattatgttataaaatttgattgaaagaaaattataacgaataaataaaatagattctcaccagccaacataagtggtttctttaaatgtttgcagtttgagttaccacgaagaaagttttgtgcaatgtggcgcaggcaaaagaaatgggatgtgtcctggacccataagttacttgggttgttgtaggcacttataattgaggggtgtcggtctgaaataagagaaatgttaatttgcagagtaacatgtcttctcaaattctttagaaaaaacccccaagctgaagttgtctccccttctacaatggcataggcaatcgggaagatatggttagctccatcttgtgcggtagctatcaacagtgtgccagtatactttccgtaaagccatgtaccgtctacttgtacaatgggtttgcaatatgcaaaaccattaatgcatggaccaaatgaccaaaagacacgtttaaacaatcttttgcccggtactatttctcccccctcatacaaggattctgtttgagcagcgaccacagtcccgggaacacaagattgcaaagctccgaaaagttttggcagtttggcatatgattcttcccagtttccatgaatcatctccaatgctttttgctttgctaaccatgtcttcttgtaggatggggtataattcatgaacgttttaatctctgcaatcaatgtcttgatggagacagttgggtttgttttgacaattggttggatgatctgtgctatgacgtgtttgtcgagttggcgatgatcttgtgtaagcatcggcacgagacaagtgtgatgacctctgatactcttgataatccatttgttatgcctctttgaattgcatgcgcccaagctccatgtacaaccattttcatgtaacttgcagacgaagtgtagccttctttggtcagagtaaattgttctgcaatcaaaatgatttctgatgttgtattctttgattgctcgaatacattgtgatttgtcatcgaaggtcatgccaacctcgagtacatcgac

SEQ ID NO: 11267 - DNA, 1065 bp, Glycine max
  Gm_smallRNAprecursor_4100
cgtaccctgtaaatatttaatcaatgtattatgttataaaatttgattgaaagaaaattataacgaataaataaaatagattctcaccagccaacataagtggtttctttaaatgtttgcagtttgagttaccacgaagaaagttttgtgcaatgtggcgcaggcaaaagaaatgggatgtgtcctggacccataagttacttgggttgttgtaggcacttataattgaggggtgtcggtctgaaataagagaaatgttaatttgcagagtaacatgtcttctcaaattctttagaaaaaacccccaagctgaagttgtctccccttctacaatggcataggcaatcgggaagatatggttagctccatcttgtgcggtagctatcaacagtgtgccagtatactttccgtaaagccatgtaccgtctacttgtacaatgggtttgcaatatgcaaaaccattaatgcatggaccaaatgaccaaaagacacgtttaaacaatcttttgcccggtactatttctcccccctcatacaaggattctgtttgagcagcgaccacagtcccgggaacacaagattgcaaagctccgaaaagttttggcagtttggcatatgattcttcccagtttccatgaatcatctccaatgctttttgctttgctaaccatgtcttcttgtaggatggggtataattcatgaacgttttaatctctgcaatcaatgtcttgatggagacagttgggtttgttttgacaattggttggatgatctgtgctatgacgtgtttgtcgagttggcgatgatcttgtgtaagcatcggcacgagacaagtgtgatgacctctgatactcttgataatccatttgttatgcctctttgaattgcatgcgcccaagctccatgtacaaccattttcatgtaacttgcagacgaagtgtagccttctttggtcagagtaaattgttctgcaatcaaaatgatttctgatgttgtattctttgattgctcgaatacattgtgatttgtcatcgaaggtcatgccaacctcgagtacatcgactg

SEQ ID NO: 11268 - DNA, 1046 bp, Glycine max
  Gm_smallRNAprecursor_4101
aacggacagataggaagtaagaatgcagtatgataaatggaaaggaaaatataaacttgtaaaacagatatcaagggcacatcggagaccggcttacaaatcccaggttttcataaacaaagaaactgaagcggcggcagagccgcacaggatcggtaaagagagagaagagggatgaaaaaatagaaatttattgaaacttgaaagaagcgcttacaaaaatcttgtttcagagcacctctcttcagaaacctgaaaaatggccaaatgaaagggtgcctcacaacatacttgaggactccttatatagccaaaaatctaagaccgatagttaccggtagttttgaccgggactatttgactgtttgttacaagataagtagttttgaccgggactttaatggctacaggacagatagtattgtccaacattaattacacattaattacaaacagacgattttgtgaccgaaattaaatttaatctaaacagataccaaaacaatcatcttcgttttggtaaaaggtgtcttcttcttcttcttcagcagaacttgtttcttccttctttgaggatgaaccttcttcttcctgctgtaacatttgcagaacttcctttagatttttagtcaggacctcctttgatttcgatcctgctaaaaatgctgccagatgagacttttggttcaaaaacacagaagtttctggatcaggtgctttgaggaattctagatgggattggaaccagagttttacttgttctggatccgctttgaatgagtcaaattgtgtccaccattttacaaatgcgtgtctttgtagtgatggatattggtttgtcttttcagtcttgctgtaacgatattgccatgagaagatccatgacagtgcaaagcttgaaaagtatttaagatctgttggaattcgtgattcctgcgaattgtattgtctctcaaattgagcaaatccttgttggactgtttctgggaatatctctgaaattggtccaaagaagtcccacaattgcaaaaaccaattgggaaaat

SEQ ID NO: 11269 - DNA, 1080 bp, Glycine max
  Gm_smallRNAprecursor_4102
aagataagtagttttgaccgggactttaatggctacaggacagatagtattgtccaacattaattacacattaattacaaacagacgattttgtgaccgaaattaaatttaatctaaacagataccaaaacaatcatcttcgttttggtaaaaggtgtcttcttcttcttcttcagcagaacttgtttcttccttctttgaggatgaaccttcttcttcctgctgtaacatttgcagaacttcctttagatttttagtcaggacctcctttgatttcgatcctgctaaaaatgctgccagatgagacttttggttcaaaaacacagaagtttctggatcaggtgctttgaggaattctagatgggattggaaccagagttttacttgttctggatccgctttgaatgagtcaaattgtgtccaccattttacaaatgcgtgtctttgtagtgatggatattggtttgtcttttcagtcttgctgtaacgatattgccatgagaagatccatgacagtgcaaagcttgaaaagtatttaagatctgttggaattcgtgattcctgcgaattgtattgtctctcaaattgagcaaatccttgttggactgtttctgggaatatctctgaaattggtccaaagaagtcccacaattgcaaaaaccaattgggaaaattgtaaattgtattggtcttgaaatatatcagccatgaatgcttgaaacgagtattttggtgccaaaacaccttagtccaagcatcaacataatcccaataggtataacctgccggatcaaatggaactgaaaatctctttcctttgttcaagtccgaaccaaagtgtcttggttgaagaacttttagtatttggattgtcgagtgggtgtttaatgtttggtcttttgggtctttgaaatgtttaatagatactgagtttgaatctaccaaaatcaattcataaaaagttcttgtcttcaggatggtggttggtttgtagtgaaatcctggtgggaaagccttggccgtcgccttgaagggatttttgtcccaaaatttaggttccatctacaaaacagttgtaaa

SEQ ID NO: 11270 - DNA, 1060 bp, Glycine max
  Gm_smallRNAprecursor_4103
ggactttaatggctacaggacagatagtattgtccaacattaattacacattaattacaaacagacgattttgtgaccgaaattaaatttaatctaaacagataccaaaacaatcatcttcgttttggtaaaaggtgtcttcttcttcttcttcagcagaacttgtttcttccttctttgaggatgaaccttcttcttcctgctgtaacatttgcagaacttcctttagatttttagtcaggacctcctttgatttcgatcctgctaaaaatgctgccagatgagacttttggttcaaaaacacagaagtttctggatcaggtgctttgaggaattctagatgggattggaaccagagttttacttgttctggatccgctttgaatgagtcaaattgtgtccaccattttacaaatgcgtgtctttgtagtgatggatattggtttgtcttttcagtcttgctgtaacgatattgccatgagaagatccatgacagtgcaaagcttgaaaagtatttaagatctgttggaattcgtgattcctgcgaattgtattgtctctcaaattgagcaaatccttgttggactgtttctgggaatatctctgaaattggtccaaagaagtcccacaattgcaaaaaccaattgggaaaattgtaaattgtattggtcttgaaatatatcagccatgaatgcttgaaacgagtattttggtgccaaaacaccttagtccaagcatcaacataatcccaataggtataacctgccggatcaaatggaactgaaaatctctttcctttgttcaagtccgaaccaaagtgtcttggttgaagaacttttagtatttggattgtcgagtgggtgtttaatgtttggtcttttgggtctttgaaatgtttaatagatactgagtttgaatctaccaaaatcaattcataaaaagttcttgtcttcaggatggtggttggtttgtagtgaaatcctggtgggaaagccttggccgtcgccttgaagggatttttgtcccaaaatttaggttccatctacaaaacagttgtaaa

SEQ ID NO: 11271 - DNA, 1049 bp, Glycine max
  Gm_smallRNAprecursor_4104
gctacaggacagatagtattgtccaacattaattacacattaattacaaacagacgattttgtgaccgaaattaaatttaatctaaacagataccaaaacaatcatcttcgttttggtaaaaggtgtcttcttcttcttcttcagcagaacttgtttcttccttctttgaggatgaaccttcttcttcctgctgtaacatttgcagaacttcctttagatttttagtcaggacctcctttgatttcgatcctgctaaaaatgctgccagatgagacttttggttcaaaaacacagaagtttctggatcaggtgctttgaggaattctagatgggattggaaccagagttttacttgttctggatccgctttgaatgagtcaaattgtgtccaccattttacaaatgcgtgtctttgtagtgatggatattggtttgtcttttcagtcttgctgtaacgatattgccatgagaagatccatgacagtgcaaagcttgaaaagtatttaagatctgttggaattcgtgattcctgcgaattgtattgtctctcaaattgagcaaatccttgttggactgtttctgggaatatctctgaaattggtccaaagaagtcccacaattgcaaaaaccaattgggaaaattgtaaattgtattggtcttgaaatatatcagccatgaatgcttgaaacgagtattttggtgccaaaacaccttagtccaagcatcaacataatcccaataggtataacctgccggatcaaatggaactgaaaatctctttcctttgttcaagtccgaaccaaagtgtcttggttgaagaacttttagtatttggattgtcgagtgggtgtttaatgtttggtcttttgggtctttgaaatgtttaatagatactgagtttgaatctaccaaaatcaattcataaaaagttcttgtcttcaggatggtggttggtttgtagtgaaatcctggtgggaaagccttggccgtcgccttgaagggatttttgtcccaaaatttaggttccatctacaaaacagttgtaaa

SEQ ID NO: 11272 - DNA, 1057 bp, Glycine max
  Gm_smallRNAprecursor_4105
gctacaggacagatagtattgtccaacattaattacacattaattacaaacagacgattttgtgaccgaaattaaatttaatctaaacagataccaaaacaatcatcttcgttttggtaaaaggtgtcttcttcttcttcttcagcagaacttgtttcttccttctttgaggatgaaccttcttcttcctgctgtaacatttgcagaacttcctttagatttttagtcaggacctcctttgatttcgatcctgctaaaaatgctgccagatgagacttttggttcaaaaacacagaagtttctggatcaggtgctttgaggaattctagatgggattggaaccagagttttacttgttctggatccgctttgaatgagtcaaattgtgtccaccattttacaaatgcgtgtctttgtagtgatggatattggtttgtcttttcagtcttgctgtaacgatattgccatgagaagatccatgacagtgcaaagcttgaaaagtatttaagatctgttggaattcgtgattcctgcgaattgtattgtctctcaaattgagcaaatccttgttggactgtttctgggaatatctctgaaattggtccaaagaagtcccacaattgcaaaaaccaattgggaaaattgtaaattgtattggtcttgaaatatatcagccatgaatgcttgaaacgagtattttggtgccaaaacaccttagtccaagcatcaacataatcccaataggtataacctgccggatcaaatggaactgaaaatctctttcctttgttcaagtccgaaccaaagtgtcttggttgaagaacttttagtatttggattgtcgagtgggtgtttaatgtttggtcttttgggtctttgaaatgtttaatagatactgagtttgaatctaccaaaatcaattcataaaaagttcttgtcttcaggatggtggttggtttgtagtgaaatcctggtgggaaagccttggccgtcgccttgaagggatttttgtcccaaaatttaggttccatctacaaaacagttgtaaatttatttt

SEQ ID NO: 11273 - DNA, 1058 bp, Glycine max
  Gm_smallRNAprecursor_4106
gctacaggacagatagtattgtccaacattaattacacattaattacaaacagacgattttgtgaccgaaattaaatttaatctaaacagataccaaaacaatcatcttcgttttggtaaaaggtgtcttcttcttcttcttcagcagaacttgtttcttccttctttgaggatgaaccttcttcttcctgctgtaacatttgcagaacttcctttagatttttagtcaggacctcctttgatttcgatcctgctaaaaatgctgccagatgagacttttggttcaaaaacacagaagtttctggatcaggtgctttgaggaattctagatgggattggaaccagagttttacttgttctggatccgctttgaatgagtcaaattgtgtccaccattttacaaatgcgtgtctttgtagtgatggatattggtttgtcttttcagtcttgctgtaacgatattgccatgagaagatccatgacagtgcaaagcttgaaaagtatttaagatctgttggaattcgtgattcctgcgaattgtattgtctctcaaattgagcaaatccttgttggactgtttctgggaatatctctgaaattggtccaaagaagtcccacaattgcaaaaaccaattgggaaaattgtaaattgtattggtcttgaaatatatcagccatgaatgcttgaaacgagtattttggtgccaaaacaccttagtccaagcatcaacataatcccaataggtataacctgccggatcaaatggaactgaaaatctctttcctttgttcaagtccgaaccaaagtgtcttggttgaagaacttttagtatttggattgtcgagtgggtgtttaatgtttggtcttttgggtctttgaaatgtttaatagatactgagtttgaatctaccaaaatcaattcataaaaagttcttgtcttcaggatggtggttggtttgtagtgaaatcctggtgggaaagccttggccgtcgccttgaagggatttttgtcccaaaatttaggttccatctacaaaacagttgtaaatttattttt

SEQ ID NO: 11274 - DNA, 1162 bp, Glycine max
  Gm_smallRNAprecursor_4107
attttgtgaccgaaattaaatttaatctaaacagataccaaaacaatcatcttcgttttggtaaaaggtgtcttcttcttcttcttcagcagaacttgtttcttccttctttgaggatgaaccttcttcttcctgctgtaacatttgcagaacttcctttagatttttagtcaggacctcctttgatttcgatcctgctaaaaatgctgccagatgagacttttggttcaaaaacacagaagtttctggatcaggtgctttgaggaattctagatgggattggaaccagagttttacttgttctggatccgctttgaatgagtcaaattgtgtccaccattttacaaatgcgtgtctttgtagtgatggatattggtttgtcttttcagtcttgctgtaacgatattgccatgagaagatccatgacagtgcaaagcttgaaaagtatttaagatctgttggaattcgtgattcctgcgaattgtattgtctctcaaattgagcaaatccttgttggactgtttctgggaatatctctgaaattggtccaaagaagtcccacaattgcaaaaaccaattgggaaaattgtaaattgtattggtcttgaaatatatcagccatgaatgcttgaaacgagtattttggtgccaaaacaccttagtccaagcatcaacataatcccaataggtataacctgccggatcaaatggaactgaaaatctctttcctttgttcaagtccgaaccaaagtgtcttggttgaagaacttttagtatttggattgtcgagtgggtgtttaatgtttggtcttttgggtctttgaaatgtttaatagatactgagtttgaatctaccaaaatcaattcataaaaagttcttgtcttcaggatggtggttggtttgtagtgaaatcctggtgggaaagccttggccgtcgccttgaagggatttttgtcccaaaatttaggttccatctacaaaacagttgtaaatttatttttataaatataattgttagtttgtttggtaggtggtgtttgagctttggctaaaggtagtttccctttaggattggaagttgttttggtcattgatgcattttggatcattgtttgtaaatttgattcaagttcatcatcagattctgaggcaatgtctgcc

SEQ ID NO: 11275 - DNA, 1165 bp, Glycine max
  Gm_smallRNAprecursor_4108
attttgtgaccgaaattaaatttaatctaaacagataccaaaacaatcatcttcgttttggtaaaaggtgtcttcttcttcttcttcagcagaacttgtttcttccttctttgaggatgaaccttcttcttcctgctgtaacatttgcagaacttcctttagatttttagtcaggacctcctttgatttcgatcctgctaaaaatgctgccagatgagacttttggttcaaaaacacagaagtttctggatcaggtgctttgaggaattctagatgggattggaaccagagttttacttgttctggatccgctttgaatgagtcaaattgtgtccaccattttacaaatgcgtgtctttgtagtgatggatattggtttgtcttttcagtcttgctgtaacgatattgccatgagaagatccatgacagtgcaaagcttgaaaagtatttaagatctgttggaattcgtgattcctgcgaattgtattgtctctcaaattgagcaaatccttgttggactgtttctgggaatatctctgaaattggtccaaagaagtcccacaattgcaaaaaccaattgggaaaattgtaaattgtattggtcttgaaatatatcagccatgaatgcttgaaacgagtattttggtgccaaaacaccttagtccaagcatcaacataatcccaataggtataacctgccggatcaaatggaactgaaaatctctttcctttgttcaagtccgaaccaaagtgtcttggttgaagaacttttagtatttggattgtcgagtgggtgtttaatgtttggtcttttgggtctttgaaatgtttaatagatactgagtttgaatctaccaaaatcaattcataaaaagttcttgtcttcaggatggtggttggtttgtagtgaaatcctggtgggaaagccttggccgtcgccttgaagggatttttgtcccaaaatttaggttccatctacaaaacagttgtaaatttatttttataaatataattgttagtttgtttggtaggtggtgtttgagctttggctaaaggtagtttccctttaggattggaagttgttttggtcattgatgcattttggatcattgtttgtaaatttgattcaagttcatcatcagattctgaggcaatgtctgcccaa

SEQ ID NO: 11276 - DNA, 1129 bp, Glycine max
  Gm_smallRNAprecursor_4109
ctacaaaacagttgtaaatttatttttataaatataattgttagtttgtttggtaggtggtgtttgagctttggctaaaggtagtttccctttaggattggaagttgttttggtcattgatgcattttggatcattgtttgtaaatttgattcaagttcatcatcagattctgaggcaatgtctgcccaagattttttgattatttttggaaatttggttagacccatgtcttgaagggcctgaagggtttcaattggccatgcatagtcggccgatgtttgtttggcggttgccggtttgggagattcctgagtggatggctcaggtttgattgaggtaatcagggttgatgacccttctaaattggttttctgggtagatgacccagcctgggttggtgacccataagaggttgatgatttcttaatggttggttctggaagagccagtctggctcctttgcctgtacttcttcctccccttagggagattctcgatgccttaggaggcattaccacttttctgtaagaattcacggataaggtagtcaggtaatgaatttgaggtgcccttgatgtattctatgtcaaaatcaaagacacttaaaattgcttgccatcttgcaaaaatttgttttgaggcaaggtttttaacatttttttgtaaaatatccttggctgatttacaatcaactctgattaaaaaattttggtttagtaaatccgattgaaatttggaaatgcacaaaacaattgctaaaactttctttttaacggttgaatattttaattgtgcgggattccaatgttttgatgtatatgcaatgacatgatcttggccatggactctttgtttgagaatgccaccataacctatgtctgaagcatcagtttcgataattttaaatgcctgtggaataagaagatacagacattttatggattggactttgactttgatttctttaactgtttgtgtatggaggtcagaccaaggaggcagatttttcttcagcctatcatgcaaaggcttgacaatattgtttaaataggggacaaattctcctacgtaatttagacaacctagaaatctttgtaactgggttttgtctaagatttggttgggaaa

SEQ ID NO: 11277 - DNA, 1115 bp, Glycine max
  Gm_smallRNAprecursor_4110
taaatttatttttataaatataattgttagtttgtttggtaggtggtgtttgagctttggctaaaggtagtttccctttaggattggaagttgttttggtcattgatgcattttggatcattgtttgtaaatttgattcaagttcatcatcagattctgaggcaatgtctgcccaagattttttgattatttttggaaatttggttagacccatgtcttgaagggcctgaagggtttcaattggccatgcatagtcggccgatgtttgtttggcggttgccggtttgggagattcctgagtggatggctcaggtttgattgaggtaatcagggttgatgacccttctaaattggttttctgggtagatgacccagcctgggttggtgacccataagaggttgatgatttcttaatggttggttctggaagagccagtctggctcctttgcctgtacttcttcctccccttagggagattctcgatgccttaggaggcattaccacttttctgtaagaattcacggataaggtagtcaggtaatgaatttgaggtgcccttgatgtattctatgtcaaaatcaaagacacttaaaattgcttgccatcttgcaaaaatttgttttgaggcaaggtttttaacatttttttgtaaaatatccttggctgatttacaatcaactctgattaaaaaattttggtttagtaaatccgattgaaatttggaaatgcacaaaacaattgctaaaactttctttttaacggttgaatattttaattgtgcgggattccaatgttttgatgtatatgcaatgacatgatcttggccatggactctttgtttgagaatgccaccataacctatgtctgaagcatcagtttcgataattttaaatgcctgtggaataagaagatacagacattttatggattggactttgactttgatttctttaactgtttgtgtatggaggtcagaccaaggaggcagatttttcttcagcctatcatgcaaaggcttgacaatattgtttaaataggggacaaattctcctacgtaatttagacaacctagaaatctttgtaactgggttttgtctaagatttggttgggaaa

SEQ ID NO: 11278 - DNA, 1218 bp, Glycine max
  Gm_smallRNAprecursor_4111
tggctcaggtttgattgaggtaatcagggttgatgacccttctaaattggttttctgggtagatgacccagcctgggttggtgacccataagaggttgatgatttcttaatggttggttctggaagagccagtctggctcctttgcctgtacttcttcctccccttagggagattctcgatgccttaggaggcattaccacttttctgtaagaattcacggataaggtagtcaggtaatgaatttgaggtgcccttgatgtattctatgtcaaaatcaaagacacttaaaattgcttgccatcttgcaaaaatttgttttgaggcaaggtttttaacatttttttgtaaaatatccttggctgatttacaatcaactctgattaaaaaattttggtttagtaaatccgattgaaatttggaaatgcacaaaacaattgctaaaactttctttttaacggttgaatattttaattgtgcgggattccaatgttttgatgtatatgcaatgacatgatcttggccatggactctttgtttgagaatgccaccataacctatgtctgaagcatcagtttcgataattttaaatgcctgtggaataagaagatacagacattttatggattggactttgactttgatttctttaactgtttgtgtatggaggtcagaccaaggaggcagatttttcttcagcctatcatgcaaaggcttgacaatattgtttaaataggggacaaattctcctacgtaatttagacaacctagaaatctttgtaactgggttttgtctaagatttggttgggaaatttgctagcaaactctattgacctttctattgaaatgattgtaccttgatatatattgtgaccaaggaattgaattcgagtttggaaaagattgatttttgatttggagactgccaaaccattctgtttgatgatatggatgaaggtctggagatgtttgaaatgttagtcaatgttttgggaaaagattaaaacatcatctatgtagacaatgacaaattttgaatagggattaaaaatatcattcataattttttgaaattctgaaggggcattcttcagtccgaatggcatcacattccattcatattgcccgaaaggtacagtaaacgttgttttgtacctatctgattcttggatttggatttgccaaaatccatatttcatatcaaattttgaaaatatct

SEQ ID NO: 11279 - DNA, 1071 bp, Glycine max
  Gm_smallRNAprecursor_4112
taaattggttttctgggtagatgacccagcctgggttggtgacccataagaggttgatgatttcttaatggttggttctggaagagccagtctggctcctttgcctgtacttcttcctccccttagggagattctcgatgccttaggaggcattaccacttttctgtaagaattcacggataaggtagtcaggtaatgaatttgaggtgcccttgatgtattctatgtcaaaatcaaagacacttaaaattgcttgccatcttgcaaaaatttgttttgaggcaaggtttttaacatttttttgtaaaatatccttggctgatttacaatcaactctgattaaaaaattttggtttagtaaatccgattgaaatttggaaatgcacaaaacaattgctaaaactttctttttaacggttgaatattttaattgtgcgggattccaatgttttgatgtatatgcaatgacatgatcttggccatggactctttgtttgagaatgccaccataacctatgtctgaagcatcagtttcgataattttaaatgcctgtggaataagaagatacagacattttatggattggactttgactttgatttctttaactgtttgtgtatggaggtcagaccaaggaggcagatttttcttcagcctatcatgcaaaggcttgacaatattgtttaaataggggacaaattctcctacgtaatttagacaacctagaaatctttgtaactgggttttgtctaagatttggttgggaaatttgctagcaaactctattgacctttctattgaaatgattgtaccttgatatatattgtgaccaaggaattgaattcgagtttggaaaagattgatttttgatttggagactgccaaaccattctgtttgatgatatggatgaaggtctggagatgtttgaaatgttagtcaatgttttgggaaaagattaaaacatcatctatgtagacaatgacaaattttgaatagggattaaaaatatcattcataattttttgaaattctgaaggggcattcttcagtccgaatggcatcacattcc

SEQ ID NO: 11280 - DNA, 1232 bp, Glycine max
  Gm_smallRNAprecursor_4113
aattgcttgccatcttgcaaaaatttgttttgaggcaaggtttttaacatttttttgtaaaatatccttggctgatttacaatcaactctgattaaaaaattttggtttagtaaatccgattgaaatttggaaatgcacaaaacaattgctaaaactttctttttaacggttgaatattttaattgtgcgggattccaatgttttgatgtatatgcaatgacatgatcttggccatggactctttgtttgagaatgccaccataacctatgtctgaagcatcagtttcgataattttaaatgcctgtggaataagaagatacagacattttatggattggactttgactttgatttctttaactgtttgtgtatggaggtcagaccaaggaggcagatttttcttcagcctatcatgcaaaggcttgacaatattgtttaaataggggacaaattctcctacgtaatttagacaacctagaaatctttgtaactgggttttgtctaagatttggttgggaaatttgctagcaaactctattgacctttctattgaaatgattgtaccttgatatatattgtgaccaaggaattgaattcgagtttggaaaagattgatttttgatttggagactgccaaaccattctgtttgatgatatggatgaaggtctggagatgtttgaaatgttagtcaatgttttgggaaaagattaaaacatcatctatgtagacaatgacaaattttgaatagggattaaaaatatcattcataattttttgaaattctgaaggggcattcttcagtccgaatggcatcacattccattcatattgcccgaaaggtacagtaaacgttgttttgtacctatctgattcttggatttggatttgccaaaatccatatttcatatcaaattttgaaaatatctttgcagaatttaatctgttaagcaaatcttttttgtttggaataggatatctaatccattgtaatgcttgatttagtggtttgtagtttatgactaagcgaggtgttccacgctcaatctcagattgtttgttgacataaaaagccgcacaagaccatggacttttgcttttccgaattaggcctttatcaagcaaatccttgatttccttttggcagtattgaagaagttcttagttcatttggattggtctggcttttgtggaaatttgtttttccctaaagtctttctcataagggagat

SEQ ID NO: 11281 - DNA, 1076 bp, Glycine max
  Gm_smallRNAprecursor_4114
ccatctttcgggaagagttacttcatcccattttatttttctcgggagagaaacattagcctttgtcatatcagtgataaacaaagttgtttctcctttttgaggttttaacaagactctagatgcacaagtattcatgaccttgtactggatcctataaattaaggctgctgggattgatccttctttcatgtcaaggccatgaaagtggatgtttaagaacagagagtcaagaatgtttttgtccatcaaactcactgttttgtttggataacaattaaaatatattggaccttgtcctaggctggtttcgactgttccaattagggagtcttcaaatttattatgcctaatatctcttagacacattaaaactgctgcatctatgcccatgtcaattaagggcttgatggctacttgtacacaaccgatgtgtagatatttatacttacggctatgttcataaattgaattttttgaaagtaaatgaaattcttcccctatatcttgtcctagaggaatattgttttctactgttttgattatgtaatcaaagttgtgtttgtccttaattgtttcaggaacgtatagttgatcctgagggatttttggaatgtttcagtcatccatgttttgattgatatcttcgaatcggacttcctcatcgaagagattgtgtttgggggcgacctcttgggtctggttatcttgatcatttagtaaattggagtttcttgaagaagatgatgaggaggaatttgatcgaaaagagatacgggaaaaagatcgcaatagtctagacatgattataacattctctaatatctttgccttcatttggttccatagaaatatttccataaggctatatgttacagaacttcttggatctgaacaaatgaaaaagatttttttttttacggtcaatatagtttgagcactactcctatagccaccagtatattatgtctcaatattttatttgaacaatcactactacaaaagtttcattttacgacgcaggatctacgacggttcatgaagacccgatttagaaggtggcgcagtgacatttc

SEQ ID NO: 11282 - DNA, 1159 bp, Glycine max
  Gm_smallRNAprecursor_4115
ccatctttcgggaagagttacttcatcccattttatttttctcgggagagaaacattagcctttgtcatatcagtgataaacaaagttgtttctcctttttgaggttttaacaagactctagatgcacaagtattcatgaccttgtactggatcctataaattaaggctgctgggattgatccttctttcatgtcaaggccatgaaagtggatgtttaagaacagagagtcaagaatgtttttgtccatcaaactcactgttttgtttggataacaattaaaatatattggaccttgtcctaggctggtttcgactgttccaattagggagtcttcaaatttattatgcctaatatctcttagacacattaaaactgctgcatctatgcccatgtcaattaagggcttgatggctacttgtacacaaccgatgtgtagatatttatacttacggctatgttcataaattgaattttttgaaagtaaatgaaattcttcccctatatcttgtcctagaggaatattgttttctactgttttgattatgtaatcaaagttgtgtttgtccttaattgtttcaggaacgtatagttgatcctgagggatttttggaatgtttcagtcatccatgttttgattgatatcttcgaatcggacttcctcatcgaagagattgtgtttgggggcgacctcttgggtctggttatcttgatcatttagtaaattggagtttcttgaagaagatgatgaggaggaatttgatcgaaaagagatacgggaaaaagatcgcaatagtctagacatgattataacattctctaatatctttgccttcatttggttccatagaaatatttccataaggctatatgttacagaacttcttggatctgaacaaatgaaaaagatttttttttttacggtcaatatagtttgagcactactcctatagccaccagtatattatgtctcaatattttatttgaacaatcactactacaaaagtttcattttacgacgcaggatctacgacggttcatgaagacccgatttagaaggtggcgcagtgacatttctgtaattaggagcaaagtttttagtttttacatcgcgatttctaagacggtcgtatataaccgtcttagaatgcttaataatg

SEQ ID NO: 11283 - DNA, 1154 bp, Glycine max
  Gm_smallRNAprecursor_4116
catttgccttatttatggaagccaacgagggtggctaggaatagctaggataggtagggttttcatcatggtcaagggtcattgatgcacccttttaactctgaggtcatgaatatatatatatatatatatatatatatatatatatatatatatatatagaacgtcttgtcttcaatcttgtggagtattctagatctcagatctagtttgctttgtgttgtgttgttagtttgccttggagtttcatgttcttatccagatgatgagagcttcagatcaggtttctagttcctatttgggtgtggttatgtagatatgagtctttgtgatgaggttcatggtcttggtgctttggtgtttttctttgtggggtggttctagctagctagggtttgggtagtgagtgtaataaagttgcaaagtttttggttaggttacgttttgaccttattattatagttcaaagggaaacattaattaaaggggattatgaagtggagctccttgaagtccaattgaggatcttactgggtgaattgagctgcttagctatggatcccacagttctacccatcaataagtgcttttgtggtagtcttgtggcttccatatctggggagcttcatttgcctttatagtattaaccttctttggattgaagggagctctacacccttctcttcttttctctcataataatttaaatttgttatagactctaaactttaaatgttttttttgaagtttttccgtttttctcttttgccatgatcccgttcttgctgtggagtaaccttgtccgaggtatgtgcatgattagatccatacttaatttgtgtgcatcacgaaggtgaggttgaaatgaactttgcttttttgaccttttaggaaagttcttttgttgcagtaatcaattttaattagttttaattgacactattacttttattgtcatctttgttagttttattgttgaattgagtgcatatttcctaggaaattctcttacctaacattttttatacagatctatgctcttggctcttgcccttactcttggccttgtgttggttatttgtctacatatttattgactggtcgatgagacatgtcacaattcttgggcttatttgttggtctaataaaaggag

SEQ ID NO: 11284 - DNA, 1182 bp, Glycine max
  Gm_smallRNAprecursor_4117
aaatcttgtttcagagcacctctcttccgaaacctgaaaaatggctaaatgaaagggtgcctcacaacatacttgaggactccttatatagccaaaaatctaagaccggtagttgccggtagttttgaccgggactatttgactgtttgttacaagacaagtagttttgaccgggactttaatggctacaggacaggtagtattgtccatcattaattacacattaattacaaacagacggttttgtgaccgaaatttaatctaaacagataccaaaacaatcatcttcgttttggtaaaagggatcttcttcgtcttcttcaggagaacttgtttcttccttctttgaggatgaagcttcttcttcctgttgtaacatttgtagaacttccttcagatttttagctaagacctcctttgatgtagatcctgctaaaaatgccgccagatgagacttttggttcaagaacacagaagtctctggatcagccgctttgaggaattctggatgggattggaaccatagttttacttgttctggatccgctttagatgagtcaaattgtgtccaccattttacaaatgcgtgtctttgtagtgatggatattggtttgtcttttcagtcttgctgtaacgatattgccatgagaatatccatgacagtgcaaagcttgaaaagtatttaagatctgctggaattcgtgattcctgcgaattgtattgtttcttaaattgggaaaatccttgttggaccgtttttgggaatatctctgggattggtccaaagaagtcccaccattgcaaaaaccagttgggaaaattgtaaattgtgttggtcttgaaatatatcagccatgaatgcttgaagcgggtattttggtgccaaaacaccttagtccaagcatcaacgtaatcccaataggtataacctaccggatcaaatggaactgaaaatctctttcctttgttcaagtccgaaccaaagtgtcttggttgaagaacttttagtatttggatggttgagtgggtgtttaaagtttggtcttttggatctttgaaatgtttgatagatactgagtttgaatctaccaaaatcaattcataaaaagttcttgtcttcaggatggtggttggtttgtagtgaaatcctggtgggaaagccttggccgtcgccttgaagg

SEQ ID NO: 11285 - DNA, 1031 bp, Glycine max
  Gm_smallRNAprecursor_4118
acaagacaagtagttttgaccgggactttaatggctacaggacaggtagtattgtccatcattaattacacattaattacaaacagacggttttgtgaccgaaatttaatctaaacagataccaaaacaatcatcttcgttttggtaaaagggatcttcttcgtcttcttcaggagaacttgtttcttccttctttgaggatgaagcttcttcttcctgttgtaacatttgtagaacttccttcagatttttagctaagacctcctttgatgtagatcctgctaaaaatgccgccagatgagacttttggttcaagaacacagaagtctctggatcagccgctttgaggaattctggatgggattggaaccatagttttacttgttctggatccgctttagatgagtcaaattgtgtccaccattttacaaatgcgtgtctttgtagtgatggatattggtttgtcttttcagtcttgctgtaacgatattgccatgagaatatccatgacagtgcaaagcttgaaaagtatttaagatctgctggaattcgtgattcctgcgaattgtattgtttcttaaattgggaaaatccttgttggaccgtttttgggaatatctctgggattggtccaaagaagtcccaccattgcaaaaaccagttgggaaaattgtaaattgtgttggtcttgaaatatatcagccatgaatgcttgaagcgggtattttggtgccaaaacaccttagtccaagcatcaacgtaatcccaataggtataacctaccggatcaaatggaactgaaaatctctttcctttgttcaagtccgaaccaaagtgtcttggttgaagaacttttagtatttggatggttgagtgggtgtttaaagtttggtcttttggatctttgaaatgtttgatagatactgagtttgaatctaccaaaatcaattcataaaaagttcttgtcttcaggatggtggttggtttgtagtgaaatcctggtgggaaagccttggccgtcgccttgaagg

SEQ ID NO: 11286 - DNA, 1031 bp, Glycine max; identical to SEQ ID NO: 11285
  Gm_smallRNAprecursor_4119

SEQ ID NO: 11287 - DNA, 1114 bp, Glycine max
  Gm_smallRNAprecursor_4120
gaccgggactttaatggctacaggacaggtagtattgtccatcattaattacacattaattacaaacagacggttttgtgaccgaaatttaatctaaacagataccaaaacaatcatcttcgttttggtaaaagggatcttcttcgtcttcttcaggagaacttgtttcttccttctttgaggatgaagcttcttcttcctgttgtaacatttgtagaacttccttcagatttttagctaagacctcctttgatgtagatcctgctaaaaatgccgccagatgagacttttggttcaagaacacagaagtctctggatcagccgctttgaggaattctggatgggattggaaccatagttttacttgttctggatccgctttagatgagtcaaattgtgtccaccattttacaaatgcgtgtctttgtagtgatggatattggtttgtcttttcagtcttgctgtaacgatattgccatgagaatatccatgacagtgcaaagcttgaaaagtatttaagatctgctggaattcgtgattcctgcgaattgtattgtttcttaaattgggaaaatccttgttggaccgtttttgggaatatctctgggattggtccaaagaagtcccaccattgcaaaaaccagttgggaaaattgtaaattgtgttggtcttgaaatatatcagccatgaatgcttgaagcgggtattttggtgccaaaacaccttagtccaagcatcaacgtaatcccaataggtataacctaccggatcaaatggaactgaaaatctctttcctttgttcaagtccgaaccaaagtgtcttggttgaagaacttttagtatttggatggttgagtgggtgtttaaagtttggtcttttggatctttgaaatgtttgatagatactgagtttgaatctaccaaaatcaattcataaaaagttcttgtcttcaggatggtggttggtttgtagtgaaatcctggtgggaaagccttggccgtcgccttgaagggatttttgtcccaaaattcaggttccatctgcaaaacagttaacaatttatttttataaatataattgttagtttgtttggtaggtggtgtttgagtttt

SEQ ID NO: 11288 - DNA, 1146 bp, Glycine max
  Gm_smallRNAprecursor_4121
atggctacaggacaggtagtattgtccatcattaattacacattaattacaaacagacggttttgtgaccgaaatttaatctaaacagataccaaaacaatcatcttcgttttggtaaaagggatcttcttcgtcttcttcaggagaacttgtttcttccttctttgaggatgaagcttcttcttcctgttgtaacatttgtagaacttccttcagatttttagctaagacctcctttgatgtagatcctgctaaaaatgccgccagatgagacttttggttcaagaacacagaagtctctggatcagccgctttgaggaattctggatgggattggaaccatagttttacttgttctggatccgctttagatgagtcaaattgtgtccaccattttacaaatgcgtgtctttgtagtgatggatattggtttgtcttttcagtcttgctgtaacgatattgccatgagaatatccatgacagtgcaaagcttgaaaagtatttaagatctgctggaattcgtgattcctgcgaattgtattgtttcttaaattgggaaaatccttgttggaccgtttttgggaatatctctgggattggtccaaagaagtcccaccattgcaaaaaccagttgggaaaattgtaaattgtgttggtcttgaaatatatcagccatgaatgcttgaagcgggtattttggtgccaaaacaccttagtccaagcatcaacgtaatcccaataggtataacctaccggatcaaatggaactgaaaatctctttcctttgttcaagtccgaaccaaagtgtcttggttgaagaacttttagtatttggatggttgagtgggtgtttaaagtttggtcttttggatctttgaaatgtttgatagatactgagtttgaatctaccaaaatcaattcataaaaagttcttgtcttcaggatggtggttggtttgtagtgaaatcctggtgggaaagccttggccgtcgccttgaagggatttttgtcccaaaattcaggttccatctgcaaaacagttaacaatttatttttataaatataattgttagtttgtttggtaggtggtgtttgagttttggctaaaggtagttttcctttagtattggtggctgttttggtcat

SEQ ID NO: 11289 - DNA, 1146 bp, Glycine max; identical to SEQ ID NO: 11288
  Gm_smallRNAprecursor_4122

SEQ ID NO: 11290 - DNA, 1147 bp, Glycine max
  Gm_smallRNAprecursor_4123
atggctacaggacaggtagtattgtccatcattaattacacattaattacaaacagacggttttgtgaccgaaatttaatctaaacagataccaaaacaatcatcttcgttttggtaaaagggatcttcttcgtcttcttcaggagaacttgtttcttccttctttgaggatgaagcttcttcttcctgttgtaacatttgtagaacttccttcagatttttagctaagacctcctttgatgtagatcctgctaaaaatgccgccagatgagacttttggttcaagaacacagaagtctctggatcagccgctttgaggaattctggatgggattggaaccatagttttacttgttctggatccgctttagatgagtcaaattgtgtccaccattttacaaatgcgtgtctttgtagtgatggatattggtttgtcttttcagtcttgctgtaacgatattgccatgagaatatccatgacagtgcaaagcttgaaaagtatttaagatctgctggaattcgtgattcctgcgaattgtattgtttcttaaattgggaaaatccttgttggaccgtttttgggaatatctctgggattggtccaaagaagtcccaccattgcaaaaaccagttgggaaaattgtaaattgtgttggtcttgaaatatatcagccatgaatgcttgaagcgggtattttggtgccaaaacaccttagtccaagcatcaacgtaatcccaataggtataacctaccggatcaaatggaactgaaaatctctttcctttgttcaagtccgaaccaaagtgtcttggttgaagaacttttagtatttggatggttgagtgggtgtttaaagtttggtcttttggatctttgaaatgtttgatagatactgagtttgaatctaccaaaatcaattcataaaaagttcttgtcttcaggatggtggttggtttgtagtgaaatcctggtgggaaagccttggccgtcgccttgaagggatttttgtcccaaaattcaggttccatctgcaaaacagttaacaatttatttttataaatataattgttagtttgtttggtaggtggtgtttgagttttggctaaaggtagttttcctttagtattggtggctgttttggtcatt

SEQ ID NO: 11291 - DNA, 1147 bp, Glycine max; identical to SEQ ID NO: 11290
  Gm_smallRNAprecursor_4124

SEQ ID NO: 11292 - DNA, 1247 bp, Glycine max
  Gm_smallRNAprecursor_4125
atggctacaggacaggtagtattgtccatcattaattacacattaattacaaacagacggttttgtgaccgaaatttaatctaaacagataccaaaacaatcatcttcgttttggtaaaagggatcttcttcgtcttcttcaggagaacttgtttcttccttctttgaggatgaagcttcttcttcctgttgtaacatttgtagaacttccttcagatttttagctaagacctcctttgatgtagatcctgctaaaaatgccgccagatgagacttttggttcaagaacacagaagtctctggatcagccgctttgaggaattctggatgggattggaaccatagttttacttgttctggatccgctttagatgagtcaaattgtgtccaccattttacaaatgcgtgtctttgtagtgatggatattggtttgtcttttcagtcttgctgtaacgatattgccatgagaatatccatgacagtgcaaagcttgaaaagtatttaagatctgctggaattcgtgattcctgcgaattgtattgtttcttaaattgggaaaatccttgttggaccgtttttgggaatatctctgggattggtccaaagaagtcccaccattgcaaaaaccagttgggaaaattgtaaattgtgttggtcttgaaatatatcagccatgaatgcttgaagcgggtattttggtgccaaaacaccttagtccaagcatcaacgtaatcccaataggtataacctaccggatcaaatggaactgaaaatctctttcctttgttcaagtccgaaccaaagtgtcttggttgaagaacttttagtatttggatggttgagtgggtgtttaaagtttggtcttttggatctttgaaatgtttgatagatactgagtttgaatctaccaaaatcaattcataaaaagttcttgtcttcaggatggtggttggtttgtagtgaaatcctggtgggaaagccttggccgtcgccttgaagggatttttgtcccaaaattcaggttccatctgcaaaacagttaacaatttatttttataaatataattgttagtttgtttggtaggtggtgtttgagttttggctaaaggtagttttcctttagtattggtggctgttttggtcattgacgcattttggatcattatttgtaaatttgattcagattcatcatcagattctgaggcaatgtctgcccaagattttttgattatttttggaaatttgg

SEQ ID NO: 11293 - DNA, 1247 bp, Glycine max; identical to SEQ ID NO: 11292
  Gm_smallRNAprecursor_4126

SEQ ID NO: 11294 - DNA, 1072 bp, Glycine max
  Gm_smallRNAprecursor_4127
gcttcttcttcctgttgtaacatttgtagaacttccttcagatttttagctaagacctcctttgatgtagatcctgctaaaaatgccgccagatgagacttttggttcaagaacacagaagtctctggatcagccgctttgaggaattctggatgggattggaaccatagttttacttgttctggatccgctttagatgagtcaaattgtgtccaccattttacaaatgcgtgtctttgtagtgatggatattggtttgtcttttcagtcttgctgtaacgatattgccatgagaatatccatgacagtgcaaagcttgaaaagtatttaagatctgctggaattcgtgattcctgcgaattgtattgtttcttaaattgggaaaatccttgttggaccgtttttgggaatatctctgggattggtccaaagaagtcccaccattgcaaaaaccagttgggaaaattgtaaattgtgttggtcttgaaatatatcagccatgaatgcttgaagcgggtattttggtgccaaaacaccttagtccaagcatcaacgtaatcccaataggtataacctaccggatcaaatggaactgaaaatctctttcctttgttcaagtccgaaccaaagtgtcttggttgaagaacttttagtatttggatggttgagtgggtgtttaaagtttggtcttttggatctttgaaatgtttgatagatactgagtttgaatctaccaaaatcaattcataaaaagttcttgtcttcaggatggtggttggtttgtagtgaaatcctggtgggaaagccttggccgtcgccttgaagggatttttgtcccaaaattcaggttccatctgcaaaacagttaacaatttatttttataaatataattgttagtttgtttggtaggtggtgtttgagttttggctaaaggtagttttcctttagtattggtggctgttttggtcattgacgcattttggatcattatttgtaaatttgattcagattcatcatcagattctgaggcaatgtctgcccaagattttttgattatttttggaaatttgg

SEQ ID NO: 11295 - DNA, 1124 bp, Glycine max
  Gm_smallRNAprecursor_4128
ccttcagatttttagctaagacctcctttgatgtagatcctgctaaaaatgccgccagatgagacttttggttcaagaacacagaagtctctggatcagccgctttgaggaattctggatgggattggaaccatagttttacttgttctggatccgctttagatgagtcaaattgtgtccaccattttacaaatgcgtgtctttgtagtgatggatattggtttgtcttttcagtcttgctgtaacgatattgccatgagaatatccatgacagtgcaaagcttgaaaagtatttaagatctgctggaattcgtgattcctgcgaattgtattgtttcttaaattgggaaaatccttgttggaccgtttttgggaatatctctgggattggtccaaagaagtcccaccattgcaaaaaccagttgggaaaattgtaaattgtgttggtcttgaaatatatcagccatgaatgcttgaagcgggtattttggtgccaaaacaccttagtccaagcatcaacgtaatcccaataggtataacctaccggatcaaatggaactgaaaatctctttcctttgttcaagtccgaaccaaagtgtcttggttgaagaacttttagtatttggatggttgagtgggtgtttaaagtttggtcttttggatctttgaaatgtttgatagatactgagtttgaatctaccaaaatcaattcataaaaagttcttgtcttcaggatggtggttggtttgtagtgaaatcctggtgggaaagccttggccgtcgccttgaagggatttttgtcccaaaattcaggttccatctgcaaaacagttaacaatttatttttataaatataattgttagtttgtttggtaggtggtgtttgagttttggctaaaggtagttttcctttagtattggtggctgttttggtcattgacgcattttggatcattatttgtaaatttgattcagattcatcatcagattctgaggcaatgtctgcccaagattttttgattatttttggaaatttggtcagacccatgtcttgaagggcctgaagggtttcaattggccatgcatagtcggccgatgtttgtttggcggttgccggtttggga

SEQ ID NO: 11296 - DNA, 1087 bp, Glycine max
  Gm_smallRNAprecursor_4129
tcctgctaaaaatgccgccagatgagacttttggttcaagaacacagaagtctctggatcagccgctttgaggaattctggatgggattggaaccatagttttacttgttctggatccgctttagatgagtcaaattgtgtccaccattttacaaatgcgtgtctttgtagtgatggatattggtttgtcttttcagtcttgctgtaacgatattgccatgagaatatccatgacagtgcaaagcttgaaaagtatttaagatctgctggaattcgtgattcctgcgaattgtattgtttcttaaattgggaaaatccttgttggaccgtttttgggaatatctctgggattggtccaaagaagtcccaccattgcaaaaaccagttgggaaaattgtaaattgtgttggtcttgaaatatatcagccatgaatgcttgaagcgggtattttggtgccaaaacaccttagtccaagcatcaacgtaatcccaataggtataacctaccggatcaaatggaactgaaaatctctttcctttgttcaagtccgaaccaaagtgtcttggttgaagaacttttagtatttggatggttgagtgggtgtttaaagtttggtcttttggatctttgaaatgtttgatagatactgagtttgaatctaccaaaatcaattcataaaaagttcttgtcttcaggatggtggttggtttgtagtgaaatcctggtgggaaagccttggccgtcgccttgaagggatttttgtcccaaaattcaggttccatctgcaaaacagttaacaatttatttttataaatataattgttagtttgtttggtaggtggtgtttgagttttggctaaaggtagttttcctttagtattggtggctgttttggtcattgacgcattttggatcattatttgtaaatttgattcagattcatcatcagattctgaggcaatgtctgcccaagattttttgattatttttggaaatttggtcagacccatgtcttgaagggcctgaagggtttcaattggccatgcatagtcggccgatgtttgtttggcggttgccggtttggga

SEQ ID NO: 11297 - DNA, 1174 bp, Glycine max
  Gm_smallRNAprecursor_4130
cgggtattttggtgccaaaacaccttagtccaagcatcaacgtaatcccaataggtataacctaccggatcaaatggaactgaaaatctctttcctttgttcaagtccgaaccaaagtgtcttggttgaagaacttttagtatttggatggttgagtgggtgtttaaagtttggtcttttggatctttgaaatgtttgatagatactgagtttgaatctaccaaaatcaattcataaaaagttcttgtcttcaggatggtggttggtttgtagtgaaatcctggtgggaaagccttggccgtcgccttgaagggatttttgtcccaaaattcaggttccatctgcaaaacagttaacaatttatttttataaatataattgttagtttgtttggtaggtggtgtttgagttttggctaaaggtagttttcctttagtattggtggctgttttggtcattgacgcattttggatcattatttgtaaatttgattcagattcatcatcagattctgaggcaatgtctgcccaagattttttgattatttttggaaatttggtcagacccatgtcttgaagggcctgaagggtttcaattggccatgcatagtcggccgatgtttgtttggcggttgccggtttgggagattcctgagtggatgactcaggtttgattgaggcaatctgggttgatgacccttctgaattggttttctgggtagatgacccagcctgggttggtgacccagaagaggtagatgatttcttgatggttggctctggaagagccagcctggctcctttgcctgtactccttcctccccgtagggagattcccgatgccttaggaggcattaccacttttctgtaagaattcacgggtaaggtagtcaggtagtgaatttgaggtgcccttgatgtattctatgtcaaaatcaaagacacttaaaattgcttgccatcgtgcaaaaatttgttttgagacaaggtttttaacatctttttgtaaaatatctttggctgatttacaatcaaccctgattaaaaatttttggtttaataaatctgattgaaatttggaaatgcacaaaacaattgctaaaacttcttttttaacagttgaatattttaattatgcaggattccaatgttttgatgtatatgcaatgacatga

SEQ ID NO: 11298 - DNA, 1173 bp, Glycine max
  Gm_smallRNAprecursor_4131
gggtattttggtgccaaaacaccttagtccaagcatcaacgtaatcccaataggtataacctaccggatcaaatggaactgaaaatctctttcctttgttcaagtccgaaccaaagtgtcttggttgaagaacttttagtatttggatggttgagtgggtgtttaaagtttggtcttttggatctttgaaatgtttgatagatactgagtttgaatctaccaaaatcaattcataaaaagttcttgtcttcaggatggtggttggtttgtagtgaaatcctggtgggaaagccttggccgtcgccttgaagggatttttgtcccaaaattcaggttccatctgcaaaacagttaacaatttatttttataaatataattgttagtttgtttggtaggtggtgtttgagttttggctaaaggtagttttcctttagtattggtggctgttttggtcattgacgcattttggatcattatttgtaaatttgattcagattcatcatcagattctgaggcaatgtctgcccaagattttttgattatttttggaaatttggtcagacccatgtcttgaagggcctgaagggtttcaattggccatgcatagtcggccgatgtttgtttggcggttgccggtttgggagattcctgagtggatgactcaggtttgattgaggcaatctgggttgatgacccttctgaattggttttctgggtagatgacccagcctgggttggtgacccagaagaggtagatgatttcttgatggttggctctggaagagccagcctggctcctttgcctgtactccttcctccccgtagggagattcccgatgccttaggaggcattaccacttttctgtaagaattcacgggtaaggtagtcaggtagtgaatttgaggtgcccttgatgtattctatgtcaaaatcaaagacacttaaaattgcttgccatcgtgcaaaaatttgttttgagacaaggtttttaacatctttttgtaaaatatctttggctgatttacaatcaaccctgattaaaaatttttggtttaataaatctgattgaaatttggaaatgcacaaaacaattgctaaaacttcttttttaacagttgaatattttaattatgcaggattccaatgttttgatgtatatgcaatgacatga

SEQ ID NO: 11299 - DNA, 1176 bp, Glycine max
  Gm_smallRNAprecursor_4132
gggtattttggtgccaaaacaccttagtccaagcatcaacgtaatcccaataggtataacctaccggatcaaatggaactgaaaatctctttcctttgttcaagtccgaaccaaagtgtcttggttgaagaacttttagtatttggatggttgagtgggtgtttaaagtttggtcttttggatctttgaaatgtttgatagatactgagtttgaatctaccaaaatcaattcataaaaagttcttgtcttcaggatggtggttggtttgtagtgaaatcctggtgggaaagccttggccgtcgccttgaagggatttttgtcccaaaattcaggttccatctgcaaaacagttaacaatttatttttataaatataattgttagtttgtttggtaggtggtgtttgagttttggctaaaggtagttttcctttagtattggtggctgttttggtcattgacgcattttggatcattatttgtaaatttgattcagattcatcatcagattctgaggcaatgtctgcccaagattttttgattatttttggaaatttggtcagacccatgtcttgaagggcctgaagggtttcaattggccatgcatagtcggccgatgtttgtttggcggttgccggtttgggagattcctgagtggatgactcaggtttgattgaggcaatctgggttgatgacccttctgaattggttttctgggtagatgacccagcctgggttggtgacccagaagaggtagatgatttcttgatggttggctctggaagagccagcctggctcctttgcctgtactccttcctccccgtagggagattcccgatgccttaggaggcattaccacttttctgtaagaattcacgggtaaggtagtcaggtagtgaatttgaggtgcccttgatgtattctatgtcaaaatcaaagacacttaaaattgcttgccatcgtgcaaaaatttgttttgagacaaggtttttaacatctttttgtaaaatatctttggctgatttacaatcaaccctgattaaaaatttttggtttaataaatctgattgaaatttggaaatgcacaaaacaattgctaaaacttcttttttaacagttgaatattttaattatgcaggattccaatgttttgatgtatatgcaatgacatgatct

SEQ ID NO: 11300 - DNA, 1071 bp, Glycine max
  Gm_smallRNAprecursor_4133
tgaattggttttctgggtagatgacccagcctgggttggtgacccagaagaggtagatgatttcttgatggttggctctggaagagccagcctggctcctttgcctgtactccttcctccccgtagggagattcccgatgccttaggaggcattaccacttttctgtaagaattcacgggtaaggtagtcaggtagtgaatttgaggtgcccttgatgtattctatgtcaaaatcaaagacacttaaaattgcttgccatcgtgcaaaaatttgttttgagacaaggtttttaacatctttttgtaaaatatctttggctgatttacaatcaaccctgattaaaaatttttggtttaataaatctgattgaaatttggaaatgcacaaaacaattgctaaaacttcttttttaacagttgaatattttaattatgcaggattccaatgttttgatgtatatgcaatgacatgatcttggccatggactctttgtttgaggatgccaccataacctatgtctgaagcatcagtttcgacaattttaaatgcctgtggaataggaagatacagacatttaatggattggactttgactttgatttctttaactgtttgtgtatggaggtcagaccaaggaggcggatttttcttcagcctatcatgtaatggcttgacaatattatttaaataggggacaaattctcctacgtaatttagacaacctagaaatctttgtaactgggttttgtctaagatttggttgggaaatttgctagcaaactctattgacctttcgattggaatgattgtaccttgatatatattgtgaccaaggaatcgaattcgagtttggaaaagattgatttttgatttggagactgccaaaccattttgtttgatgatatgtatgaaagtttggagatgtttgaaatgttggtcaatgttttgggaaaagattaaaacatcatctatgtagacaatgacaaattttgaataaggattaaaaatatcgttcataattttttgaaattctgaaggggcattcttcagtccgaatggcatcacgttcc

SEQ ID NO: 11301 - DNA, 1073 bp, Glycine max
  Gm_smallRNAprecursor_4134
tgaattggttttctgggtagatgacccagcctgggttggtgacccagaagaggtagatgatttcttgatggttggctctggaagagccagcctggctcctttgcctgtactccttcctccccgtagggagattcccgatgccttaggaggcattaccacttttctgtaagaattcacgggtaaggtagtcaggtagtgaatttgaggtgcccttgatgtattctatgtcaaaatcaaagacacttaaaattgcttgccatcgtgcaaaaatttgttttgagacaaggtttttaacatctttttgtaaaatatctttggctgatttacaatcaaccctgattaaaaatttttggtttaataaatctgattgaaatttggaaatgcacaaaacaattgctaaaacttcttttttaacagttgaatattttaattatgcaggattccaatgttttgatgtatatgcaatgacatgatcttggccatggactctttgtttgaggatgccaccataacctatgtctgaagcatcagtttcgacaattttaaatgcctgtggaataggaagatacagacatttaatggattggactttgactttgatttctttaactgtttgtgtatggaggtcagaccaaggaggcggatttttcttcagcctatcatgtaatggcttgacaatattatttaaataggggacaaattctcctacgtaatttagacaacctagaaatctttgtaactgggttttgtctaagatttggttgggaaatttgctagcaaactctattgacctttcgattggaatgattgtaccttgatatatattgtgaccaaggaatcgaattcgagtttggaaaagattgatttttgatttggagactgccaaaccattttgtttgatgatatgtatgaaagtttggagatgtttgaaatgttggtcaatgttttgggaaaagattaaaacatcatctatgtagacaatgacaaattttgaataaggattaaaaatatcgttcataattttttgaaattctgaaggggcattcttcagtccgaatggcatcacgttccat

SEQ ID NO: 11302 - DNA, 1180 bp, Glycine max
  Gm_smallRNAprecursor_4135
tggttggctctggaagagccagcctggctcctttgcctgtactccttcctccccgtagggagattcccgatgccttaggaggcattaccacttttctgtaagaattcacgggtaaggtagtcaggtagtgaatttgaggtgcccttgatgtattctatgtcaaaatcaaagacacttaaaattgcttgccatcgtgcaaaaatttgttttgagacaaggtttttaacatctttttgtaaaatatctttggctgatttacaatcaaccctgattaaaaatttttggtttaataaatctgattgaaatttggaaatgcacaaaacaattgctaaaacttcttttttaacagttgaatattttaattatgcaggattccaatgttttgatgtatatgcaatgacatgatcttggccatggactctttgtttgaggatgccaccataacctatgtctgaagcatcagtttcgacaattttaaatgcctgtggaataggaagatacagacatttaatggattggactttgactttgatttctttaactgtttgtgtatggaggtcagaccaaggaggcggatttttcttcagcctatcatgtaatggcttgacaatattatttaaataggggacaaattctcctacgtaatttagacaacctagaaatctttgtaactgggttttgtctaagatttggttgggaaatttgctagcaaactctattgacctttcgattggaatgattgtaccttgatatatattgtgaccaaggaatcgaattcgagtttggaaaagattgatttttgatttggagactgccaaaccattttgtttgatgatatgtatgaaagtttggagatgtttgaaatgttggtcaatgttttgggaaaagattaaaacatcatctatgtagacaatgacaaattttgaataaggattaaaaatatcgttcataattttttgaaattctgaaggggcattcttcagtccgaatggcatcacgttccattcatattgcccgaaaggtacagtaaacgctgttttgtacctatctgattcttggatttggatttgccaaaatccagatttcatatcaaattttgaaaatatctttgcataatttaatctgttaagcaaatcttttttgtttggaataggatatctaatccattgtaatgcttgat

SEQ ID NO: 11303 - DNA, 1181 bp, Glycine max
  Gm_smallRNAprecursor_4136
tggttggctctggaagagccagcctggctcctttgcctgtactccttcctccccgtagggagattcccgatgccttaggaggcattaccacttttctgtaagaattcacgggtaaggtagtcaggtagtgaatttgaggtgcccttgatgtattctatgtcaaaatcaaagacacttaaaattgcttgccatcgtgcaaaaatttgttttgagacaaggtttttaacatctttttgtaaaatatctttggctgatttacaatcaaccctgattaaaaatttttggtttaataaatctgattgaaatttggaaatgcacaaaacaattgctaaaacttcttttttaacagttgaatattttaattatgcaggattccaatgttttgatgtatatgcaatgacatgatcttggccatggactctttgtttgaggatgccaccataacctatgtctgaagcatcagtttcgacaattttaaatgcctgtggaataggaagatacagacatttaatggattggactttgactttgatttctttaactgtttgtgtatggaggtcagaccaaggaggcggatttttcttcagcctatcatgtaatggcttgacaatattatttaaataggggacaaattctcctacgtaatttagacaacctagaaatctttgtaactgggttttgtctaagatttggttgggaaatttgctagcaaactctattgacctttcgattggaatgattgtaccttgatatatattgtgaccaaggaatcgaattcgagtttggaaaagattgatttttgatttggagactgccaaaccattttgtttgatgatatgtatgaaagtttggagatgtttgaaatgttggtcaatgttttgggaaaagattaaaacatcatctatgtagacaatgacaaattttgaataaggattaaaaatatcgttcataattttttgaaattctgaaggggcattcttcagtccgaatggcatcacgttccattcatattgcccgaaaggtacagtaaacgctgttttgtacctatctgattcttggatttggatttgccaaaatccagatttcatatcaaattttgaaaatatctttgcataatttaatctgttaagcaaatcttttttgtttggaataggatatctaatccattgtaatgcttgatt

SEQ ID NO: 11304 - DNA, 1182 bp, Glycine max
  Gm_smallRNAprecursor_4137
tggttggctctggaagagccagcctggctcctttgcctgtactccttcctccccgtagggagattcccgatgccttaggaggcattaccacttttctgtaagaattcacgggtaaggtagtcaggtagtgaatttgaggtgcccttgatgtattctatgtcaaaatcaaagacacttaaaattgcttgccatcgtgcaaaaatttgttttgagacaaggtttttaacatctttttgtaaaatatctttggctgatttacaatcaaccctgattaaaaatttttggtttaataaatctgattgaaatttggaaatgcacaaaacaattgctaaaacttcttttttaacagttgaatattttaattatgcaggattccaatgttttgatgtatatgcaatgacatgatcttggccatggactctttgtttgaggatgccaccataacctatgtctgaagcatcagtttcgacaattttaaatgcctgtggaataggaagatacagacatttaatggattggactttgactttgatttctttaactgtttgtgtatggaggtcagaccaaggaggcggatttttcttcagcctatcatgtaatggcttgacaatattatttaaataggggacaaattctcctacgtaatttagacaacctagaaatctttgtaactgggttttgtctaagatttggttgggaaatttgctagcaaactctattgacctttcgattggaatgattgtaccttgatatatattgtgaccaaggaatcgaattcgagtttggaaaagattgatttttgatttggagactgccaaaccattttgtttgatgatatgtatgaaagtttggagatgtttgaaatgttggtcaatgttttgggaaaagattaaaacatcatctatgtagacaatgacaaattttgaataaggattaaaaatatcgttcataattttttgaaattctgaaggggcattcttcagtccgaatggcatcacgttccattcatattgcccgaaaggtacagtaaacgctgttttgtacctatctgattcttggatttggatttgccaaaatccagatttcatatcaaattttgaaaatatctttgcataatttaatctgttaagcaaatcttttttgtttggaataggatatctaatccattgtaatgcttgattt

SEQ ID NO: 11305 - DNA, 1080 bp, Glycine max
  Gm_smallRNAprecursor_4138
gatgtttgaaatgttggtcaatgttttgggaaaagattaaaacatcatctatgtagacaatgacaaattttgaataaggattaaaaatatcgttcataattttttgaaattctgaaggggcattcttcagtccgaatggcatcacgttccattcatattgcccgaaaggtacagtaaacgctgttttgtacctatctgattcttggatttggatttgccaaaatccagatttcatatcaaattttgaaaatatctttgcataatttaatctgttaagcaaatcttttttgtttggaataggatatctaatccattgtaatgcttgatttaatggtttgtaatttatgactaagcggggtgttccacgctcaatctcagattgtttgttaacataaaaagccgcacaagaccatgggcttttgcttttccggattaggcctttatcaagcaaatccttgatttccttttgacagtattgaagaagttcttcattcatttggattggtctggcttttgtgggaatttgtttttccctaaagtctttctcataagggagatcgacaatatgtttctttctgtcccaaaatgcatgtggcaattcagaacaaacggtcgattcaatatgatttaataaagattgaattttttcttttatttggggttttcccagttgtatctgaatattattaaaagatacttcttcttttaagaagttaatttgattaatcttattttctataagatttatatttctagaaattggtttagtagaaaaattaaatataatttttcttcctaaataatttgtggttattccttcattagatatttggatgggaaacagggctctaatgaagggcgttcctaagattacttcattcttaaggttttttaccagaagaaagtttgtgttaatcttaagaccttggttttcaattattgcatttgatagcttaaaattaatttttaattttgagccgtttgccgtacttaatttttctgaggttttctcaaagaattttgtaggaattaatccttctaaaatgcagtttgaatcagcccctgtgtcaaatagggcca

SEQ ID NO: 11306 - DNA, 1159 bp, Glycine max
  Gm_smallRNAprecursor_4139
ccatcttttgggaagagttacttcatcccattttatttttctcgggagagacacgttagcctttgtcatatcagtgataaacaaggttgtttctcctttttgaggttttaacaggactctagatgcacaagtattcatgaccttgtactggatcctataaattaaggctgctgggattgatccttctttcatgtcaaggccatgaaagtggatgtttaagaacagagagtcaagaatgtttctgtccatcagactcactgttttgtttggataacaattaaaatatattggaccttgtcctaggctggtttcgactgttccaattagggagtcttcaaattgattatgcctaatatctcttagacacattaaaactgctgcatctatgcccatatcaattaagggcttgatggctacttgtacacaaccgatgtgtaggtatttatacttacggctatgttcataaattgaattttttgaaagtagatgaaattcttcccctatatcttgtcctagaggaatattgttttctactgttttgattatgtaatcaaagttgtgtttgtctttaattgtttcaggaacatatagttgatcctgagggatttctggaatgttccagtcatccatgttttgattaatatcttcgaatcggacttcctcatcgaagagattgtgttttgaggcgacctcttgggtctggttatcttgatcatttaagagattggtgtttcttgaagaagatgaagaggaggaattcgagcgaaaagaaatacgggaaaaggatcgcaataatctagacatatttaaaacattctctaatatctttgccttcatttggttccataggaatctttccataaggttatatgttacagaacttcttggatctgaataaatgaaaaagaagattttttttttttactgaacttatggatctgaagcatgtacagtaattttaatttaaacagtatgtgtttgaacagtattttctggaagcacagcagtctgatattttagttgaatgatactgtagcagtaagtcccgtggatgagaaagggcagtaaggctaaggtgtattgttcaaataaaatattgagacataatatactggtggctataggagtaatgttcaaactatattgtctgtaaaaaaaa

SEQ ID NO: 11307 - DNA, 1157 bp, Glycine max
  Gm_smallRNAprecursor_4140
aaaaagaagattttttttttttactgaacttatggatctgaagcatgtacagtaattttaatttaaacagtatgtgtttgaacagtattttctggaagcacagcagtctgatattttagttgaatgatactgtagcagtaagtcccgtggatgagaaagggcagtaaggctaaggtgtattgttcaaataaaatattgagacataatatactggtggctataggagtaatgttcaaactatattgtctgtaaaaaaaaaaaaaaatcttctttttcatttattcagatccaagaagttctgtaacatataaccttatggaaagattcctatggaaccaaatgaaggcaaagatattagagaatgttttaattatgtctagattattgcgatccttttcccgtatttcttttcgctcgaattcctcctcttcatcttcttcaagaaacaccaatctcttaaatgatcaagataaccagacccaagaggtcgccccaaaacacaatctcttcgatgaggaagtccgattcgaagatattaatcaaaacatggatgactggaacattccagaaatccctcaggatcaactatacgttcctgaaacaattaaagacaaacacaactttgattacataatcaaaacagtagaaaacaatattcctctaggacaagatataggggaagaatttcatctactttcaaaaaattcaatttatgaacatagccgtaagtataaatacctacacatcggttgtgtacaagtagccatcaagcccttaattgatatgggcatagatgcagcagttttaatgtgtctaagagatattaggcataatcaatttgaagactccctaattggaacagtcgaaaccagcctaggacaaggtccaatatattttaattgttatccaaacaaaacagtgagtctgatggacataaacattcttgactctctgttcttaaacatccactttcatggccttgacatgaaagaaggatcaacaaccttgtttatcactgatatgagaataaaccgatcaatacaaagagatttccaaggaggagatactcacacaaaccatcaaccaatagaggaatggaaaatcctaaacaaaaaacaaaatcaaaaataacgtgctacaattgtggaaaacaaggc

SEQ ID NO: 11308 - DNA, 1047 bp, Glycine max
  Gm_smallRNAprecursor_4141
taatatactggtggctataggagtaatgttcaaactatattgtctgtaaaaaaaaaaaaaaatcttctttttcatttattcagatccaagaagttctgtaacatataaccttatggaaagattcctatggaaccaaatgaaggcaaagatattagagaatgttttaattatgtctagattattgcgatccttttcccgtatttcttttcgctcgaattcctcctcttcatcttcttcaagaaacaccaatctcttaaatgatcaagataaccagacccaagaggtcgccccaaaacacaatctcttcgatgaggaagtccgattcgaagatattaatcaaaacatggatgactggaacattccagaaatccctcaggatcaactatacgttcctgaaacaattaaagacaaacacaactttgattacataatcaaaacagtagaaaacaatattcctctaggacaagatataggggaagaatttcatctactttcaaaaaattcaatttatgaacatagccgtaagtataaatacctacacatcggttgtgtacaagtagccatcaagcccttaattgatatgggcatagatgcagcagttttaatgtgtctaagagatattaggcataatcaatttgaagactccctaattggaacagtcgaaaccagcctaggacaaggtccaatatattttaattgttatccaaacaaaacagtgagtctgatggacataaacattcttgactctctgttcttaaacatccactttcatggccttgacatgaaagaaggatcaacaaccttgtttatcactgatatgagaataaaccgatcaatacaaagagatttccaaggaggagatactcacacaaaccatcaaccaatagaggaatggaaaatcctaaacaaaaaacaaaatcaaaaataacgtgctacaattgtggaaaacaaggccacatcagcaaatactgtaggctaaaaaagaagttaagaaaccttaacctagaacccgcaattgaagagcaaataaacaatttgctcatagaa

SEQ ID NO: 11309 - DNA, 1126 bp, Glycine max
  Gm_smallRNAprecursor_4142
aagattaacacaaactttcttctggtaaaaaaccttaagaatgaagtaatcttaggaacgtccttcattagagccctgtttcccatccaaatatctaatgaaggaataaccacaaattatttaggaagaaaaattatatttaatttttctactaaaccaatttctagaaatataaatcttatagaaaataagattaatcaaattaacttcttaaaagaagaagtatcttttaataatattcagatacaactgggaaaaccccaagtaaaagaaaaaattcaatctttattaaatcatattgaatcgaccgtttgttctgaattgccacatgcattttgggacagaaagaaacatattgtcgatctcccttatgagaaagactttagggaaaaacaaattcccacaaaagccagaccaatccaaatgaatgaagaacttcttcaatactgtcaaaaggaaatcaaggatttgcttgataaaggcctaatccggaaaagcaaaagcccatggtcttgtgcggctttttatgttaacaaacaatctgagattgagcgtggaacaccccgcttagtcataaattacaaaccattaaatcaagcattacaatggattagatatcctattccaaacaaaaaagatttgcttaacagattaaattatgcaaagatattttcaaaatttgatatgaaatctggattttggcaaatccaaatccaagaatcagataggtacaaaacagcgtttactgtacctttcgggcaatatgaatggaacgtgatgccattcggactgaagaatgccccttcagaatttcaaaaaattatgaacgatatttttaatccttattcaaaatttgtcattgtctacatagatgatgttttaatcttttcccaaaacattgaccaacatttcaaacatctccaaactttcatacatatcatcaaacaaaatggtttggcagtctccaaatcaaaaatcaatcttttccaaactcgaattcgattccttggtcacaatatatatcaaggtacaatcattccaatcgaaaggtcaatagagtttgctagcaaatttcccaaccaaatcttagacaaaacccagttacaaagatttctaggttgtctaa

SEQ ID NO: 11310 - DNA, 1234 bp, Glycine max
  Gm_smallRNAprecursor_4143
cccaagtaaaagaaaaaattcaatctttattaaatcatattgaatcgaccgtttgttctgaattgccacatgcattttgggacagaaagaaacatattgtcgatctcccttatgagaaagactttagggaaaaacaaattcccacaaaagccagaccaatccaaatgaatgaagaacttcttcaatactgtcaaaaggaaatcaaggatttgcttgataaaggcctaatccggaaaagcaaaagcccatggtcttgtgcggctttttatgttaacaaacaatctgagattgagcgtggaacaccccgcttagtcataaattacaaaccattaaatcaagcattacaatggattagatatcctattccaaacaaaaaagatttgcttaacagattaaattatgcaaagatattttcaaaatttgatatgaaatctggattttggcaaatccaaatccaagaatcagataggtacaaaacagcgtttactgtacctttcgggcaatatgaatggaacgtgatgccattcggactgaagaatgccccttcagaatttcaaaaaattatgaacgatatttttaatccttattcaaaatttgtcattgtctacatagatgatgttttaatcttttcccaaaacattgaccaacatttcaaacatctccaaactttcatacatatcatcaaacaaaatggtttggcagtctccaaatcaaaaatcaatcttttccaaactcgaattcgattccttggtcacaatatatatcaaggtacaatcattccaatcgaaaggtcaatagagtttgctagcaaatttcccaaccaaatcttagacaaaacccagttacaaagatttctaggttgtctaaattacgtaggagaatttgtcccctatttaaataatattgtcaagccattacatgataggctgaagaaaaatccgcctccttggtctgacctccatacacaaacaattaaagaaatcaaagtcaaagtccaatccattaaatgtctgtatcttcctattccacaggcatttaaaattgtcgaaactgatgcttcagacataggttatggtggcatcctcaaacaaagagtccatggccaagatcatgtcattgcatatacatcaaaacattggaatcctacacaattaaaatattcaactgttaaaaaagaagttttagcaattgttttgtgcatttccaaatttcaatcagatttattaaaccaaaa

SEQ ID NO: 11311 - DNA, 1095 bp, Glycine max
  Gm_smallRNAprecursor_4144
tgaatggaacgtgatgccattcggactgaagaatgccccttcagaatttcaaaaaattatgaacgatatttttaatccttattcaaaatttgtcattgtctacatagatgatgttttaatcttttcccaaaacattgaccaacatttcaaacatctccaaactttcatacatatcatcaaacaaaatggtttggcagtctccaaatcaaaaatcaatcttttccaaactcgaattcgattccttggtcacaatatatatcaaggtacaatcattccaatcgaaaggtcaatagagtttgctagcaaatttcccaaccaaatcttagacaaaacccagttacaaagatttctaggttgtctaaattacgtaggagaatttgtcccctatttaaataatattgtcaagccattacatgataggctgaagaaaaatccgcctccttggtctgacctccatacacaaacaattaaagaaatcaaagtcaaagtccaatccattaaatgtctgtatcttcctattccacaggcatttaaaattgtcgaaactgatgcttcagacataggttatggtggcatcctcaaacaaagagtccatggccaagatcatgtcattgcatatacatcaaaacattggaatcctacacaattaaaatattcaactgttaaaaaagaagttttagcaattgttttgtgcatttccaaatttcaatcagatttattaaaccaaaaatttttaatcagggttgattgtaaatcagccaaagatattttacaaaaagatgttaaaaaccttgcctcaaaacaaatttttgcacgatggcaagcaattttaagtgtctttgattttgacatagaatacatcaagggcacctcaaattcactacctgactaccttacccgtgaattcttacagaaaagtggtaatgcctcctaaggcatcgggaatctccctacggggaggaaggagtacaggcaaaggagccaggctggctcttccagagccaaccatcaagaaatcatctacctcttctgggtcaccaacccaggctgggtcatctacccagaaaaccaattcagaagggtcatcaacccaga

SEQ ID NO: 11312 - DNA, 1095 bp, Glycine max; identical to SEQ ID NO: 11311
  Gm_smallRNAprecursor_4145

SEQ ID NO: 11313 - DNA, 1095 bp, Glycine max; identical to SEQ ID NO: 11311
  Gm_smallRNAprecursor_4146

SEQ ID NO: 11314 - DNA, 1095 bp, Glycine max; identical to SEQ ID NO: 11311
  Gm_smallRNAprecursor_4147

SEQ ID NO: 11315 - DNA, 1082 bp, Glycine max
  Gm_smallRNAprecursor_4148
gttatgtaaagtttaaattacatatatacacaataaataaattaactttttttaaacctattctttagccattttttaaaaaaaatttaagtgtatatcgtgtttataatgataaattttgttaaaaataaattaaatttgtttgtaaagtgtttattttatcccactatatatctcatcttttgatgttccacccgcatccattttggcaccaatcattcgcaagaattaggattgaaagttagcaacagattcggttcgcggagcactggcccatgcggtagtgcaacgcatgggcttcttaccctttttgaaaattgattgaatgtgacgtgggccaatgacacctttgtaatcagacttgggtgttgctaggtgcacccagcccttaagctgaaatgacaaaaatacccttaatccgtaagtcatttaaattgatccgtaaaaagtttacagatcaacttgattcataagtcttttatggatcaacttgatccgtaaaagacttacggatcaagttgatctatattttccgtaaaaggcttacggatcaagttgatccgtaagccttttacgaatcaacttgatccgtaagtcttttacagaacaatacagatcaacttgatcggtagaagccttacggatcaacttgatctgtatcaaccttacggatcaacttgatccgtacaatttacggaccaccctcacatatacccatcacaaatgcgaaaaaagcgcagagatagttttgatattttaaaaaaatgctgggtgcaccagcaataatgctggttgcacctagcaactcccattagactttcaattgacaacaacatgcgagttccttggggcacccagcatttttgttggtacatccagtaattttcaaaactgaaaatatccttatgggtatttttggttataaataatagattaacttttttatttctgcaaccctttttttcttcttcgtaaaaccgcactcccttagtgtaacttgcttccattagcatccttttgtgagcgtttgttgtcgccggtgatatacggtgaagttcagtggtttatcgttgtcaaagaag

SEQ ID NO: 11316 - DNA, 1045 bp, Glycine max
  Gm_smallRNAprecursor_4149
taaattaactttttttaaacctattctttagccattttttaaaaaaaatttaagtgtatatcgtgtttataatgataaattttgttaaaaataaattaaatttgtttgtaaagtgtttattttatcccactatatatctcatcttttgatgttccacccgcatccattttggcaccaatcattcgcaagaattaggattgaaagttagcaacagattcggttcgcggagcactggcccatgcggtagtgcaacgcatgggcttcttaccctttttgaaaattgattgaatgtgacgtgggccaatgacacctttgtaatcagacttgggtgttgctaggtgcacccagcccttaagctgaaatgacaaaaatacccttaatccgtaagtcatttaaattgatccgtaaaaagtttacagatcaacttgattcataagtcttttatggatcaacttgatccgtaaaagacttacggatcaagttgatctatattttccgtaaaaggcttacggatcaagttgatccgtaagccttttacgaatcaacttgatccgtaagtcttttacagaacaatacagatcaacttgatcggtagaagccttacggatcaacttgatctgtatcaaccttacggatcaacttgatccgtacaatttacggaccaccctcacatatacccatcacaaatgcgaaaaaagcgcagagatagttttgatattttaaaaaaatgctgggtgcaccagcaataatgctggttgcacctagcaactcccattagactttcaattgacaacaacatgcgagttccttggggcacccagcatttttgttggtacatccagtaattttcaaaactgaaaatatccttatgggtatttttggttataaataatagattaacttttttatttctgcaaccctttttttcttcttcgtaaaaccgcactcccttagtgtaacttgcttccattagcatccttttgtgagcgtttgttgtcgccggtgatatacggtgaagttcagtggtttatcgttgtcaaagaag

SEQ ID NO: 11317 - DNA, 1044 bp, Glycine max
  Gm_smallRNAprecursor_4150
aaattaactttttttaaacctattctttagccattttttaaaaaaaatttaagtgtatatcgtgtttataatgataaattttgttaaaaataaattaaatttgtttgtaaagtgtttattttatcccactatatatctcatcttttgatgttccacccgcatccattttggcaccaatcattcgcaagaattaggattgaaagttagcaacagattcggttcgcggagcactggcccatgcggtagtgcaacgcatgggcttcttaccctttttgaaaattgattgaatgtgacgtgggccaatgacacctttgtaatcagacttgggtgttgctaggtgcacccagcccttaagctgaaatgacaaaaatacccttaatccgtaagtcatttaaattgatccgtaaaaagtttacagatcaacttgattcataagtcttttatggatcaacttgatccgtaaaagacttacggatcaagttgatctatattttccgtaaaaggcttacggatcaagttgatccgtaagccttttacgaatcaacttgatccgtaagtcttttacagaacaatacagatcaacttgatcggtagaagccttacggatcaacttgatctgtatcaaccttacggatcaacttgatccgtacaatttacggaccaccctcacatatacccatcacaaatgcgaaaaaagcgcagagatagttttgatattttaaaaaaatgctgggtgcaccagcaataatgctggttgcacctagcaactcccattagactttcaattgacaacaacatgcgagttccttggggcacccagcatttttgttggtacatccagtaattttcaaaactgaaaatatccttatgggtatttttggttataaataatagattaacttttttatttctgcaaccctttttttcttcttcgtaaaaccgcactcccttagtgtaacttgcttccattagcatccttttgtgagcgtttgttgtcgccggtgatatacggtgaagttcagtggtttatcgttgtcaaagaag

SEQ ID NO: 11318 - DNA, 1153 bp, Glycine max
  Gm_smallRNAprecursor_4151
gataaattagaaacaaaaacactcaggagccagaagtacaattgctcaccaaaagaaacatagtattcattgttaagaattagttcaaaagttgcttctacataagttgttgagaattgaaattccatattgactagagatatggcaaatataatacttataaagtttttgaaattctcaccatacaaattggtttgagattcattaggccttaagcccaaactctaagatagtatcggatcctaagtttgttattgagtgatagaaaccttagtaaggaagtgggccttgatgagaatgttaataggcccaaggtttggagagtgtatacgaggaagaagggaaaagggaaaaagaatgatgaggtggcagaggatacatcaaaatagtactatataagtagtagtattgagcagtagtggggaggaaagaattctgttatttggtagggtcactgaatcagtgatttgggatctggtagtacactatcagattattatcttttattccttcagctgttgagatcgtaattgtcctaccataatacaattccactatttcatccatttcttcccactgtttttatctgttatttactgtttcattcatctttctcatacttaatttcaccaattggtccgattacaatctcaacagctgaaggaataaaagataataatctgatagtgtactaccagatcccaaatcactgattcagtgaccctaccaaataacagaattctttctccccactactgctcaatactactacttatatagtactattttgatgtatcctctgccacctcatcattctttttcccttttcccttcttcctcgtatacactctccaaaccttgggcctattaacattctcatcaaggcccacttccttactaaggtttctatcattgagtcacccatatttttcttcattttattcctaggtgtgatgtgaggagtgttgttattggactacccatattagtccacactctagatgtctagtcttgggaatgaggatgtgttgagatcatacattgactagagatatcacaaatgtgatccttataaggcttgggcagtcctcgtcttataaactggttttgtaaggatgacctaggccttgagcccaaattctaagatggtata

SEQ ID NO: 11319 - DNA, 1152 bp, Glycine max
  Gm_smallRNAprecursor_4152
ataaattagaaacaaaaacactcaggagccagaagtacaattgctcaccaaaagaaacatagtattcattgttaagaattagttcaaaagttgcttctacataagttgttgagaattgaaattccatattgactagagatatggcaaatataatacttataaagtttttgaaattctcaccatacaaattggtttgagattcattaggccttaagcccaaactctaagatagtatcggatcctaagtttgttattgagtgatagaaaccttagtaaggaagtgggccttgatgagaatgttaataggcccaaggtttggagagtgtatacgaggaagaagggaaaagggaaaaagaatgatgaggtggcagaggatacatcaaaatagtactatataagtagtagtattgagcagtagtggggaggaaagaattctgttatttggtagggtcactgaatcagtgatttgggatctggtagtacactatcagattattatcttttattccttcagctgttgagatcgtaattgtcctaccataatacaattccactatttcatccatttcttcccactgtttttatctgttatttactgtttcattcatctttctcatacttaatttcaccaattggtccgattacaatctcaacagctgaaggaataaaagataataatctgatagtgtactaccagatcccaaatcactgattcagtgaccctaccaaataacagaattctttctccccactactgctcaatactactacttatatagtactattttgatgtatcctctgccacctcatcattctttttcccttttcccttcttcctcgtatacactctccaaaccttgggcctattaacattctcatcaaggcccacttccttactaaggtttctatcattgagtcacccatatttttcttcattttattcctaggtgtgatgtgaggagtgttgttattggactacccatattagtccacactctagatgtctagtcttgggaatgaggatgtgttgagatcatacattgactagagatatcacaaatgtgatccttataaggcttgggcagtcctcgtcttataaactggttttgtaaggatgacctaggccttgagcccaaattctaagatggtata

SEQ ID NO: 11320 - DNA, 1152 bp, Glycine max; identical to SEQ ID NO: 11319
  Gm_smallRNAprecursor_4153

SEQ ID NO: 11321 - DNA, 1148 bp, Glycine max
  Gm_smallRNAprecursor_4154
aaattagaaacaaaaacactcaggagccagaagtacaattgctcaccaaaagaaacatagtattcattgttaagaattagttcaaaagttgcttctacataagttgttgagaattgaaattccatattgactagagatatggcaaatataatacttataaagtttttgaaattctcaccatacaaattggtttgagattcattaggccttaagcccaaactctaagatagtatcggatcctaagtttgttattgagtgatagaaaccttagtaaggaagtgggccttgatgagaatgttaataggcccaaggtttggagagtgtatacgaggaagaagggaaaagggaaaaagaatgatgaggtggcagaggatacatcaaaatagtactatataagtagtagtattgagcagtagtggggaggaaagaattctgttatttggtagggtcactgaatcagtgatttgggatctggtagtacactatcagattattatcttttattccttcagctgttgagatcgtaattgtcctaccataatacaattccactatttcatccatttcttcccactgtttttatctgttatttactgtttcattcatctttctcatacttaatttcaccaattggtccgattacaatctcaacagctgaaggaataaaagataataatctgatagtgtactaccagatcccaaatcactgattcagtgaccctaccaaataacagaattctttctccccactactgctcaatactactacttatatagtactattttgatgtatcctctgccacctcatcattctttttcccttttcccttcttcctcgtatacactctccaaaccttgggcctattaacattctcatcaaggcccacttccttactaaggtttctatcattgagtcacccatatttttcttcattttattcctaggtgtgatgtgaggagtgttgttattggactacccatattagtccacactctagatgtctagtcttgggaatgaggatgtgttgagatcatacattgactagagatatcacaaatgtgatccttataaggcttgggcagtcctcgtcttataaactggttttgtaaggatgacctaggccttgagcccaaattctaagatggta

SEQ ID NO: 11322 - DNA, 1040 bp, Glycine max
  Gm_smallRNAprecursor_4155
agttgagaatgttggaatcaacaaagtgctcattgatggaggagcggctgtcaacttaatgcctcgatctatgctctacaagatcgggaaacatgacactgatctatctgcccacaacattgtgctttcgaattatgaaggtaaaactggctattctttgggagccattcaagtagatgttgctgtaggcagtatagttcgaccaactctattcctggtgattcagtccaaggctaattttaacttgctattaggaagagaatggattcatggagttggggctgtgccatctacccttcaccagaagctcattatctggagggaggatgggattgtggaaaatatagaggcggatcaaagcttctataagtcagaggtcgataatgttactgcacaaacctttgacaaaaagttggctaacatagcaccttgtggtgacaaggaggctgttgtcgaatcgagtgacaatgttgtccactctgtcaaactccatcctacctatgggtttatatgggagagggaggaaattgatgttgttccctctgaagatggagtcattccaccaactgggtggaatacatatgaagattaatatgactgaggccactgcatgggccagaattacggcttatatggccgaaaatagactaaatacggcctttgaggctgaatctcaacaaaatatggcagttgaagccaagatcgaagatcatgaaaacaaagaaacaaaggatcgaagactggattgtatttatgatgatgagccgctgggttttgagaaaaatcccataagtgaggcgccaaagatgcaggctcaagatcctttggaagaggtcgatattggagatggctcgattaataggccaacttatatcagtgccaatatcacctcaagtttaaaagaaaagctggtacctcttcttagagagtttaaagattgttttgcttgggattaccacgaaatgcctgggttaagcagagaaatggtcgaaatgaagttacctattaaggagggaaaaagaccagtaaaacaactacca

SEQ ID NO: 11323 - DNA, 1157 bp, Glycine max
  Gm_smallRNAprecursor_4156
aagaccagtaaaacaactaccaagaagattcgcaccggaaatcatgtccaagattaaggaagagatcgaaaggctgctgaggtgtaaattcatcagggctgccaggtatgtcgaatggttagcaaatatagtccctgtcattaaaaagaatggaactcttagagtatgcatagattttagggatttaaataatgctacacctaaagatgaatatgctatgccagtagcggaaatgttggtagattcggcagctggtttcgaatttttgagcatgttagatggttattctggttataaccaaatatttattgctgaaaatgatgtgtcgaaaacagcatttcgatgccctggtgctttaggcacttatgaatgggtggttatgccctttgggttgaaaaatgctggggccacttatcaaagggccatgaattccatgtttcatgattttattgacacatttatgcaaatttatattgatgatataatcatcaaatcctcctcagaagatagccatttggattatcttaggcaatctttcgaacgaatgaggaaacatggattaaaaatgaatccattaaagtgtgctttttgtgtgcgtgcaggagatttccttggttttgtggtgcataaaaaaggcattgagataaatcaaaataagacaaaggctattcttgagacgaagcctccttcgaccaaaaaacagcttcagtctttgctaggaaaaatcaacttcttgaggcgattcatttcgaatctaagtggcaaagctcagattttttcgccattacttcgactcaagaaagatgaaccattcaaatggaatgaagagcatcaaaaggctttcgatgaaattaaagaatatctgatcaagcctcctgtgttaatgcctcctagtcgaaacaagtctatgaagttgtatattgctgcgtctgacaagaccattggtagcatgttggctcaggaagatgatgatggcatagaacatgcaatttattatcttagtcgtgtactaaatgatgcagaaactagatatactgccatagaaaaactttgtctttgtctgtatttctcttgtgcaaaacttaagcaatatataaagcctgttgatgtttatgtgtattctcattatgatattattaagcacatgttgtcaaaac

SEQ ID NO: 11324 - DNA, 1175 bp, Glycine max
  Gm_smallRNAprecursor_4157
aagagatcgaaaggctgctgaggtgtaaattcatcagggctgccaggtatgtcgaatggttagcaaatatagtccctgtcattaaaaagaatggaactcttagagtatgcatagattttagggatttaaataatgctacacctaaagatgaatatgctatgccagtagcggaaatgttggtagattcggcagctggtttcgaatttttgagcatgttagatggttattctggttataaccaaatatttattgctgaaaatgatgtgtcgaaaacagcatttcgatgccctggtgctttaggcacttatgaatgggtggttatgccctttgggttgaaaaatgctggggccacttatcaaagggccatgaattccatgtttcatgattttattgacacatttatgcaaatttatattgatgatataatcatcaaatcctcctcagaagatagccatttggattatcttaggcaatctttcgaacgaatgaggaaacatggattaaaaatgaatccattaaagtgtgctttttgtgtgcgtgcaggagatttccttggttttgtggtgcataaaaaaggcattgagataaatcaaaataagacaaaggctattcttgagacgaagcctccttcgaccaaaaaacagcttcagtctttgctaggaaaaatcaacttcttgaggcgattcatttcgaatctaagtggcaaagctcagattttttcgccattacttcgactcaagaaagatgaaccattcaaatggaatgaagagcatcaaaaggctttcgatgaaattaaagaatatctgatcaagcctcctgtgttaatgcctcctagtcgaaacaagtctatgaagttgtatattgctgcgtctgacaagaccattggtagcatgttggctcaggaagatgatgatggcatagaacatgcaatttattatcttagtcgtgtactaaatgatgcagaaactagatatactgccatagaaaaactttgtctttgtctgtatttctcttgtgcaaaacttaagcaatatataaagcctgttgatgtttatgtgtattctcattatgatattattaagcacatgttgtcaaaaccgattttacacagtagaattggaaaatgggctttagcattaacagaatattctttaacgtacaagcctttgaaatct

SEQ ID NO: 11325 - DNA, 1109 bp, Glycine max
  Gm_smallRNAprecursor_4158
tagcatatcagttcatgcctcaaatgggagcaaattgagctttgatctctttttcacataaaccaaccaaacagacacaatccattcaacacaacaatgtcattctcattgtcaagaaggttaagctcttctctctctctttccattcccaactttcctccttttcttccaaaccccactttccctctttgctgtttcccagttcaggatgacatgctccttctgcgtcataccccacccattatcgaatttgcctagattttaggatccttgtaatgaagcattatcccactgccatttccctttctaaacaaatggaagccgccaaaggaattgtgccaaatcttgttactttgagcatcctcatcaattgtttacgccacttgggccaaatggccttttctttttctgtattgggcaaaattctaaaattaggttatcagccgaatagcataaccttgactacactcatgaaaggtcaagaaatcactgcactttcatgacaaggtcgtagcacaaggatttcagatgaaccaggttagttacaggaccctgctcaatggactatgtaaaataggagaaacgagatgtgccatcaagttgccaagaatgattgaagacagatcaactaggcccctgatgtggtaatgtacaacaccatcattgatggcttatgcaaagataaacttataaacgaggcttatgatctatattctgaaatggatgctagaggaatttttcctaatgttatcgcttacagtactctaatatgtggcttttgccttgtgggttagttaatgggagcattcagtttattaaatgaaatgatatcaaagaacatcaacccggatgtttatacctatagtatattgattgatacattatgtaaagaagaaggaaaggtgaaagaagcaaaaaatttattaactgtgatgatgaaagaaggagtaaaacctgatgttgcttataatacaaaatagatattacacgctatggttcaaacgagaatacatcctaatgtttgcagtgattaatggattaagattaaaataaataagaagttttatcaaaataaataatttaatttagataaaatgataacttatatt

SEQ ID NO: 11326 - DNA, 1109 bp, Glycine max
  Gm_smallRNAprecursor_4159
aacaaacacagtccattcaacacaacaatgtcattctcattctcattgtcaagaaggttaagctcttctctctctcattccattcccaactttcctccttttcttccaaaccccactttccctttttactttcactctcagcctccatccattcacgatgttgtccatgatgctgtttcccagttcaatggcatgctccttatgcgtaataccccgtcgatcatcgaatttggcaagattttaggatccctcgtaaagatgaagcattttcccactgccatttccctttctaaacaaatggaagtcaaaggaattgagccagatcttgttactttgagcatcctcatcaattgtttctgccacttgggccaaatggccttttctttttctgtattgggcaaaattctaaaattaggttatcagccgaataccataatcttgactacactcatgaaaggtctgtgtctcaagggtgaggtaaagaaatcactgcactttcatgacaaggtcgtagcacaaggatttcagatgaaccaggttagttacgggaccctgctcaatggactatgtaaaataggagaaacgagatgtgccatcaagttgctgagaatgattgaagacagatcaactaggcctgatgtggtaatgtacaacaccatcattgatggcttatgcaaagataaacttgtaaacgaggcttatgatttttatactgaaatgaattctagaggaatttttcctgatgttatcacttacagtactctaatatgtggcttttgccttgcgggtcagttaatgggagcattcagtctattaaatgaaatgacattgaagaacatcaacccggatgtttatacctatactatattgattgatgcattatgtaaagaaggaaagctgaaagaagcaaaaaatttattaggtgtgatgacgaaagaaggagtaaaacctaatgttgttacttatagtactttaatggatggatattgtttagttggtgaagtgcataatgcaaaacagatattccatgctatggtccaaactgaggtaaatcctagtgtttgcagctacaatataatgattaatggattatgtaagggtaaaagcgt

SEQ ID NO: 11327 - DNA, 1186 bp, Glycine max
  Gm_smallRNAprecursor_4160
aacaaacacagtccattcaacacaacaatgtcattctcattctcattgtcaagaaggttaagctcttctctctctcattccattcccaactttcctccttttcttccaaaccccactttccctttttactttcactctcagcctccatccattcacgatgttgtccatgatgctgtttcccagttcaatggcatgctccttatgcgtaataccccgtcgatcatcgaatttggcaagattttaggatccctcgtaaagatgaagcattttcccactgccatttccctttctaaacaaatggaagtcaaaggaattgagccagatcttgttactttgagcatcctcatcaattgtttctgccacttgggccaaatggccttttctttttctgtattgggcaaaattctaaaattaggttatcagccgaataccataatcttgactacactcatgaaaggtctgtgtctcaagggtgaggtaaagaaatcactgcactttcatgacaaggtcgtagcacaaggatttcagatgaaccaggttagttacgggaccctgctcaatggactatgtaaaataggagaaacgagatgtgccatcaagttgctgagaatgattgaagacagatcaactaggcctgatgtggtaatgtacaacaccatcattgatggcttatgcaaagataaacttgtaaacgaggcttatgatttttatactgaaatgaattctagaggaatttttcctgatgttatcacttacagtactctaatatgtggcttttgccttgcgggtcagttaatgggagcattcagtctattaaatgaaatgacattgaagaacatcaacccggatgtttatacctatactatattgattgatgcattatgtaaagaaggaaagctgaaagaagcaaaaaatttattaggtgtgatgacgaaagaaggagtaaaacctaatgttgttacttatagtactttaatggatggatattgtttagttggtgaagtgcataatgcaaaacagatattccatgctatggtccaaactgaggtaaatcctagtgtttgcagctacaatataatgattaatggattatgtaagggtaaaagcgtggatgaggccatgaatctcctaagagaaatgctacataaaaatgtggttcctaataccgtgacgtacaattctctta

SEQ ID NO: 11328 - DNA, 1130 bp, Glycine max
  Gm_smallRNAprecursor_4161
attaatgcattacaagatcctaattggaaaatggccatgaccgacgaatataatgctcttattgaaaataagacgtgggacttagtgccccgtccaactgatgctaatgttatccgaagtttgtggattttcaggcataaaaagaaagctgatggttcatttgaaaggtacaaggctcggctagtcggtaatggttcgaatcaacagactggtgtcgattgcggagaaacctttagtcccgtagttaaaccagcaactattcgaacggttctcagtattgctctttccaaatcatggggtcttcatcagttggatgtcaaaaatgctttcctacatggtaatctcaatgaaaccgtgtacatgtaccaacctgctggcttccgcgatccgcaataccctgattatgtatgcttgttgaagaagtctctctatggtcttaaacaagcacctcgtgcttggtaccaacgcttcactgattttgttgctaccttgggcttttctcatagtatatgtgataactcattattcacctaccacaatggcaatgacacggcctacatccttctttatgtagatgatatcattctcactgcatcctctgacactctacgccaatctatcatgtctaaactgagttccgaatttgctatgaaagatttgggtcctcttagttattttctaggtatctcagttaccaggcattccagtggtatgtttctctctcaacataaatatgctgaagaaatcattgagagagcttccatgtcctcctgcaaaccggtttcaactccagtggatacaaaagcaaaactcagtggaacctctggcaacccatatcatgatccatctgaatatagaagtcttgctggtgctttgcaataccttactttcacaagacctgatatttcttatgccgttcagcaagtatgtcttttcatgcatgatccaagaacacaacacatgaatgccttgaagcgaatcattcgatacatcaaaggcaccatcactcacggtttacatctctctccctcctcagttgacaaactcaccacatatactgatgctgactgggggggatgtccggacacccgcaggtccacgtccggttattgtgtttatcttggagataa

SEQ ID NO: 11329 - DNA, 1044 bp, Glycine max
  Gm_smallRNAprecursor_4162
gccccgtccaactgatgctaatgttatccgaagtttgtggattttcaggcataaaaagaaagctgatggttcatttgaaaggtacaaggctcggctagtcggtaatggttcgaatcaacagactggtgtcgattgcggagaaacctttagtcccgtagttaaaccagcaactattcgaacggttctcagtattgctctttccaaatcatggggtcttcatcagttggatgtcaaaaatgctttcctacatggtaatctcaatgaaaccgtgtacatgtaccaacctgctggcttccgcgatccgcaataccctgattatgtatgcttgttgaagaagtctctctatggtcttaaacaagcacctcgtgcttggtaccaacgcttcactgattttgttgctaccttgggcttttctcatagtatatgtgataactcattattcacctaccacaatggcaatgacacggcctacatccttctttatgtagatgatatcattctcactgcatcctctgacactctacgccaatctatcatgtctaaactgagttccgaatttgctatgaaagatttgggtcctcttagttattttctaggtatctcagttaccaggcattccagtggtatgtttctctctcaacataaatatgctgaagaaatcattgagagagcttccatgtcctcctgcaaaccggtttcaactccagtggatacaaaagcaaaactcagtggaacctctggcaacccatatcatgatccatctgaatatagaagtcttgctggtgctttgcaataccttactttcacaagacctgatatttcttatgccgttcagcaagtatgtcttttcatgcatgatccaagaacacaacacatgaatgccttgaagcgaatcattcgatacatcaaaggcaccatcactcacggtttacatctctctccctcctcagttgacaaactcaccacatatactgatgctgactgggggggatgtccggacacccgcaggtccacgtccggttattgtgtttatcttggagataa

SEQ ID NO: 11330 - DNA, 1080 bp, Glycine max
  Gm_smallRNAprecursor_4163
tcaagatgatgataatgatgctggaaatgatttggtatttgaagatgatgatgctctaaattgggcaactgtgtatcaggcttcaggggttggagagtgtaggatgtatactaggcggaaaaagcaaaaaacaagtgttgctgctgcccaaacttctaaaaaacaggcaatggttgttggatcttcatcaaggaagcaaaaagcagtccaagaaaatgatgaggatctagatgttgaggagaatattgatgttgaatctgaagaagaagaaatcatggtcaattttgaggcgtctgatggggaagggggagagggagatgctccattaccatatgataacaacgaagatgattatgttgggattggagaagatgattagagccttaaccttcactttgcactttgcattatgtttttatcattttcttattttgaactctttaatgagtttatttggtgttggtacttgattattgtatgaactcatgaaacttttttagtttatttgaatgcaatcctttgtttttttcaatttcaatgagtttatatatatgttttttttttttttgtgtccgccatgacatccgccattttccgctacgccatccgccatatttttatggcggatttttgactttccgccatgaaccgccatccgccattaacaacattgtattccattactcagttttcactcttttaaagcagaaacttgacaaagtgaactgcatcttacctagccatatcaatacttaccctgtttttgttttgaagacatgacacacaactaatgattttgttttgtgaggcttatgctttttttacttttgtcaattcctagttaataataacattgagaactatacatcatttatatgatatatttcaagttacttttcattgtatctctaaatctaattcaatgcaatttgcaattcacaactatcaactatgttattaaaattatagtgaatcaccttgctacaaagtaacttctgttaacaagtatgtcaattattaaaaaaaaaatgtcataacaaatagctaccattctgcaatagccaaggtaagaatataaaa

SEQ ID NO: 11331 - DNA, 1136 bp, Glycine max
  Gm_smallRNAprecursor_4164
atgtgaattaatccacgtattcagtgatcggataacattaattagttttcattcaaattactttctaattttttttattttacagaattaattttagttaaattcagaatttaaatttgttttactaggtccttctaattttcaatttttgaaactaaatcataggacgcttgaaactaaatcctagggaggcctacgaagattagttgaaaatttctaagttttgctgacgaagcaaaaaccttgatcaagatggagtaactcatgtctatatataaaaacttgtttagggccgggcttatttaaatcaaaaaattttaaaacacgaataattaaagggtgttgctaggtacacccagcattatagctagtgtactcagcatttttttaaaataccaaaactgctcctgcatttttattttttttgcatttttgatgggtgtgtgtgagggtggtccataaatcgtacggatcaagttgatccgtaaggttgatatggatcaagttgatccgtatgttgatattaagcatacggatcaacttgatccgtaaggcttctacggatcaagttgatccgtattattccataaaaggcttacggatcaagttgattcgtaaaaggcttacgaatcaacttgatctgtaagtcttttacggatcaacttgatccatagaagccttacggatcaacttaaatggcttaggaattaaggatatttttttattttaccttaagtgctgggtgtaccagcaataatgctgggtgcacctagcaacacccataattaaaatagcttgtgctcctcaccatgtcgttttcacttttcagcactgggacacccaagtgtgacaatttgtaatccattcacactgatgggctccaaattaacctttatgtggacgctgggagtgttgaggggcaaatatgtgataaagatagtggacttttcccagcagctaggcccaacctgatgtctacagggatgattaagatatgtgtgggccaatccaggactggacctttatagtagtgagtagtgacagccttatgtctccacagttgctttctgtacctcctagttgctttatgtatttttttttttatcttttatgaattgatcattatgaaaagtcaa

SEQ ID NO: 11332 - DNA, 1190 bp, Glycine max
  Gm_smallRNAprecursor_4165
tcaattgtaaagattgaaaaaaatattgttgacctgcatctatgaatggttgtcggtagtagatttcatctagtaattgatcgttggttagttgaagggtgttgtgcattctacgcttgagtgtatcaaaagaacagttgttaggaactcgcattggtgttggaatgagactttgaaaataaacaccaatttggttgtaactgatcgatccatttgaaaaaatgaaagctaatctggagttagtaatggtctgactacttgtttctcccaaaaatgacatagtaataagattgaatttggtttgtgaaattatgttgtgtgagattgtgtgtttgtattgtgtctgtgttgtgttatttatagttgtatgagtattctgccacattgatgtgtattggaatccaatgtttctttttccctagtaagtgatgtagcagacgtccattatcatttcaaagtgaacaaagagattatgagttgttcatcttatgtcagttttgcacacgtctctaaaaattaaatgtatcacctgtaaaactgacatgaaatggacagctcataatgcaaagtgttgttaatttggactgtgatttttcccatgtaattaaagcaacagacgttcatgatgattttcagagtgaataaagagatgatgagctgtccatttcatggcagttttgcaggtgagacatttaatttttagagacgtgtgcaaattgcagagtattgtcaatttggattgtgatttttcccttgtaattaaagctgcaaacgtccataattattttcagagtgaataaagagattatgagttgtccatttcatgtcagttttgtcgatgagacatttaatttttaaaaacagtgtagtgtaaatgacaaagtattgtgaattttgacagttatgttatcatgtcaactaatgcagtaaaagtgggtaaactgaaaattgctaatttaaatttaaaggaaaaattatttcaatacgtaaagtgataactgaagacagacataagactttacatgaaaatctcaaagaagaaataacttagacatgaatgatccgtagattaccaatcccgtttgaatataggttcgtgggatggagacatgttacttccttcgggcccggaagaggagtctgtatcactatcatggtttttgagccaacaagtctcgtattcacctgat

SEQ ID NO: 11333 - DNA, 1065 bp, Glycine max
  Gm_smallRNAprecursor_4166
atagtaaagatgttcattgtcgttaaatttataataaaaatacaaataagattagtattttttttctctctatatgttaaaggtttacaaagcccaattagatttaaaaaaattataaaggaatttaatttaattagttgaatatgataggtgaattattgtaaatgatttcatattagtttttttattcttactgataaaaaataaatattaaatgaaaaaatatttcaaatatttaagacaattacttaaagttattgtcgaaataattaattaagctaaaataactcattcataatatttggttgataaggcaggtcttaagagaattttttgtggactgagctctccaacgaagaagcccaaacacagtttagaaacccaaatattaagcgattgttgctaggtgcacccagcttattgctggtgcacccaacatttttgaaaatggcaaaactatccctgctaatttctctccttacggatcaacttcatccgtaaaagacttacggatcaacttgatccgtaagtcttaaaaatcaacttacggattaacttgatccgtaaaagacttacggatcaagttgatccataagtcttaaaaattaacttactgatcaacttgattcgtaagggttatttctgtcttttcgtggttaatactgggtgcatcagcaataatgttgggtacacctagcagcactcatattaagcccgctgatatggattgacagaagctctgcaaacttgtgaccagtttggacttgtactcatttaatctaaaaagtctcgttaactacctatgttttgatccttgttgccttgttataacttataggttgcgttggccatacaccaagataccgaacaccaagaataatatagaacacacacacaagttataagataatttatcatatatattacttgataaataatagacaacataaataaaataatataaaatttattacaatatttaatattaattattttaatataattttatataaaatttaatgtgtttatcaaaatataaaaaaagagagaaagaaatttaaaaaa

SEQ ID NO: 11334 - DNA, 1043 bp, Glycine max
  Gm_smallRNAprecursor_4167
aaaaccgtctttgattcatgtgatttttaattatatattcactgaaaaatgttttttaattataaaaactcgtgttgtacgttgttcccatatatcttcgtaaaccctaaattcccttttatatatgcagttggcgaagaatcgagccgacaaccacgctctgatcggcgagtccggtgcggtggctgctctgattccgctactccgatgcagcgaaccgtggacataggaacacgcagtgacgacgttgctgaacctgtctcttctggaagagaacaaggcgcttataacgaatgcgggtgcggtgaagtcgttgatgataataacatatagatttaaatctagctcttatactagttgttgcgaccaatccacaaatataagaccaaagtaaccgatagaatttttggcaaaattacaaaattggtcccccactttatctccaattacggatttggtccccctataatttaattcacaaatttggtcccccagttttataaatccctgcaaaattggtcctggaagcccgatttggacgttgaccgttaacctcagacgttgactgccacgtgtcaatgacacgtgtcaacgtttgagtggttccctgtaaaggcttcattttttgtaggtaaaattgcacttttggtcccccagtttttacttcaatttcgattttggtccccctatagtttaattcacacatttagtccccaagttttataaatccctttataaattgttcctacaaaattggtcttttgaatggtttagctactggtgttagagacatggtaggtcttgataaatctcgcacttcttttttatcgcaagtttttcactcactcggaacccagagaaaaatcactctttgtctttctcccactttcggggttgttcaacttgggaaagtggtgcatgaatccgaacttgagtttgaaattttcagatctctttaacaggttctgtaataaccccctattttttctttctttttttgctcccctatgcggtattatgtgtatacgactgcttaagtggct

SEQ ID NO: 11335 - DNA, 1078 bp, Glycine max
  Gm_smallRNAprecursor_4168
ggacggtaactgtggatatcggtccattgccgctttattaggtatgggggaagattcatggctgttagtgcgtaatgaattgattaaagaacttggcaggtggtcgcatgagtacatgaacctcttcggtggcacagagagatttgaacaattaaagttgtccttacttgttgatgggttttcgaaggtatgtttttaggttaatttttttaataacaaactttaaattacttacatgtgtatgtttggttgattcaggttagtgtggacaagtggatggatataacggagatgggatatgtgattgcatcacggtataatgtaatccttgtatcgttgtcccgacaacaaagcatgacattttttcctcttagaagtcaagcaccacctgattcttctgggcactgcatgatatgtgtcggtcacgtgtttggaaatcattttgttcaggtacattgaatatagttagtataacaattatgcaatgacttcgctggttcatttgacacggtcaccgcatgatataatctttgttcatatacaacaggtttatttgaaagaccattgtcccttaccgcctccagcgttgttgtggtcaagcaattgttattctcaggcaaagcagtggacaactctatatattagtagaatgcagcaatacacaagcttgatatcattcaaaagacactatgtcgacctaaatgaagactaaacatgcattgtttatgtaattgttggtccatataatttgttgtaagtcattactaaccaattaatattattaagtactcatttcgttaagcaaaaaaattgttggtccaacaaaaatcatttacgtgtgtagcatacatcattatcataattgacaacacataatgacatgcatgcgtattaaagtttgagcgcgacaacacattgactgacttgactacacattttgaaggaaacataaacacgaaacatgttcacgcgtgtctatttttttgtaaacaaagtgaagcaatcgctcggtcacaaccatctatatatatagcagacacggctaataaatcacacattatcttgctttcacatagtc

SEQ ID NO: 11336 - DNA, 1092 bp, Glycine max
  Gm_smallRNAprecursor_4169
atcatggcaagtatatatgaaattagcccataaaagctagattggattctgtgattaaaattccattaagccctcctagctaggtcaggattctagtctatccaaaccaatgttgttaatggcggatgacgattcatggcagaaagccaaaaatccgccataaaaatatggtggatggcatagcggaaaatggagaatgtcatggcggacaaaaatatatatacatatatataaactcattgaaattgaaaaaaaaaacaatggattgcattcaaataaactaaaaaagtttcatgagttaatacaataatcaagtaccaacaccaaataaactcattaaagagttcaaaataagaaaatgataaaaacataatgcaaagtgcaaagtgaaggttcaggctctaatcatcttctccaatcccaacataatcatattcgttattatcatatggtaatggagcatctccctctccctcttccccatcagatgcctcaaaattgaccatgatttcttcttcttcagattcaagatcaatattctcctcaaaatctagatcctcatcattttcttggactactttttgcttccttgatgaagatccaacaaccattgcttgtttttttagaagtttgggtagcagcaacacttgttgttttttactttttccgcctagtatacatcctacactccaacccccgaagcctgatacacagttgcccaatttagagcatcatcatcttcaaataccaaatcatttccagcatcattatcatcatcttgatccatctctcccacgatccgttcattgcacacatcaatatcattaagagaaattggatcaatttcatctcttgcattatatctttgcttcaattgttggttgtatttgacaaacaccaaatcatgcaacctcttgtgctcaagcctatttcattttttggaatgaatctacaacataacaaataaatgttgatttcaatctcaaatatactccaaataaaacttgatcataaaaattaaataaaattaaaaagtatagttagtgttttgtcacaattacttgctcaaacacactccaatttctttcacat

SEQ ID NO: 11337 - DNA, 1092 bp, Glycine max
  Gm_smallRNAprecursor_4170
gtatcatggcaagtatatatgaaattagcccataaaagctagattggattctgtgattaaaattccattaagccctcctagctaggttagcattctagtctatcccaaccaatgttgttaatggcggatggcggttcatggcggaaagccaaaaatccaccataaaaatatggcggatggcgtagcggaaaatggagaatgtcatggcggacaaaaaaatatatacatatatataaactcattgaaattgaaaaaaaaacatggattgcattcaaataaactaaaaaagtttcatgagttcatacaataatcaagtaccaacaccaagtaaactcattaaagagttcaaaataagaaaatgataaaaacataatgcaaagtgcaaagtgaaggttcgggctctaatcatcttctccaatcccaacataatcatcttcgttattatcatatggtaatggagcatctccctctccctcttccccatcagatgcctcaaaattgaccatgatttcttcttcttcagattcaagatcaatattctcctcaaaatctagatcctcatcattttcttggactgctttttgcttccttgatgaagatccaacaaccattgcctgctttttagaagtttgggtagcagcaacacttgttgttttttgctttttccgcctagtatacatcctacactccaacccccgaagcctaatacacagttgcctaatttagagcatcatcatcttcaaataccaaatcatttccagcatcattatcatcatcttgatccatctctcccacgatccattcattgcacacatcaatatcattaagagaaattggatcaatttcatctcttgcattatatccttgcttcaattgttggttgtatttgacaaacaccaaatcatgcaacctcttgtgctcaagcctatttcattttttggaatgaatctacaacataacaaataaattttgatttcaatctcaaatatactccaaataaaacttgatcatcaaaattaaataaaattaaaaagtatagttagagttttgtcacaattacttgctcaaacacactccaatttctttcacatc

SEQ ID NO: 11338 - DNA, 1089 bp, Glycine max
  Gm_smallRNAprecursor_4171
tagctcaagagttgttaaactttcctgatgaaaatctcatagtcaaacagatccaaccattcttaggaattgtaaattatatcagagattttatccccagagcagcccaatatactagttcgttgtccaaacttttgaagaaaaactgttctccatggtcagaagaacaacaaacgatagcagtcaaggaactcaagaagattgcccaaaatcccccggccttgaagattccaggaacaggccagaggatattacaaactgatgcaagtgatcattattagggagctatcttgatagaacaagaaggggagaagaattattattgtggtcatgccagtggataattcaaagaagctgagaaacattatcatactacattcaaagaggccttgatggtaaaaaaatggaatcaagaaatttgattttcatttgagaggacacaagtttcaggttcacatggacaattcctcgtttccaaacattttggaatttaaaaacaagatgccaccagatcctcaaatcttaaggcttaaggattggttctctagatatgatttttatgtgaaactcataaaagggaagaataatttgattcctgatttcttatccaaaccaaacaacaagaccgttaaggtgataactttcactcactccttcccattgatattcatggcaaaaccattatttgaaacaaccaaaactattaaggttttccctctaggattgattacccatactcttgcacagatccttgaatatgctaagtctcattacttctattttctgcatgaaaccatagattcaaatacacttcaacacaaatatttgaccctgagataccatttggaggtatatttgaactgttctgtgagattgggtgggatttgtgtgaaccaaccatatgggtcatttggtgtaatacaatacaatatttaattctcatcgccataaaacctttgatgacatacaacctcttgacagatccatataaagatgaatatcttttatggacaatgttagagtggttttctcctttagcatggtggcgaatgaagctgaaacaaattatagacattgagagacaaagag

SEQ ID NO: 11339 - DNA, 1092 bp, Glycine max
  Gm_smallRNAprecursor_4172
caatttggaagcatagaaatgatatagttttttccaatagtagtttcaatgcaaacagagtgatggaggatgcactgtttttggtttggacgcggatgaaaaacttagagaaggatttcaccactcactacaatcagtggtcttcaaatctgactcaaggttttttatgtagtaagcattaggagtgcagggcaatcactagtattaggacctgttttgtaccccatcatggggtggtatgataagtgggctgatcacagaaatgtaacacttgtaatctttttcatgtaccttttcagtacccctggtactcacttaatataaatatatattattttggctgatcaaaaaaaagaaaatgataaaaacataatgcaaagtgcaaagtgaaggttgaggctctaatcatcttctccaatcccaacataatcatctttgttgttatcatatggtaatggagcatctccctctccctcttccccatcagactcctcaaaattgaccatgatttcttcttcttcagattcaacatcaatattctcctcaacatctagatcctcattattttcttggactgctttttgcttccttgatgaagatccaacaaccattgcctgttttttagaagtttgggcagcagcaacacttgttttttgctttttccgcctagtatacatcctacactctccaacccccgaagcctgatacacagttgcccaatttagagcatcatcatcttcaaataccaaatcatttccagcatcattatcatcatcttgatccatctctcccacgagccattcattgcatacatcaatattattaagagaaattggatcaatttcatctcttgcattatatctttgcttcaattgttggttgtatttgacaaacaccaaatcatgcaacctcttgtgctcaagcctatttctttttttggaatgaatctacaacataacaaataaatgttgattttaatctcaaatatactccaaataaaacttgatcatcaaaattaaataaaattaaaaagtatagttagagttttgtcacaattacttgctcaaacacactccaatttctttcacatcc

SEQ ID NO: 11340 - DNA, 1079 bp, Glycine max
  Gm_smallRNAprecursor_4173
ggtcacaacattttaaaaataattttattttgcaaaatttatatttgaataaattgcgcaaaaattaaaacaaattgaataataaatatgtactagtctcaaatggactttttttaaaaatttgaattgtttcgtggcttataaccaacatccttcatgtccacagtccattttttcaagacatgatatatctcaccactttgaggatgtttctcatctgaagtacttcacacacccatcaatagtgatataaaataaaactgaaaataatatacagtttgtttggatagcaaaataaaattgaattttgattttgtgtatattattattattattattattattattattattattattattattattattattattattattattatgttcaggttgggttgggtcatgggcctaaaatacaaagagtgttgctaggcgcaaccagcattcttaaaaaatggcaaaattgtccttgcttggttttcctcttacggatcaagttgattcggaagtctcttacggatcaagttgattcggaagtctcttacagatcaacttacggatcaagttgatccggaagtctcttacggatcaagttgatccgtaagaggaaaaataattataatatactttaaagatacaacatatttatttataatataattaaatctatttttttattttattaattataatatatttataaatattgatttattataaataattaattttttaatattttttagaataaatttgtttagaagatgatattaaaatacttactcagtcccattataattattgtttaaggttattttatacatattaataaaaatcaataaatacataaaagataatattataaagaattaatcataccattattaatgttataaagaatataaaaaaataattagtattatattaaaaattaaaatattaactactttataatacatttttttacatgatcattagtataagtgggaaaatagtaattataagagaatttaaaaatattagtacgttatataagatcttagataacgaatgatgtccattttttgtttaat

SEQ ID NO: 11341 - DNA, 1057 bp, Glycine max
  Gm_smallRNAprecursor_4174
ttttaaaaataattttattttgcaaaatttatatttgaataaattgcgcaaaaattaaaacaaattgaataataaatatgtactagtctcaaatggactttttttaaaaatttgaattgtttcgtggcttataaccaacatccttcatgtccacagtccattttttcaagacatgatatatctcaccactttgaggatgtttctcatctgaagtacttcacacacccatcaatagtgatataaaataaaactgaaaataatatacagtttgtttggatagcaaaataaaattgaattttgattttgtgtatattattattattattattattattattattattattattattattattattattattattattattatgttcaggttgggttgggtcatgggcctaaaatacaaagagtgttgctaggcgcaaccagcattcttaaaaaatggcaaaattgtccttgcttggttttcctcttacggatcaagttgattcggaagtctcttacggatcaagttgattcggaagtctcttacagatcaacttacggatcaagttgatccggaagtctcttacggatcaagttgatccgtaagaggaaaaataattataatatactttaaagatacaacatatttatttataatataattaaatctatttttttattttattaattataatatatttataaatattgatttattataaataattaattttttaatattttttagaataaatttgtttagaagatgatattaaaatacttactcagtcccattataattattgtttaaggttattttatacatattaataaaaatcaataaatacataaaagataatattataaagaattaatcataccattattaatgttataaagaatataaaaaaataattagtattatattaaaaattaaaatattaactactttataatacatttttttacatgatcattagtataagtgggaaaatagtaattataagagaatttaaaaatattagtacgttatataagatcttagataacgaatgatgtccat

SEQ ID NO: 11342 - DNA, 1058 bp, Glycine max
  Gm_smallRNAprecursor_4175
ttttaaaaataattttattttgcaaaatttatatttgaataaattgcgcaaaaattaaaacaaattgaataataaatatgtactagtctcaaatggactttttttaaaaatttgaattgtttcgtggcttataaccaacatccttcatgtccacagtccattttttcaagacatgatatatctcaccactttgaggatgtttctcatctgaagtacttcacacacccatcaatagtgatataaaataaaactgaaaataatatacagtttgtttggatagcaaaataaaattgaattttgattttgtgtatattattattattattattattattattattattattattattattattattattattattattattatgttcaggttgggttgggtcatgggcctaaaatacaaagagtgttgctaggcgcaaccagcattcttaaaaaatggcaaaattgtccttgcttggttttcctcttacggatcaagttgattcggaagtctcttacggatcaagttgattcggaagtctcttacagatcaacttacggatcaagttgatccggaagtctcttacggatcaagttgatccgtaagaggaaaaataattataatatactttaaagatacaacatatttatttataatataattaaatctatttttttattttattaattataatatatttataaatattgatttattataaataattaattttttaatattttttagaataaatttgtttagaagatgatattaaaatacttactcagtcccattataattattgtttaaggttattttatacatattaataaaaatcaataaatacataaaagataatattataaagaattaatcataccattattaatgttataaagaatataaaaaaataattagtattatattaaaaattaaaatattaactactttataatacatttttttacatgatcattagtataagtgggaaaatagtaattataagagaatttaaaaatattagtacgttatataagatcttagataacgaatgatgtccatt

SEQ ID NO: 11343 - DNA, 1056 bp, Glycine max
  Gm_smallRNAprecursor_4176
tttaaaaataattttattttgcaaaatttatatttgaataaattgcgcaaaaattaaaacaaattgaataataaatatgtactagtctcaaatggactttttttaaaaatttgaattgtttcgtggcttataaccaacatccttcatgtccacagtccattttttcaagacatgatatatctcaccactttgaggatgtttctcatctgaagtacttcacacacccatcaatagtgatataaaataaaactgaaaataatatacagtttgtttggatagcaaaataaaattgaattttgattttgtgtatattattattattattattattattattattattattattattattattattattattattattattatgttcaggttgggttgggtcatgggcctaaaatacaaagagtgttgctaggcgcaaccagcattcttaaaaaatggcaaaattgtccttgcttggttttcctcttacggatcaagttgattcggaagtctcttacggatcaagttgattcggaagtctcttacagatcaacttacggatcaagttgatccggaagtctcttacggatcaagttgatccgtaagaggaaaaataattataatatactttaaagatacaacatatttatttataatataattaaatctatttttttattttattaattataatatatttataaatattgatttattataaataattaattttttaatattttttagaataaatttgtttagaagatgatattaaaatacttactcagtcccattataattattgtttaaggttattttatacatattaataaaaatcaataaatacataaaagataatattataaagaattaatcataccattattaatgttataaagaatataaaaaaataattagtattatattaaaaattaaaatattaactactttataatacatttttttacatgatcattagtataagtgggaaaatagtaattataagagaatttaaaaatattagtacgttatataagatcttagataacgaatgatgtccat

SEQ ID NO: 11344 - DNA, 1051 bp, Glycine max
  Gm_smallRNAprecursor_4177
tttgcaaaatttatatttgaataaattgcgcaaaaattaaaacaaattgaataataaatatgtactagtctcaaatggactttttttaaaaatttgaattgtttcgtggcttataaccaacatccttcatgtccacagtccattttttcaagacatgatatatctcaccactttgaggatgtttctcatctgaagtacttcacacacccatcaatagtgatataaaataaaactgaaaataatatacagtttgtttggatagcaaaataaaattgaattttgattttgtgtatattattattattattattattattattattattattattattattattattattattattattattatgttcaggttgggttgggtcatgggcctaaaatacaaagagtgttgctaggcgcaaccagcattcttaaaaaatggcaaaattgtccttgcttggttttcctcttacggatcaagttgattcggaagtctcttacggatcaagttgattcggaagtctcttacagatcaacttacggatcaagttgatccggaagtctcttacggatcaagttgatccgtaagaggaaaaataattataatatactttaaagatacaacatatttatttataatataattaaatctatttttttattttattaattataatatatttataaatattgatttattataaataattaattttttaatattttttagaataaatttgtttagaagatgatattaaaatacttactcagtcccattataattattgtttaaggttattttatacatattaataaaaatcaataaatacataaaagataatattataaagaattaatcataccattattaatgttataaagaatataaaaaaataattagtattatattaaaaattaaaatattaactactttataatacatttttttacatgatcattagtataagtgggaaaatagtaattataagagaatttaaaaatattagtacgttatataagatcttagataacgaatgatgtccattttttgtttaat

SEQ ID NO: 11345 - DNA, 1062 bp, Glycine max
  Gm_smallRNAprecursor_4178
cgccggtgattcgtccatggccaaaaacaacataagccgcggtgggcttacgaagaggcgcaatgataatgtaagggggattttcttccggtcggtgagtgaaaaataaaaaacactcttacatatagtataaacagattcataatccgtaaaaagtaatattgaaattgttgaaaataggctggatgtaaagaaaacggggtgttgctaggtgcacccagcattttaagtgaatgggcaaaaatacccttcacttaaaatttaaaatctatacacccagcactgttcacgcattccgtaccttcctcttccatgcgccatttggttgtttttgcactgccttttgagcttcttctcttcctggcactgtttcctttcattggaggttcgtttgccgcgcattgggtggttcgttgtcgacattgaggacctgcagctgcattttgctgttctaccgttgaggtaagcttcgcgtctccgtcgttttcatttttccttttgtgtgttcgtacggatcaacatgatccataactattatatgatccgtataacgcatacggatcaagttgatccgtatgactcatacatatcatgttgattcgtaggaccttttttaattcaaataaaaaaaaattaaacataggtatttatgttttgaaaaatgtttttaaataggtagtttatttgttagttttgtttttaaaaataggtactgtttttgttttaaaaaatattatgtatgattgcatggtgttatgaaatagttataaattttaatagtaaatatatgaattttgtagttgtttatttttattttatttcaatgaaaatagtcatatattatttaattatgtagttgttattttattatgaattttgtgttttaattatgtagtcatatatggtattatgaaatagttataaatggtgttattttatttcaatgaaaaatagtcatatattatttgtagttataaattttgtagttatttatgtttattttaatagtaaatattgaattcgatcaaaaaatgcatgtgtgtcaaaatttgcagattatgg

SEQ ID NO: 11346 - DNA, 1046 bp, Glycine max
  Gm_smallRNAprecursor_4179
aggtatgtcgaatggttagcaaatatagtccctgtcattaaaaagaatggaactcttagagtatgcatagattttagggatttaaataatgctacacctaaagatgaatatgctatgccagtagcggaaatgttggtagattcggcggctggtttcgaatttttaagcatgttagatggttattctggttataaccaaatatttattgctgaaagtgatgtgtcaaaaacagcatttcgatgccctggtgctttaggcacttatgaatgggtggttatgccctttgggttgaaaaatgctggggcctcttatcaaagggccatgaattccatgtttcatgattttattgacacatttatgcaagtttatattgatgatataatcatcaaatcttcctcagaagatagccatttggattaccttaggcaatctttcgaacgaatgaggaaacatggattaaaaatgaatccattaaagtgtgctttttgtgtgcgtgcaggagatttccttggttttgtggtgcataaaaaaggcattgagataaatcaaaacaagacaaaggctattcttgagacgaagcctccttcgaccaaaaaacagcttcagtctttgctaggaaaaatcaacttcttgagacgattcatttcgaatctaagtggcaaagctcagactttttcgccattacttcgactcaagaaagatgaaccattcaaatgggatgaagtgcatcaaaaggcttttgatgaaattaaagaatatctgatcaagcctcctgtgttaatgcctcctagtcgaaacaagactatgaagttgtatattgctgcgtctgacaagaccattggtagcatgttggctcaggaggatgatgatggcgtagagcatgcaatttattatcttagtcgtgtactaaatgatgcagaaactagatatactgccatagaaaaactttgtctttgtttatatttctcttgtgcaaaacttaagcaatatataaagcctgttgatgtttatgtgtattctcattatgatattattaagcacatgtt

SEQ ID NO: 11347 - DNA, 1130 bp, Glycine max
  Gm_smallRNAprecursor_4180
tggtgttgaccactttggttccgactttgcaatggctcaaaggaaaacccattttcctagtaagaaacttttatcatactatttttttttatgtattagtgatttagtgttataattcagaattctaagttatgctcttggttggtaattggtattgcagcatattggtggcgaatgtttgggtcacaaactccaaatttgcagaagctagctattaagattttgagtttgacttgcagtgcttcaggatgtgaaagaaattggagtgtgtttgagcaagtaattgtgacaaaactctaactatactttttaattttatttaattttgattatcaagttatatttggagtatatttgagattgaaatcaacatttatttgttatgttgtagattcattccaaaaaaagaaataggcttgagcacaagaggttgcatgatttggtgtttgtcaaatacaaccaacaattgaagcaaagatataatgcaagagatgaaattgatccaatttctcttaatgatattgatgtatgcaatgaatggctcgtgggagagatggatcaagatgatgataatgatgctggaaatgatttggtatttgaagatgatgatgctctaaattgggcaactgtgtatcaggcttcgggggttggagagtgtaggatgtatactaggcggaaaaagcaaaaaacaagtgttgctgctgcccaaacttctaaaaaacaggcaatggttgttggatcttcatcaaggaagcaaaaagcagtccaagaaaatgatgagggtctagatgttgaggagaatattgatgttgaatctgaagaagaagaaatcatggtcaattttgaagctatgatggggaagagggagagggagatgctccattaccatatgataacatcgaagatgattatgttgggattggagaagatgattagagcctcaaccttcactttgcactttgcattatgtttttatcattttcttattttgaactctttaatgagtttatttggtgttggtacttgattattgtatgaactcatgaaacttttttagtttatttgaatgcaatcctttgtttttttcaatttcaattagtttatatatatgtttttttttgtccaccatg

SEQ ID NO: 11348 - DNA, 1073 bp, Glycine max
  Gm_smallRNAprecursor_4181
atcaagatgatgataatgatgctggaaatgatttggtatttgaagatgatgatgctctaaattgggcaactgtgtatcaggcttcgggggttggagagtgtaggatgtatactaggcggaaaaagcaaaaaacaagtgttgctgctgcccaaacttctaaaaaacaggcaatggttgttggatcttcatcaaggaagcaaaaagcagtccaagaaaatgatgagggtctagatgttgaggagaatattgatgttgaatctgaagaagaagaaatcatggtcaattttgaagctatgatggggaagagggagagggagatgctccattaccatatgataacatcgaagatgattatgttgggattggagaagatgattagagcctcaaccttcactttgcactttgcattatgtttttatcattttcttattttgaactctttaatgagtttatttggtgttggtacttgattattgtatgaactcatgaaacttttttagtttatttgaatgcaatcctttgtttttttcaatttcaattagtttatatatatgtttttttttgtccaccatgacatccgccattttccgctacgccatccgccatatttttatggcggatttttgactttccgccatgaaccgtcatccgccattaacaacattggtcaaaattaatgtaacctatcatatatttgtggcaaaatgacatcatgggattccttttataaacttattttcaaaaggggtctctttttaaacatattcttgaggggggtctgttttgtaaaaaaaatcacgtgatattatcattctcatcatgtaaccccactattcatgtcagcagaaaaagtcacgtgtgccaagtgtgtttcatcatcaccactgacaaaacacattgcttgcatggtcatgggttccgcttgatgcactggcgataggggtgggaataggtcaggtcgacctacaggggcctacgacctgacctacataaagtctggcttgaattgacctatttaattaaaagattaggctcaggtttttttaaaagcctattaaattaaatagaccaga

SEQ ID NO: 11349 - DNA, 1036 bp, Glycine max
  Gm_smallRNAprecursor_4182
taatgaaatttgggtattaattaaacgttaactagaattagtgtacacacacataaaatatatataagtagaacttttatttaaatcacgtaccttaacaacaatccacctagcagcagccttggatttcagttgtggagtatcatcaagtcctttcaaagcactagtgttgaatatgaggaacattaaaatattgatgttgttgagttatgccaatgaaaatgtattgaaaaaaatattgacctgtttattattccctttgtctggcctgttatgtaaagaacaaaaccagacaactaggttttccataggcagaatgatgaccatttgccagtgtccactgcactagagatgaatatgggttattgtagtagtatagattatttaaattcaattattgtgtttgatctacccatttaggtaggctccaaggtaaacatctcgttttgaactctatatccaactcttgatgtaactttcggattcaaattgtgattgcccagatctctgaatggactgtggctcgaggaatccatacacatcagaattccccgctcgcacacttgtctcagtcagatggatgtgttgttaagtcaaagttaattatgtatgaatttaaaaaaattactttggtaattaatagtaatctaaaatgacttacagaatccacaactgtataacagatatgttgagacattgaccaccgtgtgcaatttcagagagatcttcgtgctttatatacaacgggatgttttgattaaacaccccaaatatggtagcatcccacataacctggagaggcttcaaaaacagttgtgggatgatcaatgtcatcaggtacaggggatcatcaacctcttcatctgggttttctggaggttttgctggagacacagctgcctgttgataaaacatagttaattagcatgttttgattacagtgaacaaattaattgaaaaaaataaacatataatcagagtaaaatacatgttatgataaacgcttcacaagatgtgttggccaagcaaggaaggt

SEQ ID NO: 11350 - DNA, 1057 bp, Glycine max
  Gm_smallRNAprecursor_4183
gaataaatctatatatagaagccacagaacaaattaaaaaagataactctggtaaagtagaaataaccttcagacccgctccaaccatagaacaaattaaacaagataactctggtaaagtagaaataaccttcaacagaagaaactctttctcatcaagaatagaagcctctaggtctgaatatgagtcagccagaaggtcttttttggttagaacccgttcaatcccagtaggactaaccagatctgagtcacataaccagttccctacggtaaacctccaaggattagatactacttctagcatacctaaaacaacttacaaccaagaccaagaggacgaccaaaagtcgatccaatccccaacatactcttctatggaaccttatgatgttatctgacaattttagcattgataaggaaacccttaggaaagatttttattctccggcgaatgagcctcaacggatatggtttttccagcattacaagggtacaaacataaaacaaatccaagacaagttctatgaatttgtcgaaagagtcaaaattaatgtccttttctttgattggttccatgcttataccataaaaaaggatatagattacctatggaagcaagacatcataggtgatccatcggcaaatgtcctaacaaattggcaaataaaagattgtgagttaatccaatcggaattacctcccgcaactaaatatcaactaccaaatatcaaagatagtaacaataaacctgtcatggcaattccatttaaaacaaaagatatcaatgaggaagtaacctctgaagatattaagagcctaatggaacaggcaaattacaccaataaatatttaaagttttagtagaaaccattaagactaaggtagttcctaaacaaaaatcggtcgaggaagcttcgccaagcattcccattgaaaaaccattattcaaacctttcaaagttagtgagaaggctaaacaaaaaattagggaacttagaaaaactaaatccttaattgaaggcgtaggtgacaatcatagtgaattactaaacaa

SEQ ID NO: 11351 - DNA, 1103 bp, Glycine max
  Gm_smallRNAprecursor_4184
ttattaatgatttcgttttagaaacaatggccttatttgacacaggggctgattcaaactgcatttttgaaggattaattcctacaaaattctttgaaaaaacctcagaaaaattaagcacagcaaacgactcaaaattaaaaattaattttaagctatcaaatgcaatcattgaaaaccaaagtcttaggattaacacaaactttcttctggtaaaaaaccttaagaacgaagtaatcctaggaaccccctcattagagccttgtttcccatccaaatatctaatgaaggaataaccacaaattatttaggaagaaaaattatatttaatttttctactaaaccaatctccaaaaacataaatcttatagaaaataagattaatcaaattaacttcttaaaagaagaagtatcttttaataatattcaggtacaactggaaaaaccccaagtaaaagaaaaaaatccaatctttattaagtcatatcgagtcaactgtttgttctgatttgccacatgcattttgggacagaaagaaacatatcgttgatctcccttacgagaaagactttagggaaaaaaaattcccacaaaagccagaccaatccaaatgaacgaagaactccttcaatattgccaaaaggaaatcaaggatttgcttgataaaggtctaatccagaaaagcaaaagcccatggtcttgtgcggcttttcatgtcaacaaacaatccgagattgagcggggaacaccccgtttagtcataaattacaaaccactaaaccaagtattacaatggattaggtatcctattccaaacaaaaaagacttacttaacagattaaattctgcaaaagtattttcaaaatttgatatgaaatctggattctggcaaatccaaatccaagaatcagataggtacaaaacaatgtttactgtacctttcgggcaatatgaatggaacataatgccattcggattgaagaatgccccttcagaatttcaaaagattatgaatgatatttttaatccctattcaaaattcatcattgtctacattgatgatgttttaatcttttcccaaaacattgatcaacacttcaaac

SEQ ID NO: 11352 - DNA, 1036 bp, Glycine max
  Gm_smallRNAprecursor_4185
tttggatatttattaaatgttaactacaattagtgtacactcacataaaatatatataagtagaacttttatttaaatcacgtaccttaacaacaatccacctagcaacagccttgaatttcggttgtggagtatcatcaagtcctttcaaagcactagtgttgaatatgaggaacattaaaatattgatgttgttgagttatgccaatgaaaatgtattgaaaacaatattgacctgttaattattcccttaaggtagttgtctggcctgttatgtaaagaacaaaactagacaactaggttttccttaggcagaatgacgaccatttgccagtgtccgctgcagtagagacgaatatgggttattgtagtagtatagattatttaaattcaattattgtgtttgacttacccattcaggtagactccaaggtaaacatctcgttttgaactctgtatccaactcttgatgtaactttcagattcaaattgtgattgcccagatctctgaatggactgtggctcgaggaatccatacacatcagaattccccgctcgcacacttgtctcagtcagatggctgtgttgttaagtcaaagttaattatgtatgaatttaaaacaattactttggtaattaatagtaatctaaaatgacttacagaatccacaactgtataatagatatgctgagacattgaccaccgtgtgcaatttcagagagatcttcgtgctttatatagaacgggaagttttgattaaacaccccgaatatggtagcatcccacataacctggagcggcttcaaaaacagttgtgggatggtcaatgtcatcaggtacaggggatcatcgacctcttcatccgggctttctggaggttttgctggagacacagctggctgttgataaaacatagttaattagcaagttttgattacagtgaacaaattaattgaaaaaaataaacatataatcatagtaaaatacctgttctgataaacgcttcacaagatgtgttggccaagcaaggaaggt

SEQ ID NO: 11353 - DNA, 1052 bp, Glycine max
  Gm_smallRNAprecursor_4186
taccagagctagagtaacgagcaaaatagagaaggtgtaagagtagatgaaggccgacatagaggccatgaaagagcagatgaccacaatgatgaaggccatgatgagtatgagaaggatgatagaggccaatacaactacaattgttgccgcaagtgccgccattgaggtgaacccgactcacccacctggcttcaatcaagtaaatcgtctagccttggagacacatcaagtgccccgtaagtgccgccattgaggtgaacccaactacaattgcagacgttatagtagtagtagatcattctcatcgagggattgatgttattagagaacaagggtttgatgttattaaaggtggaaattttgtatttgagaatatcacactaaatgaaggtatgttgaatgctaaacagacaagaaacaataaaaaatgacttacattttggtctaattttttttaacttgctaaattattgactcgatggtaaactcgagagtctaccgagtttacttagagtttatagagtttgctcaaagtctactaaaaaaagagtttactcaagagtcaactcgcagaggacaagtggactcgtaaactcgtaagagttagcgagttaactctagagtttgataaccatgtccacaaaggccacccctaaatcagccacaaaacccgcttgccgcacatccacggtcaaacaccacctttaatacgaaccaaagcaccaaccaggaaaggaactttccagaaaagaagcctgtagaattcaccccaattccggtgtcatatgctaacttactcccagatctactcaataatgcaatggtagccataatcccaacaaagattcctcaacctccattttcccaaggatacaactcgaatgcaacatgtgcttatcatggaggagttccggggcattccattgagcattgtatgaccttaaaacatacggtgcaaactctaattgatgcaggcaggctaaaatttgaggaggacaattgcttgtgaattttgaaattttcaagcaatactatgcatgatacttggg

SEQ ID NO: 11354 - DNA, 1056 bp, Glycine max
  Gm_smallRNAprecursor_4187
aaaattcatggtgctgataattctcattcagtggctggtggaccatgaattgtttattgttcttggaagttaatgttgctttttggatataatgcaggtgagtgatgctagcggttatttggagaggacattcttgagtcctgcatccatgagggcaatcaatcttattcgtaaatggatggaggatgctggtttgagaacgttagccttctaacttgttcaactctaaataatttttctgagggcatgactgatgtttttgttgttatttgtagttgggggtaccaaatgggaaatgtacatggtcagttgatggagcaaatgcaaatgctaaagctttattgattggatctcacatggtaaggcatttattcctgcaatttatgtaaaaacaaaattgaagttttccttgacaatagtgatgatctattttaatgatagatactaggacagttcttatctggaccgtcttagaaagtaaaaactttctaagacggttattagctaacaaccgtcttaaaaagtaccctttctaaaaagtcttagaaagagtattttctaagacggtcgttagctgagacccgtcttagaaaatttattttttaagacggttgttaccgtcttagaaaagaaccatttctaagactttctaagacggttgttactgacaattgtcgtagaaagttagacttttctacgacggttgttttataaccgttgttaaaagtatcaagttttcaatgacgttgggtataaagacagtttataaccgtcgttgaatgcgtgttttagccgtcattaaatgtcttttttgcagtagtgctagagaagaccgtcacttcttgaaggaaaaattgggaaatgaagctggatgatgcattatgggcttacaggattgcatacaagacttccataggtgtctcacccttttaaatggtctatgggaaggcttttcatttgccggtggaattgaagcacagggcttactgggccttcagacgattgaacttttatgaatcctcatctggtgagaaacggagattgcagctactaaag

SEQ ID NO: 11355 - DNA, 1033 bp, Glycine max
  Gm_smallRNAprecursor_4188
aaaatttgtgatactaagtatatacttagagttagaggttgcttgacgatgagaagctaaaataaatttattttatcatgtcacattaatttttataaaataatattatttattattattattcttaagttttaatttcagtttttaaataataaaaaaatattactcccccacacataatatgtcctcttagacacatgcacttgtttttcaaaatataaagtaaagaagttttggtgcatttttcccctctcaaaataaggacactaaagaaaatttcttttttatttttatttatttaataaatcatattaatccgttagtcatttaataaaggcaaaattgtatttttggtcccccagtttatctccagtttcggatttggtccccccagtaatttaattcatgaattgggtcctcctattttgtaaaattgtgtcatgttggttccttaggcaaaaattggacgttgaccgttacaaaggaatgttgactgccacgtgtcacgttcttattggatgatgactgtcacgtgtcatgttctgattggatgtcaactccatgaaagatgaaatgcattgttgttttcattgaccaatcagaacatgacacgtgacaatcataatccaataaaaatatgacacgtgacaatcaacattcctttgtaacagtcaacgtccaattgtggtctaggggaccaacattacatgattttacaaaagaggaggacccaattcgtgaattaagttactgggggatcaaatccgaaactagagataagttgagggaccgaaccaaatttgaaattttacctttaataaaagtggattttaagtgcacaattattattaggtcataaggaaagaataatggaattcagtggtgtcgtttatgaatatttaaattcatgtattaattaattaattattattcatttaattattatatttataaattttaattttctttaaaaaatattaaattaaaaaagaactagtagtattaatctgtaattgttgcttcatttatcatt

SEQ ID NO: 11356 - DNA, 1092 bp, Glycine max
  Gm_smallRNAprecursor_4189
caagtacttagccgcgtcttgcttccactggtcagataccccaaatgctccgaaacaactctattccttgctgccaatctcaattggcctttacatcaattggatttcaaacaatgttgttaatggcggatggcggttcatggtggaaagtcaaaaatccgccataaaaatatggcggatggcgtagcggaaaatgacggatgtcatggcggacaaaaaaaaaatacatatatataaactcattgaaattgaaaaaaacaaaggattgcattcaaataaactaaaaaagtttcatgagttcatataataatcaagtaccaataccaaataaactcattaaagagttcaaaataagaaaatgataaaaacataatgcaaagtgcaaagtgaaggttgaggctctaatcatcttctccaatcccaacataatcatcttcattgttatcacatggtaatggagcatctccctctccctcttccccatcagacgccttaaaattgaccatgatttcttcttcttcaaattcaacatcaatattctcctcaaaatctagatcctcatcattttcttggactgctttttgcttccttgatgaagatccaacaaccattgcctgttttttagaagtttgggcagcagcaacacttgttttttgctttttccgcctagtatacttcctacactctccaacccccgaagcctgatacacagttgccaaatttagagcatcatcatcttcaaataccaaatcatttccagcatcattatcatcatcttgatccatctctcccacgagccattcattgtacacatcaatatcattaagagaaattggatcaatttcatctcttgcattatatctttgcttcaattgttggttgtatttgacaaacaccaaatcatggagcctcttgtgctcaagcctatttctttttttggaatgaatctacaacataacaaataaatgttgatttcaatctcaaatatactccaaataaaacttgatcatcaaaattaaataaaattaaaaagtatagttagagttttgtcacaattacttgcccaaacacactccaatttctttcacatcc

SEQ ID NO: 11357 - DNA, 1133 bp, Glycine max
  Gm_smallRNAprecursor_4190
tagcggaaaatgacggatgtcatggcggacaaaaaaaaaatacatatatataaactcattgaaattgaaaaaaacaaaggattgcattcaaataaactaaaaaagtttcatgagttcatataataatcaagtaccaataccaaataaactcattaaagagttcaaaataagaaaatgataaaaacataatgcaaagtgcaaagtgaaggttgaggctctaatcatcttctccaatcccaacataatcatcttcattgttatcacatggtaatggagcatctccctctccctcttccccatcagacgccttaaaattgaccatgatttcttcttcttcaaattcaacatcaatattctcctcaaaatctagatcctcatcattttcttggactgctttttgcttccttgatgaagatccaacaaccattgcctgttttttagaagtttgggcagcagcaacacttgttttttgctttttccgcctagtatacttcctacactctccaacccccgaagcctgatacacagttgccaaatttagagcatcatcatcttcaaataccaaatcatttccagcatcattatcatcatcttgatccatctctcccacgagccattcattgtacacatcaatatcattaagagaaattggatcaatttcatctcttgcattatatctttgcttcaattgttggttgtatttgacaaacaccaaatcatggagcctcttgtgctcaagcctatttctttttttggaatgaatctacaacataacaaataaatgttgatttcaatctcaaatatactccaaataaaacttgatcatcaaaattaaataaaattaaaaagtatagttagagttttgtcacaattacttgcccaaacacactccaatttctttcacatcctgaagcactgcaagtcaaactcaaaattttaatagctagcttctgcaaatttggagtttgtgacccaaacattcgccaccaatatgctgcaatacaaattaccagccaagagcataacttagaattctgaattataacactaatacataaaaaaaaaagtatgataagtttcttactaggagaatgggttttcttttgagccattgcaaagtcggaaccaaagtg

SEQ ID NO: 11358 - DNA, 1043 bp, Glycine max
  Gm_smallRNAprecursor_4191
tgctttaggtccaccaacaaaaaagtatttttcattagtattaaaaaaaacctcaaatattattaaaaaagtcatatatgttagaaaaatgtgcaacatatttaaagtaaaaactttcttttaaaatttgcttatcgttgggttgaccctgttaaattccattttaaagtgtattcgcagcttactctggtagtctgattggtgttgggttgattttgaatgcatagggaaaaactcgtgatatttagaggtgttgtcagaacgggttaatggttgaagtacacgaaccgtcataataatgtaatattatgtatatatacacacgttaatgacaattcatcacctatatatacacaatcatagtttgggctatttataaaagaatgtgggtgttgctaggtgcacctagcattattgttggtgcacccagcacttaagatgaaatgacgaaaatacctgatccgtaagctttttaagttgattcgtaaaaaacttatagttcaacttgatccgtaagccttttatggatcaacttgattcgtagaagccttacgaatcaagttgatccgtaaggtttctacagatcaagttgatccatgttgttccgtaaaaggcttatggatcaacttgatctgtaagccttttagaaatcaacttgattcataaaccttttacggaacaacacagatcaacttgatctgtagaagtcttacgcaacatatggatcaacttgattcgtatcaaccttacggatcaacttgatccgtatcaaccttacggatcaaattgatccgtacgatttacggactaccttcacgcacacccatcacaaatgtgaaaaaaatgcaggggcaatttttggtatttttagaaaatgttgggtgcacctagcaacacccaaagaatgttcataaagaatgtcaaaagttatggactggtatatttaatgttgggtgcacctagcaacacccaaagaatgtttcataaattctccattttgtccttttgtaatggctcaagaattaaacattgactttcaagtt

SEQ ID NO: 11359 - DNA, 1080 bp, Glycine max
  Gm_smallRNAprecursor_4192
aaaaaaaacctcaaatattattaaaaaagtcatatatgttagaaaaatgtgcaacatatttaaagtaaaaactttcttttaaaatttgcttatcgttgggttgaccctgttaaattccattttaaagtgtattcgcagcttactctggtagtctgattggtgttgggttgattttgaatgcatagggaaaaactcgtgatatttagaggtgttgtcagaacgggttaatggttgaagtacacgaaccgtcataataatgtaatattatgtatatatacacacgttaatgacaattcatcacctatatatacacaatcatagtttgggctatttataaaagaatgtgggtgttgctaggtgcacctagcattattgttggtgcacccagcacttaagatgaaatgacgaaaatacctgatccgtaagctttttaagttgattcgtaaaaaacttatagttcaacttgatccgtaagccttttatggatcaacttgattcgtagaagccttacgaatcaagttgatccgtaaggtttctacagatcaagttgatccatgttgttccgtaaaaggcttatggatcaacttgatctgtaagccttttagaaatcaacttgattcataaaccttttacggaacaacacagatcaacttgatctgtagaagtcttacgcaacatatggatcaacttgattcgtatcaaccttacggatcaacttgatccgtatcaaccttacggatcaaattgatccgtacgatttacggactaccttcacgcacacccatcacaaatgtgaaaaaaatgcaggggcaatttttggtatttttagaaaatgttgggtgcacctagcaacacccaaagaatgttcataaagaatgtcaaaagttatggactggtatatttaatgttgggtgcacctagcaacacccaaagaatgtttcataaattctccattttgtccttttgtaatggctcaagaattaaacattgactttcaagttattagaactacactctaatcaactgaactaataagtcaattatgttataaaataaataatgttactatacataatacta

SEQ ID NO: 11360 - DNA, 1168 bp, Glycine max
  Gm_smallRNAprecursor_4193
cacacacatagaaacacacccacacacagaaacacacacacacagaaacacatacacacagaaacacatacacacagaaacacacacacatagaaacaaacacacacagccacacacacacacacacacacacagacacacacacacacacacacacacacacagaaatacacacacacagaaacacacacacacacagacagaaacacagacacacagacacacacacacacacagccacaaccacacacacacaaccacagccacacacacacacagaaacgaaacacacacacacacagagacagaaaaacacacacacacacacacacacacacacacacacacatgtttgtcgccttaggaaagatattgagctggtagaggaggaacaggcacggattggtgctgatccttctagtgggacctccaataaatctgagaattataagaaggaagcatggaagaaaacacagaagcataaaccaaagagggtggagagtgtcaacgctgatgcagaagcctttggtgatgactcgaaaattctgattgctctatgcattgtgaagctgctgaagcagtagaacatacgaacaaaagagatacaggccatcaaaatttggcattggacaataagataggagattcaactatgctgaagatgggagattcagctaaagttgtgatcaaacaagacatgaagggaagaaggcataaatatgggtttaacaacaatgaacgtgagaaggcacaaaagaaaagggtggtggatgatgaaactgccgacaaacatcagctggatgaagtcctatgaagatcctcctcattctcaaagaggggaacgagcaaaaatttgaaggttgtacattcaggaactaaagaattcaaaatagctagtaataagagggatttgtttttgggattttctgagcaccaagagcggctacgcaagaagtttgcacttgaggagggaaggatatttgcagctaatgaacaagtttcttaactatttgtccttaagattttactgtttctttttgctaatatgtaaatataaatggtataagggtatggcgtaaaaacatggtctatatttacttctaagattgttaggggtaaaaatgaccatgtccctatggcataaccttatattatttatatttacata

SEQ ID NO: 11361 - DNA, 1157 bp, Glycine max
  Gm_smallRNAprecursor_4194
ggattttaatggtagggacttatttgcatagtggatgtaaagataggaactattttttatattttaaaaagatcgagactaatttgcaaaagggaccaaaagtcagggaccaaaatgcctatttactcactctctctctctctctctctctatatatatatatatatatatatatatatatatatatatatatatatatatatatatatatatatatatatatatatactgttcaaacatatactgtttaaattaaaattattgtacaaggttcaaatccatgaaattagttaacatatgtccttacggacctattcctatagaaccaaatgataacaatgatattggaagatgaatttatcatgtctcaccttttatgttctttttctcccatttcatttagatctaactcatcttcatcctcttcttcaatgatgtcacccaaaaacaacaattttctcaatgagcatgaaaaccagacccatgaggtcgccccaaaacacaatctcttcgatgaggaagtccgattcaaagatataaatcaaaatatggatgactggaacatcccagaaatccctcacgatacactgtatgttcctgaaacaattaaagacaaacataactttaattatataataaaaacagtagaaaataatattcctctaggacaagacataggggaaaagtttcatttgctttcaaaaaactcaatttatgaacatagccgtaaatacaagtatttacacatcggttgtgtccaagtagccatcaagaccttaatagatatgggcatagatgtagcagttttaatgtgcctaagagatattaggcataacaaatttaaagattccttaattggaacggtagaaacaagcttaggacaaggtccaatatatttcaactattatccaaacaaaacggtgagtctaatggatagaaacattcttgactatctatttttaaacatccactttcatggccttgacatgaaagaaggatcaattctagcagctttaatttataggatccagtataaggtcatgaacacttatgtgtctagagtcctgttaaaacctcaaagaggagagacaactttgtttatcactgatgtgacaaaggctaatgtttctctcccaactgagaaaagttcagtatca

SEQ ID NO: 11362 - DNA, 1055 bp, Glycine max
  Gm_smallRNAprecursor_4195
atcggtaaaagagggagaggggagacagatgagaaatagaaatttattaaaactagaaagaagcgcttacaaaagttgttctttcagagcacctcttctcaaaaacctgaaaaatgaccacatgaaagggtacctcacaatatggttgaggactccttatatagccaaaattctttcataagaccggtagttgccgatagttttgaccgaaactatttgactatttgttacaggacaattagttttgaccgggacttatttgctacaggataggtagtattgtccggaattacaaattaattacatacagacggttttgtgaccgaaattacaatttatctaaacaaataccaaaacaatcatcttcgttttggtaaaaagggtcttcttcttcttcagcagagcttgtttcttccttctttgaggatgaaccttcttcctcttgctgtaacatttgctaaacttccttaaggtttttagttaggatctctttcgattttgatcctgctaaaaatgctgccagatgagacttttggtttaaaaacacaaaagtttctggatcagctgctttgaggaattttggatgggattggaaccagagtttcacttgttctggatctgctttggatgagtcgaattgagcccaccattttacaaatgcatgtctttgcagtgatggatattggtttttttttcagtcatactataacgatattgccatgagaaaatccatgacagagcaaaactggaaaaatgtttgagatctgctggaattcgtgattcctgagaattgtattgtttttcaaattgagcaaatccttgttggactgtttccgggaatatctctggaattggaccaaagaaatcccaccattgtaaaaacgaatttggaaaattataaattgtgttggttttgaaatatatcaaccatgaatgcttgaagcgggtattttagttccaaaaaaccttagtccaagcatcaatataatcccaataggtataacctactgggtcaaatggtactgaaaatctctttcctttatttaagtccgaac

SEQ ID NO: 11363 - DNA, 1246 bp, Glycine max
  Gm_smallRNAprecursor_4196
aggataattttttagtggacaactctggtagagccagcctagatcctttacctgtacttcgacctcctctcagggaggctctgatgccttaggaggcattactgcttttctgtaagaattcacgggtaaggtagtcaggtagagagtttgaggtgcccttgatatattctatgtcaaaatcaaagacacttaaaattgcttgccaccttacaaaatttgttttgaggcaaggtttttaacatctttttgtaaaatatctttggctgacttgcgatcaaccctgattaaaaaattttgatttaataaatctgattgaaatttggaaatgcacaaaacaattgctaaaacttcttttttaatagttgaatattttaattgtgcaggattccaatgttttgatgtatattcaatgacatgatcttgaccatgtactctttgtttgaggatgccaccataacctatgtctgatgcatcggtttcgataattttaaatgcctgcagaataggaagatacagacattttatagattggactttgagtttgatctctttaactatttgggtatggagatcagaccaaggaggcggatttttcttcagcctatcatgcaatggcttgacaatattgtttaaataggggacaaattctcctacataatttaggcaacctagaaatctttgtaactgggttttgtctaagatttggttaggaaatttgttagcaaattctattgacctttctattggaatgattgtaccttgatatatattatgaccaaggaatcaaatttgagtttggaaaagattgatttttgatttggagactgtcaaaccattctgtttgatgatatggatgaaagtcaggagatgtttgaaatgttggtcaatgttttgggaaaagattaaaacatcatctatatagacaatgacaaattttgaataacgattaaaaatatcgttcataattttttgaaattctaaaggggcattcttcagtctgaatggcatcacattccattcatattgcccgaaaggtacagcaaacgttgttttgtacctatttgattcttggatttggatttgccaaaatccaggtttcatatcaaaatttgaaaatatttttgcagattttaatctgttaagtaaatcttttttgtttgaaataggatacctaatccattgtaatgcttgatttagtggtttgtaatttatgactaggaggggtgttccgcgctcaagctcagat

SEQ ID NO: 11364 - DNA, 1153 bp, Glycine max
  Gm_smallRNAprecursor_4197
aggaggcattactgcttttctgtaagaattcacgggtaaggtagtcaggtagagagtttgaggtgcccttgatatattctatgtcaaaatcaaagacacttaaaattgcttgccaccttacaaaatttgttttgaggcaaggtttttaacatctttttgtaaaatatctttggctgacttgcgatcaaccctgattaaaaaattttgatttaataaatctgattgaaatttggaaatgcacaaaacaattgctaaaacttcttttttaatagttgaatattttaattgtgcaggattccaatgttttgatgtatattcaatgacatgatcttgaccatgtactctttgtttgaggatgccaccataacctatgtctgatgcatcggtttcgataattttaaatgcctgcagaataggaagatacagacattttatagattggactttgagtttgatctctttaactatttgggtatggagatcagaccaaggaggcggatttttcttcagcctatcatgcaatggcttgacaatattgtttaaataggggacaaattctcctacataatttaggcaacctagaaatctttgtaactgggttttgtctaagatttggttaggaaatttgttagcaaattctattgacctttctattggaatgattgtaccttgatatatattatgaccaaggaatcaaatttgagtttggaaaagattgatttttgatttggagactgtcaaaccattctgtttgatgatatggatgaaagtcaggagatgtttgaaatgttggtcaatgttttgggaaaagattaaaacatcatctatatagacaatgacaaattttgaataacgattaaaaatatcgttcataattttttgaaattctaaaggggcattcttcagtctgaatggcatcacattccattcatattgcccgaaaggtacagcaaacgttgttttgtacctatttgattcttggatttggatttgccaaaatccaggtttcatatcaaaatttgaaaatatttttgcagattttaatctgttaagtaaatcttttttgtttgaaataggatacctaatccattgtaatgcttgatttagtggtttgtaatttatgactaggaggggtgttccgcgctcaagctca

SEQ ID NO: 11365 - DNA, 1063 bp, Glycine max
  Gm_smallRNAprecursor_4198
atcaatatcattttacacttcaattaaattgaagcaaaagatttagttttaacaattaaaaaatatatggtgtaatggggatctctaccccacgtattaatttttgggcttttaagccccattaatacttgggtgatgctagtgcaccagcattattatttgtgcacccaacaattttttaatcccctaaatatccctggtgtcttcttccttttgaagttggttgcagtgttattttttctcttacgcctccattgtttttttcttcgctttctccctctgttgttggttcgtgttggtttttcattgttgagagagttgccgcttgggtcgaggtgaaagtgttacgggtgatgattgttgcggtggttgtttcgtcgtcgtccgcatttaaggtacgccattatgctgcattttgctgggtgtgtgtgagttaatccgtatgtgcaagttataagtacggatcaagttaatccgtaagttaaaattacaaatacagatcaagttgatccgtatgactcatatggatcaactatgactcatacagatcaagtttattcatatgagtcatacggatcaacttgagtgaaggacattttaacccattcacttaaaatgttgggtgcaccagcaataatgccgggtgcacctagcatcacccttaatacttgttttaaacaaaaagccccattaataccaaaaataaaatagaattaaggagaccaaattggcattcaaactgacatagaaacaaagttcaattaatccttaaaattataatagtcatccattgcatttcatcctattatttgatacttgaaaacaaaccctaaatcacaagttcctcatttctttaattttgggtataaaataaagtcctcatttacaacgagggagaagaatgaatttacgaaattaaatatcatatctatatatcacatcacatgtatatacaaaaaaaaaaaaagatgctataagaggggacaatgaaatttggtaactagtgttctaggtcctttaattgcttttttaaaagtaaatgttcataccgcatcctttcaag

SEQ ID NO: 11366 - DNA, 1092 bp, Glycine max
  Gm_smallRNAprecursor_4199
cactttgtcatttcaaattcagttttcaatcatcaatcacattacacatgaatcacataatccgatcaagacataataacacatcaatttcataatgaacaattagtaggcgtcaatgttgctaatggcggatggcggttcatggcggaaagccaaaaatccgccataagaatatggtggatggcatagcggaaaatgacggatgtcatggcggacaaaaaaaatacatatatataaactcattgaaattgaaacaaacaaaggattgcattcaaataaactaaaaaagtttaatgagtccatacaataatcaagtaccaacaccaaataaactcattaaagagttcaaaataagaaaatgataaaaacataatgcaaagtgcaaagtgaaggttgaggctctaatcatcttctccaatccctacataatcatcttcattgttatcatatggtaatggagcatctccctctcactcttccccatcagacgcctcgaaattgaccatgatttcttcttcttcagattcaagatcaatattctcctcaaaatctagatcttcatcattttcttgaactgctttttgcttccttgatgaagatccaacaaccattgcctgttttttagaagtttgggcagcagcaacacttgttgttttttgctttttccgcctagtatacatcctacactctccaacccccgaagcctgatacacagttgcgtaatttagagcatcatcatcttcaaataccacatcatttccagcatcattatcatcatcttgatccatctctcccacgagccattcattgcacacatcaatatcattaagagaaattggatcaatttcatctcttgcattatatctttgcttcaattgttggttgtatttgacaaacaccaaatcatgcaacctcttgtgctcaagcctatttctttttttggaatgaatctacaacataacaaataaatgttgattttaatctcaaatatactccaaataaaacttgatcatcaaaattaaataaaattaaaaagtatagttagagttttgtcacaattacttgctcaaacacactccaatttctttcaca

SEQ ID NO: 11367 - DNA, 1133 bp, Glycine max
  Gm_smallRNAprecursor_4200
agcggaaaatgacggatgtcatggcggacaaaaaaaatacatatatataaactcattgaaattgaaacaaacaaaggattgcattcaaataaactaaaaaagtttaatgagtccatacaataatcaagtaccaacaccaaataaactcattaaagagttcaaaataagaaaatgataaaaacataatgcaaagtgcaaagtgaaggttgaggctctaatcatcttctccaatccctacataatcatcttcattgttatcatatggtaatggagcatctccctctcactcttccccatcagacgcctcgaaattgaccatgatttcttcttcttcagattcaagatcaatattctcctcaaaatctagatcttcatcattttcttgaactgctttttgcttccttgatgaagatccaacaaccattgcctgttttttagaagtttgggcagcagcaacacttgttgttttttgctttttccgcctagtatacatcctacactctccaacccccgaagcctgatacacagttgcgtaatttagagcatcatcatcttcaaataccacatcatttccagcatcattatcatcatcttgatccatctctcccacgagccattcattgcacacatcaatatcattaagagaaattggatcaatttcatctcttgcattatatctttgcttcaattgttggttgtatttgacaaacaccaaatcatgcaacctcttgtgctcaagcctatttctttttttggaatgaatctacaacataacaaataaatgttgattttaatctcaaatatactccaaataaaacttgatcatcaaaattaaataaaattaaaaagtatagttagagttttgtcacaattacttgctcaaacacactccaatttctttcacatcctgaagcactgcaagtcaaactcaaaattttaatagctaacttttgcaaatttggagtttgtgacccaaacattcgccaccaatatgctacaataccaattaccaaccaagagcataacttcaaagttagaattctgaattataacactaatacataaaaaaaatagtatggtatttgtatttgtcatatggtaaaagtttcttactaggagaatgagttttcctt

SEQ ID NO: 11368 - DNA, 1094 bp, Glycine max
  Gm_smallRNAprecursor_4201
cttctctttaaaagattctaacaatctaatattttatttttctgaaagatatattttttagaacctttatctaaataattattggataatttttgaactgtgatacttcccaaaagatcaagaaattgaactgtgatacatttttccaaaagttttgacatgaatcttaattatttaaaaatactactgtattttgcagagttaccacacaaaccttgctcataaatgatactgaagatataacttaccaatagagtactgccatgagcatagtgatgaatagagaaccctttgtgaaattgtatgattctacatgcacagtcaacccactcttggttgcaggatgttaaatatcttcaacaacccttacagatgcaaataatatcagatccaacatccctagtggaagatctatttttttttttttatatatatatatatatatatatatatatatatatatatatatatatacttatttatttatgttaatcatttactgctgatgcagcatcatcaagattctcaagtcaaaactctcctaggaaagaaattttgtcaaaaatctcttatagggtgtaaattgcatgtgaatcttgatggtgctgcacctgcaaacaatgattgcagattattctcaaaacactggaaactgacttcaacagttctcatctatatgtgctatcacattttgggtgcgagaggttttcaggcaaagaagactctgaagaaacttcaggcaaattctgccaaaggcacaaaaaatttgaaaatacataacttgaggaagccctaacaaaatataaggtttcaaacaacgtgctaattaattatatatagtaattaatcaaaatagagagccaaaatagtagaatataggacactacaaaaataattgagcgcatatataagaaaatataaaaaaaaaactgtggttttgatatacgatttgaactaatctaatcgcatagagacgtatatctagcgagtgattctgattttgttgagaaagattgaagacagaatgaacgaaacacaagtagaaaaggaggaagaggaaaaaaaaaatccaagatggatgtggaataaaaaac

SEQ ID NO: 11369 - DNA, 1085 bp, Glycine max
  Gm_smallRNAprecursor_4202
ctttaaaagattctaacaatctaatattttatttttctgaaagatatattttttagaacctttatctaaataattattggataatttttgaactgtgatacttcccaaaagatcaagaaattgaactgtgatacatttttccaaaagttttgacatgaatcttaattatttaaaaatactactgtattttgcagagttaccacacaaaccttgctcataaatgatactgaagatataacttaccaatagagtactgccatgagcatagtgatgaatagagaaccctttgtgaaattgtatgattctacatgcacagtcaacccactcttggttgcaggatgttaaatatcttcaacaacccttacagatgcaaataatatcagatccaacatccctagtggaagatctatttttttttttttatatatatatatatatatatatatatatatatatatatatatatatacttatttatttatgttaatcatttactgctgatgcagcatcatcaagattctcaagtcaaaactctcctaggaaagaaattttgtcaaaaatctcttatagggtgtaaattgcatgtgaatcttgatggtgctgcacctgcaaacaatgattgcagattattctcaaaacactggaaactgacttcaacagttctcatctatatgtgctatcacattttgggtgcgagaggttttcaggcaaagaagactctgaagaaacttcaggcaaattctgccaaaggcacaaaaaatttgaaaatacataacttgaggaagccctaacaaaatataaggtttcaaacaacgtgctaattaattatatatagtaattaatcaaaatagagagccaaaatagtagaatataggacactacaaaaataattgagcgcatatataagaaaatataaaaaaaaaactgtggttttgatatacgatttgaactaatctaatcgcatagagacgtatatctagcgagtgattctgattttgttgagaaagattgaagacagaatgaacgaaacacaagtagaaaaggaggaagaggaaaaaaaaaatccaagatggatgtggaataaa

SEQ ID NO: 11370 - DNA, 1082 bp, Glycine max
  Gm_smallRNAprecursor_4203
tttaaaagattctaacaatctaatattttatttttctgaaagatatattttttagaacctttatctaaataattattggataatttttgaactgtgatacttcccaaaagatcaagaaattgaactgtgatacatttttccaaaagttttgacatgaatcttaattatttaaaaatactactgtattttgcagagttaccacacaaaccttgctcataaatgatactgaagatataacttaccaatagagtactgccatgagcatagtgatgaatagagaaccctttgtgaaattgtatgattctacatgcacagtcaacccactcttggttgcaggatgttaaatatcttcaacaacccttacagatgcaaataatatcagatccaacatccctagtggaagatctatttttttttttttatatatatatatatatatatatatatatatatatatatatatatatacttatttatttatgttaatcatttactgctgatgcagcatcatcaagattctcaagtcaaaactctcctaggaaagaaattttgtcaaaaatctcttatagggtgtaaattgcatgtgaatcttgatggtgctgcacctgcaaacaatgattgcagattattctcaaaacactggaaactgacttcaacagttctcatctatatgtgctatcacattttgggtgcgagaggttttcaggcaaagaagactctgaagaaacttcaggcaaattctgccaaaggcacaaaaaatttgaaaatacataacttgaggaagccctaacaaaatataaggtttcaaacaacgtgctaattaattatatatagtaattaatcaaaatagagagccaaaatagtagaatataggacactacaaaaataattgagcgcatatataagaaaatataaaaaaaaaactgtggttttgatatacgatttgaactaatctaatcgcatagagacgtatatctagcgagtgattctgattttgttgagaaagattgaagacagaatgaacgaaacacaagtagaaaaggaggaagaggaaaaaaaaaatccaagatggatgtggaata

SEQ ID NO: 11371 - DNA, 1041 bp, Glycine max
  Gm_smallRNAprecursor_4204
ttcctatggcaaccaggcgggaaggattttcttcaatgtatagcccgcatttgtctgagtcacctgtctctagatcgttccccgagggagcaacacaactctcctttgtgctgacacgaggacctgagggaccaacctctggctctggaggcagtgcaagtccctgtgattgcatttgagactgaaactaggactgcatctggctgaaggatgccatcaactatcgagtcactttttctgtgatcgactcctcaagctggtccctgatttgttgggtcagctgttgtaggtcttcaggaggcatggaggaagaactgcgggatgttcgtggagctgatccgaagtattgctttatggtgacaccgactccaacagcacggacacggccagggtgctctggtcgcccaatgacaatagtcaggacatcctgacgtccatgggggacgaacgatccttgtgacgcctgctcttccaaagaatcttgtacaaaacacatatatttgtccaaggaattcacagaatacacaaagataaatataattattaattaaaaatgacttacaatcttctcagctatttccactattagaaaatatgctttctacatcggttatttatgactttcaacatcggtttttcaatcgatgttgaaagtaccgacgttgataatattatcgttaacatcggtttttcaaaaatcgatgttaaagtaaaattaccaacatcggttatataaataaccgatgttgctaatatgaattacacccagaaaatgtatattaatattgaaagttaacatcggtttttacaaaaaaccgatgttaacgaatgtgttactgttgacagttaacatcggttttttacagaaaaccgatgttaacgttcgttaacatcggtttttataaaaaaccgatgttaacgaatgtgttattgttgacagttaacatcggtttttataaaaaaccgatgttaacgaatgtgttactattcacagttaacatcggtttttatgaaaaccgatgttaacgtgggttaacatcg

SEQ ID NO: 11372 - DNA, 1036 bp, Glycine max
  Gm_smallRNAprecursor_4205
tttggatattaattaaacgttaactacaattagtgtacacacacataaaatatatataagtagaacttttatttaaatcacgtaccttaacaacaatccacctagcagcagccttggatttcggttgtggagtatcatcaagtcctttcaaagcactagtgttgaatataaggaacattaaaatattgatgttgttgagttatgccaatgaaaatgtattgaaaacaacactgacctgttaattattcccttaaggtagttgtctggcctgttatgcaaagaacaaaaccagacaactaggttttccttaggtagaatgacgaccatttgccagtgtccactgcagtagagacgaatatagtttattgtagtagtatagattatttaaattcagttattgtgtttgacttacctattcagataggctccaaggtaaacatctcgttttgaactctgtatccaactcttgatgtaactttcggattcaaattgtgattgtccagatctctgaatggactgtggctcgaggaatccatacacatcagaattccccgctcgcacacttgtctcagtcagatggctgtgttgttaagtcaaagttaattatgtatgaatttaaaacaattactttggtaattaatagtaatctaaaatgacttacagaatccacaactgtataactgatatgctgagacattgaccaccatgtgcaatttcagagagatcttcgtgctttatatacaacgggaagttttgattaaacaccccgaatatggtagcatcccacataacctggagcggcttcaaaaacagttgtgggatggtcaatgtcatcaggtacaggggatcatcgacctcttcatccgggctttctggaggttttgctggagacacagctgcctattgataaaacatagttaattagcaagttttgattacagtgaacaaattaattgaaaaaaaagaaacatataatcagagtaaaatacctgttctgataaacgcttcacaagatgtgttggccaagcaaggaaag

SEQ ID NO: 11373 - DNA, 1053 bp, Glycine max
  Gm_smallRNAprecursor_4206
ctgagggagcaacacaactctcctttgtactgacacgaggacctgagggaccaacctctggctctggaggtagtgcaattccctgtgattgcatctgacactgaaactgcgactgcatctggctgaaggattccatcatctttcgagtcactttttctgtgattgactcctccagttggtctctgatttgttgggtcagctgttctaggtcttcaagaggcatggaggaagaactgtgggatgttcgtgaagctgatccaaagtattgctttatggtgacaccggctccaacagcacgaacacggccagggtgctctggtcgcccaatggcagcagtcaggatatcctgacgtccatgggggacaaacgatccctgtgacgcctgctcgtccaaagaatcctgtaccgaacacatatttgtccaaggaattcacaaaatacacaaagataattacaattattaattaaaaatgacttacaatcctgtcagctatttcttttgctgcctcagacgtcatctgtccagttttcttcgtgcgggccatcttccatttcacgtggcgtctgatgggagatggagggtcaatgatgccctcagtgcttccagactgggcagcttcttccagtcttttctttgccttctcagccatgagcttttcttctaaatattcataacccccacgagacaatacgtggggggcagtgttttgcttctgggaggcctgtgccttttttcgtacatcctgcaaaagtttaacattaatgaaaatgattattacaataaattataagaaatgattttgttgtggaaaacaactaaaatgacaaagtacatacctcccatgaggagtctctacgggtctgacaaaaccgagtccatttctccttgctaatgccatatttttcacagacaatgtcgtccgcaccgtccttgtcgactgcaagtgcccatttcctagtcaagtcagatttaaattgcctccagcgctcgccgacaatctgaagaattttcttctttgtcctattgtcagaagcttcagggatttgaaattc

SEQ ID NO: 11374 - DNA, 1069 bp, Glycine max
  Gm_smallRNAprecursor_4207
agaggaaacaacttgagctaaaccctggtatgcaatgtgaacaataagaaagggtcgtcattattctatctagccattacttgtttctattctatgtgacagacgcaaaatgaacattctatctagtcattttaactgcatgaatgatcatttgtgacgatttttaatagcaaaaaattatagtttttttttttttacttacattacacgtatatggtgctgctataacggagaatggagattggggatgaaaaacggaagataaatgcttttgagaaaaaaaattaaaaaaataacaatataaaaactggcaaaatgatcaaatcagcattaagggtattaattagttttcaagtattcatttgcaaacattttaaagctaggtaaaattgtatttttggtctccagtttatcttcaattttggatttggtctcccagtaatttaattcacgaattgggtccttctattttgtaatcgtgcaatgttgatccacatgctacaattggacgttgaccgttagtaaatgatattgactgtcacgtgtcacgttcttattggattatgattgtcacgtgtcatgttctgatttggtcaatgaaaacaacaatgcatttcatctttcatggagttgagatccaatcagaacatgacacgtgatagtcatcatccaataagaacgtgacaatgtggtagtcaacatcacttactaatggtcaacgtcatccaattgtagcctggggatcaacattgcacgattttataaaataggaggacccaatttgtgaattaaattattgggggaccaaatccaaaattaaaaataaattgggggaccaaaaatacaattttgccttaaaactataaaaatttcctatgttttgttaaaaatatggtagtgcacatgaccaaaaaaatagtacaagacaaacatataagtttttggacaatttttttttatcttatacatggtttgacaaataattaattacacaagtaaaataatataaaattaattaaaatacttaatattaattatcttaatacaattgacatcaaatcaaatttaa

SEQ ID NO: 11375 - DNA, 1033 bp, Glycine max
  Gm_smallRNAprecursor_4208
ctcctccccatctgaagagttacaaatgtcctattaaggaataaagaggttccggttgaggaagaaccatgaagccatcggttacctacgaattcagattccgctgcgtttgttgattaatcattatggattcaggtattccaaaaactcttcttgataatctaatgtaatgttttctttgtggttattggtattttaaaaggatcccctaaaattccaacaatacaacttataagtgtccattgtaaaataatttatttacatttacaatttttattacataaaaaagaataggacgtggtttcgtgtaggatactacacaagctatttctttaaggcaaaattgcaaatttgatcccccagtttatctccaattttggatttggtccccaagtaatttaattcaagaatttggtcctcctattttgtaaaatcgtgcaatgttggtcccccaggccacaattggatgttgaccgttaacaagtgatgttgactgccacgtgtcacgttcttattggatgatgactgccacgtgtcatgttctgattggatgttaactccatgaaagacgaaatgcattgttgttttcattgaccaatcagaacatgatacgtgacagtcatcatccaataagaaacgtgacacgtgacagtcaacatcatttgttaacggtcaacgtccaattgtgccctcaggatcatcattgcacgattttacataataggaggaccaaatttgtgaattaaattactgagggactaaatcggaaactgaaaataaattgaaggatcaaaaatataattttgcctttgtttaatgtgagctcacttgctaattgcaactttatttatttaaagggaagtgccaaatttggaataaggtccctatccatatcttggtattggaacatatatcccttgcatcctgaaaacaagttacactacgatatttaaattctgaaccaaaatttattagtaattgcaaatctgcatcattttctttcattgtatattaaggaaagcaaaaagatgtt

SEQ ID NO: 11376 - DNA, 1109 bp, Glycine max
  Gm_smallRNAprecursor_4209
attaaggaataaagaggttccggttgaggaagaaccatgaagccatcggttacctacgaattcagattccgctgcgtttgttgattaatcattatggattcaggtattccaaaaactcttcttgataatctaatgtaatgttttctttgtggttattggtattttaaaaggatcccctaaaattccaacaatacaacttataagtgtccattgtaaaataatttatttacatttacaatttttattacataaaaaagaataggacgtggtttcgtgtaggatactacacaagctatttctttaaggcaaaattgcaaatttgatcccccagtttatctccaattttggatttggtccccaagtaatttaattcaagaatttggtcctcctattttgtaaaatcgtgcaatgttggtcccccaggccacaattggatgttgaccgttaacaagtgatgttgactgccacgtgtcacgttcttattggatgatgactgccacgtgtcatgttctgattggatgttaactccatgaaagacgaaatgcattgttgttttcattgaccaatcagaacatgatacgtgacagtcatcatccaataagaaacgtgacacgtgacagtcaacatcatttgttaacggtcaacgtccaattgtgccctcaggatcatcattgcacgattttacataataggaggaccaaatttgtgaattaaattactgagggactaaatcggaaactgaaaataaattgaaggatcaaaaatataattttgcctttgtttaatgtgagctcacttgctaattgcaactttatttatttaaagggaagtgccaaatttggaataaggtccctatccatatcttggtattggaacatatatcccttgcatcctgaaaacaagttacactacgatatttaaattctgaaccaaaatttattagtaattgcaaatctgcatcattttctttcattgtatattaaggaaagcaaaaagatgttactaagtaataagtttctagtaaacttgcgatcctcagttgaaaactatcacatgaaaagcctaaagaaaaaagagatgcaaatctagaattctttttaatttaaggg

SEQ ID NO: 11377 - DNA, 1095 bp, Glycine max
  Gm_smallRNAprecursor_4210
ttcacacctataataataatagtagtagtaacgagttaaaaaggttacttgaataataatttgaacaactaagagaaaacagagaattttgagatttaaaaaaatgatatgatgaaaagaaataaatacaaaaaatgatgtcatacaaattattgtatgtgtatcacatctcatttaatattgactgacatgtaaatgagtacacaatggttaaataaattttgagaggattctacaagcaaagggaaaaaaatcccagccatacaattcatcaagtagagccaaagtagccttttccaatgattaggcatctaagaatgtgggaccatatggtgcggaaaatgttcgagggacaaaccagttttcaatgcccagagtatgttcgtagtgccctaataagttgaacctatgaacacatttgaaaacagatcatactcaataaataaaaaaaataaatgaggaaaaggggaataaggaaaggagaattagaaatagagacaaagccagggaagaggcagtgcatgagcagaaccacaacagatttctcctctcactttctcactttcttgacaatattgtgttgatagctccatccatgctctgcctgttcccctgctttgtcctgtctctaactattacctcatacttgtcgacaacatctgaaacatttagcaacatctcattctcagaactcggaaggattaccccattcgaaatttgggttattttattagattaattaaacacaaaatgcactctgagtcttgagtgcaagcatggttaaatccgatccttattatatttggtcgcagagggatgaatgttttgtactttgcagtccatgaatgatgtctgtactatgaaaattttggtgtactactttcacttatggggtactagtgtactaatagctagctcaaagtgtcatagtttaattaaaacaataaacaacaacttctggaatgtgagatgttaagtgtactgctggtgctatgttttagtttgtagtactgtggtactgctttccttttgctagcctaatttgtacgtgcatcagcatttaagtttagtactatttgattatttctctgaaat

SEQ ID NO: 11378 - DNA, 1095 bp, Glycine max; identical to SEQ ID NO: 11377
  Gm_smallRNAprecursor_4211

SEQ ID NO: 11379 - DNA, 1093 bp, Glycine max
  Gm_smallRNAprecursor_4212
cacacctataataataatagtagtagtaacgagttaaaaaggttacttgaataataatttgaacaactaagagaaaacagagaattttgagatttaaaaaaatgatatgatgaaaagaaataaatacaaaaaatgatgtcatacaaattattgtatgtgtatcacatctcatttaatattgactgacatgtaaatgagtacacaatggttaaataaattttgagaggattctacaagcaaagggaaaaaaatcccagccatacaattcatcaagtagagccaaagtagccttttccaatgattaggcatctaagaatgtgggaccatatggtgcggaaaatgttcgagggacaaaccagttttcaatgcccagagtatgttcgtagtgccctaataagttgaacctatgaacacatttgaaaacagatcatactcaataaataaaaaaaataaatgaggaaaaggggaataaggaaaggagaattagaaatagagacaaagccagggaagaggcagtgcatgagcagaaccacaacagatttctcctctcactttctcactttcttgacaatattgtgttgatagctccatccatgctctgcctgttcccctgctttgtcctgtctctaactattacctcatacttgtcgacaacatctgaaacatttagcaacatctcattctcagaactcggaaggattaccccattcgaaatttgggttattttattagattaattaaacacaaaatgcactctgagtcttgagtgcaagcatggttaaatccgatccttattatatttggtcgcagagggatgaatgttttgtactttgcagtccatgaatgatgtctgtactatgaaaattttggtgtactactttcacttatggggtactagtgtactaatagctagctcaaagtgtcatagtttaattaaaacaataaacaacaacttctggaatgtgagatgttaagtgtactgctggtgctatgttttagtttgtagtactgtggtactgctttccttttgctagcctaatttgtacgtgcatcagcatttaagtttagtactatttgattatttctctgaaat

SEQ ID NO: 11380 - DNA, 1093 bp, Glycine max; identical to SEQ ID NO: 11379
  Gm_smallRNAprecursor_4213

SEQ ID NO: 11381 - DNA, 1093 bp, Glycine max; identical to SEQ ID NO: 11379
  Gm_smallRNAprecursor_4214

SEQ ID NO: 11382 - DNA, 1094 bp, Glycine max
  Gm_smallRNAprecursor_4215
cacacctataataataatagtagtagtaacgagttaaaaaggttacttgaataataatttgaacaactaagagaaaacagagaattttgagatttaaaaaaatgatatgatgaaaagaaataaatacaaaaaatgatgtcatacaaattattgtatgtgtatcacatctcatttaatattgactgacatgtaaatgagtacacaatggttaaataaattttgagaggattctacaagcaaagggaaaaaaatcccagccatacaattcatcaagtagagccaaagtagccttttccaatgattaggcatctaagaatgtgggaccatatggtgcggaaaatgttcgagggacaaaccagttttcaatgcccagagtatgttcgtagtgccctaataagttgaacctatgaacacatttgaaaacagatcatactcaataaataaaaaaaataaatgaggaaaaggggaataaggaaaggagaattagaaatagagacaaagccagggaagaggcagtgcatgagcagaaccacaacagatttctcctctcactttctcactttcttgacaatattgtgttgatagctccatccatgctctgcctgttcccctgctttgtcctgtctctaactattacctcatacttgtcgacaacatctgaaacatttagcaacatctcattctcagaactcggaaggattaccccattcgaaatttgggttattttattagattaattaaacacaaaatgcactctgagtcttgagtgcaagcatggttaaatccgatccttattatatttggtcgcagagggatgaatgttttgtactttgcagtccatgaatgatgtctgtactatgaaaattttggtgtactactttcacttatggggtactagtgtactaatagctagctcaaagtgtcatagtttaattaaaacaataaacaacaacttctggaatgtgagatgttaagtgtactgctggtgctatgttttagtttgtagtactgtggtactgctttccttttgctagcctaatttgtacgtgcatcagcatttaagtttagtactatttgattatttctctgaaatt

SEQ ID NO: 11383 - DNA, 1069 bp, Glycine max
  Gm_smallRNAprecursor_4216
acaccatgaacacatataagatagatatttatttctcaacacgatttatttcatattcaagagtcaaacagaatttgaatattagatcatttgcttaaagaatacaagctattatcacttatagtgttcttggctttttttattattattattatgagtgcttatgtttaatggtttaaaactatttctattcaaattaattttatctaacttttttaaagtaggctgaccttaaatgttgactcaagcagtgtgtaactaattagtgttaaaagtcaataggagcacatataacctatattttttattttggcaaaattgtaaatttggtttccaaatttgtttccaatttcgattttggtcccctttaaaattattgacgaattttgtcctcctattttatccaatctcgcaatttcggtcccccagtccagaattggacattcactgctataaaggaatgttaactgccacatgtcacgttcttattagatgatgactatcacatgtcatgttctgattgacctatgacaacaaaaatgcatttcatcttccatgaagttgacatccaatcataacatgacacgtgacagtcatcatccaaagaacgtgacatgtgatagtcaacatttctttgtagaagtcaatgtccaattctggactgggggggacaaaatttgttattaattttaaagggggaccaaaatcgaaattgaagataaattgggagaccagaaatataattatcatacaatggtaggtttagatattgttgtttgcatatttaacatttcatttgttaataaacatttgaaaggtatatcaatgttttatcgaataaagttttttctcttaaaaaaatggccctacatagaaactaaattattttttcgatttgtcatgttatatcattccgttcatggaattattgattccatatccgatatcggataaaagccaaaacaacaatggatgagaaagttgtgattccaagagagagatctcggataagtaattataaaatgatatatatatatatatatatatatatatatatatatatatatat

SEQ ID NO: 11384 - DNA, 1187 bp, Glycine max
  Gm_smallRNAprecursor_4217
atcagcttcacgaacatcccgtagttcttcctccatgcctcttgaagacctagaacaactgacccaacaaatcagagaccaactagaggagtcaattacataaaaagtgactcgaaagatgatggaatcctttagccagatgcagtcgcagtttcagtctcagatgcaatcacaggcaattgcactacctccagagccagaggttggtccctcaggtcctcgtgtcagcacaaaggagagttatgttgctccctcagggaatgatccagggacgggtgactcagacaaatgcggcctatatattgaagaaaattcttcccgcttggttgccctaggaagacgttacgagggatccacaacagttcacaacatcccattgttgcatggccaagttaaggttggtgttgaggaggttaaagatacagaggctctcgttcttgtgcccactgacgaagttaccttagtggggcaggcacttaacactttccttgcttggccaacacatcttgtgaagcgtttatcagaacaggtattttactctgattatatgtttatttttttcaattaatttgttcactgtaatcaaaacttgctaattaactatgttttatcaataggcagctgtgtctccagcaaaacctccagaaagcccggatgaaaaggtcgatgatcccctgtacctgatgacattgaccatcccacaactgtttttgaagccgctccaggttatgtgggatgctaccatattcggggtatttaatcaaaacttcccgttgtatataaagcacgaagatctctctgaaattgcacatggtggtcaatgtctcagcatatctgttatatagttgtggattctgtaagtcattttacattactattaattaccaaagtaattgttttaaattcatacataaaaaccgatgttaatgtgggttaacatcggttttttataaaaaaaatcgatgttaactgtcaatagcaacacattcgttaacatcggttttttgtaaaaaaaccgatgttaaaattcaatagtaacacatccgttaacatcggtttttataaaaaccgatgttaactgtcaatagtaacacattcgttaacatcggtttttttataaaaaccgatgttaactgtaaataataacacattcgttaacatcggtttttataaaaaccgatgttaac

SEQ ID NO: 11385 - DNA, 1046 bp, Glycine max
  Gm_smallRNAprecursor_4218
gcttgtggtcactatctgtgacatccatgcaagcttcatacctattaaggttagatgacattaatcaaaacaaaaaatgaaagaaaaagatggtacttcccacttatgcttttctaaaatattttagagagcaatgctaaacaattagaaaagtttaaattatattttggccctatattttaattgggtcctgattcctgaatgcaaaaagttttcaattcagtccttatatgtacaattgttggggaaggaggaaatcagagacaagattgaatccatgtgtttacacaacagaggcttgactacatatgttctaacacaaatatcctaaatacctactataaatgatgaaaggatggtcatgtttacattattctggagtgaataaacaatttagtccctgagattgtacctatttttcatattagtccctaacttaatattaaattcaaaatagtccctatctttgcataagtgttgcaaaatagtccttccgttaaattttaaagtaacgccgttagtgaggtcaattttagtgccacgtggactatccacgtggcactaaaggatgacgtgacatgacacgtggacgtgcctgatgccacgtcatttgatgataacaaaacgagtaaatagactatttagtccctgactttgtacccctgttgcatattaatccctaacttaatgaaaaattcaaaatagtccctatcttttacataagtattgcaaaatagtccttccgttaaattttaaagtaatgttgttagtaaggtcaattttagtgtcacgtcatttgatgatgatagaatgagtgacttcttcaaatttgatggttttgaaccaattgagacatatatacgaaaaagaactcacacacacttacacaaataaaaagaaccaaaaatccacagcaacaaccttatctctgtagctgtcaacaccaatgggcgaggtctgcataaccattctcttttcctctttttttttttacttcaattaccatcaatgtatcattctggattctgattttttttgtgtgtttt

SEQ ID NO: 11386 - DNA, 1045 bp, Glycine max
  Gm_smallRNAprecursor_4219
cttgtggtcactatctgtgacatccatgcaagcttcatacctattaaggttagatgacattaatcaaaacaaaaaatgaaagaaaaagatggtacttcccacttatgcttttctaaaatattttagagagcaatgctaaacaattagaaaagtttaaattatattttggccctatattttaattgggtcctgattcctgaatgcaaaaagttttcaattcagtccttatatgtacaattgttggggaaggaggaaatcagagacaagattgaatccatgtgtttacacaacagaggcttgactacatatgttctaacacaaatatcctaaatacctactataaatgatgaaaggatggtcatgtttacattattctggagtgaataaacaatttagtccctgagattgtacctatttttcatattagtccctaacttaatattaaattcaaaatagtccctatctttgcataagtgttgcaaaatagtccttccgttaaattttaaagtaacgccgttagtgaggtcaattttagtgccacgtggactatccacgtggcactaaaggatgacgtgacatgacacgtggacgtgcctgatgccacgtcatttgatgataacaaaacgagtaaatagactatttagtccctgactttgtacccctgttgcatattaatccctaacttaatgaaaaattcaaaatagtccctatcttttacataagtattgcaaaatagtccttccgttaaattttaaagtaatgttgttagtaaggtcaattttagtgtcacgtcatttgatgatgatagaatgagtgacttcttcaaatttgatggttttgaaccaattgagacatatatacgaaaaagaactcacacacacttacacaaataaaaagaaccaaaaatccacagcaacaaccttatctctgtagctgtcaacaccaatgggcgaggtctgcataaccattctcttttcctctttttttttttacttcaattaccatcaatgtatcattctggattctgattttttttgtgtgtttt

SEQ ID NO: 11387 - DNA, 1061 bp, Glycine max
  Gm_smallRNAprecursor_4220
tgctgttttcccatgccctcgtttcaagtgtagtgaaatgatttgaaactactaaacaaaacagaaaaaaaaaaccacacccacatgtgagcccccagcaggtaaatgaaggaatatgttcccccagttaacactctgcagatcacatatatatgcatcactcgaaagaaccctagaaaaaaaatgtcttccttcaagacttttgcaataatgaaaaaaggaagataaaaataaaaacagatgtacctttgttcagtcacgaggaagcaaaacctatgcctttgaaaatgacaatgccgtgctttgttgaatagttggcctatataaatatatatatatatatcctccaatagttggtacaattcatgattaatactataacaaaccgaagaaattaaaaaaaatatcaaagactaataatattcatatatacatactctttaatttacccacataaaattaaaatttgatcatcataatctccatgtatgtatatgaaatatgcttggctcctcatacgccatccacaaaggtcattgatgcttcgatgagctctacaaatggcatacagggagccaggcacatacacatatgtatgcatgatgtaacacaattaaacatgcaattaactaataagatgcatgagtgtaattaaacatacacatatacaaaatcaagcttttttgccccatctctctctctctctaaattctaattagctataactaatcctaaggttatagaagtgttatgtatgatgcattactatatgatatgtacttttaaaactatgtatatatacaagtgatgagtgcaaggaatagacctagctagctatatggttaacatgataaggatgatagatgatcaaacctagatgtatatatagatagtccttgatggggaggaagatgaaggtggaattggtggagataggtagggggaaaaggagagaaagggacataaagagaggaggagagaattgtttagaggtagaaggggatggagagtaagagtggaaggagatggaggtagtatatattgagttgagggtgggggga

SEQ ID NO: 11388 - DNA, 1061 bp, Glycine max; identical to SEQ ID NO: 11387
  Gm_smallRNAprecursor_4221

SEQ ID NO: 11389 - DNA, 1061 bp, Glycine max; identical to SEQ ID NO: 11387
  Gm_smallRNAprecursor_4222

SEQ ID NO: 11390 - DNA, 1061 bp, Glycine max; identical to SEQ ID NO: 11387
  Gm_smallRNAprecursor_4223

SEQ ID NO: 11391 - DNA, 1062 bp, Glycine max
  Gm_smallRNAprecursor_4224
tgctgttttcccatgccctcgtttcaagtgtagtgaaatgatttgaaactactaaacaaaacagaaaaaaaaaaccacacccacatgtgagcccccagcaggtaaatgaaggaatatgttcccccagttaacactctgcagatcacatatatatgcatcactcgaaagaaccctagaaaaaaaatgtcttccttcaagacttttgcaataatgaaaaaaggaagataaaaataaaaacagatgtacctttgttcagtcacgaggaagcaaaacctatgcctttgaaaatgacaatgccgtgctttgttgaatagttggcctatataaatatatatatatatatcctccaatagttggtacaattcatgattaatactataacaaaccgaagaaattaaaaaaaatatcaaagactaataatattcatatatacatactctttaatttacccacataaaattaaaatttgatcatcataatctccatgtatgtatatgaaatatgcttggctcctcatacgccatccacaaaggtcattgatgcttcgatgagctctacaaatggcatacagggagccaggcacatacacatatgtatgcatgatgtaacacaattaaacatgcaattaactaataagatgcatgagtgtaattaaacatacacatatacaaaatcaagcttttttgccccatctctctctctctctaaattctaattagctataactaatcctaaggttatagaagtgttatgtatgatgcattactatatgatatgtacttttaaaactatgtatatatacaagtgatgagtgcaaggaatagacctagctagctatatggttaacatgataaggatgatagatgatcaaacctagatgtatatatagatagtccttgatggggaggaagatgaaggtggaattggtggagataggtagggggaaaaggagagaaagggacataaagagaggaggagagaattgtttagaggtagaaggggatggagagtaagagtggaaggagatggaggtagtatatattgagttgagggtggggggaa

SEQ ID NO: 11392 - DNA, 1062 bp, Glycine max; identical to SEQ ID NO: 11391
  Gm_smallRNAprecursor_4225

SEQ ID NO: 11393 - DNA, 1063 bp, Glycine max
  Gm_smallRNAprecursor_4226
tgctgttttcccatgccctcgtttcaagtgtagtgaaatgatttgaaactactaaacaaaacagaaaaaaaaaaccacacccacatgtgagcccccagcaggtaaatgaaggaatatgttcccccagttaacactctgcagatcacatatatatgcatcactcgaaagaaccctagaaaaaaaatgtcttccttcaagacttttgcaataatgaaaaaaggaagataaaaataaaaacagatgtacctttgttcagtcacgaggaagcaaaacctatgcctttgaaaatgacaatgccgtgctttgttgaatagttggcctatataaatatatatatatatatcctccaatagttggtacaattcatgattaatactataacaaaccgaagaaattaaaaaaaatatcaaagactaataatattcatatatacatactctttaatttacccacataaaattaaaatttgatcatcataatctccatgtatgtatatgaaatatgcttggctcctcatacgccatccacaaaggtcattgatgcttcgatgagctctacaaatggcatacagggagccaggcacatacacatatgtatgcatgatgtaacacaattaaacatgcaattaactaataagatgcatgagtgtaattaaacatacacatatacaaaatcaagcttttttgccccatctctctctctctctaaattctaattagctataactaatcctaaggttatagaagtgttatgtatgatgcattactatatgatatgtacttttaaaactatgtatatatacaagtgatgagtgcaaggaatagacctagctagctatatggttaacatgataaggatgatagatgatcaaacctagatgtatatatagatagtccttgatggggaggaagatgaaggtggaattggtggagataggtagggggaaaaggagagaaagggacataaagagaggaggagagaattgtttagaggtagaaggggatggagagtaagagtggaaggagatggaggtagtatatattgagttgagggtggggggaag

SEQ ID NO: 11394 - DNA, 1060 bp, Glycine max
  Gm_smallRNAprecursor_4227
gctgttttcccatgccctcgtttcaagtgtagtgaaatgatttgaaactactaaacaaaacagaaaaaaaaaaccacacccacatgtgagcccccagcaggtaaatgaaggaatatgttcccccagttaacactctgcagatcacatatatatgcatcactcgaaagaaccctagaaaaaaaatgtcttccttcaagacttttgcaataatgaaaaaaggaagataaaaataaaaacagatgtacctttgttcagtcacgaggaagcaaaacctatgcctttgaaaatgacaatgccgtgctttgttgaatagttggcctatataaatatatatatatatatcctccaatagttggtacaattcatgattaatactataacaaaccgaagaaattaaaaaaaatatcaaagactaataatattcatatatacatactctttaatttacccacataaaattaaaatttgatcatcataatctccatgtatgtatatgaaatatgcttggctcctcatacgccatccacaaaggtcattgatgcttcgatgagctctacaaatggcatacagggagccaggcacatacacatatgtatgcatgatgtaacacaattaaacatgcaattaactaataagatgcatgagtgtaattaaacatacacatatacaaaatcaagcttttttgccccatctctctctctctctaaattctaattagctataactaatcctaaggttatagaagtgttatgtatgatgcattactatatgatatgtacttttaaaactatgtatatatacaagtgatgagtgcaaggaatagacctagctagctatatggttaacatgataaggatgatagatgatcaaacctagatgtatatatagatagtccttgatggggaggaagatgaaggtggaattggtggagataggtagggggaaaaggagagaaagggacataaagagaggaggagagaattgtttagaggtagaaggggatggagagtaagagtggaaggagatggaggtagtatatattgagttgagggtgggggga

SEQ ID NO: 11395 - DNA, 1060 bp, Glycine max; identical to SEQ ID NO: 11394
  Gm_smallRNAprecursor_4228

SEQ ID NO: 11396 - DNA, 1049 bp, Glycine max
  Gm_smallRNAprecursor_4229
tttaacaaaaaaaaaggtatattacaattccaatgtaatggaggctcagacaccgaagcacggattggatctcgaaatcacgaatgcattgcaccgagccacgcaaaacaattcctgtccccctaaaccctaacaatcatacaattaagatttagcacctatagcttattcaatttcacgcagtggcagaagaaaaaaataaataattaaagaatatctcatccagaatccttgtcttatccaagaaaataattaaggggaaaataatgagctatcagttatatatgctatgctgactaagaataagaagtaagaacccagatgagagaaaataagatgagaatccgttcctcactagtcacgcttttgttctgctatataaattacaaacaagcaaagaaaatccaagagggcacagacataattaaacacaaaacagagaggaaggcatcagaactaacaaattattaaactagggttcatgcggccaacaactactaggtgaaactgccacatgatctgatctttccacagcaagtgagggaagttaagatcatgctggcagcttcaactggtagtggtgcatgatggtagacagatattgggaagaacaagaacaagtgttctaaaaggtgatgatgtatatgatgatgatgagatcggaaattgaagggaggttttaactgctgcttttgctagctagggtttggatggagaagagagtaggaagagtcactattatatatagcagcgatcaaagagaaatcaagaaagactctatgtgaaaatttgaagggttccttttaatttaatttatttattgattataatctttttgcctcccaccatttgttttaacttttaatatttgttatctataagtaacggaatattaggggagggtgtaaagccattggagaagttattaaaatgaaaacaaattaaaagaggtaaaaagtggtccctagtgatgtaaattgaatattgtcacgccaacaccaccaccatgcccttcgcagacaagatagcgagtgtttttctatatatac

SEQ ID NO: 11397 - DNA, 1050 bp, Glycine max
  Gm_smallRNAprecursor_4230
tttaacaaaaaaaaaggtatattacaattccaatgtaatggaggctcagacaccgaagcacggattggatctcgaaatcacgaatgcattgcaccgagccacgcaaaacaattcctgtccccctaaaccctaacaatcatacaattaagatttagcacctatagcttattcaatttcacgcagtggcagaagaaaaaaataaataattaaagaatatctcatccagaatccttgtcttatccaagaaaataattaaggggaaaataatgagctatcagttatatatgctatgctgactaagaataagaagtaagaacccagatgagagaaaataagatgagaatccgttcctcactagtcacgcttttgttctgctatataaattacaaacaagcaaagaaaatccaagagggcacagacataattaaacacaaaacagagaggaaggcatcagaactaacaaattattaaactagggttcatgcggccaacaactactaggtgaaactgccacatgatctgatctttccacagcaagtgagggaagttaagatcatgctggcagcttcaactggtagtggtgcatgatggtagacagatattgggaagaacaagaacaagtgttctaaaaggtgatgatgtatatgatgatgatgagatcggaaattgaagggaggttttaactgctgcttttgctagctagggtttggatggagaagagagtaggaagagtcactattatatatagcagcgatcaaagagaaatcaagaaagactctatgtgaaaatttgaagggttccttttaatttaatttatttattgattataatctttttgcctcccaccatttgttttaacttttaatatttgttatctataagtaacggaatattaggggagggtgtaaagccattggagaagttattaaaatgaaaacaaattaaaagaggtaaaaagtggtccctagtgatgtaaattgaatattgtcacgccaacaccaccaccatgcccttcgcagacaagatagcgagtgtttttctatatataca

SEQ ID NO: 11398 - DNA, 1161 bp, Glycine max
  Gm_smallRNAprecursor_4231
tagaaatagtacaaaacttcctttagcaattaaaagcataaggagtgagccactgttcacaacccatccaacaaagaagggttttgagtcatcaaaacatttgagcaatttaactcaagacagaagcaaaatctcttttatacatgatccattgaagtttagcaggccagccataccaacagataacactggtaccattagtattgatatttcatgaagatgctgaggcacttaaatcataataaagatcaaccaataacattttcaaagaattaaggctgacatctaaagaaaagaccactagatgtcaaatcacatgaagaatgaaagtaaagtgtgagccaacttcagcatcatgtttttggggccaggagtacataagcataatatataattggcaaaattgcatttttggtccctctagttgtctccaattttgattttagtccctctttaaatttattcacgaatttagtccttcaattatgtacaatcccgtaaatgtgatccccaagtccagatttagacgttgactgttacgaaggaacattcactaccccatgtcacgttctgattggacaatgaatgtcacgtgccacgttctaattggacgatgaatgtcacgtggcaatcaacgttcctttggaacagtcaacgtcaaaatctggacttacgaaccacatttatgggattggacataattgaaggactaaattcgtgaataaatttaaagggggactaaaatcaaaattagagacaactagggggaccaaaaatgcaattttgcctatataattataatcagtaaatttgagaacttttatagcaaggacagaagaaaaaaatcaacctataaccaccaggaagttgctagtaataaggaaaaaatcattgactgatagagtcaaatatttaaactttaggacatctacttcaaaagttgaacactaacttaatggcttctcatttcagattttcaataacttctgcaatctaagtgttaacacaagaagaacttatcaaaatcatgaccaatgcctaatgttaaaactaaacaaatcacactaaaaaacaaagctttgtcccactaagctaggttggccaacaattttgagttaaataaattcgatttcttccattccaaatgaaagccataaaaat

SEQ ID NO: 11399 - DNA, 1113 bp, Glycine max
  Gm_smallRNAprecursor_4232
agcaattaaaagcataaggagtgagccactgttcacaacccatccaacaaagaagggttttgagtcatcaaaacatttgagcaatttaactcaagacagaagcaaaatctcttttatacatgatccattgaagtttagcaggccagccataccaacagataacactggtaccattagtattgatatttcatgaagatgctgaggcacttaaatcataataaagatcaaccaataacattttcaaagaattaaggctgacatctaaagaaaagaccactagatgtcaaatcacatgaagaatgaaagtaaagtgtgagccaacttcagcatcatgtttttggggccaggagtacataagcataatatataattggcaaaattgcatttttggtccctctagttgtctccaattttgattttagtccctctttaaatttattcacgaatttagtccttcaattatgtacaatcccgtaaatgtgatccccaagtccagatttagacgttgactgttacgaaggaacattcactaccccatgtcacgttctgattggacaatgaatgtcacgtgccacgttctaattggacgatgaatgtcacgtggcaatcaacgttcctttggaacagtcaacgtcaaaatctggacttacgaaccacatttatgggattggacataattgaaggactaaattcgtgaataaatttaaagggggactaaaatcaaaattagagacaactagggggaccaaaaatgcaattttgcctatataattataatcagtaaatttgagaacttttatagcaaggacagaagaaaaaaatcaacctataaccaccaggaagttgctagtaataaggaaaaaatcattgactgatagagtcaaatatttaaactttaggacatctacttcaaaagttgaacactaacttaatggcttctcatttcagattttcaataacttctgcaatctaagtgttaacacaagaagaacttatcaaaatcatgaccaatgcctaatgttaaaactaaacaaatcacactaaaaaacaaagctttgtcccactaagctaggttggccaacaattttgagttaaataaattcgatttcttcc

SEQ ID NO: 11400 - DNA, 1114 bp, Glycine max
  Gm_smallRNAprecursor_4233
agcaattaaaagcataaggagtgagccactgttcacaacccatccaacaaagaagggttttgagtcatcaaaacatttgagcaatttaactcaagacagaagcaaaatctcttttatacatgatccattgaagtttagcaggccagccataccaacagataacactggtaccattagtattgatatttcatgaagatgctgaggcacttaaatcataataaagatcaaccaataacattttcaaagaattaaggctgacatctaaagaaaagaccactagatgtcaaatcacatgaagaatgaaagtaaagtgtgagccaacttcagcatcatgtttttggggccaggagtacataagcataatatataattggcaaaattgcatttttggtccctctagttgtctccaattttgattttagtccctctttaaatttattcacgaatttagtccttcaattatgtacaatcccgtaaatgtgatccccaagtccagatttagacgttgactgttacgaaggaacattcactaccccatgtcacgttctgattggacaatgaatgtcacgtgccacgttctaattggacgatgaatgtcacgtggcaatcaacgttcctttggaacagtcaacgtcaaaatctggacttacgaaccacatttatgggattggacataattgaaggactaaattcgtgaataaatttaaagggggactaaaatcaaaattagagacaactagggggaccaaaaatgcaattttgcctatataattataatcagtaaatttgagaacttttatagcaaggacagaagaaaaaaatcaacctataaccaccaggaagttgctagtaataaggaaaaaatcattgactgatagagtcaaatatttaaactttaggacatctacttcaaaagttgaacactaacttaatggcttctcatttcagattttcaataacttctgcaatctaagtgttaacacaagaagaacttatcaaaatcatgaccaatgcctaatgttaaaactaaacaaatcacactaaaaaacaaagctttgtcccactaagctaggttggccaacaattttgagttaaataaattcgatttcttcca

SEQ ID NO: 11401 - DNA, 1112 bp, Glycine max
  Gm_smallRNAprecursor_4234
gcaattaaaagcataaggagtgagccactgttcacaacccatccaacaaagaagggttttgagtcatcaaaacatttgagcaatttaactcaagacagaagcaaaatctcttttatacatgatccattgaagtttagcaggccagccataccaacagataacactggtaccattagtattgatatttcatgaagatgctgaggcacttaaatcataataaagatcaaccaataacattttcaaagaattaaggctgacatctaaagaaaagaccactagatgtcaaatcacatgaagaatgaaagtaaagtgtgagccaacttcagcatcatgtttttggggccaggagtacataagcataatatataattggcaaaattgcatttttggtccctctagttgtctccaattttgattttagtccctctttaaatttattcacgaatttagtccttcaattatgtacaatcccgtaaatgtgatccccaagtccagatttagacgttgactgttacgaaggaacattcactaccccatgtcacgttctgattggacaatgaatgtcacgtgccacgttctaattggacgatgaatgtcacgtggcaatcaacgttcctttggaacagtcaacgtcaaaatctggacttacgaaccacatttatgggattggacataattgaaggactaaattcgtgaataaatttaaagggggactaaaatcaaaattagagacaactagggggaccaaaaatgcaattttgcctatataattataatcagtaaatttgagaacttttatagcaaggacagaagaaaaaaatcaacctataaccaccaggaagttgctagtaataaggaaaaaatcattgactgatagagtcaaatatttaaactttaggacatctacttcaaaagttgaacactaacttaatggcttctcatttcagattttcaataacttctgcaatctaagtgttaacacaagaagaacttatcaaaatcatgaccaatgcctaatgttaaaactaaacaaatcacactaaaaaacaaagctttgtcccactaagctaggttggccaacaattttgagttaaataaattcgatttcttcc

SEQ ID NO: 11402 - DNA, 1123 bp, Glycine max
  Gm_smallRNAprecursor_4235
attgaagctaattttatatatatatatatatatatatatataatttatatatatatatatatatatatatatataattttattgttcctgttcatgttgttcgtctcagttcaatagcaatcttaagtacttaccactctcaaagaggactttcagcattcattgctgtgctgtccctccaactcctgcttagaagacgtcaatcagcaagcaaaaacaagtacaattcgttatggtaattagttagtcaacaactctttactcttcacaaataaaacaaggaacttgacaaagttatatgtttgggagagggatacatacaaatacacatatttcaccatgaaaaaaaacacacatgataattcgttagatcttacgcattcctttatttttcagagtagatcagtagaacgataaaaaaaggaaaaaaaatgtaatagcttttggaagtctatttttcaataatgtatgcacaaaaaacatgtaaaaaatagctttgggtctgtcagacaaccgtgtgaccatcccagacaggaatctgcctaagaacgatcctctacagcctaagttatcacccctccacagagaagatcaataggccgttaatcccgctctgatcacacggtcatgattcatccaccagacgtaggttcctgtctccttagaactcaaggacacagaggtacgagcctatagaacagatcctgttcaagtaaggtcgtgaccatgaatgttatgcttaattatataaacacatgtttgtagctaaacgctctcgatgtgggactattattatttctgtgtcaagttgttaaagaggcaattgtctagggttcagacttggtcaaagcttatagaatgagagttaaattcctaaaacattatcagaagtgttcgatcttttactgagagattgtaaaatttatacaaaggcgtcaacaatccgaaaatgaatgcaaaataaaagtgtcctagactcctagactgtgattataacaaaagcctgaaccaacttgattcagctatggatagtgttctctttgataagttctacgctgaagaagcataaagcggtataaaccatctgtaagaaaaatcatcatctttacaatatatacccttc

SEQ ID NO: 11403 - DNA, 1081 bp, Glycine max
  Gm_smallRNAprecursor_4236
ttaagtacttaccactctcaaagaggactttcagcattcattgctgtgctgtccctccaactcctgcttagaagacgtcaatcagcaagcaaaaacaagtacaattcgttatggtaattagttagtcaacaactctttactcttcacaaataaaacaaggaacttgacaaagttatatgtttgggagagggatacatacaaatacacatatttcaccatgaaaaaaaacacacatgataattcgttagatcttacgcattcctttatttttcagagtagatcagtagaacgataaaaaaaggaaaaaaaatgtaatagcttttggaagtctatttttcaataatgtatgcacaaaaaacatgtaaaaaatagctttgggtctgtcagacaaccgtgtgaccatcccagacaggaatctgcctaagaacgatcctctacagcctaagttatcacccctccacagagaagatcaataggccgttaatcccgctctgatcacacggtcatgattcatccaccagacgtaggttcctgtctccttagaactcaaggacacagaggtacgagcctatagaacagatcctgttcaagtaaggtcgtgaccatgaatgttatgcttaattatataaacacatgtttgtagctaaacgctctcgatgtgggactattattatttctgtgtcaagttgttaaagaggcaattgtctagggttcagacttggtcaaagcttatagaatgagagttaaattcctaaaacattatcagaagtgttcgatcttttactgagagattgtaaaatttatacaaaggcgtcaacaatccgaaaatgaatgcaaaataaaagtgtcctagactcctagactgtgattataacaaaagcctgaaccaacttgattcagctatggatagtgttctctttgataagttctacgctgaagaagcataaagcggtataaaccatctgtaagaaaaatcatcatctttacaatatatacccttctcaggccttttgactgtctatgtctttcactacacagcatgatcctgcagtgaaacagccattgtataatgcatacaact

SEQ ID NO: 11404 - DNA, 1073 bp, Glycine max
  Gm_smallRNAprecursor_4237
caacacaaatagaattagtacgagttttgataagagatgtgcccaaactccaatcaccaactactatcttagcacgatttataagagattctgttggttaatgataagagagatgttctgaaaaggtactatgttctgtggttataataatgtaatcagatcaagacgagtttgtgttctaagattttgtaccaaacttgtaaactggaagatactttctttttttagttcttactaaacttccaattgtcagaccttttagaagagattaaaaataaattatataaataattcctagctttcattatttttttcccgtataagaaatttagtgaattaaaatgtaaaatcccacataatagagagagcatgcagaaacatatatgtttagtgaaagaaaaaataaaagaagagggatatcattaccattacgattatgagatgagaaggagggttgagatgtggaaaggcagcagaagtcaagggaagggggagaaatagaggaaaaacagtggtatgggaggtgtagggaagaaataacatattttgcttatggatattccttcccaatccccccatacccatgtcttcccccaattttatctcccttttcccctctctgaagaaaacttattttcttcttcaatgttcatgtctcacaattcacaaggaaggaagccttttgagttgaggttgaatgggggtagttggtggtataacttgtaattacaatacaaggaaggtggacaaaggtaaaagagagcctctcaatatgtttattaaataatgatgcaaaagtggaatcaaaatggtgggtatgatgagattcctgacataggatgtggacaaaagttttggcagaggaaatggaatcctatccgataatggaccctcactgtctccctctcctgcttattctctattatttattaaaaaataataagcaaacatccactttttttattataaaaaaacataaatatttacttattttaaagatcttatcaactttcttcttattttaatcatttacttaaaaaaaaggcaaacatccactttttttaataaaaaaa

SEQ ID NO: 11405 - DNA, 1066 bp, Glycine max
  Gm_smallRNAprecursor_4238
atcaagaaagaaaactttggtggcgttatagtggcacccaaacctttaaaaatgtccagcttttaccaagaaagaaaagctccagtaaaattatttggatttggtccagcttgatatggatagatcacatttttaaacatcttgtggagctagctaattaactagcatctgtctgtaataatctacatctactagagctgagataatttgttaagccttaaacaagaaaaaggaaagaaaagacgaaaaaagaaagaagcgatttgttgttttttcttgtcttgaatgtaacccagtcagaccggcagcttctagaaggaagtaacaagaaagagcagtgagattaaggaagaagatagatactttggtattaattaaggtcgaaaaaaacatagatctataataagtgtatgatatgaagaagaaaagtgcttaccatgaccataacagattgtggagagcggagaggagagtggaaagaaaggaaccaaagaaaatcataggaatgggtggaatcggcaaaagaataaacaacacaacaattaatcatagagacgctgttatcctttaccgaccctcccatctcccatcacttcctcaagctcttcttcctttccctttctcactctatcaatatagaacaggtgcaagtggttggttaaccacacatgaatatatagagaaagagaatattgatgcttaaaacacacacatgacttggcatggagtgaggaaaacggtgacactggacaaagacccttcattattaatttaccaacccctaccccactacacgttagacttgcatatgcctttatcttgtccacacctacgggaatctttccaaccaattcaactttggattctctgtagtcaacaacacaatgcaacagcaatctccaccgtttattttttttcatttagtaataataaaatataagttaaacaatatttgacaaaataataagtatatatgtcttaaatggtaagtttattaatttttttaataataattacctttttctttcacaaatataataattatcttaaaagttactgtattaaa

SEQ ID NO: 11406 - DNA, 1067 bp, Glycine max
  Gm_smallRNAprecursor_4239
atcaagaaagaaaactttggtggcgttatagtggcacccaaacctttaaaaatgtccagcttttaccaagaaagaaaagctccagtaaaattatttggatttggtccagcttgatatggatagatcacatttttaaacatcttgtggagctagctaattaactagcatctgtctgtaataatctacatctactagagctgagataatttgttaagccttaaacaagaaaaaggaaagaaaagacgaaaaaagaaagaagcgatttgttgttttttcttgtcttgaatgtaacccagtcagaccggcagcttctagaaggaagtaacaagaaagagcagtgagattaaggaagaagatagatactttggtattaattaaggtcgaaaaaaacatagatctataataagtgtatgatatgaagaagaaaagtgcttaccatgaccataacagattgtggagagcggagaggagagtggaaagaaaggaaccaaagaaaatcataggaatgggtggaatcggcaaaagaataaacaacacaacaattaatcatagagacgctgttatcctttaccgaccctcccatctcccatcacttcctcaagctcttcttcctttccctttctcactctatcaatatagaacaggtgcaagtggttggttaaccacacatgaatatatagagaaagagaatattgatgcttaaaacacacacatgacttggcatggagtgaggaaaacggtgacactggacaaagacccttcattattaatttaccaacccctaccccactacacgttagacttgcatatgcctttatcttgtccacacctacgggaatctttccaaccaattcaactttggattctctgtagtcaacaacacaatgcaacagcaatctccaccgtttattttttttcatttagtaataataaaatataagttaaacaatatttgacaaaataataagtatatatgtcttaaatggtaagtttattaatttttttaataataattacctttttctttcacaaatataataattatcttaaaagttactgtattaaaa

SEQ ID NO: 11407 - DNA, 1065 bp, Glycine max
  Gm_smallRNAprecursor_4240
tcaagaaagaaaactttggtggcgttatagtggcacccaaacctttaaaaatgtccagcttttaccaagaaagaaaagctccagtaaaattatttggatttggtccagcttgatatggatagatcacatttttaaacatcttgtggagctagctaattaactagcatctgtctgtaataatctacatctactagagctgagataatttgttaagccttaaacaagaaaaaggaaagaaaagacgaaaaaagaaagaagcgatttgttgttttttcttgtcttgaatgtaacccagtcagaccggcagcttctagaaggaagtaacaagaaagagcagtgagattaaggaagaagatagatactttggtattaattaaggtcgaaaaaaacatagatctataataagtgtatgatatgaagaagaaaagtgcttaccatgaccataacagattgtggagagcggagaggagagtggaaagaaaggaaccaaagaaaatcataggaatgggtggaatcggcaaaagaataaacaacacaacaattaatcatagagacgctgttatcctttaccgaccctcccatctcccatcacttcctcaagctcttcttcctttccctttctcactctatcaatatagaacaggtgcaagtggttggttaaccacacatgaatatatagagaaagagaatattgatgcttaaaacacacacatgacttggcatggagtgaggaaaacggtgacactggacaaagacccttcattattaatttaccaacccctaccccactacacgttagacttgcatatgcctttatcttgtccacacctacgggaatctttccaaccaattcaactttggattctctgtagtcaacaacacaatgcaacagcaatctccaccgtttattttttttcatttagtaataataaaatataagttaaacaatatttgacaaaataataagtatatatgtcttaaatggtaagtttattaatttttttaataataattacctttttctttcacaaatataataattatcttaaaagttactgtattaaa

SEQ ID NO: 11408 - DNA, 1035 bp, Glycine max
  Gm_smallRNAprecursor_4241
ttgcattgcattcgaaatgtaaagtttacagaaacttaaaatggttcacaatcatacattttccttgcgtactcgtttctctctgcgctgggtactttgagtatataaggattttgtaggaatgatttgcgaccttgaaatctgactaaaaaactgctatatatagacattcgaaaataaactaccctaacggtcgaacactatcctaatgccaagtgtcctgctacgtataccttgcatgcatataactgctccttagaacggttatccacattactcgaaatcgaactgattttgtgaagttttgtcagaaattgcgctaagtccagaaatcttgctgcctcgacttcgactcgagtatacaccagttcgaatcgcccaatggttcgaagccctctttcttgtcttagccttatacttcataaatacttctttgatcccgtgaatccctttcaataaactcttctttcttttcgattcgaacaggatctgacaagactcttgctctttaatacgcttcgaaattcaagacgacatctaatgcgtatttagagcatattttagctcatcaaaaatatgggctaacaaattgcccccaaaaaatgtctgcttcgattcgagatcgaaggaagatgagaagttgacattttttctcttcttctaccagttttcctgaaacggcgtcatgatcgcacgttcactgtgtaaccgtcgcctcgatctcccactacccatcattaattccacctttttaggcaaagtgggacacgtgtcatgctggggaatcggaagggaaatctgatgtgattgattttgaccattgattcttattatattgtttttccccttttaaaagtgaaatcccataaatagcgccagaaaccccagacaaaaccccttcagcttctttgctttcgaaacctttcttcttcttcgcttctgaaacctttcttcttctttgcttctgaaacctttcttcttctaattcgtatccattatctccggcgaagctttcttattttcagataacaactt

SEQ ID NO: 11409 - DNA, 1086 bp, Glycine max
  Gm_smallRNAprecursor_4242
caggcaattcccaggctcaaatgcctaagaagaaaaagaaagtgaagcaggtcgagcctgaaccttctgtggctgttgagggtggtgagccaatcaagaagaaaaagaaaaagcccaagccttcaaaagaacaaggtgacaatcaacctgttgacgttcaaccaccttcgaccgatattgacggcactgaagtagaggctactccttctgttgctgagatgggcaaccctgtcgatcaaccggactcaccacaagaacaaccctcacatgctcgaacatctcccactcctgagacggatgcagtgaatgttgaggaacagggtgaaggtcaaggcattggatccagtagtcctcatggatcgagtcagaaaagttcatccgaagaaaacttttccgatgaagaggccatagaagaggctgaagctggtggttcggacatttacccggcgtcttcgacatctaagctttccgctagcatagggatcgcagaagatacattcattcaaatgcaagacgaagaccctgctgcagcccttcgactcctgctgaacacaagtcaagccaacacctcaagtgaaaagattcctggtgcttcgtcctcatctgatgccgaaataaactcttcagtacgccaagattgcctgctcctaaagttatcaatggaatacgcacgggaagacgtacttaaatccattgaagagaaccccctgctgcttttgggcacctgaactttttgaagaaattgcacaacccccttacctctgatgagattctaggcaaagttatccaaatcgagtccattatcgatcaattcgcaagtactgtgcagaaaaaacgcgaaaatggcgccagactagatgcccagaaacaggcacatatccttctgctcgagaaagcccgagctgctcaacatgaagtcgaacgtctcaccaaagaggcgaaagaaggatcttctgagatcaaagcctgcgatgataacatctcctcctgggaagcaactattacggatttgctgtctcaggtcgatgatataaggcaaaaaattgtgacagagcaggccaaacgcaaagaactccaggagaaggc

SEQ ID NO: 11410 - DNA, 1110 bp, Glycine max
  Gm_smallRNAprecursor_4243
tgatcaacatttggcaacgggactgcttcgatccattttgtaaagtaatcgataccaactataatataacgctggttcttagaagaggcaggcttgatttcaccaattaggtccaaagcccatcctctgaaaggccaaggtttgattatggagtgtaactcactagcaggtacatgctgtatccctgcatgcttttggcattcctgacagcctttagcaaattctatgcagtcttttaacatcgaaggccaatacaaaccttgtcgaaataaaagccatttcattttatggcctgcttgatgcgatccacaggccccactgtgaacatgggaaactgccaagtatgcttctgattcacttagacattttagcaacactccttctgcagtctttttaaacaaatcatttcccacaatcacgtaatttaaagccctatatttgatctttcgagccacattacctattggattttccaaatattcaacaatggactttctccaatcattatctaacatattgtcaatggccaaaatttgaattctttcctggcgatcatccatgctttcatcttcattattttgtggtatacttgcccccacaagttttggcattggcaatttagtgcttaatggctctggtaacaccagtttatcttttatttcgatcaactgagttaacttttccttcgacattttgtaccctgaagctatttgggctaaatcatttgcttcttggttttcttgtcgaggtatatgctcaatgttaatgtaatcgaaatgattcagaagagaactcgccataacaaaatattttgctaagtgttcattaacacatttgtattcttgtgttaattgcttcaatactaattctgaatcaccccttatgttaacatttcttgcccccaggctaattaaaatttcaaggcctgtaattagagcctcatactcagcctcattattagaacaaagccctttgattttatatttgaatttagttggaactttattgggggatattattaaaactccaattccagttccatgtttgtgtttcgaaccatcgaaatacaaaatccaaggctctgtatcgacatagtcttgcggcatttcg

SEQ ID NO: 11411 - DNA, 1083 bp, Glycine max
  Gm_smallRNAprecursor_4244
caacgggactgcttcgatccattttgtaaagtaatcgataccaactataatataacgctggttcttagaagaggcaggcttgatttcaccaattaggtccaaagcccatcctctgaaaggccaaggtttgattatggagtgtaactcactagcaggtacatgctgtatccctgcatgcttttggcattcctgacagcctttagcaaattctatgcagtcttttaacatcgaaggccaatacaaaccttgtcgaaataaaagccatttcattttatggcctgcttgatgcgatccacaggccccactgtgaacatgggaaactgccaagtatgcttctgattcacttagacattttagcaacactccttctgcagtctttttaaacaaatcatttcccacaatcacgtaatttaaagccctatatttgatctttcgagccacattacctattggattttccaaatattcaacaatggactttctccaatcattatctaacatattgtcaatggccaaaatttgaattctttcctggcgatcatccatgctttcatcttcattattttgtggtatacttgcccccacaagttttggcattggcaatttagtgcttaatggctctggtaacaccagtttatcttttatttcgatcaactgagttaacttttccttcgacattttgtaccctgaagctatttgggctaaatcatttgcttcttggttttcttgtcgaggtatatgctcaatgttaatgtaatcgaaatgattcagaagagaactcgccataacaaaatattttgctaagtgttcattaacacatttgtattcttgtgttaattgcttcaatactaattctgaatcaccccttatgttaacatttcttgcccccaggctaattaaaatttcaaggcctgtaattagagcctcatactcagcctcattattagaacaaagccctttgattttatatttgaatttagttggaactttattgggggatattattaaaactccaattccagttccatgtttgtgtttcgaaccatcgaaatacaaaatccaaggctctgtatcgacatagtc

SEQ ID NO: 11412 - DNA, 1114 bp, Glycine max
  Gm_smallRNAprecursor_4245
tatctaacatattgtcaatggccaaaatttgaattctttcctggcgatcatccatgctttcatcttcattattttgtggtatacttgcccccacaagttttggcattggcaatttagtgcttaatggctctggtaacaccagtttatcttttatttcgatcaactgagttaacttttccttcgacattttgtaccctgaagctatttgggctaaatcatttgcttcttggttttcttgtcgaggtatatgctcaatgttaatgtaatcgaaatgattcagaagagaactcgccataacaaaatattttgctaagtgttcattaacacatttgtattcttgtgttaattgcttcaatactaattctgaatcaccccttatgttaacatttcttgcccccaggctaattaaaatttcaaggcctgtaattagagcctcatactcagcctcattattagaacaaagccctttgattttatatttgaatttagttggaactttattgggggatattattaaaactccaattccagttccatgtttgtgtttcgaaccatcgaaatacaaaatccaaggctctgtatcgacatagtcttgcggcatttcgactactgagtgatctacaataaaatctgccacaatttgacccttaacagatttcaaaggcttgtacgttaaagaatattctgttaatgctaaagcccattttccaattctactgtgtagaataggttttgacaacatatgcttaataatatcataatgagaatatacataaacatcaacaggctttatatattgcttaagttttgcacaagagaaatacaaacaaagacaaagtttttctatggcagtatatctagtttctgcatcatttagtacacgactaagataataaattgcatgctctacgccatcatcatcttcctgagccaacatgctaccaatggtcttatcagatgcagcaatatacaacttcatagtcttgtttcgactaggaggcattaacacgggaggcttgatcagatattctttaatttcatcgaaagccttttgatgctcttcattccatttgaatggttcatctttcttgagtcgaagtaatggcgaaaaaat

SEQ ID NO: 11413 - DNA, 1176 bp, Glycine max
  Gm_smallRNAprecursor_4246
tgccacaatttgacccttaacagatttcaaaggcttgtacgttaaagaatattctgttaatgctaaagcccattttccaattctactgtgtagaataggttttgacaacatatgcttaataatatcataatgagaatatacataaacatcaacaggctttatatattgcttaagttttgcacaagagaaatacaaacaaagacaaagtttttctatggcagtatatctagtttctgcatcatttagtacacgactaagataataaattgcatgctctacgccatcatcatcttcctgagccaacatgctaccaatggtcttatcagatgcagcaatatacaacttcatagtcttgtttcgactaggaggcattaacacgggaggcttgatcagatattctttaatttcatcgaaagccttttgatgctcttcattccatttgaatggttcatctttcttgagtcgaagtaatggcgaaaaaatttgagctttgccacttagattcgaaatgaatcgcctcaagaagttgatttttcctagcaaagactgaagctgttttttggtcgaaggaggcttcgtctcaagaatagcctttgtcttattttgatttatctcaatgccttttttatgcaccacaaaaccaaggaaatctcctgcacgtacacaaaaagcacactttaatggattcatttttaatccatgtttcctcattcgttcgaaagattgcctaaggtaatccaaatggctatcttctgaggaggatttgatgattatatcatcaatataaacttgcataaatgtgtcaataaaatcatgaaacatggaattcatggccctttgataagtggccccagcatttttcaacccaaagggcataaccacccattcataagtgcctaaagcaccaggacatcgaaatgctgtttttgacacatcactttcagcaataaatatttggttatacccagaataaccatctaacatgcttaaaaattcgaagccagctgctgaatctaccaacatttccgctactggcatagcatattcatctttaggtgtagcattatttaaatccctaaaatctatgcatactctaagagttccattctttttaatgacagggactatatttgctagccattcaacatacctgacagatctgatgaatttacacct

SEQ ID NO: 11414 - DNA, 1157 bp, Glycine max
  Gm_smallRNAprecursor_4247
caattctactgtgtagaataggttttgacaacatatgcttaataatatcataatgagaatatacataaacatcaacaggctttatatattgcttaagttttgcacaagagaaatacaaacaaagacaaagtttttctatggcagtatatctagtttctgcatcatttagtacacgactaagataataaattgcatgctctacgccatcatcatcttcctgagccaacatgctaccaatggtcttatcagatgcagcaatatacaacttcatagtcttgtttcgactaggaggcattaacacgggaggcttgatcagatattctttaatttcatcgaaagccttttgatgctcttcattccatttgaatggttcatctttcttgagtcgaagtaatggcgaaaaaatttgagctttgccacttagattcgaaatgaatcgcctcaagaagttgatttttcctagcaaagactgaagctgttttttggtcgaaggaggcttcgtctcaagaatagcctttgtcttattttgatttatctcaatgccttttttatgcaccacaaaaccaaggaaatctcctgcacgtacacaaaaagcacactttaatggattcatttttaatccatgtttcctcattcgttcgaaagattgcctaaggtaatccaaatggctatcttctgaggaggatttgatgattatatcatcaatataaacttgcataaatgtgtcaataaaatcatgaaacatggaattcatggccctttgataagtggccccagcatttttcaacccaaagggcataaccacccattcataagtgcctaaagcaccaggacatcgaaatgctgtttttgacacatcactttcagcaataaatatttggttatacccagaataaccatctaacatgcttaaaaattcgaagccagctgctgaatctaccaacatttccgctactggcatagcatattcatctttaggtgtagcattatttaaatccctaaaatctatgcatactctaagagttccattctttttaatgacagggactatatttgctagccattcaacatacctgacagatctgatgaatttacacctcagcagcctttcgatctcttccttaattttggacatgatttctggtgcgaatcttctt

SEQ ID NO: 11415 - DNA, 1039 bp, Glycine max
  Gm_smallRNAprecursor_4248
atttctggtgcgaatcttcttggtagttgttttactggtctttttccctccttaatcgataatttcatttcgaccatttctctgcttaacccaggcatttcgtggtaatcccaagcaaaacagtctttaaattctctaagaagaggcaccagcttttcttttagacttgaggtgatattggcactgatatatgttggccttttcatcgagccatctccaatgtcgatttcctccaaaggatcttgagcctgcatctttggcaccttacttacgggatttttctcgaaacccagcggctcatcgtcataaatgcaatccagtctttgatcctttgtttctttgtttttatgatcttcgatcttggcttcaactgccatattttgttgagattcagcctcaaaggccgtatttagtctattttcggccatataagccgtaattctggcccatgcagtggcctcagccatattaatcttcatatatattccacccagttggtggaatgactccatcttcagagggaacagcatcaatttcctccctctcccatataaacccataggtaggatggagtttgacagaatggataacattgtcacttgattcgacaatagcctccttatcaccacaaggtgctatgttagccaactttttgtcaaaggtttgtgcagtaacattatcgacctccgacttatagaagctttgatccgcctctatattttcaacaatcccatcctccctccagataatgagtttctggtgaagggtagatggcacagccccaactccatggatccattcccttcctaatagcaagttaaaattagccttggactgtatcaccaggaatagagttggtcgaactatactgcctacagcaacatctacttgaatggctcccaaagaatagccagttttaccctcataattcgaaagcacaatgttgtgggcagatagatcagtgtcatgtttcccgatcttgtagagcatagatcgaggcattaagttgacagccgctcctccatcaatgagcactttg

SEQ ID NO: 11416 - DNA, 1051 bp, Glycine max
  Gm_smallRNAprecursor_4249
ggtttcagttcctcgtatagcaattactacagattgtagttgatgtagaaccacaataaaatatgcagcttcacacttgacctggcatgggtataaaaaaaaactttatgaataattaaatataaattaagccagtataatataaaaacagaaatatgcataacatcatacataaattgagtatattatcatcttaaattggataaaactgagtttccccacattttaaaattaaaaaattaccccctgaacaaaccaaaacacccacccacccacacccacaccccataatttgctcaacaccaatgtcttcccttccttgattttaacaaaaaaaaaactaaggctaaacaaaagaatcatactattgttggttagcgacatcttccttatgagtgtattctgttattgattacaagctcccttcaataaaatttaaacataaatggtggcaatatcttttcagcaatattatttattatctatgaagcacgaacaccccagtcccttgccgtgtccggtgtccgacacgcgtccgtgtcagtgtccgacaccgacacgacacccgtactacgttctatattttggacattacaagtgttcacatgtccgtgtccgtgtccgtgtccgtgcttcatagtttattattactgataatcacacccctcttcatttttgtaagacttagtgagcctttgtacagaattttattcttttggattttttgcatggtaaacctgtgtctcctacaaccaaagcattgtagagaacatttggacatttaaattctctaacctggctgactcgcccatgtataagcgcttctggaggcaaattgacatactttagaaaggctgcagcatgacctcgccaccagttatcaccatccagtatgggtgtctaagaagatatgaaataggaacataaaatcacaatattgaagatgaattttttttaatttgtatattgaaaaagacataatgtaaagggagagaggagagacggagagaatggaggaaaaccaaagatatatatatcagtaattcagtat

SEQ ID NO: 11417 - DNA, 1051 bp, Glycine max; identical to SEQ ID NO: 11416
  Gm_smallRNAprecursor_4250

SEQ ID NO: 11418 - DNA, 1050 bp, Glycine max
  Gm_smallRNAprecursor_4251
gtttcagttcctcgtatagcaattactacagattgtagttgatgtagaaccacaataaaatatgcagcttcacacttgacctggcatgggtataaaaaaaaactttatgaataattaaatataaattaagccagtataatataaaaacagaaatatgcataacatcatacataaattgagtatattatcatcttaaattggataaaactgagtttccccacattttaaaattaaaaaattaccccctgaacaaaccaaaacacccacccacccacacccacaccccataatttgctcaacaccaatgtcttcccttccttgattttaacaaaaaaaaaactaaggctaaacaaaagaatcatactattgttggttagcgacatcttccttatgagtgtattctgttattgattacaagctcccttcaataaaatttaaacataaatggtggcaatatcttttcagcaatattatttattatctatgaagcacgaacaccccagtcccttgccgtgtccggtgtccgacacgcgtccgtgtcagtgtccgacaccgacacgacacccgtactacgttctatattttggacattacaagtgttcacatgtccgtgtccgtgtccgtgtccgtgcttcatagtttattattactgataatcacacccctcttcatttttgtaagacttagtgagcctttgtacagaattttattcttttggattttttgcatggtaaacctgtgtctcctacaaccaaagcattgtagagaacatttggacatttaaattctctaacctggctgactcgcccatgtataagcgcttctggaggcaaattgacatactttagaaaggctgcagcatgacctcgccaccagttatcaccatccagtatgggtgtctaagaagatatgaaataggaacataaaatcacaatattgaagatgaattttttttaatttgtatattgaaaaagacataatgtaaagggagagaggagagacggagagaatggaggaaaaccaaagatatatatatcagtaattcagtat

SEQ ID NO: 11419 - DNA, 1050 bp, Glycine max; identical to SEQ ID NO: 11418
  Gm_smallRNAprecursor_4252

SEQ ID NO: 11420 - DNA, 1037 bp, Glycine max
  Gm_smallRNAprecursor_4253
gttcctcgtatagcaattactacagattgtagttgatgtagaaccacaataaaatatgcagcttcacacttgacctggcatgggtataaaaaaaaactttatgaataattaaatataaattaagccagtataatataaaaacagaaatatgcataacatcatacataaattgagtatattatcatcttaaattggataaaactgagtttccccacattttaaaattaaaaaattaccccctgaacaaaccaaaacacccacccacccacacccacaccccataatttgctcaacaccaatgtcttcccttccttgattttaacaaaaaaaaaactaaggctaaacaaaagaatcatactattgttggttagcgacatcttccttatgagtgtattctgttattgattacaagctcccttcaataaaatttaaacataaatggtggcaatatcttttcagcaatattatttattatctatgaagcacgaacaccccagtcccttgccgtgtccggtgtccgacacgcgtccgtgtcagtgtccgacaccgacacgacacccgtactacgttctatattttggacattacaagtgttcacatgtccgtgtccgtgtccgtgtccgtgcttcatagtttattattactgataatcacacccctcttcatttttgtaagacttagtgagcctttgtacagaattttattcttttggattttttgcatggtaaacctgtgtctcctacaaccaaagcattgtagagaacatttggacatttaaattctctaacctggctgactcgcccatgtataagcgcttctggaggcaaattgacatactttagaaaggctgcagcatgacctcgccaccagttatcaccatccagtatgggtgtctaagaagatatgaaataggaacataaaatcacaatattgaagatgaattttttttaatttgtatattgaaaaagacataatgtaaagggagagaggagagacggagagaatggaggaaaaccaaagatatatatatcagtaat

SEQ ID NO: 11421 - DNA, 1038 bp, Glycine max
  Gm_smallRNAprecursor_4254
gttcctcgtatagcaattactacagattgtagttgatgtagaaccacaataaaatatgcagcttcacacttgacctggcatgggtataaaaaaaaactttatgaataattaaatataaattaagccagtataatataaaaacagaaatatgcataacatcatacataaattgagtatattatcatcttaaattggataaaactgagtttccccacattttaaaattaaaaaattaccccctgaacaaaccaaaacacccacccacccacacccacaccccataatttgctcaacaccaatgtcttcccttccttgattttaacaaaaaaaaaactaaggctaaacaaaagaatcatactattgttggttagcgacatcttccttatgagtgtattctgttattgattacaagctcccttcaataaaatttaaacataaatggtggcaatatcttttcagcaatattatttattatctatgaagcacgaacaccccagtcccttgccgtgtccggtgtccgacacgcgtccgtgtcagtgtccgacaccgacacgacacccgtactacgttctatattttggacattacaagtgttcacatgtccgtgtccgtgtccgtgtccgtgcttcatagtttattattactgataatcacacccctcttcatttttgtaagacttagtgagcctttgtacagaattttattcttttggattttttgcatggtaaacctgtgtctcctacaaccaaagcattgtagagaacatttggacatttaaattctctaacctggctgactcgcccatgtataagcgcttctggaggcaaattgacatactttagaaaggctgcagcatgacctcgccaccagttatcaccatccagtatgggtgtctaagaagatatgaaataggaacataaaatcacaatattgaagatgaattttttttaatttgtatattgaaaaagacataatgtaaagggagagaggagagacggagagaatggaggaaaaccaaagatatatatatcagtaatt

SEQ ID NO: 11422 - DNA, 1039 bp, Glycine max
  Gm_smallRNAprecursor_4255
gttcctcgtatagcaattactacagattgtagttgatgtagaaccacaataaaatatgcagcttcacacttgacctggcatgggtataaaaaaaaactttatgaataattaaatataaattaagccagtataatataaaaacagaaatatgcataacatcatacataaattgagtatattatcatcttaaattggataaaactgagtttccccacattttaaaattaaaaaattaccccctgaacaaaccaaaacacccacccacccacacccacaccccataatttgctcaacaccaatgtcttcccttccttgattttaacaaaaaaaaaactaaggctaaacaaaagaatcatactattgttggttagcgacatcttccttatgagtgtattctgttattgattacaagctcccttcaataaaatttaaacataaatggtggcaatatcttttcagcaatattatttattatctatgaagcacgaacaccccagtcccttgccgtgtccggtgtccgacacgcgtccgtgtcagtgtccgacaccgacacgacacccgtactacgttctatattttggacattacaagtgttcacatgtccgtgtccgtgtccgtgtccgtgcttcatagtttattattactgataatcacacccctcttcatttttgtaagacttagtgagcctttgtacagaattttattcttttggattttttgcatggtaaacctgtgtctcctacaaccaaagcattgtagagaacatttggacatttaaattctctaacctggctgactcgcccatgtataagcgcttctggaggcaaattgacatactttagaaaggctgcagcatgacctcgccaccagttatcaccatccagtatgggtgtctaagaagatatgaaataggaacataaaatcacaatattgaagatgaattttttttaatttgtatattgaaaaagacataatgtaaagggagagaggagagacggagagaatggaggaaaaccaaagatatatatatcagtaattc

SEQ ID NO: 11423 - DNA, 1035 bp, Glycine max
  Gm_smallRNAprecursor_4256
ttcctcgtatagcaattactacagattgtagttgatgtagaaccacaataaaatatgcagcttcacacttgacctggcatgggtataaaaaaaaactttatgaataattaaatataaattaagccagtataatataaaaacagaaatatgcataacatcatacataaattgagtatattatcatcttaaattggataaaactgagtttccccacattttaaaattaaaaaattaccccctgaacaaaccaaaacacccacccacccacacccacaccccataatttgctcaacaccaatgtcttcccttccttgattttaacaaaaaaaaaactaaggctaaacaaaagaatcatactattgttggttagcgacatcttccttatgagtgtattctgttattgattacaagctcccttcaataaaatttaaacataaatggtggcaatatcttttcagcaatattatttattatctatgaagcacgaacaccccagtcccttgccgtgtccggtgtccgacacgcgtccgtgtcagtgtccgacaccgacacgacacccgtactacgttctatattttggacattacaagtgttcacatgtccgtgtccgtgtccgtgtccgtgcttcatagtttattattactgataatcacacccctcttcatttttgtaagacttagtgagcctttgtacagaattttattcttttggattttttgcatggtaaacctgtgtctcctacaaccaaagcattgtagagaacatttggacatttaaattctctaacctggctgactcgcccatgtataagcgcttctggaggcaaattgacatactttagaaaggctgcagcatgacctcgccaccagttatcaccatccagtatgggtgtctaagaagatatgaaataggaacataaaatcacaatattgaagatgaattttttttaatttgtatattgaaaaagacataatgtaaagggagagaggagagacggagagaatggaggaaaaccaaagatatatatatcagtaa

SEQ ID NO: 11424 - DNA, 1035 bp, Glycine max; identical to SEQ ID NO: 11423
  Gm_smallRNAprecursor_4257

SEQ ID NO: 11425 - DNA, 1036 bp, Glycine max
  Gm_smallRNAprecursor_4258
ttcctcgtatagcaattactacagattgtagttgatgtagaaccacaataaaatatgcagcttcacacttgacctggcatgggtataaaaaaaaactttatgaataattaaatataaattaagccagtataatataaaaacagaaatatgcataacatcatacataaattgagtatattatcatcttaaattggataaaactgagtttccccacattttaaaattaaaaaattaccccctgaacaaaccaaaacacccacccacccacacccacaccccataatttgctcaacaccaatgtcttcccttccttgattttaacaaaaaaaaaactaaggctaaacaaaagaatcatactattgttggttagcgacatcttccttatgagtgtattctgttattgattacaagctcccttcaataaaatttaaacataaatggtggcaatatcttttcagcaatattatttattatctatgaagcacgaacaccccagtcccttgccgtgtccggtgtccgacacgcgtccgtgtcagtgtccgacaccgacacgacacccgtactacgttctatattttggacattacaagtgttcacatgtccgtgtccgtgtccgtgtccgtgcttcatagtttattattactgataatcacacccctcttcatttttgtaagacttagtgagcctttgtacagaattttattcttttggattttttgcatggtaaacctgtgtctcctacaaccaaagcattgtagagaacatttggacatttaaattctctaacctggctgactcgcccatgtataagcgcttctggaggcaaattgacatactttagaaaggctgcagcatgacctcgccaccagttatcaccatccagtatgggtgtctaagaagatatgaaataggaacataaaatcacaatattgaagatgaattttttttaatttgtatattgaaaaagacataatgtaaagggagagaggagagacggagagaatggaggaaaaccaaagatatatatatcagtaat

SEQ ID NO: 11426 - DNA, 1037 bp, Glycine max
  Gm_smallRNAprecursor_4259
ttcctcgtatagcaattactacagattgtagttgatgtagaaccacaataaaatatgcagcttcacacttgacctggcatgggtataaaaaaaaactttatgaataattaaatataaattaagccagtataatataaaaacagaaatatgcataacatcatacataaattgagtatattatcatcttaaattggataaaactgagtttccccacattttaaaattaaaaaattaccccctgaacaaaccaaaacacccacccacccacacccacaccccataatttgctcaacaccaatgtcttcccttccttgattttaacaaaaaaaaaactaaggctaaacaaaagaatcatactattgttggttagcgacatcttccttatgagtgtattctgttattgattacaagctcccttcaataaaatttaaacataaatggtggcaatatcttttcagcaatattatttattatctatgaagcacgaacaccccagtcccttgccgtgtccggtgtccgacacgcgtccgtgtcagtgtccgacaccgacacgacacccgtactacgttctatattttggacattacaagtgttcacatgtccgtgtccgtgtccgtgtccgtgcttcatagtttattattactgataatcacacccctcttcatttttgtaagacttagtgagcctttgtacagaattttattcttttggattttttgcatggtaaacctgtgtctcctacaaccaaagcattgtagagaacatttggacatttaaattctctaacctggctgactcgcccatgtataagcgcttctggaggcaaattgacatactttagaaaggctgcagcatgacctcgccaccagttatcaccatccagtatgggtgtctaagaagatatgaaataggaacataaaatcacaatattgaagatgaattttttttaatttgtatattgaaaaagacataatgtaaagggagagaggagagacggagagaatggaggaaaaccaaagatatatatatcagtaatt

SEQ ID NO: 11427 - DNA, 1034 bp, Glycine max
  Gm_smallRNAprecursor_4260
tcctcgtatagcaattactacagattgtagttgatgtagaaccacaataaaatatgcagcttcacacttgacctggcatgggtataaaaaaaaactttatgaataattaaatataaattaagccagtataatataaaaacagaaatatgcataacatcatacataaattgagtatattatcatcttaaattggataaaactgagtttccccacattttaaaattaaaaaattaccccctgaacaaaccaaaacacccacccacccacacccacaccccataatttgctcaacaccaatgtcttcccttccttgattttaacaaaaaaaaaactaaggctaaacaaaagaatcatactattgttggttagcgacatcttccttatgagtgtattctgttattgattacaagctcccttcaataaaatttaaacataaatggtggcaatatcttttcagcaatattatttattatctatgaagcacgaacaccccagtcccttgccgtgtccggtgtccgacacgcgtccgtgtcagtgtccgacaccgacacgacacccgtactacgttctatattttggacattacaagtgttcacatgtccgtgtccgtgtccgtgtccgtgcttcatagtttattattactgataatcacacccctcttcatttttgtaagacttagtgagcctttgtacagaattttattcttttggattttttgcatggtaaacctgtgtctcctacaaccaaagcattgtagagaacatttggacatttaaattctctaacctggctgactcgcccatgtataagcgcttctggaggcaaattgacatactttagaaaggctgcagcatgacctcgccaccagttatcaccatccagtatgggtgtctaagaagatatgaaataggaacataaaatcacaatattgaagatgaattttttttaatttgtatattgaaaaagacataatgtaaagggagagaggagagacggagagaatggaggaaaaccaaagatatatatatcagtaa

SEQ ID NO: 11428 - DNA, 1034 bp, Glycine max; identical to SEQ ID NO: 11427
  Gm_smallRNAprecursor_4261

SEQ ID NO: 11429 - DNA, 1035 bp, Glycine max
  Gm_smallRNAprecursor_4262
tcctcgtatagcaattactacagattgtagttgatgtagaaccacaataaaatatgcagcttcacacttgacctggcatgggtataaaaaaaaactttatgaataattaaatataaattaagccagtataatataaaaacagaaatatgcataacatcatacataaattgagtatattatcatcttaaattggataaaactgagtttccccacattttaaaattaaaaaattaccccctgaacaaaccaaaacacccacccacccacacccacaccccataatttgctcaacaccaatgtcttcccttccttgattttaacaaaaaaaaaactaaggctaaacaaaagaatcatactattgttggttagcgacatcttccttatgagtgtattctgttattgattacaagctcccttcaataaaatttaaacataaatggtggcaatatcttttcagcaatattatttattatctatgaagcacgaacaccccagtcccttgccgtgtccggtgtccgacacgcgtccgtgtcagtgtccgacaccgacacgacacccgtactacgttctatattttggacattacaagtgttcacatgtccgtgtccgtgtccgtgtccgtgcttcatagtttattattactgataatcacacccctcttcatttttgtaagacttagtgagcctttgtacagaattttattcttttggattttttgcatggtaaacctgtgtctcctacaaccaaagcattgtagagaacatttggacatttaaattctctaacctggctgactcgcccatgtataagcgcttctggaggcaaattgacatactttagaaaggctgcagcatgacctcgccaccagttatcaccatccagtatgggtgtctaagaagatatgaaataggaacataaaatcacaatattgaagatgaattttttttaatttgtatattgaaaaagacataatgtaaagggagagaggagagacggagagaatggaggaaaaccaaagatatatatatcagtaat

SEQ ID NO: 11430 - DNA, 1033 bp, Glycine max
  Gm_smallRNAprecursor_4263
tatagcaattactacagattgtagttgatgtagaaccacaataaaatatgcagcttcacacttgacctggcatgggtataaaaaaaaactttatgaataattaaatataaattaagccagtataatataaaaacagaaatatgcataacatcatacataaattgagtatattatcatcttaaattggataaaactgagtttccccacattttaaaattaaaaaattaccccctgaacaaaccaaaacacccacccacccacacccacaccccataatttgctcaacaccaatgtcttcccttccttgattttaacaaaaaaaaaactaaggctaaacaaaagaatcatactattgttggttagcgacatcttccttatgagtgtattctgttattgattacaagctcccttcaataaaatttaaacataaatggtggcaatatcttttcagcaatattatttattatctatgaagcacgaacaccccagtcccttgccgtgtccggtgtccgacacgcgtccgtgtcagtgtccgacaccgacacgacacccgtactacgttctatattttggacattacaagtgttcacatgtccgtgtccgtgtccgtgtccgtgcttcatagtttattattactgataatcacacccctcttcatttttgtaagacttagtgagcctttgtacagaattttattcttttggattttttgcatggtaaacctgtgtctcctacaaccaaagcattgtagagaacatttggacatttaaattctctaacctggctgactcgcccatgtataagcgcttctggaggcaaattgacatactttagaaaggctgcagcatgacctcgccaccagttatcaccatccagtatgggtgtctaagaagatatgaaataggaacataaaatcacaatattgaagatgaattttttttaatttgtatattgaaaaagacataatgtaaagggagagaggagagacggagagaatggaggaaaaccaaagatatatatatcagtaattcag

SEQ ID NO: 11431 - DNA, 1032 bp, Glycine max
  Gm_smallRNAprecursor_4264
atagcaattactacagattgtagttgatgtagaaccacaataaaatatgcagcttcacacttgacctggcatgggtataaaaaaaaactttatgaataattaaatataaattaagccagtataatataaaaacagaaatatgcataacatcatacataaattgagtatattatcatcttaaattggataaaactgagtttccccacattttaaaattaaaaaattaccccctgaacaaaccaaaacacccacccacccacacccacaccccataatttgctcaacaccaatgtcttcccttccttgattttaacaaaaaaaaaactaaggctaaacaaaagaatcatactattgttggttagcgacatcttccttatgagtgtattctgttattgattacaagctcccttcaataaaatttaaacataaatggtggcaatatcttttcagcaatattatttattatctatgaagcacgaacaccccagtcccttgccgtgtccggtgtccgacacgcgtccgtgtcagtgtccgacaccgacacgacacccgtactacgttctatattttggacattacaagtgttcacatgtccgtgtccgtgtccgtgtccgtgcttcatagtttattattactgataatcacacccctcttcatttttgtaagacttagtgagcctttgtacagaattttattcttttggattttttgcatggtaaacctgtgtctcctacaaccaaagcattgtagagaacatttggacatttaaattctctaacctggctgactcgcccatgtataagcgcttctggaggcaaattgacatactttagaaaggctgcagcatgacctcgccaccagttatcaccatccagtatgggtgtctaagaagatatgaaataggaacataaaatcacaatattgaagatgaattttttttaatttgtatattgaaaaagacataatgtaaagggagagaggagagacggagagaatggaggaaaaccaaagatatatatatcagtaattcag

SEQ ID NO: 11432 - DNA, 1037 bp, Glycine max
  Gm_smallRNAprecursor_4265
gcaattactacagattgtagttgatgtagaaccacaataaaatatgcagcttcacacttgacctggcatgggtataaaaaaaaactttatgaataattaaatataaattaagccagtataatataaaaacagaaatatgcataacatcatacataaattgagtatattatcatcttaaattggataaaactgagtttccccacattttaaaattaaaaaattaccccctgaacaaaccaaaacacccacccacccacacccacaccccataatttgctcaacaccaatgtcttcccttccttgattttaacaaaaaaaaaactaaggctaaacaaaagaatcatactattgttggttagcgacatcttccttatgagtgtattctgttattgattacaagctcccttcaataaaatttaaacataaatggtggcaatatcttttcagcaatattatttattatctatgaagcacgaacaccccagtcccttgccgtgtccggtgtccgacacgcgtccgtgtcagtgtccgacaccgacacgacacccgtactacgttctatattttggacattacaagtgttcacatgtccgtgtccgtgtccgtgtccgtgcttcatagtttattattactgataatcacacccctcttcatttttgtaagacttagtgagcctttgtacagaattttattcttttggattttttgcatggtaaacctgtgtctcctacaaccaaagcattgtagagaacatttggacatttaaattctctaacctggctgactcgcccatgtataagcgcttctggaggcaaattgacatactttagaaaggctgcagcatgacctcgccaccagttatcaccatccagtatgggtgtctaagaagatatgaaataggaacataaaatcacaatattgaagatgaattttttttaatttgtatattgaaaaagacataatgtaaagggagagaggagagacggagagaatggaggaaaaccaaagatatatatatcagtaattcagtatgcctg

SEQ ID NO: 11433 - DNA, 1044 bp, Glycine max
  Gm_smallRNAprecursor_4266
agaggttgaagctatgatgcaatgcattatttatttatttatgtctagatgttgatttcaacagtgccttgtcattaagtttataaattgtgcaagattttgaagttgttgctctgttttcggcccttgtgagctgatgccgacttttttttttttttcgtaccccagtgcccagaggctcttcgctatgcgaaagtatgagagagggatattgtacgcagccttacccttgcatatgcaaagaggctgtttccggattcgaacccatgaccaacaagtaaatgaaattaaaaattaaataaaaatgttttttttaataaaaatcaggataacatttcatgtcaattaccttactagatactttgctttcatttttcatgtattggttgtattagaaatttgttttatgcccgagcgcttgtccaagagtatgtgagtgttagtattagaatataaaatattccttgtctattatatttttaagaggacccaaatctttcatagcaaattcggaactcagtttagacatgatagattggcgtagagtgtcagaggatgcagtgagaatgatatcatctacataaagaaggatgtaggccgtgtcattgccattgtggtaggtgaataatgagttatcacatatactatgagaaaagcccaaggtagcaacaacaacagtgggctgttccaccttgggctgcaccgtggcaaccatgggccacgccaccatgtccgtacccaactacgccaaattggcaacatcagtccactcctcgccagcaaggaattcttggaccaaagcctccacaagctcatatggcagccacatcagcaaataatgctcaaccatcatatgcatcaaccgacattcaagctgcgatgcatactctttctatggctcctcccgatgatcagtggtacatggataccggggccacctctcacatgactgcaaatggaggtaatctcacttcttattccaatatgagcaataatattatcgttggtagtggtcataatattccagtttttaattctctacaa

SEQ ID NO: 11434 - DNA, 1129 bp, Glycine max
  Gm_smallRNAprecursor_4267
agaggttgaagctatgatgcaatgcattatttatttatttatgtctagatgttgatttcaacagtgccttgtcattaagtttataaattgtgcaagattttgaagttgttgctctgttttcggcccttgtgagctgatgccgacttttttttttttttcgtaccccagtgcccagaggctcttcgctatgcgaaagtatgagagagggatattgtacgcagccttacccttgcatatgcaaagaggctgtttccggattcgaacccatgaccaacaagtaaatgaaattaaaaattaaataaaaatgttttttttaataaaaatcaggataacatttcatgtcaattaccttactagatactttgctttcatttttcatgtattggttgtattagaaatttgttttatgcccgagcgcttgtccaagagtatgtgagtgttagtattagaatataaaatattccttgtctattatatttttaagaggacccaaatctttcatagcaaattcggaactcagtttagacatgatagattggcgtagagtgtcagaggatgcagtgagaatgatatcatctacataaagaaggatgtaggccgtgtcattgccattgtggtaggtgaataatgagttatcacatatactatgagaaaagcccaaggtagcaacaacaacagtgggctgttccaccttgggctgcaccgtggcaaccatgggccacgccaccatgtccgtacccaactacgccaaattggcaacatcagtccactcctcgccagcaaggaattcttggaccaaagcctccacaagctcatatggcagccacatcagcaaataatgctcaaccatcatatgcatcaaccgacattcaagctgcgatgcatactctttctatggctcctcccgatgatcagtggtacatggataccggggccacctctcacatgactgcaaatggaggtaatctcacttcttattccaatatgagcaataatattatcgttggtagtggtcataatattccagtttttaattctctacaaagaaacaattttattttatgtaataagcttccaaagcattatttttgtcattcctgtcctcttggaaaacacacaaaattacctt

SEQ ID NO: 11435 - DNA, 1059 bp, Glycine max
  Gm_smallRNAprecursor_4268
atacagatatatacaagagttagtttataataaactaactgacaactatgacagctaaaacagttataactactctaacggaaaagagagaaaagattaatataattataactactctaactgaaatgaaaaagaaggctaatactaatttagaataatctaatatttcttccttcatgataatatataatcgaatgttattaattttttcttatataatcgaatgttattaattttttcttataaactaaaaaaaattgataatgtattatatgaaaatataatacatagtggtgtgagatcattaatttaataatttctctcactccataacttcattttcacttcactcgttgctcctgccacgctgcttatattaatctcttctgtccctctctctcagaatttgctacctataaatactgagcctctacttactaccacactcgcatactcaaggtgtgaagtgattcttcttcactgggtgagaagctccttgttggagaagcagggcacgtgcaactctctaggctctcttaagcgccattgaaccctttgcacgtgctccccttctccaacacggcttcctcaccctcccttccatctctttctcagttactccggtgagtctgccacttcatgaggtaattgctttccctctgtcttaatttgttaatttcccacgtaaatttagttccaaatttacatgatgactcttcttgttgttggaaacagtgtgaagcatatcaatgttacattgtggtctccaacaaatgaaagattaattacgtaccattttatctgactaccctttgaacagtaatttcatttcatcactgagatatcatgcaccatactgagaaataccatgtgtaactctggatgtttaagtaagaactatgaacacatttttttttcctgctatagatggtgttatttactaatatctgctttgaaagtgaacactattctacgtaagcagtagtatatagtttctaaagttgaggacatttcaattcaattttttgagtctccgaatgcaatgtaactcgatcaggc

SEQ ID NO: 11436 - DNA, 1092 bp, Glycine max
  Gm_smallRNAprecursor_4269
agtttgacttgcagtgcttcaggatgtgaaagaaattggagtgtgtttgagcaagtaattgtgacaaaactctaactatactttttaattttatttaattttgatgatcaagttatatttggagtatatttgagattgaaatcaacatttatttgttatgttgtagattcattccaaaaaaagaaataggcttgagcacaagaggttgcatgatttggtgtttgtcaaatagaaccaacaattgaagcaaagatataatgcaagagatgaaattgatccaatttctcttaatgatattgatgtatgcaatgaatggctcgtgggagagatggatcaagatgatgataatgatgctggaaatgatttggtatttgaagatgatgatgctctaaattgggcaactgtgtatcaggcttcaggggttggagagtgtaggatgtatactaggcggaaaaagcaaaaaacaagtgttgctgctgcccaaacttctaaaaaacaggcaatggttgttggatcttcatcaaggaagcaaaaagcagtccaagaaaatgatgaggatctagatgttgaggagaatattgatgttgaatctgaagaagaagaaatcatggtcaattttgaggcgtctgatggggaagggggagagggagatgctccattaccatatgataacaacgaagatgattatgttgggattggagaagatgattagagccttaaccttcactttgcactttgcattatgtttttatcattttcttattttgaactctttaatgagtttatttggtgttggtacttgattattgtatgaactcatgaaacttttttagtttatttgaatgcaatcctttgtttttttcaatttcaatgagtttatatatatgttttttttttttttgtgtccgccatgacatccgccattttccgctacgccatccgccatatttttatggcggatttttgactttccgccatgaaccgccatccgccattaacaacattgtattccattactcagttttcactcttttaaagcagaaacttgacaaagtgaactgcatcttacctagccatatcaatacttaccct

SEQ ID NO: 11437 - DNA, 1092 bp, Glycine max; identical to SEQ ID NO: 11436
  Gm_smallRNAprecursor_4270

SEQ ID NO: 11438 - DNA, 1054 bp, Glycine max
  Gm_smallRNAprecursor_4271
tttggcatttcaaaccttttgaagacccactcctattccttgttttgtttttcgtttctgatgtataaaaaaataataatggaagtatcccaaagtcgattttttctcttccctgccaccccaactcattgaccgtccaaacaagaatagttcattttctacccattaacaaagagtgttgctaggtgcacccaacattctttaaaaatgaccaaattaccccttccttctttatccctttatgaatcaagttgatccgtaagaagcttgtgaatcaagttgaccaaatcttatttttttaatcttaaatcttatttttcagttacttagagacattttttggaaaaatgagttgggaatttgccaggaaattctccctttaatttcgagcattttgacatattatggaccttaaacggacatttttatcaaaagctacaaccttttgaagcttataatttccatactgccaattgttgatccatgaaagacttacggatcaacttgatccgtaagtcttaaaaatcaattcgcggatcaacttgatccgtaaaagacttacggatcaacttgatccgtaaaagacttacggatcaacttgattcgtaacaagtttacagatcgtctatatcaactgcggatcacctaaaatctatgcggatcaactcattgcatatgtgaatcaacctgaatgagctgggtggacaaaaatatttttaaaaatacgcaggagtatttttgccttttcacgttaagtgctgggtgcccctagcaacacccattaacaaagatgcacaagtataaaattaactccgaagcattgtagatacatacatactccataatggttttacatgcacgtttaactttgcattgtcacacacaaacgcaggacatgctagtaaaaatttccttgactgtattttgactcgatatagagagtattaaaaatattacaaatgtatgtccaattgaagagtatattattatcattggtcttttgagagaatagatcatcttagaagatttcacgtgatagatgatgtaaaagaag

SEQ ID NO: 11439 - DNA, 1082 bp, Glycine max
  Gm_smallRNAprecursor_4272
tttggcatttcaaaccttttgaagacccactcctattccttgttttgtttttcgtttctgatgtataaaaaaataataatggaagtatcccaaagtcgattttttctcttccctgccaccccaactcattgaccgtccaaacaagaatagttcattttctacccattaacaaagagtgttgctaggtgcacccaacattctttaaaaatgaccaaattaccccttccttctttatccctttatgaatcaagttgatccgtaagaagcttgtgaatcaagttgaccaaatcttatttttttaatcttaaatcttatttttcagttacttagagacattttttggaaaaatgagttgggaatttgccaggaaattctccctttaatttcgagcattttgacatattatggaccttaaacggacatttttatcaaaagctacaaccttttgaagcttataatttccatactgccaattgttgatccatgaaagacttacggatcaacttgatccgtaagtcttaaaaatcaattcgcggatcaacttgatccgtaaaagacttacggatcaacttgatccgtaaaagacttacggatcaacttgattcgtaacaagtttacagatcgtctatatcaactgcggatcacctaaaatctatgcggatcaactcattgcatatgtgaatcaacctgaatgagctgggtggacaaaaatatttttaaaaatacgcaggagtatttttgccttttcacgttaagtgctgggtgcccctagcaacacccattaacaaagatgcacaagtataaaattaactccgaagcattgtagatacatacatactccataatggttttacatgcacgtttaactttgcattgtcacacacaaacgcaggacatgctagtaaaaatttccttgactgtattttgactcgatatagagagtattaaaaatattacaaatgtatgtccaattgaagagtatattattatcattggtcttttgagagaatagatcatcttagaagatttcacgtgatagatgatgtaaaagaagagatacacatgaagacaccacaaatttt

SEQ ID NO: 11440 - DNA, 1044 bp, Glycine max
  Gm_smallRNAprecursor_4273
cttgttttgtttttcgtttctgatgtataaaaaaataataatggaagtatcccaaagtcgattttttctcttccctgccaccccaactcattgaccgtccaaacaagaatagttcattttctacccattaacaaagagtgttgctaggtgcacccaacattctttaaaaatgaccaaattaccccttccttctttatccctttatgaatcaagttgatccgtaagaagcttgtgaatcaagttgaccaaatcttatttttttaatcttaaatcttatttttcagttacttagagacattttttggaaaaatgagttgggaatttgccaggaaattctccctttaatttcgagcattttgacatattatggaccttaaacggacatttttatcaaaagctacaaccttttgaagcttataatttccatactgccaattgttgatccatgaaagacttacggatcaacttgatccgtaagtcttaaaaatcaattcgcggatcaacttgatccgtaaaagacttacggatcaacttgatccgtaaaagacttacggatcaacttgattcgtaacaagtttacagatcgtctatatcaactgcggatcacctaaaatctatgcggatcaactcattgcatatgtgaatcaacctgaatgagctgggtggacaaaaatatttttaaaaatacgcaggagtatttttgccttttcacgttaagtgctgggtgcccctagcaacacccattaacaaagatgcacaagtataaaattaactccgaagcattgtagatacatacatactccataatggttttacatgcacgtttaactttgcattgtcacacacaaacgcaggacatgctagtaaaaatttccttgactgtattttgactcgatatagagagtattaaaaatattacaaatgtatgtccaattgaagagtatattattatcattggtcttttgagagaatagatcatcttagaagatttcacgtgatagatgatgtaaaagaagagatacacatgaagacaccacaaatttt

SEQ ID NO: 11441 - DNA, 1190 bp, Glycine max
  Gm_smallRNAprecursor_4274
aattgtaaagattgaaaaaaatattgttgacctgcatctatgaatggttgtcggtagtagatttcatctagtaattgatcgttggttagttgaagggtgttgtgcattctacgcttgagtgtatcaaaagaacagttgttaggaactcgcattggtgttggaatgagactttgaaaataaacaccaatttggttgtaactgatcgatccatttgaaaaaatgaaagctaatctggagttagtaatggtctgactacttgtttctcccaaaaatgacatagtaataagattgaatttggtttgtgaaattatgttgtgtgagattgtgtgtttgtattgtgtctgtgttgtgttatttatagttgtatgagtattctgccacattgatgtgtattggaatccaatgtttctttttccctagtaagtgatgtagcagacgtccattatcatttcaaagtgaacaaagagattatgagttgttcatcttatgtcagttttgcacacgtctctaaaaattaaatgtatcacctgtaaaactgacatgaaatggacagctcataatgcaaagtgttgttaatttggactgtgatttttcccatgtaattaaagcaacagacgttcatgatgattttcagagtgaataaagagatgatgagctgtccatttcatggcagttttgcaggtgagacatttaatttttagagacgtgtgcaaattgcagagtattgtcaatttggattgtgatttttcccttgtaattaaagctgcaaacgtccataattattttcagagtgaataaagagattatgagttgtccatttcatgtcagttttgtcgatgagacatttaatttttaaaaacagtgtagtgtaaatgacaaagtattgtgaattttgacagttatgttatcatgtcaactaatgcagtaaaagtgggtaaactgaaaattgctaatttaaatttaaaggaaaaattatttcaatacgtaaagtgataactgaagacagacataagactttacatgaaaatctcaaagaagaaataacttagacatgaatgatccgtagattaccaatcccgtttgaatataggttcgtgggatggagacatgttacttccttcgggcccggaagaggagtctgtatcactatcatggtttttgagccaacaagtctcgtattcacctgataa

SEQ ID NO: 11442 - DNA, 1185 bp, Glycine max
  Gm_smallRNAprecursor_4275
ctatattgatcgacactattttgttcatcaacaacacaatgtacaaccaccaatcggtgtactcgaggttggcatgaccttcgatgacaaagcacaatgtattcgagcaatcaaagaatacaacatcagaaatcattttgattgcagaacaatttactctgaccaaagaaggctaaacttcgtctgcaagttacatgaaaatggttgtacatggagcttgggcgcatgcaattcaaagaggcataacaaatggattatcaagagtatcagaggtcatcacacttgtctcgtgccgatgctcaaacaagatcatcgccaactcgacaaacacgtcatagcatagatcatccaaccaattgtcaaaacaaacccaactgtctccatcaagacgttgattgcagagatcaaaacattcatgaattataccccatcctacaagaagacatggttagcaaagcaaaaagcattggagatgattcatggaaactgggaagaatcatatgccaaactgccaaaacttttcggagctttagaatcttgtgttcccgggactgtggtcgctgctcaaacagaatccttgtatgaagggggagaaatagtaccgggcaaaagattgtttaaatgtgtcttttggtcatttggtccatgcattaatggttttgcatattgcaaactcattgtacaagtagatggtacatggctttacggaaagtatactggcacactgttgatagctaccgcacaagatggagctaaccatatcttctcgattgcctatgccattgtagaaggggagacaacttcagcttgggggttttttctaaagaatttgagaagacatgttactccacaaattaacaattctcttatttcagaccgacacccctcaattataagtgcctacaacaacccaagtaacttatgggtccaggacacatcccatttcttttgcctgtgccacactgcacaaaactttcttcgtggtaactcaaactgcaaacatttaaagaaaccacttatgttggctggtgagaatctattttatttattcgttataattttctttcaatcaaattttataacataatacattgattaaatatttatagggtacgcatgcacggagaagatgcactggcgacatcttgaggatattcgtgcgaataagccaagtgcagctgaatg

SEQ ID NO: 11443 - DNA, 1110 bp, Glycine max
  Gm_smallRNAprecursor_4276
ttaaaattatatgacattaataaattcgtttttaaaagatgaaaaataaaaatttatttttgaaagtatagaaaaatataataaatacatttttaactttttccattaatgttaataaatcatcatatgttacatgttacaaggaaaatatttactcatgtgactttcattaacatgtcgaagcattaattttaatttcactttttgctctcttctttctactcatgtgttctttcttccattctcctcctccttctcttggaccattgtcgacgagctcgtcttcatcaaaatcatcaacaagaagatcacgggacagcatgagggctacggtttcatcaagttcctctcccacaccaaagctcagagggttatgcaaacttacaacgacaaccaaatgcccatcatcgaccacgccttgggagttgctacgtgcacccaacattattgctgtgacacccagcaaacagtgaagtggcgaaattgcccttcaggaattcttcttccggaagacgctttttccggaaacattccggaataccctttttctggaaactttccggaagaaccttcttccagaagaagaatttgtgatttccggaagtactcagaaactccttccggaagaacgtcttccagaatgtttccgaaagaagcttcttccggaagatatctttttactttcggaagaaaggtcttccggaagttagtttttttaaaaaaaaatgttttattttgtaataatttacttttaatgaataaactaaattataaaatgattaatattattatacataaataattaaataattagtgaacgtaattatgactaatatttataatttgttttttacgcgcatgtaaaatattaatatattaatttgtgtgacaatttagtataatttaaacataaaaattaattaattcgtaaattttattaaaaatataaattttttattatgataaaatttaatttctattataaaagttaatatataataaaaaaataattattatttcataacaaagtgaagaaaaaataattttcattttataataataagtaaaaataaaataatatttaatgcatatgtaatgacgattttgttc

SEQ ID NO: 11444 - DNA, 1073 bp, Glycine max
  Gm_smallRNAprecursor_4277
agaagaatgcttctttggggagaggttttgtgaaaatatcagcaagttgattcttagtatcaacaaactcgaatacataatctccctttaggacatgatctctaagaaaatggtgcctaatttctatatgtttagttctagagtgttgaactggattcttggagagattaattgcacttgtattatcacatctaataggtatatggttaagaagaattccataatcagaaagttgttgcttcacccataagatttgagcacaacaactgccggcaaaaatatattccacttctgcagtggataaagcaacactattttgtttcttaccgtgccaagaaactagagcagatccaatgaattgacaagttccactagtgctctttctatctgttttagaacaggcaaagtctgaatcaaaatatccaattaaggtgcatgtggaatttctaggataccataaacctatgtttgtagtgcctaccaaatatctaatgattcttttaacagcactaagatgtgattgtttaggatttgattgaaatctagcacacatacacacactaaacattatatcaggcctgctagtagataaataaagaagtgattcgatcatacctcgatattgcttaacatctattgactgaccggtttcatctttatctagatagcaagcagtgctcattggtgtagccatgtgcttagcattttccatgtcgaatttgtggattaactctttgcaatacttggattgattgacaaagataccatccttagtttgtttaatttgtaatccaagaaagaagttaagttctcccatcattgacatttcaaactcactttgcatgtcatgggagaattccttgcacaacaatttgttagtggatccaaaaataatgtcatcaacataaatttgaaccaataaaatatcatgtgattttctctttataaaaagagtagtatccacttttcctctagaaaagtccttttctaaaaggaacttacttagacgctcgtaccaagccctaagggcttgtttcaagccatacaaagcctttttcaatttataaacatga

SEQ ID NO: 11445 - DNA, 1131 bp, Glycine max
  Gm_smallRNAprecursor_4278
atggagaatgtcatggcggacaaaaatatatatacatatatataaactcattgaaattgaaaaaaaaaacaatggattgcattcaaataaactaaaaaagtttcatgagttaatacaataatcaagtaccaacaccaaataaactcattaaagagttcaaaataagaaaatgataaaaacataatgcaaagtgcaaagtgaaggttcaggctctaatcatcttctccaatcccaacataatcatattcgttattatcatatggtaatggagcatctccctctccctcttccccatcagatgcctcaaaattgaccatgatttcttcttcttcagattcaagatcaatattctcctcaaaatctagatcctcatcattttcttggactactttttgcttccttgatgaagatccaacaaccattgcttgtttttttagaagtttgggtagcagcaacacttgttgttttttactttttccgcctagtatacatcctacactccaacccccgaagcctgatacacagttgcccaatttagagcatcatcatcttcaaataccaaatcatttccagcatcattatcatcatcttgatccatctctcccacgatccgttcattgcacacatcaatatcattaagagaaattggatcaatttcatctcttgcattatatctttgcttcaattgttggttgtatttgacaaacaccaaatcatgcaacctcttgtgctcaagcctatttcattttttggaatgaatctacaacataacaaataaatgttgatttcaatctcaaatatactccaaataaaacttgatcataaaaattaaataaaattaaaaagtatagttagtgttttgtcacaattacttgctcaaacacactccaatttctttcacatcctgaaacactgcaagtcaaactcaaaattttaatagctagcttctacaaatttggagtttgtgacccaaacattcgccaccaatatgctgcaataccaattaccaactaagagcataacttagaattatgaattataacattaatacataaaaaaatagtatagtatttgtatttttcatatggtaaaagtttcttactaggagaatgggttttcctttgagccatt

SEQ ID NO: 11446 - DNA, 1187 bp, Glycine max
  Gm_smallRNAprecursor_4279
ggcagaatgacgatcatttgtcagtgtccgctgtagtaaagacgaatatcggttattgtagtagtatagattatttaaattcagttgttgtgtttgacttacccattcaggtaggctccaaggtaaacatctcgttttgaactttgtattcaactcttgatgtaactttcggattcaaattgtgattgcctagatctctgaatggactgtggctcgaggaatccatacacatcagaattctccgctcgcacacttgtctcagtcagatggctgtgttgttaagccaaagttaattatgtatgaatttaaaataattactttggtaattaacattaatctaaaatgatttacataatccacaactgtataacagatacgctgagacattgaccaccgtgtgcaatttcagagagatcttcgtactttatatacaacgggaagttttgattaaacaccccgaatatggtagcatcccacataacctggagaggcttcaaaaacagttgtgggatggtcaatgtcatcaggtacaggggatcatcgacctcttcatccgggatttctggaggttttgctggtgacacaattgtctgttgatcaaacatagttaattaacaagttttgattacagtgaacaaattaattgaaaaaaataaacatataatcagagtaaaatacttgttctgataaacgcttcacaagatgtgttggccaagcaaggaaggtgttaagtatctgccccactaaggtaacctcgtcagtgggtaaaggaacgagagcctctgcaactttaacctcctcaacaccaatcttgacttggccatgcaacaaagggatgttgtgaactgttgtggatccctcataaattcttcctagggaaaccaagcgggaaggattttcttcaatgtatagcccacatttgtctgagtcacccgtccctggatcgttccctgagggagcaacacaactctcctttgtgctgacacaaggatctgagagaccaacctctggctttggaggtagtgcaagttcctgtgattgcatctgagactaaaactgggattgcatctggctaaaggatgccatcagctttccagtcactttttctgtgattaactcctctagttggtctctgatttgttgggtcagttgttctaggtcttcatgaggcatggaggaaaatttcg

SEQ ID NO: 11447 - DNA, 1040 bp, Glycine max
  Gm_smallRNAprecursor_4280
agttgagaatgttggaattaacaaagtgctcatagatggaggagcggctgtcaacttgatgcctcgatctatgctctacaagatcgggaaacatgacactgatctatctgcccacaacattgtgctttctaattatgagggcaaaactggctattctttgggagccattcaagtagatgttgttgtaggcagtatagttcgaccaactctattcctggtgatacagtccaaggctaattttaacttgttattaggaagggaatggatccatggagttggggctgtgccatctactctccaccagaaactcattatctggagggaggatgggattgttgaaaatatagaggcagatcaaagcttctataagtcagaggttgataatgttactccacaaacctttgacaaaaatttggctaacatagcaccttgtggtgacaaggaggctgttttcgagtcaagtgacaatgttatccactctgtcaaactccatcctacctatgggtttatatgggagagggaggaaattaatgctgtttcctctgaagatggagtcattccaccaactgggtggaatatatatgaagattaatatgactgaggccactgcatgggccagaattacggcttatatggccgaaaatagactaaatacggcctttgaggctgaattccaacaaaatatggcagttgaagccaagatcgaagatcatgaaaacaaagaaacaaaggatcgaagactggactgcatttatgatgatgagccactgggttttgagaaaaatcccataaatgaggtgccaaagatgcaagctcaagatcctttggaggagatcgacattggagatggctcgataaaaaggccaacctatatcagtgccaatatcacctcaagtctaaaagaaaagctggtgcctcttcttagagaatttaaagactgttttgcttgggattaccacgaaatgcctgggttaagcagagaaatggtcgaaatgaaattgcctattaaggagggaaaaagaccagtaaaacaactacca

SEQ ID NO: 11448 - DNA, 1157 bp, Glycine max
  Gm_smallRNAprecursor_4281
aagaccagtaaaacaactaccaagaagattcgcaccagaaatcatgtccaagattaaggaagagatcgaaaggctgctgaggtgtaaattcatcagatctgccaggtatgtcgaatggttagcaaatatagtccctgtcattaaaaagaatggaactcttagagtatgcatagattttagggatttaaataatgctacacctaaagatgaatatgctatgccagtagcggaaatgttggtagattcggcggctggtttcgaatttttaagcatgttagatggttattctggttataaccaaatatttattgctgaaagtgatgtgtcaaaaacagcatttcgatgccctggtgctttaggcacttatgaatgggtggttatgccctttgggttgaaaaatgctggggcctcttatcaaagggccatgaattccatgtttcatgattttattgacacatttatgcaagtttatattgatgatataatcatcaaatcttcctcagaagatagccatttggattaccttaggcaatctttcgaacgaatgaggaaacatggattaaaaatgaatccattaaagtgtgctttttgtgtgcgtgcaggagatttccttggttttgtggtgcataaaaaaggcattgagataaatcaaaacaagacaaaggctattcttgagacgaagcctccttcgaccaaaaaacagcttcagtctttgctaggaaaaatcaacttcttgagacgattcatttcgaatctaagtggcaaagctcagactttttcgccattacttcgactcaagaaagatgaaccattcaaatgggatgaagtgcatcaaaaggcttttgatgaaattaaagaatatctgatcaagcctcctgtgttaatgcctcctagtcgaaacaagactatgaagttgtatattgctgcgtctgacaagaccattggtagcatgttggctcaggaggatgatgatggcgtagagcatgcaatttattatcttagtcgtgtactaaatgatgcagaaactagatatactgccatagaaaaactttgtctttgtttatatttctcttgtgcaaaacttaagcaatatataaagcctgttgatgtttatgtgtattctcattatgatattattaagcacatgttgtcaaaac

SEQ ID NO: 11449 - DNA, 1114 bp, Glycine max
  Gm_smallRNAprecursor_4282
aatctaagtggcaaagctcagactttttcgccattacttcgactcaagaaagatgaaccattcaaatgggatgaagtgcatcaaaaggcttttgatgaaattaaagaatatctgatcaagcctcctgtgttaatgcctcctagtcgaaacaagactatgaagttgtatattgctgcgtctgacaagaccattggtagcatgttggctcaggaggatgatgatggcgtagagcatgcaatttattatcttagtcgtgtactaaatgatgcagaaactagatatactgccatagaaaaactttgtctttgtttatatttctcttgtgcaaaacttaagcaatatataaagcctgttgatgtttatgtgtattctcattatgatattattaagcacatgttgtcaaaacctattttacacagtagaattggaaaatgggctttagcattaacagaatattctttaacgtacaagcctttgaaatctgttaagggtcaaattgtggcagattttattgtagatcactcagtgatcgaaatgccgcaagactatgtcgatacagagccttggattttgtatttcgatggttcgaaacacaaacatggaactggaattggagttttaataatatcccccaataaagttccaactaaattcaaatataaaatcaaagggctttgttctaataatgaggctgagtatgaagctctaattacaggccttgaaattttaattagcctgggggcaagaaatgttaacataaggggtgattcagaattagtgttgaggcaattaacacaagaatacaaatgtgttaatgaacacttagcaaaatattttgttatagcaagttctcttctgaatcatttcgattacattaacattgagcatatacctcgacaagaaaaccaagaagcaaatgatttagcccaaatagcttcagggtacaaaatgtcgaaggaaaagttaactcagttgatcgaaataaaagataaactggtattactagagccattaagcaataaattgccaatgccaaaacttgtgggggcaagtacaccacaaaataatgaagatgaaagcatggatgatctccaaggaaaaattcaaattttgg

SEQ ID NO: 11450 - DNA, 1082 bp, Glycine max
  Gm_smallRNAprecursor_4283
cagtgatcgaaatgccgcaagactatgtcgatacagagccttggattttgtatttcgatggttcgaaacacaaacatggaactggaattggagttttaataatatcccccaataaagttccaactaaattcaaatataaaatcaaagggctttgttctaataatgaggctgagtatgaagctctaattacaggccttgaaattttaattagcctgggggcaagaaatgttaacataaggggtgattcagaattagtgttgaggcaattaacacaagaatacaaatgtgttaatgaacacttagcaaaatattttgttatagcaagttctcttctgaatcatttcgattacattaacattgagcatatacctcgacaagaaaaccaagaagcaaatgatttagcccaaatagcttcagggtacaaaatgtcgaaggaaaagttaactcagttgatcgaaataaaagataaactggtattactagagccattaagcaataaattgccaatgccaaaacttgtgggggcaagtacaccacaaaataatgaagatgaaagcatggatgatctccaaggaaaaattcaaattttggccattgacaatatgttagataatgattggagaaagtccattgttgaatatttggaaaatccaataggtaatgtggctcgaaaggtcaaatatagggctttaaattacgtgattgtgggaaatgatctgtttaaaaagactgcagaaggagtgttgttgaaatgtctaagtgaatcagaagcgtacttggcagtttcccatgttcacaatggggcttgtggatcacatcaagcaggccataaaatgaaatggcttttatttcgacaaggtttgtattggccttcgatgttaaaagactgcatagaatttgctaaaggctgtcaggaatgccaaaagcatgcagggatacagcatgtacctgctagtgagttacactccataatcaaaccttggcctttcagaggatgggctttggacctaattggtgaaatcaagcctgcttcttctaagaaccagcgttatattatagttggtatcgattactttacaaaa

SEQ ID NO: 11451 - DNA, 1137 bp, Glycine max
  Gm_smallRNAprecursor_4284
ataggtaatgtggctcgaaaggtcaaatatagggctttaaattacgtgattgtgggaaatgatctgtttaaaaagactgcagaaggagtgttgttgaaatgtctaagtgaatcagaagcgtacttggcagtttcccatgttcacaatggggcttgtggatcacatcaagcaggccataaaatgaaatggcttttatttcgacaaggtttgtattggccttcgatgttaaaagactgcatagaatttgctaaaggctgtcaggaatgccaaaagcatgcagggatacagcatgtacctgctagtgagttacactccataatcaaaccttggcctttcagaggatgggctttggacctaattggtgaaatcaagcctgcttcttctaagaaccagcgttatattatagttggtatcgattactttacaaaatggatcgaagcagtccctttgccaaatgttgatcaggaagcagtaattagtttcattcaaaatcatattatttataggtatggtattcctgaaacaattaccactgatcaaggttcagtttttactggacgaaaaatgcaagaatttgccaaagaaactggctttcgattattaacctcaacaccatattacgcgcaagcaaatggtcaggtcgaagcagccaataagattgtaattaacttgattaaaaaacacattgcccaaaagccaagaaattggaataaaacgttagatcaagttctatgggcatgtagaaattctcctaaggaatcaactaatactaccccatttcgactgacttatgggcatgatgctgtacttccggtcgaaatacatttgcaatcagccagggtacaaaaacaaatggacattccaatcgaccattattggaaaatgatgtcagatgagttggttgatttagatgaggagagattaagagcattagaagttttgactaaacaaaaagaaagagttgctaaagcttataataagaaagtgaagtcaaaaacttttaatattggagatttagtttggaaggttatcctgcccatggatagtaaggatcgagccttgggcaaatggtccccaaattgggaaggaccgtttaaaataattcagatttattcgaatggtgcttatgaagtggag

SEQ ID NO: 11452 - DNA, 1086 bp, Glycine max
  Gm_smallRNAprecursor_4285
gtttctgaatcgagttagcagccttctcctggagttccttgcgtttggcctgctctgtcacaattttctgccttagatcatcgacctgaaacagcagatccgtaatagtttcctcccaggaggagatgttatcatcacagtctttgatctcagaagatccttctttcgcctctttggtgagacgttcgacttcatgttgagcagctcgggctttctcgagcagaaggatatgtgcctgtttctgggcatctagtcttgcgccattttcgcgttttttctgcacagtacttgcaaattggtcaatgatggcctcgatttggataactttgcctagaatctcatcagaggtaagggggttgtgcaatttcttcaaaaagttcaggtgcccaaaggcagcagaggggttctcttcaatggatttaagcacatctttccgtgcgtattccatggataacttcaagagcagagaatcttggcgtactgaagagtttatttcagcatcagatgaggacgaagcaccaggaatcttttcacttgaggtgttggcttgacttgtgttcagcaggagtcgaagggctgcagcagggtcttcgtcttgcatttgaatgaatgtatcttctgcgatccctatgctagcggaaagcttagatgttgaagacactgggtaaatgtccgaacctccagcttcagcctcttttatggcgtcttcatcaaaaaagttttcttcagatgaacttttctgactcgattcatgaggagtggtattatctgactggttcggctcatgagggtcatcgacctctgcccaaccatgaggacgactggatccaatgccttgaccttcaccccattcctcaacattcactgcatccgcctcaggagcgggagaggttcgcgcacatgagggtatttcttctgcagaaacattttgttgcacctgattcgaattgtcatggaaaaaaggttaacaaatagtttcgtataagctatgattaaaatcacattaagagaatgatacctcgacggcaggttgttcttgtgataagttcggttgctcgacagggttgcccatctcagcaatagaag

SEQ ID NO: 11453 - DNA, 1132 bp, Glycine max
  Gm_smallRNAprecursor_4286
ggtgttgaccactttggttccgactttgcaatggctcaaaggaaaacccattttcctagtaagaaacttttatcatactatttttttttatgtattagtgatttagtgttataattcagaattctaagttatgctcttggttggtaattggtattgcagcatattggtggcgaatgtttgggtcacaaactccaaatttgcagaagctagctattaagattttgagtttgacttgcagtgcttcaggatgtgaaagaaattggagtgtgtttgagcaagtaattgtgacaaaactctaactatactttttaattttatttaattttgattatcaagttatatttggagtatatttgagattgaaatcaacatttatttgttatgttgtagattcattccaaaaaaagaaataggcttgagcacaagaggttgcatgatttggtgtttgtcaaatacaaccaacaattgaagcaaagatataatgcaagagatgaaattgatccaatttctcttaatgatattgatgtatgcaatgaatggctcgtgggagagatggatcaagatgatgataatgatgctggaaatgatttggtatttgaagatgatgatgctctaaattgggcaactgtgtatcaggcttcgggggttggagagtgtaggatgtatactaggcggaaaaagcaaaaaacaagtgttgctgctgcccaaacttctaaaaaacaggcaatggttgttggatcttcatcaaggaagcaaaaagcagtccaagaaaatgatgagggtctagatgttgaggagaatattgatgttgaatctgaagaagaagaaatcatggtcaattttgaagctatgatggggaagagggagagggagatgctccattaccatatgataacatcgaagatgattatgttgggattggagaagatgattagagcctcaaccttcactttgcactttgcattatgtttttatcattttcttattttgaactctttaatgagtttatttggtgttggtacttgattattgtatgaactcatgaaacttttttagtttatttgaatgcaatcctttgtttttttcaatttcaattagtttatatatatgtttttttttgtccaccatgaca

SEQ ID NO: 11454 - DNA, 1092 bp, Glycine max
  Gm_smallRNAprecursor_4287
agtttgacttgcagtgcttcaggatgtgaaagaaattggagtgtgtttgagcaagtaattgtgacaaaactctaactatactttttaattttatttaattttgattatcaagttatatttggagtatatttgagattgaaatcaacatttatttgttatgttgtagattcattccaaaaaaagaaataggcttgagcacaagaggttgcatgatttggtgtttgtcaaatacaaccaacaattgaagcaaagatataatgcaagagatgaaattgatccaatttctcttaatgatattgatgtatgcaatgaatggctcgtgggagagatggatcaagatgatgataatgatgctggaaatgatttggtatttgaagatgatgatgctctaaattgggcaactgtgtatcaggcttcgggggttggagagtgtaggatgtatactaggcggaaaaagcaaaaaacaagtgttgctgctgcccaaacttctaaaaaacaggcaatggttgttggatcttcatcaaggaagcaaaaagcagtccaagaaaatgatgagggtctagatgttgaggagaatattgatgttgaatctgaagaagaagaaatcatggtcaattttgaagctatgatggggaagagggagagggagatgctccattaccatatgataacatcgaagatgattatgttgggattggagaagatgattagagcctcaaccttcactttgcactttgcattatgtttttatcattttcttattttgaactctttaatgagtttatttggtgttggtacttgattattgtatgaactcatgaaacttttttagtttatttgaatgcaatcctttgtttttttcaatttcaattagtttatatatatgtttttttttgtccaccatgacatccgccattttccgctacgccatccgccatatttttatggcggatttttgactttccgccatgaaccgtcatccgccattaacaacattggtcaaaattaatgtaacctatcatatatttgtggcaaaatgacatcatgggattccttttataaacttattttcaaaaggggtctctttttaaa

SEQ ID NO: 11455 - DNA, 1092 bp, Glycine max; identical to SEQ ID NO: 11454
  Gm_smallRNAprecursor_4288

SEQ ID NO: 11456 - DNA, 1082 bp, Glycine max
  Gm_smallRNAprecursor_4289
taagtactaatgtgagaggaccatttaaggggacaaggcatctctcttatcatataagcttatggagagacacaacaagagactctgttaaatgtagacagaataacagcccaacacaccaaatcttggacaaagcatcttaggctccttatactaggtaatatttattttcgtgtgtttgaattgatagggaatggggtctacattcaacaaaaaatatcttagtcttctcggatgattcatttggcaaatctacattgacaagtataaataaatatatttataaaaacaaaatgataattgaaatagtagtctttattaacataagcactactagtttgtttctctttacaacaaaaggcctcaaactcaaacctacccactttgcctcacatatcaacaaatattcaacaccctcaagagagagagagggttttgaaccaattccttcatcagaagaatgagagattttggttattccactacaactagaggaggcatccaaagggatcgcattgatcccaaatccaagcttcaatgttcttctatctttctcactcaaaatattaattttatttgggatcatgctatccctttggatttctcctttagtggcttctataatgatgactctcatggattctgcttgctagctgcaccacaacataaaaacttccatatacgcctctcaattaacactactacactactaatgcattatgtggctgaaggagaatcacataactcatttctgtaattccatattcttttccttttaattgaaacccttttagctcttacacacttgccttgtctatttccttagctctaaacaattttcttttctaatttctaatgcttactttagaaactacaaattataaaccttcaacttgattttgaaaactgaaaccactaaatcaatataactattatcagcatcacaaagttgaacttcaggatgacgcaagctatcaaccactaccagcagcattcgcaaaggtactaaaatcccaaatcccaataacctgtcaaaataccacacatatttttatttcctgttgtcaaaactactgttgttt

SEQ ID NO: 11457 - DNA, 1082 bp, Glycine max; identical to SEQ ID NO: 11456
  Gm_smallRNAprecursor_4290

SEQ ID NO: 11458 - DNA, 1116 bp, Glycine max
  Gm_smallRNAprecursor_4291
ttcataacccccacgagacaatacgtggggggcagtgttttgcttctgggaggcctgtgccttttttcgtacatcctgcaaaagtttaacattaatgaaaatgattattacaataaattataagaaatgattttgttgtggaaaacaactaaaatgacaaagtacatacctcccatgaggggtctctacgggtctgacaaaactgagtccatttctccttgctaatgccatatttttcacagacattgtcgtccgcaccgtccttgtcgactgcaagtgcccatttcctagtcaagtcagatttaaattgcctccagcgcttgccgacaatctgaagaattttcttctttgtcctattgtcagaagcttcagggatttgaaattccgcctgacaaacaataaattaggttttgttgtaagtaaataacaaatttagactattaaagaaaatcaacgaagaaaactcaaatacctgaatatcctcccatatcaaatccttctgagcagtagggacttccttccaggtgtcatatgtcacgtcgaccttatcacgagcgacaatccccaaatatgttcttaatttcttcttgtagggaccgtcggccttgccggtagcaggatcgacgttgaccacaggtctttctgccccaggtggtctagtggccaatgatcgtagccgtgtcgccttgcgtgtccgcttcaacgtaaatggagacacatcagcgtttgcaggaggaggaggaagaggaggaggaggcgaggcaggtggagtatccatggtcctttaaagaaaaaaagttgagttagttaatattatcaaaaaacactgtatgagttatgtaaatgaatgtaccgaaatgaaatattatattagaaaattacgttagacgatgttaattaattctccttcatcatgatcattacgattagcatgaacatcgtcagcttcttcttctccaacgttgttagaagtcatttgtgtagacaaaggactaacataagtgtccatgtatgaatcatcatcttctacattaacaccaattgttttcccgtttagaaccacagaccacctttcatcacaagggtcttgcacataaaatacttgcttagcttgtt

SEQ ID NO: 11459 - DNA, 1187 bp, Glycine max
  Gm_smallRNAprecursor_4292
ggcagaatgacgaccatttgccagtgtccgctgcagtagagacgaatatgggttattgtagtagtatagattatttaaattcaattattgtgtttgacttacccattcaggtagactccaaggtaaacatctcgttttgaactctgtatccaactcttgatgtaactttcagattcaaattgtgattgcccagatctctgaatggactgtggctcgaggaatccatacacatcagaattccccgctcgcacacttgtctcagtcagatggctgtgttgttaagtcaaagttaattatgtatgaatttaaaacaattactttggtaattaatagtaatctaaaatgacttacagaatccacaactgtataatagatatgctgagacattgaccaccgtgtgcaatttcagagagatcttcgtgctttatatagaacgggaagttttgattaaacaccccgaatatggtagcatcccacataacctggagcggcttcaaaaacagttgtgggatggtcaatgtcatcaggtacaggggatcatcgacctcttcatccgggctttctggaggttttgctggagacacagctggctgttgataaaacatagttaattagcaagttttgattacagtgaacaaattaattgaaaaaaataaacatataatcatagtaaaatacctgttctgataaacgcttcacaagatgtgttggccaagcaaggaaggtgttaagtgtctgccccactaaggtaacctcgtcaatgggtacaggaacgagagcctctgcatctttaacctcctcaacaccaaccttgacttggccatgcaacaaagggatgttgtgaactgttgtggatccctcataaagtcttcctagggcaaccaggcaggaaggattttcttcaatatatagtccgcatttgtctgagtcacccatccctggatcgttccctgagggagcaacacaactctcctttgtgctgacacgaggacctgagggaccaacctctggctctggaggtagtgcaagtccctgtgattgcatctgagactggaaccgggactgcatctggctgaaggattccatcatctttcgagtcactttttctgtgattgactcctccagttggtctctgatttgttgggtcagctgttctaggtcttcaggaggcatggaggaaaaagtgc

SEQ ID NO: 11460 - DNA, 1165 bp, Glycine max
  Gm_smallRNAprecursor_4293
ctttcgaaaacgggccccgacggatgctgagaaacgtgaggaactagaaccagagaagcagcacgcaaaccgaggtaggattttagcattcaaaaggtcaaacttttctctccttgtggctgagtatgaagtcacctcaaagggaagaggtgggcccctttttgttccactcaaaatggaacaagtggcaagtgctttatgagaagaaaaaaaataggaaaaagaaaatcatttttcttaaaaagccactttctctctcttccttcagcagaaaattcagaagctcttcttctcactcccacgttgcttttcttctccctttcttctccacctttgttctccattaaagctccaaactttgttcatcatttctactccaaattgcaaaaggaagccattttcggagtcgtgaagcgcacctctacgttgtgggacttcgaatttcaggtatgggtggacttcttctcacatgaatttcgtgggtattgggtttttgggagatatgatgggtagttctactaggtttatgccttatggtagttatttgtgaagaaatttgttgaaagcatgctaaacttgacatgtttgatgtgagtcaaatttacccattctgttttagggttttatgatgatgctttgtgatgtttgtgtgctgaaattgttggtagaaaactggtagagatgatggggagagttaacctagggttaaatgtgaaaatggtagtgatgtgagtggaaaagtgtgaggttttgagggtttgaaaagctaaatttggggttagtggtaattggaggctaaagtgagttgatcctagtttaaaatgtcaattaggacttgtagcaaagcttgggcagagcaaatgagaaaaatgagtgaccaaggtgaaagcaagagccatttctagggtaaattgggtgttgaggggtcaaattttgaatcggtggagttttcgccgtaaaaccagtttgagcaagtttaaattaatgttatagaattgtttgagatgagagtttactccaaaattaccccattctcattttcacttctcaaaccttgaaaatccactaaattgatgggttttagatacctagattttgaattgccttggtctgaagcttgtttttggtttaaatatgatttatacatgatttaggacttgtagga

SEQ ID NO: 11461 - DNA, 1131 bp, Glycine max
  Gm_smallRNAprecursor_4294
cggaaaatgacggatgtcatggcggacaaaaaaaaaatacatatatataaactcattgaaattgaaaaaaacaaaggattgcattcaaataaactaaaaaagtttcatgagttcatataataatcaagtaccaataccaaataaactcattaaagagttcaaaataagaaaatgataaaaacataatgcaaagtgcaaagtgaaggttgaggctctaatcatcttctccaatcccaacataatcatcttcattgttatcacatggtaatggagcatctccctctccctcttccccatcagacgccttaaaattgaccatgatttcttcttcttcaaattcaacatcaatattctcctcaaaatctagatcctcatcattttcttggactgctttttgcttccttgatgaagatccaacaaccattgcctgttttttagaagtttgggcagcagcaacacttgttttttgctttttccgcctagtatacttcctacactctccaacccccgaagcctgatacacagttgccaaatttagagcatcatcatcttcaaataccaaatcatttccagcatcattatcatcatcttgatccatctctcccacgagccattcattgtacacatcaatatcattaagagaaattggatcaatttcatctcttgcattatatctttgcttcaattgttggttgtatttgacaaacaccaaatcatggagcctcttgtgctcaagcctatttctttttttggaatgaatctacaacataacaaataaatgttgatttcaatctcaaatatactccaaataaaacttgatcatcaaaattaaataaaattaaaaagtatagttagagttttgtcacaattacttgcccaaacacactccaatttctttcacatcctgaagcactgcaagtcaaactcaaaattttaatagctagcttctgcaaatttggagtttgtgacccaaacattcgccaccaatatgctgcaatacaaattaccagccaagagcataacttagaattctgaattataacactaatacataaaaaaaaaagtatgataagtttcttactaggagaatgggttttcttttgagccattgcaaagtcggaaccaaagtgg

SEQ ID NO: 11462 - DNA, 1101 bp, Glycine max
  Gm_smallRNAprecursor_4295
tgcattcctttgtgcccaatccttcacaagcgaaccaaccttgaggacctctgtgatcaaaactgattttcttggctggtcagagtgcataggccatgctgctgttgcacccccgtggttatgctctctaagcaagaattctatctacaatgactcataaaatcccctgttgaagtgtggttcagaatttccaattggggagcccagtctctgattagtagccctatgcctttaactctttcctcaaacccatttggaagctcatgccattttgcttcatttccatcgaagatgtctcctttatcagcatctctcagcacctagatgaatttctgcttgctttgttccaacccagttgcaatttctttaatttgttcctctttaaaacttgtggtcccaaaagacacatatatgactgaaattagctcttgtttatcaagccactccatgcatatgtgccttcctttggagtttttcttctcaactatgaagcacagacaccgacacggacaccggacacgacacggatacggacacgtggacacctgtaatgtccaaaatatagaacgtaatacgggtgttgtgtcggtgtcggacgctgacacggacgcgtgtcggacactgacacggacgcgtgtcggacaccgaacacgacaaagggctgaagtgtccgtgcttcatagcttctcaatggttgaagtgttgaatgaccccagtgcccaagttttcgtcaccactgatgcgatccatgaagtcaatgtaagcaccttcgatttccctgattgtgttgtagatgttgccatcattgaatttgaggaaattactttgtgcaatcaggaaatccatgaattgggttgtggagcatccttccagagaaggaatttcagggacacacaagctttcaaccaagggccttcccattagctcccaaaaataaacggaggtggtaaaggcacatgtgctgcgaaaagtgtagttctcaacatttggcatgtttgtggcatcttgtgccgctgatgccattacagaatcatggatgataatgacccttttggcttgagatgaaagggattgaagaaggttcctcacaggttcacgaag

SEQ ID NO: 11463 - DNA, 1101 bp, Glycine max; identical to SEQ ID NO: 11462
  Gm_smallRNAprecursor_4296

SEQ ID NO: 11464 - DNA, 1124 bp, Glycine max
  Gm_smallRNAprecursor_4297
tgcattcctttgtgcccaatccttcacaagcgaaccaaccttgaggacctctgtgatcaaaactgattttcttggctggtcagagtgcataggccatgctgctgttgcacccccgtggttatgctctctaagcaagaattctatctacaatgactcataaaatcccctgttgaagtgtggttcagaatttccaattggggagcccagtctctgattagtagccctatgcctttaactctttcctcaaacccatttggaagctcatgccattttgcttcatttccatcgaagatgtctcctttatcagcatctctcagcacctagatgaatttctgcttgctttgttccaacccagttgcaatttctttaatttgttcctctttaaaacttgtggtcccaaaagacacatatatgactgaaattagctcttgtttatcaagccactccatgcatatgtgccttcctttggagtttttcttctcaactatgaagcacagacaccgacacggacaccggacacgacacggatacggacacgtggacacctgtaatgtccaaaatatagaacgtaatacgggtgttgtgtcggtgtcggacgctgacacggacgcgtgtcggacactgacacggacgcgtgtcggacaccgaacacgacaaagggctgaagtgtccgtgcttcatagcttctcaatggttgaagtgttgaatgaccccagtgcccaagttttcgtcaccactgatgcgatccatgaagtcaatgtaagcaccttcgatttccctgattgtgttgtagatgttgccatcattgaatttgaggaaattactttgtgcaatcaggaaatccatgaattgggttgtggagcatccttccagagaaggaatttcagggacacacaagctttcaaccaagggccttcccattagctcccaaaaataaacggaggtggtaaaggcacatgtgctgcgaaaagtgtagttctcaacatttggcatgtttgtggcatcttgtgccgctgatgccattacagaatcatggatgataatgacccttttggcttgagatgaaagggattgaagaaggttcctcacaggttcacgaagatgcgaagaggccaaatggaggg

SEQ ID NO: 11465 - DNA, 1124 bp, Glycine max; identical to SEQ ID NO: 11464
  Gm_smallRNAprecursor_4298

SEQ ID NO: 11466 - DNA, 1116 bp, Glycine max
  Gm_smallRNAprecursor_4299
gcccaatccttcacaagcgaaccaaccttgaggacctctgtgatcaaaactgattttcttggctggtcagagtgcataggccatgctgctgttgcacccccgtggttatgctctctaagcaagaattctatctacaatgactcataaaatcccctgttgaagtgtggttcagaatttccaattggggagcccagtctctgattagtagccctatgcctttaactctttcctcaaacccatttggaagctcatgccattttgcttcatttccatcgaagatgtctcctttatcagcatctctcagcacctagatgaatttctgcttgctttgttccaacccagttgcaatttctttaatttgttcctctttaaaacttgtggtcccaaaagacacatatatgactgaaattagctcttgtttatcaagccactccatgcatatgtgccttcctttggagtttttcttctcaactatgaagcacagacaccgacacggacaccggacacgacacggatacggacacgtggacacctgtaatgtccaaaatatagaacgtaatacgggtgttgtgtcggtgtcggacgctgacacggacgcgtgtcggacactgacacggacgcgtgtcggacaccgaacacgacaaagggctgaagtgtccgtgcttcatagcttctcaatggttgaagtgttgaatgaccccagtgcccaagttttcgtcaccactgatgcgatccatgaagtcaatgtaagcaccttcgatttccctgattgtgttgtagatgttgccatcattgaatttgaggaaattactttgtgcaatcaggaaatccatgaattgggttgtggagcatccttccagagaaggaatttcagggacacacaagctttcaaccaagggccttcccattagctcccaaaaataaacggaggtggtaaaggcacatgtgctgcgaaaagtgtagttctcaacatttggcatgtttgtggcatcttgtgccgctgatgccattacagaatcatggatgataatgacccttttggcttgagatgaaagggattgaagaaggttcctcacaggttcacgaagatgcgaagaggccaaatggagggaacta

SEQ ID NO: 11467 - DNA, 1105 bp, Glycine max
  Gm_smallRNAprecursor_4300
cacaagcgaaccaaccttgaggacctctgtgatcaaaactgattttcttggctggtcagagtgcataggccatgctgctgttgcacccccgtggttatgctctctaagcaagaattctatctacaatgactcataaaatcccctgttgaagtgtggttcagaatttccaattggggagcccagtctctgattagtagccctatgcctttaactctttcctcaaacccatttggaagctcatgccattttgcttcatttccatcgaagatgtctcctttatcagcatctctcagcacctagatgaatttctgcttgctttgttccaacccagttgcaatttctttaatttgttcctctttaaaacttgtggtcccaaaagacacatatatgactgaaattagctcttgtttatcaagccactccatgcatatgtgccttcctttggagtttttcttctcaactatgaagcacagacaccgacacggacaccggacacgacacggatacggacacgtggacacctgtaatgtccaaaatatagaacgtaatacgggtgttgtgtcggtgtcggacgctgacacggacgcgtgtcggacactgacacggacgcgtgtcggacaccgaacacgacaaagggctgaagtgtccgtgcttcatagcttctcaatggttgaagtgttgaatgaccccagtgcccaagttttcgtcaccactgatgcgatccatgaagtcaatgtaagcaccttcgatttccctgattgtgttgtagatgttgccatcattgaatttgaggaaattactttgtgcaatcaggaaatccatgaattgggttgtggagcatccttccagagaaggaatttcagggacacacaagctttcaaccaagggccttcccattagctcccaaaaataaacggaggtggtaaaggcacatgtgctgcgaaaagtgtagttctcaacatttggcatgtttgtggcatcttgtgccgctgatgccattacagaatcatggatgataatgacccttttggcttgagatgaaagggattgaagaaggttcctcacaggttcacgaagatgcgaagaggccaaatggagggaacta

SEQ ID NO: 11468 - DNA, 1158 bp, Glycine max
  Gm_smallRNAprecursor_4301
gtagtattgtccggaattacaaattaattacatacagacggttttgtgaccgaaattacaatttatctaaacaaataccaaaacaatcatcttcgttttggtaaaaagggtcttcttcttcttcagcagagcttgtttcttccttctttgaggatgaaccttcttcctcttgctgtaacatttgctaaacttccttaaggtttttagttaggatctctttcgattttgatcctgctaaaaatgctgccagatgagacttttggtttaaaaacacaaaagtttctggatcagctgctttgaggaattttggatgggattggaaccagagtttcacttgttctggatctgctttggatgagtcgaattgagcccaccattttacaaatgcatgtctttgcagtgatggatattggtttttttttcagtcatactataacgatattgccatgagaaaatccatgacagagcaaaactggaaaaatgtttgagatctgctggaattcgtgattcctgagaattgtattgtttttcaaattgagcaaatccttgttggactgtttccgggaatatctctggaattggaccaaagaaatcccaccattgtaaaaacgaatttggaaaattataaattgtgttggttttgaaatatatcaaccatgaatgcttgaagcgggtattttagttccaaaaaaccttagtccaagcatcaatataatcccaataggtataacctactgggtcaaatggtactgaaaatctctttcctttatttaagtccgaaccaaaatgtcttggttgaagaacttttagtatttggattgttgagtgggtgttcaatgtttgatcttttgggtctttgaaatgtttaatagacacttaatttgagtctaccaaaatcaattcgtagaaagtccttgacttctggatggtagttggtttgaagtgaaatcctgacgggaaagccttagctgttgccttaaatgggtttttgtcccaaaattcaagttccatctgcaaaacagttgaaaatttatttttataaatataattgttagtttgtttggtaggtggtgtttgtattttggctaggggtagtttccctttaggattagaggctgttttggtcattgatgtattttggatcattgtttgttaatt

SEQ ID NO: 11469 - DNA, 1181 bp, Glycine max
  Gm_smallRNAprecursor_4302
ttacaaattaattacatacagacggttttgtgaccgaaattacaatttatctaaacaaataccaaaacaatcatcttcgttttggtaaaaagggtcttcttcttcttcagcagagcttgtttcttccttctttgaggatgaaccttcttcctcttgctgtaacatttgctaaacttccttaaggtttttagttaggatctctttcgattttgatcctgctaaaaatgctgccagatgagacttttggtttaaaaacacaaaagtttctggatcagctgctttgaggaattttggatgggattggaaccagagtttcacttgttctggatctgctttggatgagtcgaattgagcccaccattttacaaatgcatgtctttgcagtgatggatattggtttttttttcagtcatactataacgatattgccatgagaaaatccatgacagagcaaaactggaaaaatgtttgagatctgctggaattcgtgattcctgagaattgtattgtttttcaaattgagcaaatccttgttggactgtttccgggaatatctctggaattggaccaaagaaatcccaccattgtaaaaacgaatttggaaaattataaattgtgttggttttgaaatatatcaaccatgaatgcttgaagcgggtattttagttccaaaaaaccttagtccaagcatcaatataatcccaataggtataacctactgggtcaaatggtactgaaaatctctttcctttatttaagtccgaaccaaaatgtcttggttgaagaacttttagtatttggattgttgagtgggtgttcaatgtttgatcttttgggtctttgaaatgtttaatagacacttaatttgagtctaccaaaatcaattcgtagaaagtccttgacttctggatggtagttggtttgaagtgaaatcctgacgggaaagccttagctgttgccttaaatgggtttttgtcccaaaattcaagttccatctgcaaaacagttgaaaatttatttttataaatataattgttagtttgtttggtaggtggtgtttgtattttggctaggggtagtttccctttaggattagaggctgttttggtcattgatgtattttggatcattgtttgttaatttgattcagaatcatcgtcgaattctgaggcaataactgc

SEQ ID NO: 11470 - DNA, 1162 bp, Glycine max
  Gm_smallRNAprecursor_4303
gacggttttgtgaccgaaattacaatttatctaaacaaataccaaaacaatcatcttcgttttggtaaaaagggtcttcttcttcttcagcagagcttgtttcttccttctttgaggatgaaccttcttcctcttgctgtaacatttgctaaacttccttaaggtttttagttaggatctctttcgattttgatcctgctaaaaatgctgccagatgagacttttggtttaaaaacacaaaagtttctggatcagctgctttgaggaattttggatgggattggaaccagagtttcacttgttctggatctgctttggatgagtcgaattgagcccaccattttacaaatgcatgtctttgcagtgatggatattggtttttttttcagtcatactataacgatattgccatgagaaaatccatgacagagcaaaactggaaaaatgtttgagatctgctggaattcgtgattcctgagaattgtattgtttttcaaattgagcaaatccttgttggactgtttccgggaatatctctggaattggaccaaagaaatcccaccattgtaaaaacgaatttggaaaattataaattgtgttggttttgaaatatatcaaccatgaatgcttgaagcgggtattttagttccaaaaaaccttagtccaagcatcaatataatcccaataggtataacctactgggtcaaatggtactgaaaatctctttcctttatttaagtccgaaccaaaatgtcttggttgaagaacttttagtatttggattgttgagtgggtgttcaatgtttgatcttttgggtctttgaaatgtttaatagacacttaatttgagtctaccaaaatcaattcgtagaaagtccttgacttctggatggtagttggtttgaagtgaaatcctgacgggaaagccttagctgttgccttaaatgggtttttgtcccaaaattcaagttccatctgcaaaacagttgaaaatttatttttataaatataattgttagtttgtttggtaggtggtgtttgtattttggctaggggtagtttccctttaggattagaggctgttttggtcattgatgtattttggatcattgtttgttaatttgattcagaatcatcgtcgaattctgaggcaataactgcc

SEQ ID NO: 11471 - DNA, 1160 bp, Glycine max
  Gm_smallRNAprecursor_4304
acggttttgtgaccgaaattacaatttatctaaacaaataccaaaacaatcatcttcgttttggtaaaaagggtcttcttcttcttcagcagagcttgtttcttccttctttgaggatgaaccttcttcctcttgctgtaacatttgctaaacttccttaaggtttttagttaggatctctttcgattttgatcctgctaaaaatgctgccagatgagacttttggtttaaaaacacaaaagtttctggatcagctgctttgaggaattttggatgggattggaaccagagtttcacttgttctggatctgctttggatgagtcgaattgagcccaccattttacaaatgcatgtctttgcagtgatggatattggtttttttttcagtcatactataacgatattgccatgagaaaatccatgacagagcaaaactggaaaaatgtttgagatctgctggaattcgtgattcctgagaattgtattgtttttcaaattgagcaaatccttgttggactgtttccgggaatatctctggaattggaccaaagaaatcccaccattgtaaaaacgaatttggaaaattataaattgtgttggttttgaaatatatcaaccatgaatgcttgaagcgggtattttagttccaaaaaaccttagtccaagcatcaatataatcccaataggtataacctactgggtcaaatggtactgaaaatctctttcctttatttaagtccgaaccaaaatgtcttggttgaagaacttttagtatttggattgttgagtgggtgttcaatgtttgatcttttgggtctttgaaatgtttaatagacacttaatttgagtctaccaaaatcaattcgtagaaagtccttgacttctggatggtagttggtttgaagtgaaatcctgacgggaaagccttagctgttgccttaaatgggtttttgtcccaaaattcaagttccatctgcaaaacagttgaaaatttatttttataaatataattgttagtttgtttggtaggtggtgtttgtattttggctaggggtagtttccctttaggattagaggctgttttggtcattgatgtattttggatcattgtttgttaatttgattcagaatcatcgtcgaattctgaggcaataactgc

SEQ ID NO: 11472 - DNA, 1161 bp, Glycine max
  Gm_smallRNAprecursor_4305
acggttttgtgaccgaaattacaatttatctaaacaaataccaaaacaatcatcttcgttttggtaaaaagggtcttcttcttcttcagcagagcttgtttcttccttctttgaggatgaaccttcttcctcttgctgtaacatttgctaaacttccttaaggtttttagttaggatctctttcgattttgatcctgctaaaaatgctgccagatgagacttttggtttaaaaacacaaaagtttctggatcagctgctttgaggaattttggatgggattggaaccagagtttcacttgttctggatctgctttggatgagtcgaattgagcccaccattttacaaatgcatgtctttgcagtgatggatattggtttttttttcagtcatactataacgatattgccatgagaaaatccatgacagagcaaaactggaaaaatgtttgagatctgctggaattcgtgattcctgagaattgtattgtttttcaaattgagcaaatccttgttggactgtttccgggaatatctctggaattggaccaaagaaatcccaccattgtaaaaacgaatttggaaaattataaattgtgttggttttgaaatatatcaaccatgaatgcttgaagcgggtattttagttccaaaaaaccttagtccaagcatcaatataatcccaataggtataacctactgggtcaaatggtactgaaaatctctttcctttatttaagtccgaaccaaaatgtcttggttgaagaacttttagtatttggattgttgagtgggtgttcaatgtttgatcttttgggtctttgaaatgtttaatagacacttaatttgagtctaccaaaatcaattcgtagaaagtccttgacttctggatggtagttggtttgaagtgaaatcctgacgggaaagccttagctgttgccttaaatgggtttttgtcccaaaattcaagttccatctgcaaaacagttgaaaatttatttttataaatataattgttagtttgtttggtaggtggtgtttgtattttggctaggggtagtttccctttaggattagaggctgttttggtcattgatgtattttggatcattgtttgttaatttgattcagaatcatcgtcgaattctgaggcaataactgcc

SEQ ID NO: 11473 - DNA, 1063 bp, Glycine max
  Gm_smallRNAprecursor_4306
caatatcattttacacttcaattaaattgaagcaaaagatttagttttaacaattaaaaaatatatggtgtaatggggatctctaccccacgtattaatttttgggcttttaagccccattaatacttgggtgatgctagtgcaccagcattattatttgtgcacccaacaattttttaatcccctaaatatccctggtgtcttcttccttttgaagttggttgcagtgttattttttctcttacgcctccattgtttttttcttcgctttctccctctgttgttggttcgtgttggtttttcattgttgagagagttgccgcttgggtcgaggtgaaagtgttacgggtgatgattgttgcggtggttgtttcgtcgtcgtccgcatttaaggtacgccattatgctgcattttgctgggtgtgtgtgagttaatccgtatgtgcaagttataagtacggatcaagttaatccgtaagttaaaattacaaatacagatcaagttgatccgtatgactcatatggatcaactatgactcatacagatcaagtttattcatatgagtcatacggatcaacttgagtgaaggacattttaacccattcacttaaaatgttgggtgcaccagcaataatgccgggtgcacctagcatcacccttaatacttgttttaaacaaaaagccccattaataccaaaaataaaatagaattaaggagaccaaattggcattcaaactgacatagaaacaaagttcaattaatccttaaaattataatagtcatccattgcatttcatcctattatttgatacttgaaaacaaaccctaaatcacaagttcctcatttctttaattttgggtataaaataaagtcctcatttacaacgagggagaagaatgaatttacgaaattaaatatcatatctatatatcacatcacatgtatatacaaaaaaaaaaaaagatgctataagaggggacaatgaaatttggtaactagtgttctaggtcctttaattgcttttttaaaagtaaatgttcataccgcatcctttcaagcc

SEQ ID NO: 11474 - DNA, 1131 bp, Glycine max
  Gm_smallRNAprecursor_4307
ggaaaatgacggatgtcatggcggacaaaaaaaatacatatatataaactcattgaaattgaaacaaacaaaggattgcattcaaataaactaaaaaagtttaatgagtccatacaataatcaagtaccaacaccaaataaactcattaaagagttcaaaataagaaaatgataaaaacataatgcaaagtgcaaagtgaaggttgaggctctaatcatcttctccaatccctacataatcatcttcattgttatcatatggtaatggagcatctccctctcactcttccccatcagacgcctcgaaattgaccatgatttcttcttcttcagattcaagatcaatattctcctcaaaatctagatcttcatcattttcttgaactgctttttgcttccttgatgaagatccaacaaccattgcctgttttttagaagtttgggcagcagcaacacttgttgttttttgctttttccgcctagtatacatcctacactctccaacccccgaagcctgatacacagttgcgtaatttagagcatcatcatcttcaaataccacatcatttccagcatcattatcatcatcttgatccatctctcccacgagccattcattgcacacatcaatatcattaagagaaattggatcaatttcatctcttgcattatatctttgcttcaattgttggttgtatttgacaaacaccaaatcatgcaacctcttgtgctcaagcctatttctttttttggaatgaatctacaacataacaaataaatgttgattttaatctcaaatatactccaaataaaacttgatcatcaaaattaaataaaattaaaaagtatagttagagttttgtcacaattacttgctcaaacacactccaatttctttcacatcctgaagcactgcaagtcaaactcaaaattttaatagctaacttttgcaaatttggagtttgtgacccaaacattcgccaccaatatgctacaataccaattaccaaccaagagcataacttcaaagttagaattctgaattataacactaatacataaaaaaaatagtatggtatttgtatttgtcatatggtaaaagtttcttactaggagaatgagttttccttt

SEQ ID NO: 11475 - DNA, 1054 bp, Glycine max
  Gm_smallRNAprecursor_4308
taatttattgtttttcaagcggaatttgaaatccctgaagcttctgacagtaggacaaagaagaaaattcttcagattgtcggcaagcgctgaaggtagtttaaatctgacttgactaagaaatggacactttcaaccgtcaaggacggtgcgaacgacattgtctgtgaaaaatatggcattagcaaggagaaatggacctaattttgtcagacccacagagacccctcatgggaggtatgtactttgtcattttagttgttttccacaacaaaatcacttcttataatttattgtaataatcattttcattaatgttaaacttttgcaggatgtgcgaaaaaatgcacaggtctcccagaagcaaaacactgccctccacgtattgtctcgtgggggttatgaatatttagaagaaaagctcatggctgagaagacaaagaaaagattggaagaagctgcccagtctggaagcactgagggcatcattgaccctctatctcccatcagacgccacgtgaaatggaagatggctcgcacgaagaaaactggacagatgacgtctgaggcagcaaaggaaatagctgataggattgtaagtcatttttaattaataattgtaattatctttgtgtattttgtgaattccttagacaaatatgtgttcggtacaggattctttggacgagcaggcgtcacagggatcgttcgtcccccatggacgtcaggatatcctgactgctgctattgggtgaccagagcaccctggccgtgttcgtgctgttggagccggtgtcaccataaaacaatactttggatcggcttcacgaacgtcctgcagttcttcctccatgcctcctaaagacctagaacagttgacccaacaaatcagagaccaactagaggagtcaatcacagaaaaagtgactcgaaagatgatggcatccttcagccagatgcagtcccagtttcagtttcagatgcaatcacagggacttgcactacctccagagccagaggttggtccctcaggtcctcgtgtcagcacaaagga

SEQ ID NO: 11476 - DNA, 1037 bp, Glycine max
  Gm_smallRNAprecursor_4309
ttagtgggacagacacctaacaccttccttgcttggccaacacatcttatgaagcgtttatcagaacaagtattttactctgattatatgtttatttttttcaattaatttgttcactgtaataaaaaattactaattaactatgttttatcaacaggcaattgtgtctccagcaaaacctccagaaagcccgaatgaagaggtcgatgatcccctgtacctgatgacattgaccatcccacaactgtttttgaagcctctccaggttatgtgggatgctaccatattcggggtgtttaatcaaaacttcccattgtatataaagcacgaagatctctctgaaattgcacacggtggtcaatgtctcagcatatctgttatacagttgtggattctataaatcattttagattactattaattaccaaagtaattgttttaaattcatacataattaactttgacttaacaacacaaccatctgactgagacaagtgtgcgagcggggaattctgatgtgtatggattcctcgagccacagtccattcagagatctgggcaatcacaatttgaatctgaaagttacatcaagagttggatacagagttcagaacgagatgtttaccttggagcctacctgaatgggtaagtcaaacacaataattgaatttaaataatctatactactacaataacccatattcgtctctactgcagcggacactggcaaatgatcgtcattctacctaaggaaaacctagttgtttggttttgttctttacataacaggctagacaactaccttaagggaataattaacaggtcagtattgttttcaatacattttcattggcataactcaacaacatcaatattttaatgttcctcatattcaacactagtgctttgaaaggacttgatgatgctccacaaccgaaatccaaggctgttgctaggtggattgttgttaaggtacgtgatttaaataaaagttctacttatatatattttatgtgtgtgtacactaattgtagtta

SEQ ID NO: 11477 - DNA, 1188 bp, Glycine max
  Gm_smallRNAprecursor_4310
aggcagaatgacgaccatttgccagtgtccgctgtagtagagacaaatatggttattgtaatagtatagattatttaaattcagttattttctttgacttacccattcaggtaagctccaaggtagacatctcgttttgaactctgcatccaactcttgatgtaactttccgattcaaattgcgattgcccagatctctgaatggagtgtggctcgaggaatccatacacatcggaattccccgctcgcagacttgtctcagtcagatgcctgtgttgttaagacaaagttaattatgtatgaatttaaaacaattactttggcaattaacagtaatctaaattgacttacaaaatccacaactgtataatagatatgttgagacattgaccaccgtgtgcaatttcagagagatcttcgtgctttatgtacaacgggaagttttgattaaacaccccgaacatggtagcatcccacataacctggagaggcttcaaaaacagttgtgggatggtcaatgtcatcaggtacaggggatcatcgacctcatgatccgggctttctggaggttttgctggagacacaactgcttgttgatcaaacatagttaattaacaagttttgattacagtgaacaaatcaattgaaaaaaaagaaacatataatcagagtaaaatacctgttttgataaacgcttcacaagatgtgtcagccaagcaaggaaaatgttaagtgtctgccccactaaggtaacctcgtcaatgggtacaagaacgagagcctttgcatctttaacctcctcaacaccaaccttgacttggccatgcaacaaagggatgttgtgaactgctgtggatccctcataaagtcttcctatggcaaccaggcgggaaggattttcttcaatgtatagcccgcatttgtctgagtcacctgtctctagatcgttccccgagggagcaacacaactctcctttgtgctgacacgaggacctgagggaccaacctctggctctggaggcagtgcaagtccctgtgattgcatttgagactgaaactaggactgcatctggctgaaggatgccatcaactatcgagtcactttttctgtgatcgactcctcaagctggtccctgatttgttgggtcagctgttgtaggtcttcaggaggcatggaggaagaactgc

SEQ ID NO: 11478 - DNA, 1188 bp, Glycine max
  Gm_smallRNAprecursor_4311
ggtagaatgacgaccatttgccagtgtccactgcagtagagacgaatatagtttattgtagtagtatagattatttaaattcagttattgtgtttgacttacctattcagataggctccaaggtaaacatctcgttttgaactctgtatccaactcttgatgtaactttcggattcaaattgtgattgtccagatctctgaatggactgtggctcgaggaatccatacacatcagaattccccgctcgcacacttgtctcagtcagatggctgtgttgttaagtcaaagttaattatgtatgaatttaaaacaattactttggtaattaatagtaatctaaaatgacttacagaatccacaactgtataactgatatgctgagacattgaccaccatgtgcaatttcagagagatcttcgtgctttatatacaacgggaagttttgattaaacaccccgaatatggtagcatcccacataacctggagcggcttcaaaaacagttgtgggatggtcaatgtcatcaggtacaggggatcatcgacctcttcatccgggctttctggaggttttgctggagacacagctgcctattgataaaacatagttaattagcaagttttgattacagtgaacaaattaattgaaaaaaaagaaacatataatcagagtaaaatacctgttctgataaacgcttcacaagatgtgttggccaagcaaggaaagtgttaagtgcctgccccactaaggtaacctcggcagtgggtacaggaacgagagcctctgtatctttaacctcctcaacaccaaccttgacttggccatacaacaacgggatgttgtgaactgttgtggatccctcgtaaagtcttcctagggcaaccaagcgggaaggattttcttcaatatataggccgcatttgtctgagtcacccatccctggattgttccctgagggagcaacacaactctcctttgtactgacacgaggacctgagggaccaacctctggctctggaggtagtgcaattccctgtgattgcatctgacactgaaactgcgactgcatctggctgaaggattccatcatctttcgagtcactttttctgtgattgactcctccagttggtctctgatttgttgggtcagctgttctaggtcttcaagaggcatggaggaagaactgt

SEQ ID NO: 11479 - DNA, 1116 bp, Glycine max
  Gm_smallRNAprecursor_4312
ttcataacccccacgagacaatacgtggggggcagtgttttgcttctgggaggcctgtgccttttttcgtacatcctgcaaaagtttaacattaatgaaaatgattattacaataaattataagaaatgattttgttgtggaaaacaactaaaatgacaaagtacatacctcccatgaggagtctctacgggtctgacaaaaccgagtccatttctccttgctaatgccatatttttcacagacaatgtcgtccgcaccgtccttgtcgactgcaagtgcccatttcctagtcaagtcagatttaaattgcctccagcgctcgccgacaatctgaagaattttcttctttgtcctattgtcagaagcttcagggatttgaaattccgcctgacaaacaataaattaggttttgttgtaagtaaataacaaatttagactattaaagaaaatcaacgaagaaaactcaaatacctgaatatcctcccatatcaaatccttctgagcagtagggacttccttccaggtgtcatatgtcacgtcgaccttatcacgagcgacaatccccaaatatgttcttaatttcttcttgtagggaccgtcggccttgccggtagcaggatcgacgttgaccacaggtctttctgccccaggtggtctagtggccaatgatcgtagccgtgtcgccttgcgtgtccgcttcaacgtagatggagacgcatcagcgtttgcaggaggaggaggaagaggaggaggaggcgaggcaggtggagtatccatggtcctttaaagaaaaaaagttgagttagttaatattatcaaaaaacactgtatgagttatgtaaatgaatgtaccgaaatgaaatattatattagaaaattacgttagacgatgttaattaattctccttcatcatgatcattacgattagcatgaacatcgtcagcttcttcttctccaacgttgttagaagtcatttgtgtagacaaaggactaacataagtgtccatgtatgaatcatcatcttctacattaacaccaattgttttcccgtttagaaccacagaccacctttcatcacaagggtcttgcacataaaatacttgcttagcttgtt

SEQ ID NO: 11480 - DNA, 1054 bp, Glycine max
  Gm_smallRNAprecursor_4313
ttagaggaccaaattaacatcacttgtatcttgtataatcagttcatgataaagtattaaataggtattgactccttttttaatgatgtcattatgcaatttcctgttcttgtataattagttcattctttcattttttttccgttattaatgtttggcactgcattactgtttaattcagaatgtaaggtcaaattaccaccaagctgtgtcaaggtcagaacaagatcaaaactatagactataatgatccaacaagggtttgttcttacgaggctggccagcaagtcttccttggccaaccagaagtatacttgtatataaggtgttgagggagaatacatatatttgagatcacatgcaggcttgcagccaattctttactggtatggtgggctgtactcaagtcttaactgttaaacatacattttgttcatggttatcaaactctcgatttaactcgttaactcttacgagtttacgagtccacttgtcctttgcgagttgactcttgagtaaactcttttttttagtagattctgagcaaactttataaactctaagtaaactcggtagactctcgagtttaccaccgagtcaacgagttagcaagttaaaaaaattagaccaaaatgtaagttattttttattgtttcttgtatgtttagcattcaacataccttcatttagtctgttattctcaaatataaaatcacctttaataatatcaaacccttgttcgctaataacatcaaaccttcgatgagaatgatttaccactactataacgtctgcaagttattatctagtagtgatatattattactagacttgattatttaaatattttgaactttataattcattgttttgttttattatattgttgaaatgcttaattagtatgttatttatagatattttattattatttttataagtagactcttacgagtctacgagttgagtccacgagtcaagtttatgaaactctcacgaatctgtataaactctcgagtttgataaccttgattttgtttacctttcaaaaagc

SEQ ID NO: 11481 - DNA, 1070 bp, Glycine max
  Gm_smallRNAprecursor_4314
gatttatttttcctcatttttcttccaaatttttctatatctcctggaggaagtcgttctgatcttccatcttgcttttctttgatttatttttcctccccgaactgctgaatgtttgagctgaggcattgttttagatgcagttgtgcttttgtaatggaaaacgatggttgcaaccctaagccattagtgttgattgctgataaagagagcctgtaatcgaggggaagaatgaaggaatcaggaaggaaggtagttgaaaacgtaagagagagaaaaaaagagaaaaaaaaaaaaaatagataccaaaagggtatcgtattatcgtatgattgagatgaatcttgccatgtataaaagtgatgggtgttgctaggtgtacccaacattattgctggtgtatcaagcatttttttaaaatatcaaaattgtctctgtattttttttgcatttatgatgggtgtgtgtgaggatgatccataaatcgtacgaatcaagttgatccgtaaggttgatacggatcaagttgatccgtaagacttctatggatcaagttgatccgtattgttccgtaaaagacttacagatcaagttgattcataaaaaacttacggatcaacttgatccgtaagtcttttacggatcaacttaaatgacttacgaatcaaggatattttcgttatttcaccttaaatgctggatgcaccgacaataatactaggtgcacctagcaacacccaaaagtgatccacatgaataatcaatattatctactttactttacaggactagtccaactccaagtaaacgttatctcaccaaaaaacggctagaagcatccttcacatccccaaatctaaaacaatgcaggtgcgtttggtatcgtaggttgagcagtgaaataaagttgactagtgtgggtccaatggtgaaattaattttgctctctccattggtggaataatttatttatttattttcactcttttcattgtaggcaaaaagtcacttttatcatttttttaaccttttcttttcggttatccgcactaagcatttcacaagggaga

SEQ ID NO: 11482 - DNA, 1037 bp, Glycine max
  Gm_smallRNAprecursor_4315
ccttagtggggcagacacttaacaccttccttgcttggccaacacatcttgtaaagcgtttatcagaacaggtattttactctgattatatgtttatttttttcaattaatttggtcaccataatcaaaacttgttaattaaccatgttctatcaacaaatagctgtctccagcaaaacctccagaaagcccagatgaagaggtcgatgatcccctatacctgatgacattgaccatcccacaactgtttttgaagccgctccaggttatgtgggatgctaccatattcggggtgtttaatcaaaacttgccgttgtatataaagtacaaagatctctctgaaattacacacggtggtcaatgtctcagcatatctattatacagttgttgattctgtaagtcattttagattactattaattaccaatgtaattgttttgaattcatacataattaactttgacttaacaacacaaccatttgactgagacaagtgtgcgagcggggaattctgatgtgtatggattcctcgagtcacagtccattcagagatctgggcaatcataatttgaatccgaaagttacatcaagagttggatacagagttcataacgagatgtttaccttggagcctacctgaatgggtaagtcaaacacaataattgaatttaaataatctatactactacaataacccatattcgtctctactgcaacggacactgacaaatgattgtcattctgcctaaggaaaacctagttgtctggttttgttctttatataacaggccagacaactaccttaagggaataattaacaggttagtattgttttcaatacattttcattgacataactcaacaacatcaatattttaatgttcctcatattcaatactagtgctttgaaaggacttgatgatactccacaaccgaaatccaaggctgctactaggtggattgttgttaaggtacgtgatttaaataaaagttctacttatatatattttatgtgtgtgtacactaattgtagtta

SEQ ID NO: 11483 - DNA, 1158 bp, Glycine max
  Gm_smallRNAprecursor_4316
cagtatcaatgacataattgtaatattagacatttcacacacgtaaattttccttcgtcgtcatgtccatcaaatattaaaattaagtctggcccgatcgatagtgacgtattatggatgcaagctaagcatgtttcagaacatgtttggaatggggaagaagaccacaaattacacatcagacgagttgtccccacttatcaaggggaagaagaaatatcagagcaaatttttcctttccttcgacaatctggtttttactggattatgaagatggaatacttaaaaataaatgtctcattaattagtgttttgatagaaagatagaggccgaaaacacatacgtttcacatgagatgcggagagtgtactattactcttcaaaacgtctctatattgttaggtctacgtgtggatggtttaccattaatcggtccaacaaatcttaattgggctgatttatgtgaggaattattgggagtcagaccacaagaaggtgaaattaaaggtagtgtggttaaattaagttggttggctcaccattttacacaaataaataaccacgacgacgaaaaacaagtaggaaggtttgcccgtgcatggatactaagattcattggaggtgtcttgttcattgacaaaagcagtaacgaagtttcgctaaggtaccttcaatttttatgtgactttggagactatagcacatatgtatggagacctgctgtacttgcttttctatacagagagatgtgcagtgctaccgattataaaactaaatcaatcggaggtatgtgcatcttactacaaatgtgggcatgggaacgatgtataactttggctccaaagatgactccttcccaagtagaaaataaaccactcgggcacaggttagtcatttttaaaagcgtctttcatttcaaaacaataaatgattttagggtatattaaattttaatctttgtaggtggctgcgacgtggaaatcaacatatcggcaatgatgatgtgagagtttttcgtcgcaagttggatattatgaaacgtcatgaggtaagaatatggtattgtatttgtaaaataaaaaataatatgtgttattttactaaaatgctgacaactatgttgttatatgcagtttgtgtgggagccttacacaaca

SEQ ID NO: 11484 - DNA, 1155 bp, Glycine max
  Gm_smallRNAprecursor_4317
gtatcaatgacataattgtaatattagacatttcacacacgtaaattttccttcgtcgtcatgtccatcaaatattaaaattaagtctggcccgatcgatagtgacgtattatggatgcaagctaagcatgtttcagaacatgtttggaatggggaagaagaccacaaattacacatcagacgagttgtccccacttatcaaggggaagaagaaatatcagagcaaatttttcctttccttcgacaatctggtttttactggattatgaagatggaatacttaaaaataaatgtctcattaattagtgttttgatagaaagatagaggccgaaaacacatacgtttcacatgagatgcggagagtgtactattactcttcaaaacgtctctatattgttaggtctacgtgtggatggtttaccattaatcggtccaacaaatcttaattgggctgatttatgtgaggaattattgggagtcagaccacaagaaggtgaaattaaaggtagtgtggttaaattaagttggttggctcaccattttacacaaataaataaccacgacgacgaaaaacaagtaggaaggtttgcccgtgcatggatactaagattcattggaggtgtcttgttcattgacaaaagcagtaacgaagtttcgctaaggtaccttcaatttttatgtgactttggagactatagcacatatgtatggagacctgctgtacttgcttttctatacagagagatgtgcagtgctaccgattataaaactaaatcaatcggaggtatgtgcatcttactacaaatgtgggcatgggaacgatgtataactttggctccaaagatgactccttcccaagtagaaaataaaccactcgggcacaggttagtcatttttaaaagcgtctttcatttcaaaacaataaatgattttagggtatattaaattttaatctttgtaggtggctgcgacgtggaaatcaacatatcggcaatgatgatgtgagagtttttcgtcgcaagttggatattatgaaacgtcatgaggtaagaatatggtattgtatttgtaaaataaaaaataatatgtgttattttactaaaatgctgacaactatgttgttatatgcagtttgtgtgggagccttacacaac

SEQ ID NO: 11485 - DNA, 1036 bp, Glycine max
  Gm_smallRNAprecursor_4318
agaccacaagaaggtgaaattaaaggtagtgtggttaaattaagttggttggctcaccattttacacaaataaataaccacgacgacgaaaaacaagtaggaaggtttgcccgtgcatggatactaagattcattggaggtgtcttgttcattgacaaaagcagtaacgaagtttcgctaaggtaccttcaatttttatgtgactttggagactatagcacatatgtatggagacctgctgtacttgcttttctatacagagagatgtgcagtgctaccgattataaaactaaatcaatcggaggtatgtgcatcttactacaaatgtgggcatgggaacgatgtataactttggctccaaagatgactccttcccaagtagaaaataaaccactcgggcacaggttagtcatttttaaaagcgtctttcatttcaaaacaataaatgattttagggtatattaaattttaatctttgtaggtggctgcgacgtggaaatcaacatatcggcaatgatgatgtgagagtttttcgtcgcaagttggatattatgaaacgtcatgaggtaagaatatggtattgtatttgtaaaataaaaaataatatgtgttattttactaaaatgctgacaactatgttgttatatgcagtttgtgtgggagccttacacaacaactgttatatcattgttgcctcccatttgtgtagtcggaagtgtcgcgtggtgcgcggtggtgccactaatttgttttcaagttattgagtggcaccaaccggatacagtattgagacaatttggaatgcagcaaccaattctagagtctcattcgcagcccttgaacattcatggcataacactcaaagggaaacatgacgaaaattgggggcaattgttcgccccaatgattgatcagtggaacaatcgtcatgtttttagggtcgacgcatatccccaacaagagggcctattgagctttaactccaactacatggtctggtataggcaaaagacaaagatgtttgttgacccacaaa

SEQ ID NO: 11486 - DNA, 1054 bp, Glycine max
  Gm_smallRNAprecursor_4319
aatagtttagggactagaactagtcaacgttttgttgcgagattaaaaacaaaaattatgaatagttgaaggattataaatatattttggcctaaaaatagtgaattcaaatttttgtttaataaaaactgaattttttaaaaatttaagggcattgaactgtcaaacaaaagtttataaattaaaaatcttaatgaaaaaaagttcagaaatcttgattagttaacatttaatttaaggactgaaaattcaattttgcaaaagtttagaaactaaatttttttagttaatattaaaacaattttgctacagcattgcgcatttgtccagtaatttgcaatatattagtgggcttacaatgctcaatttttttattgctgatgagtgctgctaggtgcactcaacattattgctagtgcacccaacactaaccatgaaaagatagaaataccccttacggatcaagttgatatgtaagttgatttttaagacttacggatcaagttgatccgtaagtcttttacggattaagttgatccgtaagttgatttttaagacttacggatcaacttgatcggcttaacgtttgtttggcttaaaaaaatgcttttaaaataggctgaaacaaattaaaagtgcattatgattcggattatgtgttctcttgggcattactgtttgattcaatttattcttgaaactaagtttccaattagtacaacttttacagataaaatattttttcccttcaaaatatcttgaaatttggttttagttcttataaaagcttaaatgtttttagctaacatttacaaaaagcaacgtatagttttagttcctatttacatactaaaaaattgtattaatgttaaatataagaactaaaatcatattaaataattcaataattgtattctcagaaatattatttttgtaaaaaaaatcaaatatgtaaaacaaaaggcatatttgacggttaaatttaatatctggagatggatcattaatatctcaaataaggtataagtgtattatgactcagattcatgtagtc

SEQ ID NO: 11487 - DNA, 1053 bp, Glycine max
  Gm_smallRNAprecursor_4320
atagtttagggactagaactagtcaacgttttgttgcgagattaaaaacaaaaattatgaatagttgaaggattataaatatattttggcctaaaaatagtgaattcaaatttttgtttaataaaaactgaattttttaaaaatttaagggcattgaactgtcaaacaaaagtttataaattaaaaatcttaatgaaaaaaagttcagaaatcttgattagttaacatttaatttaaggactgaaaattcaattttgcaaaagtttagaaactaaatttttttagttaatattaaaacaattttgctacagcattgcgcatttgtccagtaatttgcaatatattagtgggcttacaatgctcaatttttttattgctgatgagtgctgctaggtgcactcaacattattgctagtgcacccaacactaaccatgaaaagatagaaataccccttacggatcaagttgatatgtaagttgatttttaagacttacggatcaagttgatccgtaagtcttttacggattaagttgatccgtaagttgatttttaagacttacggatcaacttgatcggcttaacgtttgtttggcttaaaaaaatgcttttaaaataggctgaaacaaattaaaagtgcattatgattcggattatgtgttctcttgggcattactgtttgattcaatttattcttgaaactaagtttccaattagtacaacttttacagataaaatattttttcccttcaaaatatcttgaaatttggttttagttcttataaaagcttaaatgtttttagctaacatttacaaaaagcaacgtatagttttagttcctatttacatactaaaaaattgtattaatgttaaatataagaactaaaatcatattaaataattcaataattgtattctcagaaatattatttttgtaaaaaaaatcaaatatgtaaaacaaaaggcatatttgacggttaaatttaatatctggagatggatcattaatatctcaaataaggtataagtgtattatgactcagattcatgtagtc

SEQ ID NO: 11488 - DNA, 1176 bp, Glycine max
  Gm_smallRNAprecursor_4321
tacccttcatcgttagttagtaccattagttattttcgttattatactttttttaaactttttttattattatagtttgatgcgcgacataaactatatccattagtaagccttaataaatgagatacgatagattaagtgtcaaattcaaatgacaaatatacaacaacaaatttaaacagaggcatgaaaatcattgggtatgatgtcagtgatgacgtgaggatgtgccacatggtcgatcccatcttcgcgcttgaagatcaggatttcttctaccgcaatgtctccccgcttctacttgctcagcctcagcagaaaactcctgacgcaaatcaacacctaataagtcacccatatcaggtattgctccgggtatatttcattgcggagctaatgaggcgttaggtgttgccattggggcatcatgttgttgtgaaggggtcatagtcggccatgaaaaatgaggatgtgtttccgcaacaccatcgaacgaatgttcgcttgcaaacatatcagtgtgatgaccttcaaacggatactgatacatctgtgaaggattctgagaaaatgttggtggcgtgtaatacatttcatggccacgctcctcaatttgttaggaaaattattgcgcttcaacagcctcccttcgtctgtcaaaacctcgagtttcaacacttgactgaagcatgtgaaactcttgtggtggaaatcgacgctctgatgctagaccatgtgccacaggctcagtgattctctcttgctcttcagataaaatcgttatcttctccacataaggcacgagatcatcaactgtccatgtgttcctcccttgtggtgacaccatatactgtaatgtctccacaacttcagcctgcaattattaggatcaggaaattatgctttaaaaaataaattgaagttaaatattcaaaaagaaataaataccaatgtagctgtgtttgcattctttgggtcgacaaacatcttcgtttttcgcctataccagaccatgtagtcggagttaaaacttaataggccctcatgtcgaggataaatgtcgaccctaaactcagctcgattgttccattgactgatcattggggtcagcagctggaactaattttcatcttgtttgcctttcagcgttaggccatggatatttagtggtgcaaa

SEQ ID NO: 11489 - DNA, 1048 bp, Glycine max
  Gm_smallRNAprecursor_4322
acaaaactgagatatagataagtaatttatataagcatcacaacacagggttgatcaaccggtaagaataagattcagtgggccatgcatgtcaaattcagggtcaaatctagaataccagcatgattttttttctaatttgttttaactcagaacagaacgtgcaccactgtccaaaaacaggttattaatgatattggcgtaagaatatatgttatacgcactcacgaaatcttggtagaagagccgtaatctcagacactgatgatgagttgtgttgattgcttgtttaggtgatcatatatcatattttggtcataggtcattactcattaaagaatatgtccacttgaagactcaatgtcttaaactcacccagcaactctctcttgaggagcagagtgtataaatgcaccagcatatccctcggccactctcaactgtcagcacagcaatgcatgcatggttcactatattttttattggtggttaactcctgttggagaagcagggcacgtgcaactcacttctagttaatctgattttgcacgtgctccccttctccaacacgattttcctacctcattccacttttgtttggattttcctggaatgctgcccttcctagctaggttgttcgctgttgtcgaaccaaggttagcttatttatctgtcttgctccactggtgaccagtgcgtgtcttcatgtagaaagttgagagttgcattgcatgcattcgatttacactttatataggttgaaattgaatatgtttcactttttttttgttcttcttcttttgttggccatggcattctctccagaccaacacactaaattcctcgagatgcagaattttgtttaaaagagtggcctcttcttcacaatgacatgaaaatggaattcctgagcacaacaatattacactatgttggtaaacatatatatatatgcttcactttcagaaactgagatttgcatgtgaatgtgattctactgtgcagggtcacgtggaatgtactggcccaactccagattagaaacaga

SEQ ID NO: 11490 - DNA, 1134 bp, Glycine max
  Gm_smallRNAprecursor_4323
gtaattaaacaacacccccagatagtggcctaaacaacaccccacaccaacagatctgcacatgataccactagcaccattgtgccactgtgcacatgccatcccaccttggctacacccaaatctcgttgttaactacaacaacaaccataaagatccacacaagaccccaatctcatcacccttcacacttgttggacacagtcaccaaagccacataatcgacatgaccccccatttgggcatttcggagatgaggactgatgggttagtgcagtttggatgaggggaaggagagggggtgagaacaattaggtgagtgggcaaaagagaaattttacttaatttggtagttccaatagcaaagttgatagtaacaataacgacccccatttcaagggggtgttgctaggtgcacccaggattattgctggtgtatctaactcttaaaatgaaatgacgaaaatacctttaatctgtaagccttttaagttgatccgtaaaaggcttacggatcaagttgatctgtaagccttttacaaatcaacttgatttgtaagccttttatagaataacacgaattaacttgatccgtaaagatcaacttgatccgtaaaaggcttatggatcaagttgatctgtatgcttaatatcaacatacggatcaacttgatccttatcaaccttacggatcaacttgatccgtacgatttacggaccaccctcacgcacacccatcactaatgcgaaaaaaacgctaggacagttttggtattttttaaaaatgctgggtgcaccaacaataatgctaggtgcacctagcaacaccctttcaaggcccattccattcgtgtctgtttgcgagtctctagcgggttatgaagtcagaacccagctgagaaaagtaatgaaaaaaggttcagcccatctttatgaattgtaactttttttttggtatttaattaattgtaacttttgttgtgagtaaattttaatcagtttttagtacactttctgtcaggaaacggggaaaaaccgtagtgggtcactgaaaaaaatataaaaatacatagtggagaggctaataattcaattaagaagaatataataagaagaccacgacgaaccaaaaag

SEQ ID NO: 11491 - DNA, 1135 bp, Glycine max
  Gm_smallRNAprecursor_4324
ccagatagtggcctaaacaacaccccacaccaacagatctgcacatgataccactagcaccattgtgccactgtgcacatgccatcccaccttggctacacccaaatctcgttgttaactacaacaacaaccataaagatccacacaagaccccaatctcatcacccttcacacttgttggacacagtcaccaaagccacataatcgacatgaccccccatttgggcatttcggagatgaggactgatgggttagtgcagtttggatgaggggaaggagagggggtgagaacaattaggtgagtgggcaaaagagaaattttacttaatttggtagttccaatagcaaagttgatagtaacaataacgacccccatttcaagggggtgttgctaggtgcacccaggattattgctggtgtatctaactcttaaaatgaaatgacgaaaatacctttaatctgtaagccttttaagttgatccgtaaaaggcttacggatcaagttgatctgtaagccttttacaaatcaacttgatttgtaagccttttatagaataacacgaattaacttgatccgtaaagatcaacttgatccgtaaaaggcttatggatcaagttgatctgtatgcttaatatcaacatacggatcaacttgatccttatcaaccttacggatcaacttgatccgtacgatttacggaccaccctcacgcacacccatcactaatgcgaaaaaaacgctaggacagttttggtattttttaaaaatgctgggtgcaccaacaataatgctaggtgcacctagcaacaccctttcaaggcccattccattcgtgtctgtttgcgagtctctagcgggttatgaagtcagaacccagctgagaaaagtaatgaaaaaaggttcagcccatctttatgaattgtaactttttttttggtatttaattaattgtaacttttgttgtgagtaaattttaatcagtttttagtacactttctgtcaggaaacggggaaaaaccgtagtgggtcactgaaaaaaatataaaaatacatagtggagaggctaataattcaattaagaagaatataataagaagaccacgacgaaccaaaaagagcccgtgtttacggaca

SEQ ID NO: 11492 - DNA, 1110 bp, Glycine max
  Gm_smallRNAprecursor_4325
agtgcataaaaaatgattttttgttaaatgtagaaaattgcatactatcataatgactttcttattattttttaaatttttttcacttttgatgataaattcgataatccaatttgatctaaattgattatgattggattgaattggtttggaatgaattagagacccaaactaaacaaaattaaatccaaactgatcaaaccgattaaaattgatcggataaaaaaatgtcaagggttcaatgcgacttaacccatgcttgcccctaacacatataaccataaattcacttgtttaagtctttcagggttttgctaggtgcacctagcattattgctggtgcacccaacatttttctaaaataccaaaattgtccctatgcttttttcgcatttgtgatgggtgtgtgtgagggtggtccgtaaatcgtatggatcaagttgatctgtaaggttgatacggatcaagttgatccgtatgttgatatcaagcatacagatcaacttgatccgtaagacttctacgaatcaacttgatccatattgttccgtaaaaggcttacggatcaagttgatccgtaagacttctatggatcaagttgattcgtaaaaggcttacggattaagttgatccgtaaaaggtaagttgatccgtaagccttttacgaatcaacttaaatggcttacagatcaagggtattttcgtcattttaccttaagtgttgggtgcaccagcaataatgctaggtgcatctagcaacacccgtatcccaaatatgatactttctcaagtttcacttttgcttgggcattgctttatgcactcagcacaattgttggtacacccctcgttattagcacgatgttttaacaaactgagctaataggtcaattatgttataaaataattaatctcgctatatataacactaaaatttctaatatatatttaatgcacatgtaaatttagataataaattttgtgacaattagctttgatctaataattaatttgtttacatatataaatttttattatatccgtatgaggcttacggattaacccatccttatcaattttatggacgagtaaaattgaaattttgttgtt

SEQ ID NO: 11493 - DNA, 1037 bp, Glycine max
  Gm_smallRNAprecursor_4326
gctctttttatcccatactgtatttcttattttcccccaaaaaatacccctaacgaaaatgtgtttcttttatgcaatacacataacgaaaatgtattttcctttgtgttagggggagaggtcttttatatatatatatatatacatttttataataagggggtgaggtctttatgaacaacaaaaatatatttatgtcttgcctattgcataaagaaaatgtgatttcaatgtataatagtcaatagacacaaagaaaatacatacattttcattaacattattgtcaatattttttgacaggcagactctactatttttattttttttaaaaaaaagaccaaatagaataacaagaagacaagtcgtatccattatatcaaatagaaattagtatcattaaactaatcatgatagttctaaattagtctaataataattagtccatatcttacgaaaagtaaatataaatgagcaaattattacaatgagaaagagggcgaaccctggtgcagcggtaaagttgtgccttggtgacttgttggtcataggttcgaatccggaagctgcgtacaatatccctccctcataccttttcatagcgaagaacctaatgagactctagtaatatttactattttcctacatatctatctcctttagttgaaatgaattgaattattgtatgccgaccaaatatggtatttgttatgaacgagcttctccgctgcaatatcaatgccgttgtggtctaatacaaggtaagagagattcattctttaaataaacctataagaagacacaattaattattgagcgactcattttatgtcgtccaagttagggataaacagaattattgaggcaattcagttatatattttggttgggttcgtagccttggtataaataccgtgtccttttataaaaaaccaaaaaatactacaatataccgctttctataagagaggaaggataatccaatttggaaaagtagggaaataaacatgatgaatatggaaaatccaatttgtgta

SEQ ID NO: 11494 - DNA, 1046 bp, Glycine max
  Gm_smallRNAprecursor_4327
tacatgacccccaccccctcaaaaaaaagaaaaagaaaaaaatgtatagactaacacaaaaatacaaattaagaaaaaaaaaaaaaaaaaaagaagacagtgatctatcttccacatatgaaacaaaagagatgaaactggaaacaggaaaactagctacttagaactagagatggtccaaaatgtagcctaataaaaaaaacgtacaaaagagggagacaaaaaactaaaaaggaaccacatacttctaatatgcttttgctagctatacgtttgccatcttcccatcgctcttatctgtaagcaatcttcactcatcaacctcttgaagaagaaacgaggaacaacgacacaacatgtgtgtgtatatatacatacatagcctaagaaactaaacatgtatagatgaagatgataagctagctactacggtccgtggagggaagaagggtcatctatttgtatatatactctcttcattgttgtgcacctgcagcagttgaagctgccagcatgatctgagtttaccttctattggtaagaacagatcatgtggctgcttcacctgttgaatggaagcatatagaaaccctaatttgctttctgatcctcctcgagattttcatccggtttcatagaaccctaaaaaaggtttcttcaattcattcttgcatcttgtatttatacgatggatgtggatactatttcattgttgtttttcctctattctacttttcacataaatatatatctatatattcatgttttctggatggctgaatattgtatattcttatgttggctaaatctggagattctatttgaatcagcattcatgtttgcttgattcttgcaaaaagaaagaggaaaggatgctggaaatgttcacgattccagtgacagtaacgcactaacgcgtttcggtggtgcgttctcctaccttgaggttggggacacttagtttttaattattttcattagtcacctaatcaaaactgtttttttaagttcaattttttctgctgcatatctaattatgcattgat

SEQ ID NO: 11495 - DNA, 1046 bp, Glycine max; identical to SEQ ID NO: 11494
  Gm_smallRNAprecursor_4328

SEQ ID NO: 11496 - DNA, 1046 bp, Glycine max; identical to SEQ ID NO: 11494
  Gm_smallRNAprecursor_4329

SEQ ID NO: 11497 - DNA, 1047 bp, Glycine max
  Gm_smallRNAprecursor_4330
tacatgacccccaccccctcaaaaaaaagaaaaagaaaaaaatgtatagactaacacaaaaatacaaattaagaaaaaaaaaaaaaaaaaaagaagacagtgatctatcttccacatatgaaacaaaagagatgaaactggaaacaggaaaactagctacttagaactagagatggtccaaaatgtagcctaataaaaaaaacgtacaaaagagggagacaaaaaactaaaaaggaaccacatacttctaatatgcttttgctagctatacgtttgccatcttcccatcgctcttatctgtaagcaatcttcactcatcaacctcttgaagaagaaacgaggaacaacgacacaacatgtgtgtgtatatatacatacatagcctaagaaactaaacatgtatagatgaagatgataagctagctactacggtccgtggagggaagaagggtcatctatttgtatatatactctcttcattgttgtgcacctgcagcagttgaagctgccagcatgatctgagtttaccttctattggtaagaacagatcatgtggctgcttcacctgttgaatggaagcatatagaaaccctaatttgctttctgatcctcctcgagattttcatccggtttcatagaaccctaaaaaaggtttcttcaattcattcttgcatcttgtatttatacgatggatgtggatactatttcattgttgtttttcctctattctacttttcacataaatatatatctatatattcatgttttctggatggctgaatattgtatattcttatgttggctaaatctggagattctatttgaatcagcattcatgtttgcttgattcttgcaaaaagaaagaggaaaggatgctggaaatgttcacgattccagtgacagtaacgcactaacgcgtttcggtggtgcgttctcctaccttgaggttggggacacttagtttttaattattttcattagtcacctaatcaaaactgtttttttaagttcaattttttctgctgcatatctaattatgcattgatt

SEQ ID NO: 11498 - DNA, 1047 bp, Glycine max; identical to SEQ ID NO: 11497
  Gm_smallRNAprecursor_4331

SEQ ID NO: 11499 - DNA, 1047 bp, Glycine max; identical to SEQ ID NO: 11497
  Gm_smallRNAprecursor_4332

SEQ ID NO: 11500 - DNA, 1060 bp, Glycine max
  Gm_smallRNAprecursor_4333
aattttcaaaaactaacagttgagatctacgtcagatatacaactttggcactaatttatacacatggagtgaataataacaatgaaagtgaacaatcatttaggttgttagaaaactccactcacttccccctcccctcttcgtgagggaaaaaaagtattagaaaaaacaaaacaaaaaaagaaggaaaggagtaaaaatctctcctactagggaggttatggtatttacatagataatttgaactaaaaactaaggtaaaatgttgtataaatcattcttaaaatctgtacgaaaagcttgacaagatgggggagccatggcatgggggacacaccgttttctgacccacacattccccatcttcacgtatataagggcccatgaaaaacaatgcatgaccaaatcaaaatcaaacagttttctctgcttctgtctcaaatcaagtctttctcttccacatttttctccactcaaacatatgaaggagttgaggggaatggtgtctggttcgagaccattcttctgaagcaaagatcatcatcacccttgagaatgatctcggaccaggcttcattccccctagctcaaagtatctgccatgaatcatgatcttcctactaacaatctaattcattctttttgctatgatcttgcaactaaccatttaattcatttttttccatctccaacagaattcagttgccaagtaacgtgtaagttcaatgcccttttctcttttttttttttccatcaaagttcatgtgtttcttggcaaaaagacatggataatcacattatctgctggaaaactcaaagatgacttgattgactttatttttattgtctctttgaaatatgtttgtccagcatgttacataattgctttgatcaaacatgaaagttccatgtttcaaatagccatcataatccttctgtttacgttcaattctttatatgcttaacaatatacaatctgcttcttgttgagacaaaaaatgaatgtataaaaaaagggtatataaattatatatataattgtggaaatgagaatgtggt

SEQ ID NO: 11501 - DNA, 1082 bp, Glycine max
  Gm_smallRNAprecursor_4334
aatctatattttttttttggaaacaaattaattccagtctatgaaaaagaacgatatatttttttttaccgtactcgaaccctatcccttagggaccaaggctgccggtagaatgatatatattttatagtttgaaaaaaaactcaatgtatttgatgtccttatttcttctcttataaatactcagaaatttatctgtatacagtcataatattttgttaaaaagaaaatttaagtggaaatgtaagttttgataaaaaaaagaaaaaagtttataatactctttaatattattctcttcaattgttaaaaggtcaacccgctaattaatgaccggtggcggcagaggatttgagaacagaaacgagaaagaatcgatgtcatcatttgacactaaaaagaaaatatgaccaattcagtgactcttgttaatgaaacaaattttcattcatcctgagaatgtgagagtattgacatagcactgtatacctatgaagcaccaacaccgacacggacaccggacacgacacagatacggacacgtggatacctgtaatgtccaaaatatagaacgtaatacgggtgtcgtgtcggtgtcggacactgacacggacgcgtgtcggacaccagacacgacaagggactggagtgtccgtgcttcatagctgtatacagctaatgaaaatttctcttcatcgccataagatcactgatttccatcatcagaatgtcttccttcacccctctcatcactgggagacccccctcggcccttcctctcattccaccttgcccaaacccatgatgaaatcgcaatcgctcctattgcataaatctagaatcaaataaagtaaacttgtgagaaaatgcaaatggacatcatattgaacaagtataacaagattatgcaacctctttcgcgcatatattgtctctggacagcttatcatggaatatcctaatcggtcgaaccaataaacaaaaaagcacactttggaagctcatatatgcaaaatagttaaatacatatattatgcaaaccttgaatgtagtttttaatcaaaacatacctcacaccataa

SEQ ID NO: 11502 - DNA, 1082 bp, Glycine max; identical to SEQ ID NO: 11501
  Gm_smallRNAprecursor_4335

SEQ ID NO: 11503 - DNA, 1083 bp, Glycine max
  Gm_smallRNAprecursor_4336
aatctatattttttttttggaaacaaattaattccagtctatgaaaaagaacgatatatttttttttaccgtactcgaaccctatcccttagggaccaaggctgccggtagaatgatatatattttatagtttgaaaaaaaactcaatgtatttgatgtccttatttcttctcttataaatactcagaaatttatctgtatacagtcataatattttgttaaaaagaaaatttaagtggaaatgtaagttttgataaaaaaaagaaaaaagtttataatactctttaatattattctcttcaattgttaaaaggtcaacccgctaattaatgaccggtggcggcagaggatttgagaacagaaacgagaaagaatcgatgtcatcatttgacactaaaaagaaaatatgaccaattcagtgactcttgttaatgaaacaaattttcattcatcctgagaatgtgagagtattgacatagcactgtatacctatgaagcaccaacaccgacacggacaccggacacgacacagatacggacacgtggatacctgtaatgtccaaaatatagaacgtaatacgggtgtcgtgtcggtgtcggacactgacacggacgcgtgtcggacaccagacacgacaagggactggagtgtccgtgcttcatagctgtatacagctaatgaaaatttctcttcatcgccataagatcactgatttccatcatcagaatgtcttccttcacccctctcatcactgggagacccccctcggcccttcctctcattccaccttgcccaaacccatgatgaaatcgcaatcgctcctattgcataaatctagaatcaaataaagtaaacttgtgagaaaatgcaaatggacatcatattgaacaagtataacaagattatgcaacctctttcgcgcatatattgtctctggacagcttatcatggaatatcctaatcggtcgaaccaataaacaaaaaagcacactttggaagctcatatatgcaaaatagttaaatacatatattatgcaaaccttgaatgtagtttttaatcaaaacatacctcacaccataag

SEQ ID NO: 11504 - DNA, 1077 bp, Glycine max
  Gm_smallRNAprecursor_4337
atattttttttttggaaacaaattaattccagtctatgaaaaagaacgatatatttttttttaccgtactcgaaccctatcccttagggaccaaggctgccggtagaatgatatatattttatagtttgaaaaaaaactcaatgtatttgatgtccttatttcttctcttataaatactcagaaatttatctgtatacagtcataatattttgttaaaaagaaaatttaagtggaaatgtaagttttgataaaaaaaagaaaaaagtttataatactctttaatattattctcttcaattgttaaaaggtcaacccgctaattaatgaccggtggcggcagaggatttgagaacagaaacgagaaagaatcgatgtcatcatttgacactaaaaagaaaatatgaccaattcagtgactcttgttaatgaaacaaattttcattcatcctgagaatgtgagagtattgacatagcactgtatacctatgaagcaccaacaccgacacggacaccggacacgacacagatacggacacgtggatacctgtaatgtccaaaatatagaacgtaatacgggtgtcgtgtcggtgtcggacactgacacggacgcgtgtcggacaccagacacgacaagggactggagtgtccgtgcttcatagctgtatacagctaatgaaaatttctcttcatcgccataagatcactgatttccatcatcagaatgtcttccttcacccctctcatcactgggagacccccctcggcccttcctctcattccaccttgcccaaacccatgatgaaatcgcaatcgctcctattgcataaatctagaatcaaataaagtaaacttgtgagaaaatgcaaatggacatcatattgaacaagtataacaagattatgcaacctctttcgcgcatatattgtctctggacagcttatcatggaatatcctaatcggtcgaaccaataaacaaaaaagcacactttggaagctcatatatgcaaaatagttaaatacatatattatgcaaaccttgaatgtagtttttaatcaaaacatacctcacaccataa

SEQ ID NO: 11505 - DNA, 1077 bp, Glycine max; identical to SEQ ID NO: 11504
  Gm_smallRNAprecursor_4338

SEQ ID NO: 11506 - DNA, 1078 bp, Glycine max
  Gm_smallRNAprecursor_4339
atattttttttttggaaacaaattaattccagtctatgaaaaagaacgatatatttttttttaccgtactcgaaccctatcccttagggaccaaggctgccggtagaatgatatatattttatagtttgaaaaaaaactcaatgtatttgatgtccttatttcttctcttataaatactcagaaatttatctgtatacagtcataatattttgttaaaaagaaaatttaagtggaaatgtaagttttgataaaaaaaagaaaaaagtttataatactctttaatattattctcttcaattgttaaaaggtcaacccgctaattaatgaccggtggcggcagaggatttgagaacagaaacgagaaagaatcgatgtcatcatttgacactaaaaagaaaatatgaccaattcagtgactcttgttaatgaaacaaattttcattcatcctgagaatgtgagagtattgacatagcactgtatacctatgaagcaccaacaccgacacggacaccggacacgacacagatacggacacgtggatacctgtaatgtccaaaatatagaacgtaatacgggtgtcgtgtcggtgtcggacactgacacggacgcgtgtcggacaccagacacgacaagggactggagtgtccgtgcttcatagctgtatacagctaatgaaaatttctcttcatcgccataagatcactgatttccatcatcagaatgtcttccttcacccctctcatcactgggagacccccctcggcccttcctctcattccaccttgcccaaacccatgatgaaatcgcaatcgctcctattgcataaatctagaatcaaataaagtaaacttgtgagaaaatgcaaatggacatcatattgaacaagtataacaagattatgcaacctctttcgcgcatatattgtctctggacagcttatcatggaatatcctaatcggtcgaaccaataaacaaaaaagcacactttggaagctcatatatgcaaaatagttaaatacatatattatgcaaaccttgaatgtagtttttaatcaaaacatacctcacaccataag

SEQ ID NO: 11507 - DNA, 1078 bp, Glycine max; identical to SEQ ID NO: 11506
  Gm_smallRNAprecursor_4340

SEQ ID NO: 11508 - DNA, 1079 bp, Glycine max
  Gm_smallRNAprecursor_4341
atattttttttttggaaacaaattaattccagtctatgaaaaagaacgatatatttttttttaccgtactcgaaccctatcccttagggaccaaggctgccggtagaatgatatatattttatagtttgaaaaaaaactcaatgtatttgatgtccttatttcttctcttataaatactcagaaatttatctgtatacagtcataatattttgttaaaaagaaaatttaagtggaaatgtaagttttgataaaaaaaagaaaaaagtttataatactctttaatattattctcttcaattgttaaaaggtcaacccgctaattaatgaccggtggcggcagaggatttgagaacagaaacgagaaagaatcgatgtcatcatttgacactaaaaagaaaatatgaccaattcagtgactcttgttaatgaaacaaattttcattcatcctgagaatgtgagagtattgacatagcactgtatacctatgaagcaccaacaccgacacggacaccggacacgacacagatacggacacgtggatacctgtaatgtccaaaatatagaacgtaatacgggtgtcgtgtcggtgtcggacactgacacggacgcgtgtcggacaccagacacgacaagggactggagtgtccgtgcttcatagctgtatacagctaatgaaaatttctcttcatcgccataagatcactgatttccatcatcagaatgtcttccttcacccctctcatcactgggagacccccctcggcccttcctctcattccaccttgcccaaacccatgatgaaatcgcaatcgctcctattgcataaatctagaatcaaataaagtaaacttgtgagaaaatgcaaatggacatcatattgaacaagtataacaagattatgcaacctctttcgcgcatatattgtctctggacagcttatcatggaatatcctaatcggtcgaaccaataaacaaaaaagcacactttggaagctcatatatgcaaaatagttaaatacatatattatgcaaaccttgaatgtagtttttaatcaaaacatacctcacaccataagt

SEQ ID NO: 11509 - DNA, 1079 bp, Glycine max; identical to SEQ ID NO: 11508
  Gm_smallRNAprecursor_4342

SEQ ID NO: 11510 - DNA, 1080 bp, Glycine max
  Gm_smallRNAprecursor_4343
atattttttttttggaaacaaattaattccagtctatgaaaaagaacgatatatttttttttaccgtactcgaaccctatcccttagggaccaaggctgccggtagaatgatatatattttatagtttgaaaaaaaactcaatgtatttgatgtccttatttcttctcttataaatactcagaaatttatctgtatacagtcataatattttgttaaaaagaaaatttaagtggaaatgtaagttttgataaaaaaaagaaaaaagtttataatactctttaatattattctcttcaattgttaaaaggtcaacccgctaattaatgaccggtggcggcagaggatttgagaacagaaacgagaaagaatcgatgtcatcatttgacactaaaaagaaaatatgaccaattcagtgactcttgttaatgaaacaaattttcattcatcctgagaatgtgagagtattgacatagcactgtatacctatgaagcaccaacaccgacacggacaccggacacgacacagatacggacacgtggatacctgtaatgtccaaaatatagaacgtaatacgggtgtcgtgtcggtgtcggacactgacacggacgcgtgtcggacaccagacacgacaagggactggagtgtccgtgcttcatagctgtatacagctaatgaaaatttctcttcatcgccataagatcactgatttccatcatcagaatgtcttccttcacccctctcatcactgggagacccccctcggcccttcctctcattccaccttgcccaaacccatgatgaaatcgcaatcgctcctattgcataaatctagaatcaaataaagtaaacttgtgagaaaatgcaaatggacatcatattgaacaagtataacaagattatgcaacctctttcgcgcatatattgtctctggacagcttatcatggaatatcctaatcggtcgaaccaataaacaaaaaagcacactttggaagctcatatatgcaaaatagttaaatacatatattatgcaaaccttgaatgtagtttttaatcaaaacatacctcacaccataagtc

SEQ ID NO: 11511 - DNA, 1080 bp, Glycine max; identical to SEQ ID NO: 11510
  Gm_smallRNAprecursor_4344

SEQ ID NO: 11512 - DNA, 1101 bp, Glycine max
  Gm_smallRNAprecursor_4345
atattttttttttggaaacaaattaattccagtctatgaaaaagaacgatatatttttttttaccgtactcgaaccctatcccttagggaccaaggctgccggtagaatgatatatattttatagtttgaaaaaaaactcaatgtatttgatgtccttatttcttctcttataaatactcagaaatttatctgtatacagtcataatattttgttaaaaagaaaatttaagtggaaatgtaagttttgataaaaaaaagaaaaaagtttataatactctttaatattattctcttcaattgttaaaaggtcaacccgctaattaatgaccggtggcggcagaggatttgagaacagaaacgagaaagaatcgatgtcatcatttgacactaaaaagaaaatatgaccaattcagtgactcttgttaatgaaacaaattttcattcatcctgagaatgtgagagtattgacatagcactgtatacctatgaagcaccaacaccgacacggacaccggacacgacacagatacggacacgtggatacctgtaatgtccaaaatatagaacgtaatacgggtgtcgtgtcggtgtcggacactgacacggacgcgtgtcggacaccagacacgacaagggactggagtgtccgtgcttcatagctgtatacagctaatgaaaatttctcttcatcgccataagatcactgatttccatcatcagaatgtcttccttcacccctctcatcactgggagacccccctcggcccttcctctcattccaccttgcccaaacccatgatgaaatcgcaatcgctcctattgcataaatctagaatcaaataaagtaaacttgtgagaaaatgcaaatggacatcatattgaacaagtataacaagattatgcaacctctttcgcgcatatattgtctctggacagcttatcatggaatatcctaatcggtcgaaccaataaacaaaaaagcacactttggaagctcatatatgcaaaatagttaaatacatatattatgcaaaccttgaatgtagtttttaatcaaaacatacctcacaccataagtcattggattagcaaaacagcca

SEQ ID NO: 11513 - DNA, 1101 bp, Glycine max; identical to SEQ ID NO: 11512
  Gm_smallRNAprecursor_4346

SEQ ID NO: 11514 - DNA, 1076 bp, Glycine max
  Gm_smallRNAprecursor_4347
tattttttttttggaaacaaattaattccagtctatgaaaaagaacgatatatttttttttaccgtactcgaaccctatcccttagggaccaaggctgccggtagaatgatatatattttatagtttgaaaaaaaactcaatgtatttgatgtccttatttcttctcttataaatactcagaaatttatctgtatacagtcataatattttgttaaaaagaaaatttaagtggaaatgtaagttttgataaaaaaaagaaaaaagtttataatactctttaatattattctcttcaattgttaaaaggtcaacccgctaattaatgaccggtggcggcagaggatttgagaacagaaacgagaaagaatcgatgtcatcatttgacactaaaaagaaaatatgaccaattcagtgactcttgttaatgaaacaaattttcattcatcctgagaatgtgagagtattgacatagcactgtatacctatgaagcaccaacaccgacacggacaccggacacgacacagatacggacacgtggatacctgtaatgtccaaaatatagaacgtaatacgggtgtcgtgtcggtgtcggacactgacacggacgcgtgtcggacaccagacacgacaagggactggagtgtccgtgcttcatagctgtatacagctaatgaaaatttctcttcatcgccataagatcactgatttccatcatcagaatgtcttccttcacccctctcatcactgggagacccccctcggcccttcctctcattccaccttgcccaaacccatgatgaaatcgcaatcgctcctattgcataaatctagaatcaaataaagtaaacttgtgagaaaatgcaaatggacatcatattgaacaagtataacaagattatgcaacctctttcgcgcatatattgtctctggacagcttatcatggaatatcctaatcggtcgaaccaataaacaaaaaagcacactttggaagctcatatatgcaaaatagttaaatacatatattatgcaaaccttgaatgtagtttttaatcaaaacatacctcacaccataa

SEQ ID NO: 11515 - DNA, 1076 bp, Glycine max; identical to SEQ ID NO: 11514
  Gm_smallRNAprecursor_4348

SEQ ID NO: 11516 - DNA, 1076 bp, Glycine max; identical to SEQ ID NO: 11514
  Gm_smallRNAprecursor_4349

SEQ ID NO: 11517 - DNA, 1076 bp, Glycine max; identical to SEQ ID NO: 11514
  Gm_smallRNAprecursor_4350

SEQ ID NO: 11518 - DNA, 1077 bp, Glycine max
  Gm_smallRNAprecursor_4351
tattttttttttggaaacaaattaattccagtctatgaaaaagaacgatatatttttttttaccgtactcgaaccctatcccttagggaccaaggctgccggtagaatgatatatattttatagtttgaaaaaaaactcaatgtatttgatgtccttatttcttctcttataaatactcagaaatttatctgtatacagtcataatattttgttaaaaagaaaatttaagtggaaatgtaagttttgataaaaaaaagaaaaaagtttataatactctttaatattattctcttcaattgttaaaaggtcaacccgctaattaatgaccggtggcggcagaggatttgagaacagaaacgagaaagaatcgatgtcatcatttgacactaaaaagaaaatatgaccaattcagtgactcttgttaatgaaacaaattttcattcatcctgagaatgtgagagtattgacatagcactgtatacctatgaagcaccaacaccgacacggacaccggacacgacacagatacggacacgtggatacctgtaatgtccaaaatatagaacgtaatacgggtgtcgtgtcggtgtcggacactgacacggacgcgtgtcggacaccagacacgacaagggactggagtgtccgtgcttcatagctgtatacagctaatgaaaatttctcttcatcgccataagatcactgatttccatcatcagaatgtcttccttcacccctctcatcactgggagacccccctcggcccttcctctcattccaccttgcccaaacccatgatgaaatcgcaatcgctcctattgcataaatctagaatcaaataaagtaaacttgtgagaaaatgcaaatggacatcatattgaacaagtataacaagattatgcaacctctttcgcgcatatattgtctctggacagcttatcatggaatatcctaatcggtcgaaccaataaacaaaaaagcacactttggaagctcatatatgcaaaatagttaaatacatatattatgcaaaccttgaatgtagtttttaatcaaaacatacctcacaccataag

SEQ ID NO: 11519 - DNA, 1077 bp, Glycine max; identical to SEQ ID NO: 11518
  Gm_smallRNAprecursor_4352

SEQ ID NO: 11520 - DNA, 1078 bp, Glycine max
  Gm_smallRNAprecursor_4353
tattttttttttggaaacaaattaattccagtctatgaaaaagaacgatatatttttttttaccgtactcgaaccctatcccttagggaccaaggctgccggtagaatgatatatattttatagtttgaaaaaaaactcaatgtatttgatgtccttatttcttctcttataaatactcagaaatttatctgtatacagtcataatattttgttaaaaagaaaatttaagtggaaatgtaagttttgataaaaaaaagaaaaaagtttataatactctttaatattattctcttcaattgttaaaaggtcaacccgctaattaatgaccggtggcggcagaggatttgagaacagaaacgagaaagaatcgatgtcatcatttgacactaaaaagaaaatatgaccaattcagtgactcttgttaatgaaacaaattttcattcatcctgagaatgtgagagtattgacatagcactgtatacctatgaagcaccaacaccgacacggacaccggacacgacacagatacggacacgtggatacctgtaatgtccaaaatatagaacgtaatacgggtgtcgtgtcggtgtcggacactgacacggacgcgtgtcggacaccagacacgacaagggactggagtgtccgtgcttcatagctgtatacagctaatgaaaatttctcttcatcgccataagatcactgatttccatcatcagaatgtcttccttcacccctctcatcactgggagacccccctcggcccttcctctcattccaccttgcccaaacccatgatgaaatcgcaatcgctcctattgcataaatctagaatcaaataaagtaaacttgtgagaaaatgcaaatggacatcatattgaacaagtataacaagattatgcaacctctttcgcgcatatattgtctctggacagcttatcatggaatatcctaatcggtcgaaccaataaacaaaaaagcacactttggaagctcatatatgcaaaatagttaaatacatatattatgcaaaccttgaatgtagtttttaatcaaaacatacctcacaccataagt

SEQ ID NO: 11521 - DNA, 1062 bp, Glycine max
  Gm_smallRNAprecursor_4354
ttctaatctaatccaagaccacacatataattagatagtgttatttgtattatatacaatatgtaccatgtacaccaaatcatcaccaaaaaataaaaacacacaaaacccatgaataatccaccaattaaaggttgttcagctttaatttaatttgtttgtgtattttaattgcttgcttctccttccctagattattatttcccctctttctatagtttaatgctttgctactcttcaaatcgtttttaaatctttctctctctctactgaatctgcagcctgtagaaaccgtatattctgttagggttccctaagttgttcacttatattctgctatatatatctgtcgtatatatagcaagcaccatggttgagggtcttggtaatcttgttcttttgcactggatcaattggatccaaaatttgatcatagttcaagctaagaagggaggttgaagctacaaggatttgtatatatatagtcgttgtttgcaggtgcagcagcatcaagattcacacacagatttacctccttgggggcgtgtgtttcggtgctgagaatcttgatgatgctgcatcagcaatagatgattcatgggcttctttccaatatagagagatcttctcatggaagtgatcttcatgaacagaaaagttatctgtttcttgaattttcatgtctgcgaggtaagattctaattaatacccttattgatatatatttgtgttcataaaattaattttttgttgaaagttatccgtttgttttcccaggaaactgatataagaaactgaattatacacgtgtgtgtgtgtgtcaaagtttgagatgaagtgttcttaaatttcgttgatctgatggtttcctggttcaattcttagggttttaaagatactaaattaaagcaaaatgttaatttaatttgtacttgctttccatcattatagaaaacaaaaattatgtaccaattaattgagctgcagatttgttaattaattttgtatataatatttgaaaacatcattcatcacaattttggttagtatctatcatgcatt

SEQ ID NO: 11522 - DNA, 1059 bp, Glycine max
  Gm_smallRNAprecursor_4355
tctaatctaatccaagaccacacatataattagatagtgttatttgtattatatacaatatgtaccatgtacaccaaatcatcaccaaaaaataaaaacacacaaaacccatgaataatccaccaattaaaggttgttcagctttaatttaatttgtttgtgtattttaattgcttgcttctccttccctagattattatttcccctctttctatagtttaatgctttgctactcttcaaatcgtttttaaatctttctctctctctactgaatctgcagcctgtagaaaccgtatattctgttagggttccctaagttgttcacttatattctgctatatatatctgtcgtatatatagcaagcaccatggttgagggtcttggtaatcttgttcttttgcactggatcaattggatccaaaatttgatcatagttcaagctaagaagggaggttgaagctacaaggatttgtatatatatagtcgttgtttgcaggtgcagcagcatcaagattcacacacagatttacctccttgggggcgtgtgtttcggtgctgagaatcttgatgatgctgcatcagcaatagatgattcatgggcttctttccaatatagagagatcttctcatggaagtgatcttcatgaacagaaaagttatctgtttcttgaattttcatgtctgcgaggtaagattctaattaatacccttattgatatatatttgtgttcataaaattaattttttgttgaaagttatccgtttgttttcccaggaaactgatataagaaactgaattatacacgtgtgtgtgtgtgtcaaagtttgagatgaagtgttcttaaatttcgttgatctgatggtttcctggttcaattcttagggttttaaagatactaaattaaagcaaaatgttaatttaatttgtacttgctttccatcattatagaaaacaaaaattatgtaccaattaattgagctgcagatttgttaattaattttgtatataatatttgaaaacatcattcatcacaattttggttagtatctatcatgca

SEQ ID NO: 11523 - DNA, 1061 bp, Glycine max
  Gm_smallRNAprecursor_4356
tctaatctaatccaagaccacacatataattagatagtgttatttgtattatatacaatatgtaccatgtacaccaaatcatcaccaaaaaataaaaacacacaaaacccatgaataatccaccaattaaaggttgttcagctttaatttaatttgtttgtgtattttaattgcttgcttctccttccctagattattatttcccctctttctatagtttaatgctttgctactcttcaaatcgtttttaaatctttctctctctctactgaatctgcagcctgtagaaaccgtatattctgttagggttccctaagttgttcacttatattctgctatatatatctgtcgtatatatagcaagcaccatggttgagggtcttggtaatcttgttcttttgcactggatcaattggatccaaaatttgatcatagttcaagctaagaagggaggttgaagctacaaggatttgtatatatatagtcgttgtttgcaggtgcagcagcatcaagattcacacacagatttacctccttgggggcgtgtgtttcggtgctgagaatcttgatgatgctgcatcagcaatagatgattcatgggcttctttccaatatagagagatcttctcatggaagtgatcttcatgaacagaaaagttatctgtttcttgaattttcatgtctgcgaggtaagattctaattaatacccttattgatatatatttgtgttcataaaattaattttttgttgaaagttatccgtttgttttcccaggaaactgatataagaaactgaattatacacgtgtgtgtgtgtgtcaaagtttgagatgaagtgttcttaaatttcgttgatctgatggtttcctggttcaattcttagggttttaaagatactaaattaaagcaaaatgttaatttaatttgtacttgctttccatcattatagaaaacaaaaattatgtaccaattaattgagctgcagatttgttaattaattttgtatataatatttgaaaacatcattcatcacaattttggttagtatctatcatgcatt

SEQ ID NO: 11524 - DNA, 1097 bp, Glycine max
  Gm_smallRNAprecursor_4357
gaataggtgaaaacggaataatttaattagaatagacagtgtaaaaaactcacattatcatagcaaaccattaaatcatagattaacatataattcaaaattatacttaaaagaatttctaattaattaacaatgtaataatttttacattaaccatgcgtgaaagtttaaagttacttctatatattaattaacaatgtaattataaataggttagaaaaagcagtatatatagaggaggatatgtttctggtatacataaatataatgattattgaaggcacttgagtaatttcacaaagcaagcattttgtttggcaccttcatttgagaattgaaacaaactacacgatgaagggcatgaaaagccccacctttattttactttttatttaccatcataaaggagcccacagatatgttttggagcaccatatatacaactcgtccaatagcaagctctttggatgaacaacaacaaccttattgttggtggatagttccaaagggatcgcattgatctaattctttatcttcctgcatgtatttacttgcagctctggttttggacctttttaccggttcactgacttggatcatgcgatcccttaggaattttccatcgccataaaaattatctacatccacaacatgcatcattttcctgagtgaaacttcttgaggtaattagttaatcttctcctcctccactgtctattgcaatcttattttgttattttgagaggcagtttttcattttccggttactagctagcattcttatcaaaattatgctatttcaggacgataaattttggttatgttcatggtaaatagtatgcgttaaattaaagttatggtaaatacgcattaaaagtactttcatcttatctttatcattttaatttcgaacatttatgtctcttgaattgagtatgtccttaaattagtcttcaatattgtataagtgagatattttagtactaaaaccttccgtgtagtctctgtaaaaaatcatttattttagaatgtaatttttatgtattatcattgatggtggaaatttgttttgagaattataagaatcgagatgtttt

SEQ ID NO: 11525 - DNA, 1096 bp, Glycine max
  Gm_smallRNAprecursor_4358
aataggtgaaaacggaataatttaattagaatagacagtgtaaaaaactcacattatcatagcaaaccattaaatcatagattaacatataattcaaaattatacttaaaagaatttctaattaattaacaatgtaataatttttacattaaccatgcgtgaaagtttaaagttacttctatatattaattaacaatgtaattataaataggttagaaaaagcagtatatatagaggaggatatgtttctggtatacataaatataatgattattgaaggcacttgagtaatttcacaaagcaagcattttgtttggcaccttcatttgagaattgaaacaaactacacgatgaagggcatgaaaagccccacctttattttactttttatttaccatcataaaggagcccacagatatgttttggagcaccatatatacaactcgtccaatagcaagctctttggatgaacaacaacaaccttattgttggtggatagttccaaagggatcgcattgatctaattctttatcttcctgcatgtatttacttgcagctctggttttggacctttttaccggttcactgacttggatcatgcgatcccttaggaattttccatcgccataaaaattatctacatccacaacatgcatcattttcctgagtgaaacttcttgaggtaattagttaatcttctcctcctccactgtctattgcaatcttattttgttattttgagaggcagtttttcattttccggttactagctagcattcttatcaaaattatgctatttcaggacgataaattttggttatgttcatggtaaatagtatgcgttaaattaaagttatggtaaatacgcattaaaagtactttcatcttatctttatcattttaatttcgaacatttatgtctcttgaattgagtatgtccttaaattagtcttcaatattgtataagtgagatattttagtactaaaaccttccgtgtagtctctgtaaaaaatcatttattttagaatgtaatttttatgtattatcattgatggtggaaatttgttttgagaattataagaatcgagatgtttt

SEQ ID NO: 11526 - DNA, 1096 bp, Glycine max; identical to SEQ ID NO: 11525
  Gm_smallRNAprecursor_4359

SEQ ID NO: 11527 - DNA, 1044 bp, Glycine max
  Gm_smallRNAprecursor_4360
accttgaaagtgaaaattttccttttgatacactcgactgacacgagttgcctttgatatttttatatgtactaaatcatttgtaaacatggtaataaattggtatttgtcaaatttattatataatttatgattattatatatattattaagttggtgtccatctttctccaaaaaaaaaaaaaagaagttggtgtctctctgtgtcgtcatatctacttgtggtgtgttgttaataaggatggtttgcacaaaattgacttgtagaaatttatttatttatttatttttcagaagacttgtaggaatgttagaacgaatcaatttgtttaactcatctatatgaattggatttagaaatggaaaactgaatcaggctaaccaaattgacccaaacttgttcgataaaatataaggagcgttgctaggtgcacccagcactagccacgaaaagataaaaataccccttacagatcaagttgatccgtaagttaatttttaagacttacgaatcaacttgatccataagtcttttacaaatcaacttgatccgtaagtcttttacggatcaagttgatccgtaaatcttttacggatcaacttaattcgtaaggggagaaattaacagagacagttttatcattttcaaagaatgttgggtgcacctaataacactcaaatataaggtttagatttaatttttttaacttaaattaaatacaggctcgcaatcgtattgaaccaactcatattggactgaataacccattttaccacctatagttaggactattaggttaaattgcataattgaattcgtcaatcccataataatctcaaatcacctaatagtttattcagacttcacaattattacttaatagtcatgaattttcacccaaaaaaaactttagtctatgaacctttaaaattttgcaaccatcaggtatagcagctatgtagttgtgatattttacaatcatatcatattcatatacatggccaaatttctacatattaacccactagcacttaatcaacgcc

SEQ ID NO: 11528 - DNA, 1041 bp, Glycine max
  Gm_smallRNAprecursor_4361
ccttgaaagtgaaaattttccttttgatacactcgactgacacgagttgcctttgatatttttatatgtactaaatcatttgtaaacatggtaataaattggtatttgtcaaatttattatataatttatgattattatatatattattaagttggtgtccatctttctccaaaaaaaaaaaaaagaagttggtgtctctctgtgtcgtcatatctacttgtggtgtgttgttaataaggatggtttgcacaaaattgacttgtagaaatttatttatttatttatttttcagaagacttgtaggaatgttagaacgaatcaatttgtttaactcatctatatgaattggatttagaaatggaaaactgaatcaggctaaccaaattgacccaaacttgttcgataaaatataaggagcgttgctaggtgcacccagcactagccacgaaaagataaaaataccccttacagatcaagttgatccgtaagttaatttttaagacttacgaatcaacttgatccataagtcttttacaaatcaacttgatccgtaagtcttttacggatcaagttgatccgtaaatcttttacggatcaacttaattcgtaaggggagaaattaacagagacagttttatcattttcaaagaatgttgggtgcacctaataacactcaaatataaggtttagatttaatttttttaacttaaattaaatacaggctcgcaatcgtattgaaccaactcatattggactgaataacccattttaccacctatagttaggactattaggttaaattgcataattgaattcgtcaatcccataataatctcaaatcacctaatagtttattcagacttcacaattattacttaatagtcatgaattttcacccaaaaaaaactttagtctatgaacctttaaaattttgcaaccatcaggtatagcagctatgtagttgtgatattttacaatcatatcatattcatatacatggccaaatttctacatattaacccactagcacttaatcaacg

SEQ ID NO: 11529 - DNA, 1051 bp, Glycine max
  Gm_smallRNAprecursor_4362
ggaaacaaaaagagaaggtgactcttctgaacttatcttttactcttaacgtcttgcctcatatttctttattttttcagagtcaaaagaaagatgatagcattgatactaccacgacttcaaaacgctcaaagcatgcggtcgtcgaattagacgaagagaaagatgcaagttttatttctaatgtcaatattatagctttctttcaagtctatattctgacaattctttaccctcgtaatgcaggaagaagaggaaagacctcttataagaaaaagaaagttacctgcgacttcgaccaagtctgctgaacaaacagaggcaggcaattcccaggctcaaatgcctaagaagaaaaagaaagtgaagcaggtcgagcctgaaccttctgtggctgttgagggtggtgagccaatcaagaagaaaaagaaaaagcccaagccttcaaaagaacaaggtgacaatcaacctgttgacgttcaaccaccttcgaccgatattgacggcactgaagtagaggctactccttctgttgctgagatgggcaaccctgtcgatcaaccggactcaccacaagaacaaccctcacatgctcgaacatctcccactcctgagacggatgcagtgaatgttgaggaacagggtgaaggtcaaggcattggatccagtagtcctcatggatcgagtcagaaaagttcatccgaagaaaacttttccgatgaagaggccatagaagaggctgaagctggtggttcggacatttacccggcgtcttcgacatctaagctttccgctagcatagggatcgcagaagatacattcattcaaatgcaagacgaagaccctgctgcagcccttcgactcctgctgaacacaagtcaagccaacacctcaagtgaaaagattcctggtgcttcgtcctcatctgatgccgaaataaactcttcagtacgccaagattgcctgctcctaaagttatcaatggaatacgcacgggaagacgtacttaaatccattgaagagaaccccctgctgcttttgggcacctgaa

SEQ ID NO: 11530 - DNA, 1102 bp, Glycine max
  Gm_smallRNAprecursor_4363
ctaaatttgtttgaggcttaaagctttttctactctaagtcattagatcaatgcttatatcatctttggctttaaagctcagatggccaagttacttatagtatattgccgcaagggtgatagatagcttgccttgattattttctttaaagaaaaagtaaatttagttctatttgtgcaattagcaagtttggcagtgttcgtaaatcctccaagggagtaattcaaatgcaaaaagaagaaaaacaggtgtagaaactagaaactcgaaagcaaacataattgagtacgcaggagaacaccctgaaccaattgtgagttatgggctgtgcacatcgatatataactgaaaactagttacaacaatatgcttggcatgagatttcctttgtgtccatgaagcatagggataaaggaaccatattccacttcactagcctttacagcataggttgtatggattgccttgtatgactatgaagcacggacactccagccccttgccgtgtccggtgtccgacacgcgtctgtgtcagtgtccgacacccacacgacacccgtactacgttctatattttggacattacaggtgtctgcgtgtccgtgtccgtgtcgtgtccggtgtccgtgtcggtgttggtgcttcatagatgatatgacataaaaccttggctgacctggcccagggaatgatttggctatatttgattttccgtttggggtgctccaaacttagttttgtgacatgtttggttatgctcaaaagtttttttttgttgcacagcaaaaatcgatattgtattagaagtaagattcagtactaggtgtactggaatacataacaagaaaatacagaggaccaaacccaactagaaaagacaaatacacagaagctaacaagataggtcaaacccccctctaagataatttgtccttcaaattagttgaccaatggttgaactgagtttgaaaacctttctccatacattttaaccaggatcatgttttttttttgcacatctttaaccaggatcatgtatggaataaagcttcatccatgactctttcgggattgaaaaactggttatttaaaaccaagcta

SEQ ID NO: 11531 - DNA, 1113 bp, Glycine max
  Gm_smallRNAprecursor_4364
ctaaatttgtttgaggcttaaagctttttctactctaagtcattagatcaatgcttatatcatctttggctttaaagctcagatggccaagttacttatagtatattgccgcaagggtgatagatagcttgccttgattattttctttaaagaaaaagtaaatttagttctatttgtgcaattagcaagtttggcagtgttcgtaaatcctccaagggagtaattcaaatgcaaaaagaagaaaaacaggtgtagaaactagaaactcgaaagcaaacataattgagtacgcaggagaacaccctgaaccaattgtgagttatgggctgtgcacatcgatatataactgaaaactagttacaacaatatgcttggcatgagatttcctttgtgtccatgaagcatagggataaaggaaccatattccacttcactagcctttacagcataggttgtatggattgccttgtatgactatgaagcacggacactccagccccttgccgtgtccggtgtccgacacgcgtctgtgtcagtgtccgacacccacacgacacccgtactacgttctatattttggacattacaggtgtctgcgtgtccgtgtccgtgtcgtgtccggtgtccgtgtcggtgttggtgcttcatagatgatatgacataaaaccttggctgacctggcccagggaatgatttggctatatttgattttccgtttggggtgctccaaacttagttttgtgacatgtttggttatgctcaaaagtttttttttgttgcacagcaaaaatcgatattgtattagaagtaagattcagtactaggtgtactggaatacataacaagaaaatacagaggaccaaacccaactagaaaagacaaatacacagaagctaacaagataggtcaaacccccctctaagataatttgtccttcaaattagttgaccaatggttgaactgagtttgaaaacctttctccatacattttaaccaggatcatgttttttttttgcacatctttaaccaggatcatgtatggaataaagcttcatccatgactctttcgggattgaaaaactggttatttaaaaccaagctatttctatgttt

SEQ ID NO: 11532 - DNA, 1114 bp, Glycine max
  Gm_smallRNAprecursor_4365
ctaaatttgtttgaggcttaaagctttttctactctaagtcattagatcaatgcttatatcatctttggctttaaagctcagatggccaagttacttatagtatattgccgcaagggtgatagatagcttgccttgattattttctttaaagaaaaagtaaatttagttctatttgtgcaattagcaagtttggcagtgttcgtaaatcctccaagggagtaattcaaatgcaaaaagaagaaaaacaggtgtagaaactagaaactcgaaagcaaacataattgagtacgcaggagaacaccctgaaccaattgtgagttatgggctgtgcacatcgatatataactgaaaactagttacaacaatatgcttggcatgagatttcctttgtgtccatgaagcatagggataaaggaaccatattccacttcactagcctttacagcataggttgtatggattgccttgtatgactatgaagcacggacactccagccccttgccgtgtccggtgtccgacacgcgtctgtgtcagtgtccgacacccacacgacacccgtactacgttctatattttggacattacaggtgtctgcgtgtccgtgtccgtgtcgtgtccggtgtccgtgtcggtgttggtgcttcatagatgatatgacataaaaccttggctgacctggcccagggaatgatttggctatatttgattttccgtttggggtgctccaaacttagttttgtgacatgtttggttatgctcaaaagtttttttttgttgcacagcaaaaatcgatattgtattagaagtaagattcagtactaggtgtactggaatacataacaagaaaatacagaggaccaaacccaactagaaaagacaaatacacagaagctaacaagataggtcaaacccccctctaagataatttgtccttcaaattagttgaccaatggttgaactgagtttgaaaacctttctccatacattttaaccaggatcatgttttttttttgcacatctttaaccaggatcatgtatggaataaagcttcatccatgactctttcgggattgaaaaactggttatttaaaaccaagctatttctatgtttc

SEQ ID NO: 11533 - DNA, 1097 bp, Glycine max
  Gm_smallRNAprecursor_4366
taaatttgtttgaggcttaaagctttttctactctaagtcattagatcaatgcttatatcatctttggctttaaagctcagatggccaagttacttatagtatattgccgcaagggtgatagatagcttgccttgattattttctttaaagaaaaagtaaatttagttctatttgtgcaattagcaagtttggcagtgttcgtaaatcctccaagggagtaattcaaatgcaaaaagaagaaaaacaggtgtagaaactagaaactcgaaagcaaacataattgagtacgcaggagaacaccctgaaccaattgtgagttatgggctgtgcacatcgatatataactgaaaactagttacaacaatatgcttggcatgagatttcctttgtgtccatgaagcatagggataaaggaaccatattccacttcactagcctttacagcataggttgtatggattgccttgtatgactatgaagcacggacactccagccccttgccgtgtccggtgtccgacacgcgtctgtgtcagtgtccgacacccacacgacacccgtactacgttctatattttggacattacaggtgtctgcgtgtccgtgtccgtgtcgtgtccggtgtccgtgtcggtgttggtgcttcatagatgatatgacataaaaccttggctgacctggcccagggaatgatttggctatatttgattttccgtttggggtgctccaaacttagttttgtgacatgtttggttatgctcaaaagtttttttttgttgcacagcaaaaatcgatattgtattagaagtaagattcagtactaggtgtactggaatacataacaagaaaatacagaggaccaaacccaactagaaaagacaaatacacagaagctaacaagataggtcaaacccccctctaagataatttgtccttcaaattagttgaccaatggttgaactgagtttgaaaacctttctccatacattttaaccaggatcatgttttttttttgcacatctttaaccaggatcatgtatggaataaagcttcatccatgactctttcgggattgaaaaactggttatttaaaaccaa

SEQ ID NO: 11534 - DNA, 1101 bp, Glycine max
  Gm_smallRNAprecursor_4367
taaatttgtttgaggcttaaagctttttctactctaagtcattagatcaatgcttatatcatctttggctttaaagctcagatggccaagttacttatagtatattgccgcaagggtgatagatagcttgccttgattattttctttaaagaaaaagtaaatttagttctatttgtgcaattagcaagtttggcagtgttcgtaaatcctccaagggagtaattcaaatgcaaaaagaagaaaaacaggtgtagaaactagaaactcgaaagcaaacataattgagtacgcaggagaacaccctgaaccaattgtgagttatgggctgtgcacatcgatatataactgaaaactagttacaacaatatgcttggcatgagatttcctttgtgtccatgaagcatagggataaaggaaccatattccacttcactagcctttacagcataggttgtatggattgccttgtatgactatgaagcacggacactccagccccttgccgtgtccggtgtccgacacgcgtctgtgtcagtgtccgacacccacacgacacccgtactacgttctatattttggacattacaggtgtctgcgtgtccgtgtccgtgtcgtgtccggtgtccgtgtcggtgttggtgcttcatagatgatatgacataaaaccttggctgacctggcccagggaatgatttggctatatttgattttccgtttggggtgctccaaacttagttttgtgacatgtttggttatgctcaaaagtttttttttgttgcacagcaaaaatcgatattgtattagaagtaagattcagtactaggtgtactggaatacataacaagaaaatacagaggaccaaacccaactagaaaagacaaatacacagaagctaacaagataggtcaaacccccctctaagataatttgtccttcaaattagttgaccaatggttgaactgagtttgaaaacctttctccatacattttaaccaggatcatgttttttttttgcacatctttaaccaggatcatgtatggaataaagcttcatccatgactctttcgggattgaaaaactggttatttaaaaccaagcta

SEQ ID NO: 11535 - DNA, 1101 bp, Glycine max; identical to SEQ ID NO: 11534
  Gm_smallRNAprecursor_4368

SEQ ID NO: 11536 - DNA, 1112 bp, Glycine max
  Gm_smallRNAprecursor_4369
taaatttgtttgaggcttaaagctttttctactctaagtcattagatcaatgcttatatcatctttggctttaaagctcagatggccaagttacttatagtatattgccgcaagggtgatagatagcttgccttgattattttctttaaagaaaaagtaaatttagttctatttgtgcaattagcaagtttggcagtgttcgtaaatcctccaagggagtaattcaaatgcaaaaagaagaaaaacaggtgtagaaactagaaactcgaaagcaaacataattgagtacgcaggagaacaccctgaaccaattgtgagttatgggctgtgcacatcgatatataactgaaaactagttacaacaatatgcttggcatgagatttcctttgtgtccatgaagcatagggataaaggaaccatattccacttcactagcctttacagcataggttgtatggattgccttgtatgactatgaagcacggacactccagccccttgccgtgtccggtgtccgacacgcgtctgtgtcagtgtccgacacccacacgacacccgtactacgttctatattttggacattacaggtgtctgcgtgtccgtgtccgtgtcgtgtccggtgtccgtgtcggtgttggtgcttcatagatgatatgacataaaaccttggctgacctggcccagggaatgatttggctatatttgattttccgtttggggtgctccaaacttagttttgtgacatgtttggttatgctcaaaagtttttttttgttgcacagcaaaaatcgatattgtattagaagtaagattcagtactaggtgtactggaatacataacaagaaaatacagaggaccaaacccaactagaaaagacaaatacacagaagctaacaagataggtcaaacccccctctaagataatttgtccttcaaattagttgaccaatggttgaactgagtttgaaaacctttctccatacattttaaccaggatcatgttttttttttgcacatctttaaccaggatcatgtatggaataaagcttcatccatgactctttcgggattgaaaaactggttatttaaaaccaagctatttctatgttt

SEQ ID NO: 11537 - DNA, 1112 bp, Glycine max; identical to SEQ ID NO: 11536
  Gm_smallRNAprecursor_4370

SEQ ID NO: 11538 - DNA, 1112 bp, Glycine max; identical to SEQ ID NO: 11536
  Gm_smallRNAprecursor_4371

SEQ ID NO: 11539 - DNA, 1112 bp, Glycine max; identical to SEQ ID NO: 11536
  Gm_smallRNAprecursor_4372

SEQ ID NO: 11540 - DNA, 1113 bp, Glycine max
  Gm_smallRNAprecursor_4373
taaatttgtttgaggcttaaagctttttctactctaagtcattagatcaatgcttatatcatctttggctttaaagctcagatggccaagttacttatagtatattgccgcaagggtgatagatagcttgccttgattattttctttaaagaaaaagtaaatttagttctatttgtgcaattagcaagtttggcagtgttcgtaaatcctccaagggagtaattcaaatgcaaaaagaagaaaaacaggtgtagaaactagaaactcgaaagcaaacataattgagtacgcaggagaacaccctgaaccaattgtgagttatgggctgtgcacatcgatatataactgaaaactagttacaacaatatgcttggcatgagatttcctttgtgtccatgaagcatagggataaaggaaccatattccacttcactagcctttacagcataggttgtatggattgccttgtatgactatgaagcacggacactccagccccttgccgtgtccggtgtccgacacgcgtctgtgtcagtgtccgacacccacacgacacccgtactacgttctatattttggacattacaggtgtctgcgtgtccgtgtccgtgtcgtgtccggtgtccgtgtcggtgttggtgcttcatagatgatatgacataaaaccttggctgacctggcccagggaatgatttggctatatttgattttccgtttggggtgctccaaacttagttttgtgacatgtttggttatgctcaaaagtttttttttgttgcacagcaaaaatcgatattgtattagaagtaagattcagtactaggtgtactggaatacataacaagaaaatacagaggaccaaacccaactagaaaagacaaatacacagaagctaacaagataggtcaaacccccctctaagataatttgtccttcaaattagttgaccaatggttgaactgagtttgaaaacctttctccatacattttaaccaggatcatgttttttttttgcacatctttaaccaggatcatgtatggaataaagcttcatccatgactctttcgggattgaaaaactggttatttaaaaccaagctatttctatgtttc

SEQ ID NO: 11541 - DNA, 1113 bp, Glycine max; identical to SEQ ID NO: 11540
  Gm_smallRNAprecursor_4374

SEQ ID NO: 11542 - DNA, 1114 bp, Glycine max
  Gm_smallRNAprecursor_4375
taaatttgtttgaggcttaaagctttttctactctaagtcattagatcaatgcttatatcatctttggctttaaagctcagatggccaagttacttatagtatattgccgcaagggtgatagatagcttgccttgattattttctttaaagaaaaagtaaatttagttctatttgtgcaattagcaagtttggcagtgttcgtaaatcctccaagggagtaattcaaatgcaaaaagaagaaaaacaggtgtagaaactagaaactcgaaagcaaacataattgagtacgcaggagaacaccctgaaccaattgtgagttatgggctgtgcacatcgatatataactgaaaactagttacaacaatatgcttggcatgagatttcctttgtgtccatgaagcatagggataaaggaaccatattccacttcactagcctttacagcataggttgtatggattgccttgtatgactatgaagcacggacactccagccccttgccgtgtccggtgtccgacacgcgtctgtgtcagtgtccgacacccacacgacacccgtactacgttctatattttggacattacaggtgtctgcgtgtccgtgtccgtgtcgtgtccggtgtccgtgtcggtgttggtgcttcatagatgatatgacataaaaccttggctgacctggcccagggaatgatttggctatatttgattttccgtttggggtgctccaaacttagttttgtgacatgtttggttatgctcaaaagtttttttttgttgcacagcaaaaatcgatattgtattagaagtaagattcagtactaggtgtactggaatacataacaagaaaatacagaggaccaaacccaactagaaaagacaaatacacagaagctaacaagataggtcaaacccccctctaagataatttgtccttcaaattagttgaccaatggttgaactgagtttgaaaacctttctccatacattttaaccaggatcatgttttttttttgcacatctttaaccaggatcatgtatggaataaagcttcatccatgactctttcgggattgaaaaactggttatttaaaaccaagctatttctatgtttcc

SEQ ID NO: 11543 - DNA, 1100 bp, Glycine max
  Gm_smallRNAprecursor_4376
aaatttgtttgaggcttaaagctttttctactctaagtcattagatcaatgcttatatcatctttggctttaaagctcagatggccaagttacttatagtatattgccgcaagggtgatagatagcttgccttgattattttctttaaagaaaaagtaaatttagttctatttgtgcaattagcaagtttggcagtgttcgtaaatcctccaagggagtaattcaaatgcaaaaagaagaaaaacaggtgtagaaactagaaactcgaaagcaaacataattgagtacgcaggagaacaccctgaaccaattgtgagttatgggctgtgcacatcgatatataactgaaaactagttacaacaatatgcttggcatgagatttcctttgtgtccatgaagcatagggataaaggaaccatattccacttcactagcctttacagcataggttgtatggattgccttgtatgactatgaagcacggacactccagccccttgccgtgtccggtgtccgacacgcgtctgtgtcagtgtccgacacccacacgacacccgtactacgttctatattttggacattacaggtgtctgcgtgtccgtgtccgtgtcgtgtccggtgtccgtgtcggtgttggtgcttcatagatgatatgacataaaaccttggctgacctggcccagggaatgatttggctatatttgattttccgtttggggtgctccaaacttagttttgtgacatgtttggttatgctcaaaagtttttttttgttgcacagcaaaaatcgatattgtattagaagtaagattcagtactaggtgtactggaatacataacaagaaaatacagaggaccaaacccaactagaaaagacaaatacacagaagctaacaagataggtcaaacccccctctaagataatttgtccttcaaattagttgaccaatggttgaactgagtttgaaaacctttctccatacattttaaccaggatcatgttttttttttgcacatctttaaccaggatcatgtatggaataaagcttcatccatgactctttcgggattgaaaaactggttatttaaaaccaagcta

SEQ ID NO: 11544 - DNA, 1110 bp, Glycine max
  Gm_smallRNAprecursor_4377
aaatttgtttgaggcttaaagctttttctactctaagtcattagatcaatgcttatatcatctttggctttaaagctcagatggccaagttacttatagtatattgccgcaagggtgatagatagcttgccttgattattttctttaaagaaaaagtaaatttagttctatttgtgcaattagcaagtttggcagtgttcgtaaatcctccaagggagtaattcaaatgcaaaaagaagaaaaacaggtgtagaaactagaaactcgaaagcaaacataattgagtacgcaggagaacaccctgaaccaattgtgagttatgggctgtgcacatcgatatataactgaaaactagttacaacaatatgcttggcatgagatttcctttgtgtccatgaagcatagggataaaggaaccatattccacttcactagcctttacagcataggttgtatggattgccttgtatgactatgaagcacggacactccagccccttgccgtgtccggtgtccgacacgcgtctgtgtcagtgtccgacacccacacgacacccgtactacgttctatattttggacattacaggtgtctgcgtgtccgtgtccgtgtcgtgtccggtgtccgtgtcggtgttggtgcttcatagatgatatgacataaaaccttggctgacctggcccagggaatgatttggctatatttgattttccgtttggggtgctccaaacttagttttgtgacatgtttggttatgctcaaaagtttttttttgttgcacagcaaaaatcgatattgtattagaagtaagattcagtactaggtgtactggaatacataacaagaaaatacagaggaccaaacccaactagaaaagacaaatacacagaagctaacaagataggtcaaacccccctctaagataatttgtccttcaaattagttgaccaatggttgaactgagtttgaaaacctttctccatacattttaaccaggatcatgttttttttttgcacatctttaaccaggatcatgtatggaataaagcttcatccatgactctttcgggattgaaaaactggttatttaaaaccaagctatttctatgtt

SEQ ID NO: 11545 - DNA, 1111 bp, Glycine max
  Gm_smallRNAprecursor_4378
aaatttgtttgaggcttaaagctttttctactctaagtcattagatcaatgcttatatcatctttggctttaaagctcagatggccaagttacttatagtatattgccgcaagggtgatagatagcttgccttgattattttctttaaagaaaaagtaaatttagttctatttgtgcaattagcaagtttggcagtgttcgtaaatcctccaagggagtaattcaaatgcaaaaagaagaaaaacaggtgtagaaactagaaactcgaaagcaaacataattgagtacgcaggagaacaccctgaaccaattgtgagttatgggctgtgcacatcgatatataactgaaaactagttacaacaatatgcttggcatgagatttcctttgtgtccatgaagcatagggataaaggaaccatattccacttcactagcctttacagcataggttgtatggattgccttgtatgactatgaagcacggacactccagccccttgccgtgtccggtgtccgacacgcgtctgtgtcagtgtccgacacccacacgacacccgtactacgttctatattttggacattacaggtgtctgcgtgtccgtgtccgtgtcgtgtccggtgtccgtgtcggtgttggtgcttcatagatgatatgacataaaaccttggctgacctggcccagggaatgatttggctatatttgattttccgtttggggtgctccaaacttagttttgtgacatgtttggttatgctcaaaagtttttttttgttgcacagcaaaaatcgatattgtattagaagtaagattcagtactaggtgtactggaatacataacaagaaaatacagaggaccaaacccaactagaaaagacaaatacacagaagctaacaagataggtcaaacccccctctaagataatttgtccttcaaattagttgaccaatggttgaactgagtttgaaaacctttctccatacattttaaccaggatcatgttttttttttgcacatctttaaccaggatcatgtatggaataaagcttcatccatgactctttcgggattgaaaaactggttatttaaaaccaagctatttctatgttt

SEQ ID NO: 11546 - DNA, 1111 bp, Glycine max; identical to SEQ ID NO: 11545
  Gm_smallRNAprecursor_4379

SEQ ID NO: 11547 - DNA, 1095 bp, Glycine max
  Gm_smallRNAprecursor_4380
tgtttgaggcttaaagctttttctactctaagtcattagatcaatgcttatatcatctttggctttaaagctcagatggccaagttacttatagtatattgccgcaagggtgatagatagcttgccttgattattttctttaaagaaaaagtaaatttagttctatttgtgcaattagcaagtttggcagtgttcgtaaatcctccaagggagtaattcaaatgcaaaaagaagaaaaacaggtgtagaaactagaaactcgaaagcaaacataattgagtacgcaggagaacaccctgaaccaattgtgagttatgggctgtgcacatcgatatataactgaaaactagttacaacaatatgcttggcatgagatttcctttgtgtccatgaagcatagggataaaggaaccatattccacttcactagcctttacagcataggttgtatggattgccttgtatgactatgaagcacggacactccagccccttgccgtgtccggtgtccgacacgcgtctgtgtcagtgtccgacacccacacgacacccgtactacgttctatattttggacattacaggtgtctgcgtgtccgtgtccgtgtcgtgtccggtgtccgtgtcggtgttggtgcttcatagatgatatgacataaaaccttggctgacctggcccagggaatgatttggctatatttgattttccgtttggggtgctccaaacttagttttgtgacatgtttggttatgctcaaaagtttttttttgttgcacagcaaaaatcgatattgtattagaagtaagattcagtactaggtgtactggaatacataacaagaaaatacagaggaccaaacccaactagaaaagacaaatacacagaagctaacaagataggtcaaacccccctctaagataatttgtccttcaaattagttgaccaatggttgaactgagtttgaaaacctttctccatacattttaaccaggatcatgttttttttttgcacatctttaaccaggatcatgtatggaataaagcttcatccatgactctttcgggattgaaaaactggttatttaaaaccaagcta

SEQ ID NO: 11548 - DNA, 1094 bp, Glycine max
  Gm_smallRNAprecursor_4381
gtttgaggcttaaagctttttctactctaagtcattagatcaatgcttatatcatctttggctttaaagctcagatggccaagttacttatagtatattgccgcaagggtgatagatagcttgccttgattattttctttaaagaaaaagtaaatttagttctatttgtgcaattagcaagtttggcagtgttcgtaaatcctccaagggagtaattcaaatgcaaaaagaagaaaaacaggtgtagaaactagaaactcgaaagcaaacataattgagtacgcaggagaacaccctgaaccaattgtgagttatgggctgtgcacatcgatatataactgaaaactagttacaacaatatgcttggcatgagatttcctttgtgtccatgaagcatagggataaaggaaccatattccacttcactagcctttacagcataggttgtatggattgccttgtatgactatgaagcacggacactccagccccttgccgtgtccggtgtccgacacgcgtctgtgtcagtgtccgacacccacacgacacccgtactacgttctatattttggacattacaggtgtctgcgtgtccgtgtccgtgtcgtgtccggtgtccgtgtcggtgttggtgcttcatagatgatatgacataaaaccttggctgacctggcccagggaatgatttggctatatttgattttccgtttggggtgctccaaacttagttttgtgacatgtttggttatgctcaaaagtttttttttgttgcacagcaaaaatcgatattgtattagaagtaagattcagtactaggtgtactggaatacataacaagaaaatacagaggaccaaacccaactagaaaagacaaatacacagaagctaacaagataggtcaaacccccctctaagataatttgtccttcaaattagttgaccaatggttgaactgagtttgaaaacctttctccatacattttaaccaggatcatgttttttttttgcacatctttaaccaggatcatgtatggaataaagcttcatccatgactctttcgggattgaaaaactggttatttaaaaccaagcta

SEQ ID NO: 11549 - DNA, 1082 bp, Glycine max
  Gm_smallRNAprecursor_4382
gtaatttttatgtacagttagttagattctcaatcttatacctagggggtatctatactttctgttgacctttttaatggttcagtagcttcaattattatttcaactttggacccaaaaaaacttatcattttaattattttgtgtgaatttaggttttgaaacaccagcaaatcattgaaaaacttgtggaggaaaatgagaggcttcggcggatactaatggaggacctgaaaataccatctaggaaacttgaagcaagttcttcaggtagaacaattacaagagaattggcaaggaatacggattacaaactgatagtggaagactatcaattcccaagcacacagtgctccccaagtcacttacaatgaccccacaattctaacagaattcctccctattcattctctctcatgcacatagacatgacaagaaaacccgtactcgtgggtactcgctcgaatccgtcccgactttgacgagtaatacctgagttgatcgggtatgggttcgggttcgggttttcctcgataaccaaaagtcgggtacgggtacgggtatgggattactagacctgtcccgatcccaaacccgaacccgccccgccacttaaaatctttagaatttttgcataatttaatcaaaaggcatataacttttattactagttaattttattttaaattttttacataatttaatattattttcttaactatttatgtagacacacgcgttataataaatttattgatatataagtagttaaaaataaatgtttaacaatcaatttatttttttctaaaatcaaatttttaatatttttttttttaaaaaaatatttttctaaatggtgtgtggaacggggttggggatacccgatactcaacgggtacccgacgggtacggggatgggacaataaactcaaacccgtcgggtttggggtatgggtatggaaatatggttgaggagtcggaggaagtgattggagagagaatactcgtacccgacccaccacattgccatgtcacatgcacatcaggcatcaatcagccacgtcatcattctatattccctt

SEQ ID NO: 11550 - DNA, 1085 bp, Glycine max
  Gm_smallRNAprecursor_4383
aagacattaattgcaaattttatatttaatatctactctataaaatagaggaaaatataatattactgataattaagaaatctgaattaattttatagtcaattttaactgataatgattaaaatttttccactttactattgttcttaatgagataatgaagaaattaatatttttctaatttttttattagcaaaagtcaaagtaagaagatttcaagagttttggaagaaaattgatgtaaaaattaaaaaaaaaaaacccctgaagaaaaattagaaaaacaagataacttgtttagcgcgcaatcgaagcttaacgcgcatcctcatttagggagcaagttcaggcttagtgcaagaagatccactacgaagcccgtaaaaaacaaaagaaaaagacacattgagtcttagagagtctaagcctatttcttagggaaaatccttcttctttagtcattcccctctttctttctttcagtcatcgagtccattcttccatccatattagtccttgaagtgtaaagtttctcatgattatgagagactaaactccatttgttgagagtctgacacgtcaaactcttgtagtctattatctatttaatgtaattctatttttattattcttctatgtgcttttgtgtttattatggtctggtcatccatataatgtttaagagggtaatgcattgaaacatggttattttctagagaactaaggaaggatatctaaataaattcattgttagaaatagattgatatttgttttgcccaatttttgcatcttgtatcttaattcgatttgttattttatccctgcaaagaaatttggaaaaaatgataaataaactagactgtttatgctgaaaatcaaagataatttcttagtaaatgtgagtgaaaacaaatatttcgttaaatagagaaattactaacattacattacaagtagtttgatatgcttgggctcaacattacatttaaattattatttatttattttacttgttatctttttctttgccttatcccaaattttacacctcaaattccttatcttttttttcctacttcttctc

SEQ ID NO: 11551 - DNA, 1074 bp, Glycine max
  Gm_smallRNAprecursor_4384
accaaacatgcagtaactcccaaatcaggaacaacaaacaggagaacaaattaatatgctcttagagttctgaaagaacctatactagatagaaaatttgttgtacaccaacactattttacaaacctatactacattgaaggtgagttcacttcactgttgtacacctaaagtgtctcttgaaccgaccttacctcacttaagtagaaaatctgcaaacttagtttaccagtcagtcaaataacgggcactcagcaacttagtacatgtttggcaagctaccaaaatcaagtcctctcactgtgatacacattctaagagtataaaatctatgaccgagattaacttaggcacatatcccaattacattattcaagtgctcaaaatcagttctaccctactttaaaacaaacaggctcttagttaaattaaatgataatctatgaagcacggacaccccagccccttgtcgtgttcggtgtccgacaagcgtctgtgttagtgtccgacaccgacacgacacccgtactacgttctatattttggacattacaggtgtccacatgtccgtgtcgtgtccggtgtccgtgtcggtgcttcatagatgataatcaatcaacaataggaaccctgccaaacaacagcaaaatacactaccaaaatggacaaaacataactacgcttcaaaaccagggatcatatacacacatacagcaatgtccaataaaaactctacgcatcttagataaatctacaacgtaccagtgccagcagcagtaatagcttgcctatacttcttgtcctgaacatccccagcagcaaacactccctccacactggtcttcgtcgtccccggcttcgtcacaatatatccatcagaatccaattcaagctgcccgtccaagaacttggtcgcgggctcgtgcccaattgcgaaaaacaacccagaaaccttcaattcagacacctcttgagtcaccacattcttcaccttcaatcccccaagcaccctcttgttatctccgcccccaaaagcctcaaccaccaccgaattccaaatcaccttaatcttac

SEQ ID NO: 11552 - DNA, 1075 bp, Glycine max
  Gm_smallRNAprecursor_4385
accaaacatgcagtaactcccaaatcaggaacaacaaacaggagaacaaattaatatgctcttagagttctgaaagaacctatactagatagaaaatttgttgtacaccaacactattttacaaacctatactacattgaaggtgagttcacttcactgttgtacacctaaagtgtctcttgaaccgaccttacctcacttaagtagaaaatctgcaaacttagtttaccagtcagtcaaataacgggcactcagcaacttagtacatgtttggcaagctaccaaaatcaagtcctctcactgtgatacacattctaagagtataaaatctatgaccgagattaacttaggcacatatcccaattacattattcaagtgctcaaaatcagttctaccctactttaaaacaaacaggctcttagttaaattaaatgataatctatgaagcacggacaccccagccccttgtcgtgttcggtgtccgacaagcgtctgtgttagtgtccgacaccgacacgacacccgtactacgttctatattttggacattacaggtgtccacatgtccgtgtcgtgtccggtgtccgtgtcggtgcttcatagatgataatcaatcaacaataggaaccctgccaaacaacagcaaaatacactaccaaaatggacaaaacataactacgcttcaaaaccagggatcatatacacacatacagcaatgtccaataaaaactctacgcatcttagataaatctacaacgtaccagtgccagcagcagtaatagcttgcctatacttcttgtcctgaacatccccagcagcaaacactccctccacactggtcttcgtcgtccccggcttcgtcacaatatatccatcagaatccaattcaagctgcccgtccaagaacttggtcgcgggctcgtgcccaattgcgaaaaacaacccagaaaccttcaattcagacacctcttgagtcaccacattcttcaccttcaatcccccaagcaccctcttgttatctccgcccccaaaagcctcaaccaccaccgaattccaaatcaccttaatcttact

SEQ ID NO: 11553 - DNA, 1072 bp, Glycine max
  Gm_smallRNAprecursor_4386
ccaaacatgcagtaactcccaaatcaggaacaacaaacaggagaacaaattaatatgctcttagagttctgaaagaacctatactagatagaaaatttgttgtacaccaacactattttacaaacctatactacattgaaggtgagttcacttcactgttgtacacctaaagtgtctcttgaaccgaccttacctcacttaagtagaaaatctgcaaacttagtttaccagtcagtcaaataacgggcactcagcaacttagtacatgtttggcaagctaccaaaatcaagtcctctcactgtgatacacattctaagagtataaaatctatgaccgagattaacttaggcacatatcccaattacattattcaagtgctcaaaatcagttctaccctactttaaaacaaacaggctcttagttaaattaaatgataatctatgaagcacggacaccccagccccttgtcgtgttcggtgtccgacaagcgtctgtgttagtgtccgacaccgacacgacacccgtactacgttctatattttggacattacaggtgtccacatgtccgtgtcgtgtccggtgtccgtgtcggtgcttcatagatgataatcaatcaacaataggaaccctgccaaacaacagcaaaatacactaccaaaatggacaaaacataactacgcttcaaaaccagggatcatatacacacatacagcaatgtccaataaaaactctacgcatcttagataaatctacaacgtaccagtgccagcagcagtaatagcttgcctatacttcttgtcctgaacatccccagcagcaaacactccctccacactggtcttcgtcgtccccggcttcgtcacaatatatccatcagaatccaattcaagctgcccgtccaagaacttggtcgcgggctcgtgcccaattgcgaaaaacaacccagaaaccttcaattcagacacctcttgagtcaccacattcttcaccttcaatcccccaagcaccctcttgttatctccgcccccaaaagcctcaaccaccaccgaattccaaatcaccttaatctta

SEQ ID NO: 11554 - DNA, 1072 bp, Glycine max; identical to SEQ ID NO: 11553
  Gm_smallRNAprecursor_4387

SEQ ID NO: 11555 - DNA, 1073 bp, Glycine max
  Gm_smallRNAprecursor_4388
ccaaacatgcagtaactcccaaatcaggaacaacaaacaggagaacaaattaatatgctcttagagttctgaaagaacctatactagatagaaaatttgttgtacaccaacactattttacaaacctatactacattgaaggtgagttcacttcactgttgtacacctaaagtgtctcttgaaccgaccttacctcacttaagtagaaaatctgcaaacttagtttaccagtcagtcaaataacgggcactcagcaacttagtacatgtttggcaagctaccaaaatcaagtcctctcactgtgatacacattctaagagtataaaatctatgaccgagattaacttaggcacatatcccaattacattattcaagtgctcaaaatcagttctaccctactttaaaacaaacaggctcttagttaaattaaatgataatctatgaagcacggacaccccagccccttgtcgtgttcggtgtccgacaagcgtctgtgttagtgtccgacaccgacacgacacccgtactacgttctatattttggacattacaggtgtccacatgtccgtgtcgtgtccggtgtccgtgtcggtgcttcatagatgataatcaatcaacaataggaaccctgccaaacaacagcaaaatacactaccaaaatggacaaaacataactacgcttcaaaaccagggatcatatacacacatacagcaatgtccaataaaaactctacgcatcttagataaatctacaacgtaccagtgccagcagcagtaatagcttgcctatacttcttgtcctgaacatccccagcagcaaacactccctccacactggtcttcgtcgtccccggcttcgtcacaatatatccatcagaatccaattcaagctgcccgtccaagaacttggtcgcgggctcgtgcccaattgcgaaaaacaacccagaaaccttcaattcagacacctcttgagtcaccacattcttcaccttcaatcccccaagcaccctcttgttatctccgcccccaaaagcctcaaccaccaccgaattccaaatcaccttaatcttac

SEQ ID NO: 11556 - DNA, 1070 bp, Glycine max
  Gm_smallRNAprecursor_4389
caaacatgcagtaactcccaaatcaggaacaacaaacaggagaacaaattaatatgctcttagagttctgaaagaacctatactagatagaaaatttgttgtacaccaacactattttacaaacctatactacattgaaggtgagttcacttcactgttgtacacctaaagtgtctcttgaaccgaccttacctcacttaagtagaaaatctgcaaacttagtttaccagtcagtcaaataacgggcactcagcaacttagtacatgtttggcaagctaccaaaatcaagtcctctcactgtgatacacattctaagagtataaaatctatgaccgagattaacttaggcacatatcccaattacattattcaagtgctcaaaatcagttctaccctactttaaaacaaacaggctcttagttaaattaaatgataatctatgaagcacggacaccccagccccttgtcgtgttcggtgtccgacaagcgtctgtgttagtgtccgacaccgacacgacacccgtactacgttctatattttggacattacaggtgtccacatgtccgtgtcgtgtccggtgtccgtgtcggtgcttcatagatgataatcaatcaacaataggaaccctgccaaacaacagcaaaatacactaccaaaatggacaaaacataactacgcttcaaaaccagggatcatatacacacatacagcaatgtccaataaaaactctacgcatcttagataaatctacaacgtaccagtgccagcagcagtaatagcttgcctatacttcttgtcctgaacatccccagcagcaaacactccctccacactggtcttcgtcgtccccggcttcgtcacaatatatccatcagaatccaattcaagctgcccgtccaagaacttggtcgcgggctcgtgcccaattgcgaaaaacaacccagaaaccttcaattcagacacctcttgagtcaccacattcttcaccttcaatcccccaagcaccctcttgttatctccgcccccaaaagcctcaaccaccaccgaattccaaatcaccttaatctt

SEQ ID NO: 11557 - DNA, 1071 bp, Glycine max
  Gm_smallRNAprecursor_4390
caaacatgcagtaactcccaaatcaggaacaacaaacaggagaacaaattaatatgctcttagagttctgaaagaacctatactagatagaaaatttgttgtacaccaacactattttacaaacctatactacattgaaggtgagttcacttcactgttgtacacctaaagtgtctcttgaaccgaccttacctcacttaagtagaaaatctgcaaacttagtttaccagtcagtcaaataacgggcactcagcaacttagtacatgtttggcaagctaccaaaatcaagtcctctcactgtgatacacattctaagagtataaaatctatgaccgagattaacttaggcacatatcccaattacattattcaagtgctcaaaatcagttctaccctactttaaaacaaacaggctcttagttaaattaaatgataatctatgaagcacggacaccccagccccttgtcgtgttcggtgtccgacaagcgtctgtgttagtgtccgacaccgacacgacacccgtactacgttctatattttggacattacaggtgtccacatgtccgtgtcgtgtccggtgtccgtgtcggtgcttcatagatgataatcaatcaacaataggaaccctgccaaacaacagcaaaatacactaccaaaatggacaaaacataactacgcttcaaaaccagggatcatatacacacatacagcaatgtccaataaaaactctacgcatcttagataaatctacaacgtaccagtgccagcagcagtaatagcttgcctatacttcttgtcctgaacatccccagcagcaaacactccctccacactggtcttcgtcgtccccggcttcgtcacaatatatccatcagaatccaattcaagctgcccgtccaagaacttggtcgcgggctcgtgcccaattgcgaaaaacaacccagaaaccttcaattcagacacctcttgagtcaccacattcttcaccttcaatcccccaagcaccctcttgttatctccgcccccaaaagcctcaaccaccaccgaattccaaatcaccttaatctta

SEQ ID NO: 11558 - DNA, 1071 bp, Glycine max; identical to SEQ ID NO: 11557
  Gm_smallRNAprecursor_4391

SEQ ID NO: 11559 - DNA, 1065 bp, Glycine max
  Gm_smallRNAprecursor_4392
tgcagtaactcccaaatcaggaacaacaaacaggagaacaaattaatatgctcttagagttctgaaagaacctatactagatagaaaatttgttgtacaccaacactattttacaaacctatactacattgaaggtgagttcacttcactgttgtacacctaaagtgtctcttgaaccgaccttacctcacttaagtagaaaatctgcaaacttagtttaccagtcagtcaaataacgggcactcagcaacttagtacatgtttggcaagctaccaaaatcaagtcctctcactgtgatacacattctaagagtataaaatctatgaccgagattaacttaggcacatatcccaattacattattcaagtgctcaaaatcagttctaccctactttaaaacaaacaggctcttagttaaattaaatgataatctatgaagcacggacaccccagccccttgtcgtgttcggtgtccgacaagcgtctgtgttagtgtccgacaccgacacgacacccgtactacgttctatattttggacattacaggtgtccacatgtccgtgtcgtgtccggtgtccgtgtcggtgcttcatagatgataatcaatcaacaataggaaccctgccaaacaacagcaaaatacactaccaaaatggacaaaacataactacgcttcaaaaccagggatcatatacacacatacagcaatgtccaataaaaactctacgcatcttagataaatctacaacgtaccagtgccagcagcagtaatagcttgcctatacttcttgtcctgaacatccccagcagcaaacactccctccacactggtcttcgtcgtccccggcttcgtcacaatatatccatcagaatccaattcaagctgcccgtccaagaacttggtcgcgggctcgtgcccaattgcgaaaaacaacccagaaaccttcaattcagacacctcttgagtcaccacattcttcaccttcaatcccccaagcaccctcttgttatctccgcccccaaaagcctcaaccaccaccgaattccaaatcaccttaatctta

SEQ ID NO: 11560 - DNA, 1065 bp, Glycine max; identical to SEQ ID NO: 11559
  Gm_smallRNAprecursor_4393

SEQ ID NO: 11561 - DNA, 1066 bp, Glycine max
  Gm_smallRNAprecursor_4394
tgcagtaactcccaaatcaggaacaacaaacaggagaacaaattaatatgctcttagagttctgaaagaacctatactagatagaaaatttgttgtacaccaacactattttacaaacctatactacattgaaggtgagttcacttcactgttgtacacctaaagtgtctcttgaaccgaccttacctcacttaagtagaaaatctgcaaacttagtttaccagtcagtcaaataacgggcactcagcaacttagtacatgtttggcaagctaccaaaatcaagtcctctcactgtgatacacattctaagagtataaaatctatgaccgagattaacttaggcacatatcccaattacattattcaagtgctcaaaatcagttctaccctactttaaaacaaacaggctcttagttaaattaaatgataatctatgaagcacggacaccccagccccttgtcgtgttcggtgtccgacaagcgtctgtgttagtgtccgacaccgacacgacacccgtactacgttctatattttggacattacaggtgtccacatgtccgtgtcgtgtccggtgtccgtgtcggtgcttcatagatgataatcaatcaacaataggaaccctgccaaacaacagcaaaatacactaccaaaatggacaaaacataactacgcttcaaaaccagggatcatatacacacatacagcaatgtccaataaaaactctacgcatcttagataaatctacaacgtaccagtgccagcagcagtaatagcttgcctatacttcttgtcctgaacatccccagcagcaaacactccctccacactggtcttcgtcgtccccggcttcgtcacaatatatccatcagaatccaattcaagctgcccgtccaagaacttggtcgcgggctcgtgcccaattgcgaaaaacaacccagaaaccttcaattcagacacctcttgagtcaccacattcttcaccttcaatcccccaagcaccctcttgttatctccgcccccaaaagcctcaaccaccaccgaattccaaatcaccttaatcttac

SEQ ID NO: 11562 - DNA, 1067 bp, Glycine max
  Gm_smallRNAprecursor_4395
tgcagtaactcccaaatcaggaacaacaaacaggagaacaaattaatatgctcttagagttctgaaagaacctatactagatagaaaatttgttgtacaccaacactattttacaaacctatactacattgaaggtgagttcacttcactgttgtacacctaaagtgtctcttgaaccgaccttacctcacttaagtagaaaatctgcaaacttagtttaccagtcagtcaaataacgggcactcagcaacttagtacatgtttggcaagctaccaaaatcaagtcctctcactgtgatacacattctaagagtataaaatctatgaccgagattaacttaggcacatatcccaattacattattcaagtgctcaaaatcagttctaccctactttaaaacaaacaggctcttagttaaattaaatgataatctatgaagcacggacaccccagccccttgtcgtgttcggtgtccgacaagcgtctgtgttagtgtccgacaccgacacgacacccgtactacgttctatattttggacattacaggtgtccacatgtccgtgtcgtgtccggtgtccgtgtcggtgcttcatagatgataatcaatcaacaataggaaccctgccaaacaacagcaaaatacactaccaaaatggacaaaacataactacgcttcaaaaccagggatcatatacacacatacagcaatgtccaataaaaactctacgcatcttagataaatctacaacgtaccagtgccagcagcagtaatagcttgcctatacttcttgtcctgaacatccccagcagcaaacactccctccacactggtcttcgtcgtccccggcttcgtcacaatatatccatcagaatccaattcaagctgcccgtccaagaacttggtcgcgggctcgtgcccaattgcgaaaaacaacccagaaaccttcaattcagacacctcttgagtcaccacattcttcaccttcaatcccccaagcaccctcttgttatctccgcccccaaaagcctcaaccaccaccgaattccaaatcaccttaatcttact

SEQ ID NO: 11563 - DNA, 1059 bp, Glycine max
  Gm_smallRNAprecursor_4396
taactcccaaatcaggaacaacaaacaggagaacaaattaatatgctcttagagttctgaaagaacctatactagatagaaaatttgttgtacaccaacactattttacaaacctatactacattgaaggtgagttcacttcactgttgtacacctaaagtgtctcttgaaccgaccttacctcacttaagtagaaaatctgcaaacttagtttaccagtcagtcaaataacgggcactcagcaacttagtacatgtttggcaagctaccaaaatcaagtcctctcactgtgatacacattctaagagtataaaatctatgaccgagattaacttaggcacatatcccaattacattattcaagtgctcaaaatcagttctaccctactttaaaacaaacaggctcttagttaaattaaatgataatctatgaagcacggacaccccagccccttgtcgtgttcggtgtccgacaagcgtctgtgttagtgtccgacaccgacacgacacccgtactacgttctatattttggacattacaggtgtccacatgtccgtgtcgtgtccggtgtccgtgtcggtgcttcatagatgataatcaatcaacaataggaaccctgccaaacaacagcaaaatacactaccaaaatggacaaaacataactacgcttcaaaaccagggatcatatacacacatacagcaatgtccaataaaaactctacgcatcttagataaatctacaacgtaccagtgccagcagcagtaatagcttgcctatacttcttgtcctgaacatccccagcagcaaacactccctccacactggtcttcgtcgtccccggcttcgtcacaatatatccatcagaatccaattcaagctgcccgtccaagaacttggtcgcgggctcgtgcccaattgcgaaaaacaacccagaaaccttcaattcagacacctcttgagtcaccacattcttcaccttcaatcccccaagcaccctcttgttatctccgcccccaaaagcctcaaccaccaccgaattccaaatcaccttaatctt

SEQ ID NO: 11564 - DNA, 1206 bp, Glycine max
  Gm_smallRNAprecursor_4397
ggccacattgaggcctaaggcatctaaaaaaattgtatcagtatttgatatgctcctgaccaaaaacaactttggtatgtccataccttagtaaaataaaatcctatcgcgaaaagatagaaaaatagcaaggaaattaatgagttacattacattagactatgttttaaaaattgtctcagattcaaaagtgtttagacagaacacagtaaggcaaatttctcaaactaggttacttttagaaactaattcccaaatgggggctgttttgaaactttttccaggggggtctgtttttgaaggggactcgccagtggggttggcgagttggacacgtggcagcgcctggtggactcgccagtggagttggcgagttgctgtccacgtggcggccacgtggcgggtcccgccactcatactgacgaaatgctttttacggaaaaaaaaattttaacttcaaacgcgtataacttttgataggaatgtccgtttgaggctcataatatgtcaaaatgctcgaaattgaatgaagaatcctttggcaactccccgaatttggtcaactcattttcccaaaaaatgcctctaagtagctcaaaaataggatttaagattaaaaaaatgggtggttgaatcttactcgcttttttgggaaaatgagttgaccaaatccccttcggggatttgccaaaggattcttcattcaatttcgagcattttgacatattatgagcctcaaacggacattcctatcaaaagttatacgcgtttgaagttaaaatttttttttccgtaaaaagcatttcgtcagtacgagtggcgggacccgccacgtggccgccacgtggacagcaactcgccaactccactggcgagtccaccaggtgctgccacgtgtccaactcgccaaccccactggcgagtccccttcaaaaacagaccccccctgaaaaaagtttcaaaacagcccccttttgggaattagtttctaaaagtaacctagtttgagaaatttgccacacagtaacaccggtctccattaagttcacaacatgtttgatgttgtctttggttgtcctaatattgtggcacaatcattttggttaaatagaaatgtttaaaatgtggcataatcaagtagacctaccgatctaatttttcaccagaaatatctccaccaggcctatggaaatgggaagaccaggt

SEQ ID NO: 11565 - DNA, 1206 bp, Glycine max; identical to SEQ ID NO: 11564
  Gm_smallRNAprecursor_4398

SEQ ID NO: 11566 - DNA, 1207 bp, Glycine max
  Gm_smallRNAprecursor_4399
ggccacattgaggcctaaggcatctaaaaaaattgtatcagtatttgatatgctcctgaccaaaaacaactttggtatgtccataccttagtaaaataaaatcctatcgcgaaaagatagaaaaatagcaaggaaattaatgagttacattacattagactatgttttaaaaattgtctcagattcaaaagtgtttagacagaacacagtaaggcaaatttctcaaactaggttacttttagaaactaattcccaaatgggggctgttttgaaactttttccaggggggtctgtttttgaaggggactcgccagtggggttggcgagttggacacgtggcagcgcctggtggactcgccagtggagttggcgagttgctgtccacgtggcggccacgtggcgggtcccgccactcatactgacgaaatgctttttacggaaaaaaaaattttaacttcaaacgcgtataacttttgataggaatgtccgtttgaggctcataatatgtcaaaatgctcgaaattgaatgaagaatcctttggcaactccccgaatttggtcaactcattttcccaaaaaatgcctctaagtagctcaaaaataggatttaagattaaaaaaatgggtggttgaatcttactcgcttttttgggaaaatgagttgaccaaatccccttcggggatttgccaaaggattcttcattcaatttcgagcattttgacatattatgagcctcaaacggacattcctatcaaaagttatacgcgtttgaagttaaaatttttttttccgtaaaaagcatttcgtcagtacgagtggcgggacccgccacgtggccgccacgtggacagcaactcgccaactccactggcgagtccaccaggtgctgccacgtgtccaactcgccaaccccactggcgagtccccttcaaaaacagaccccccctgaaaaaagtttcaaaacagcccccttttgggaattagtttctaaaagtaacctagtttgagaaatttgccacacagtaacaccggtctccattaagttcacaacatgtttgatgttgtctttggttgtcctaatattgtggcacaatcattttggttaaatagaaatgtttaaaatgtggcataatcaagtagacctaccgatctaatttttcaccagaaatatctccaccaggcctatggaaatgggaagaccaggtt

SEQ ID NO: 11567 - DNA, 1137 bp, Glycine max
  Gm_smallRNAprecursor_4400
aaaagggtggctagaatttatatatagaccatgcactcaaattgaacctttttttaaacaaaacttgaacatcgaataaataaaggatgacttcactcccatattcagatctagatctgcacaagtacgtacggtaagtaacaacatatcatgctaggaaatgtagagaggaaagggaatctacaagaaccaaaaagctacagtgattttacccttctttccatttttttcagggtgaacctgcactgagtatccttagccgagaactaaagacttatttttgtaaattaatactgagatctattttctggtaacgaatattctttcatacccacaaacttaaaagtcgaacctggtaacatacttaagaaacataattattgatcaaccattgtataccatgttgattaatctttcttacccttctttttcatcaggagcaacccacacaaaataaaagttggtgaattgttgatatatataagccaagatgtcattcacctgcagatgcacctgcacctcgtgcttggtttctcgtccattaattcacacacatactacgtaatctttttattccttctccattgacatgcttttgtggtagtacgtcttagtagttgaacagagaaaaccaagtaaagtgcaggtgcaaatgcaggcaaaggcagcatattggaacgaaaacaatggccttctattctttctacatggggttgagtatttagtactcgtagccatcattttatgttgaggatttaaagggagagggagagagagagaaatgggaaggggtaacataataagagagttaatttaagagctgttgagtgaaaatgtacatagaccaaatttgacaagagatattgaattatggatgtagcttagttagacaaacactttggggagaaaataagagtttgatttctgtagaagacatttaaaaaaaaattaaatgtaactaagtatcaaataaaaaaaattaatcatataatcgaaaaagaaattgacaagacatgatgcatccaaattatgctaataaagggttttgtgggagtgtgaagccaatgaaaagagtgattattcgtttgattataaagggataaggatttgatgaagatctccatgatatgtttttgt

SEQ ID NO: 11568 - DNA, 1074 bp, Glycine max
  Gm_smallRNAprecursor_4401
caaagggactgcttcgatccattttgtaaagtaatcgacaccaactatgatataacgctggttcttagaagaagcaggcttgatttcaccaattaagtccaaagcccatcctctgaaaggccaaggtttgattatggagtgtaactcactagcaggtacatgctgtatccctgcatgcttttggcattcctgacagcctttagcaaattctatacagtcttttaacatcgaaggccaatacaaaccttgtcgaaataaaagccatttcattttatggcctgcttgatgtgatccacaagccccactgtgaacatgggaaactgccaagtatgcttctgattcacttagacattttaacaacactccttctgcagtctttttaaacaaatcatttcccacaatcacgtaatttaaagccctatatttgatctttcgagccacattacctattggattttccaaatattcaacaatggactttctccaatcattatctaacatattgtcaatggccaaaatttgaatttttccctggagatcatcatcttcattactttgtggtgtaattgcccccacaagttttggcattggcaatttagtacttaatggctctggtaattccagtttatcttttatttcgatcaactgagttaacttttccttcgacattttgtaccctgaagctatttgggctaaatcatttgcttcttggttttcttgtcgcggtatatgctcaatgttaatgtaatcgaaatgattcagaagagaactcgtcataacaaaatattttgctaagtgttcattaacacacttgtattcttgtgttaattgcttcaatactaattctgaatcaccccttatgttaacatttcttgcccccaggctaattaaaatttcaaggcctgtaattagagcttcatactcagcctcattattagaacaaagccctttaattttatatttgaacttagttggaactttattgggggatattattaaaactccaattccagttccatgtttgtgtttcgatccatcgaaatacaaaatccaaggctctgtatcgacatagtc

SEQ ID NO: 11569 - DNA, 1114 bp, Glycine max
  Gm_smallRNAprecursor_4402
tccaatcattatctaacatattgtcaatggccaaaatttgaatttttccctggagatcatcatcttcattactttgtggtgtaattgcccccacaagttttggcattggcaatttagtacttaatggctctggtaattccagtttatcttttatttcgatcaactgagttaacttttccttcgacattttgtaccctgaagctatttgggctaaatcatttgcttcttggttttcttgtcgcggtatatgctcaatgttaatgtaatcgaaatgattcagaagagaactcgtcataacaaaatattttgctaagtgttcattaacacacttgtattcttgtgttaattgcttcaatactaattctgaatcaccccttatgttaacatttcttgcccccaggctaattaaaatttcaaggcctgtaattagagcttcatactcagcctcattattagaacaaagccctttaattttatatttgaacttagttggaactttattgggggatattattaaaactccaattccagttccatgtttgtgtttcgatccatcgaaatacaaaatccaaggctctgtatcgacatagtcttgcggcatttcgatcactgagtgatctacaataaaatctgccacaatttgacccttaacagatttcaaaggcttgtacgttaaagaatattctgttaatgctaaagcccattttccaattctactgtgtaaaataggttttgacaacatgtgcttaataatatcataatgagaatacacataaacatcaacaggctttatatattgcttaagttttgcacaagagaaatacagacaaagacaaagtttttctatggcagtatatctagtttctgcatcatttagtacacgactaagataataaattgcatgttctatgccatcatcatcttcctgagccaacatgctaccaatggtcttgtcagacgcagcaatatacaacttcatagtcttgtttcgactaggaggcattaacacaggaggcttgatcagatattctttaatttcatcgaaagccttttgatgctcttcattccatttgaatggttcatctttcttaagtcgaagtaatggcgaaaaaat

SEQ ID NO: 11570 - DNA, 1176 bp, Glycine max
  Gm_smallRNAprecursor_4403
tgccacaatttgacccttaacagatttcaaaggcttgtacgttaaagaatattctgttaatgctaaagcccattttccaattctactgtgtaaaataggttttgacaacatgtgcttaataatatcataatgagaatacacataaacatcaacaggctttatatattgcttaagttttgcacaagagaaatacagacaaagacaaagtttttctatggcagtatatctagtttctgcatcatttagtacacgactaagataataaattgcatgttctatgccatcatcatcttcctgagccaacatgctaccaatggtcttgtcagacgcagcaatatacaacttcatagtcttgtttcgactaggaggcattaacacaggaggcttgatcagatattctttaatttcatcgaaagccttttgatgctcttcattccatttgaatggttcatctttcttaagtcgaagtaatggcgaaaaaatttgagctttgccacttagattcgaaatgaatcgcctcaagaagttgatttttcctagcaaagactgaagttgttttttggtcgaaggaggcttcgtctcaagaatagcctttgtcttattttgatttatctcaatgccttttttatgcaccacaaaaccaaggaaatctcctgcacgcacacaaaaagcacactttaatggattcatttttaatccatgtttcctcattcgttcgaaagattgcctaagataatccaaatggctatcttctgaggaggatttgatgattatatcatcaatataaatttgcataaatgtgtcaataaaatcatgaaacatggaattcatggccctttgataagtggccccagcatttttcaacccaaagggcataaccacccattcataagtgcctaaagcaccagggcatcgaaatgctgttttcgacacatcactttcagcaataaatatttggttataaccagaataaccatctaacatgcttaaaaattcgaagccagctgccgaatctaccaacatttccgctactggcatagcatattcatctaggtgtagcattatttaaatccctaaaatctatgcatactctaagagttccattctttttaatgacagggactatatttgctaaccattcgacatacctggcagatctgatgaatttacacctta

SEQ ID NO: 11571 - DNA, 1157 bp, Glycine max
  Gm_smallRNAprecursor_4404
caattctactgtgtaaaataggttttgacaacatgtgcttaataatatcataatgagaatacacataaacatcaacaggctttatatattgcttaagttttgcacaagagaaatacagacaaagacaaagtttttctatggcagtatatctagtttctgcatcatttagtacacgactaagataataaattgcatgttctatgccatcatcatcttcctgagccaacatgctaccaatggtcttgtcagacgcagcaatatacaacttcatagtcttgtttcgactaggaggcattaacacaggaggcttgatcagatattctttaatttcatcgaaagccttttgatgctcttcattccatttgaatggttcatctttcttaagtcgaagtaatggcgaaaaaatttgagctttgccacttagattcgaaatgaatcgcctcaagaagttgatttttcctagcaaagactgaagttgttttttggtcgaaggaggcttcgtctcaagaatagcctttgtcttattttgatttatctcaatgccttttttatgcaccacaaaaccaaggaaatctcctgcacgcacacaaaaagcacactttaatggattcatttttaatccatgtttcctcattcgttcgaaagattgcctaagataatccaaatggctatcttctgaggaggatttgatgattatatcatcaatataaatttgcataaatgtgtcaataaaatcatgaaacatggaattcatggccctttgataagtggccccagcatttttcaacccaaagggcataaccacccattcataagtgcctaaagcaccagggcatcgaaatgctgttttcgacacatcactttcagcaataaatatttggttataaccagaataaccatctaacatgcttaaaaattcgaagccagctgccgaatctaccaacatttccgctactggcatagcatattcatctaggtgtagcattatttaaatccctaaaatctatgcatactctaagagttccattctttttaatgacagggactatatttgctaaccattcgacatacctggcagatctgatgaatttacaccttagcagcctttcgatctcttccttaattttggacatgatttctggtgcgaatcttcttgg

SEQ ID NO: 11572 - DNA, 1039 bp, Glycine max
  Gm_smallRNAprecursor_4405
atttctggtgcgaatcttcttggtagttgttttactggtctttttccctccttaatcggtaatttcatttcgaccatttctctgcttaacccaggcatttcgtggtaatcccaagcaaaacagtctttaaattctctaagaagaagcaccagtttttcttttagacttgaggtgatattggcactgatataggttggcctttttatcgagccatctccaatgtcgatttcctccaaaggatcttgagcctgcatctttggcacctcacttatgggatttttctcaaaacccagcggctcatcatcataaatacaatcaagtcttcgatcctttgtttctttgttttcgtgatcttcgatcttggcttcaactgccatattttgttgagattcagcctcaaaggccgtatttagtctattttcggccatataagccgtaattctggcccatgcagtggcctcagtcatattaatcttcatatatattccacccagttggtggaatgactccatcttcagagggaacagcatcaatttcctccctctcccatataaacccataggtaggatggagtttgacagagtggataacattgtcacttgattcgacaacagcctccttgtcaccacaaggtgctatgttagccaactttttgtcaaaggttcgtgcagtaacattatcaacctctgacttatagaagctttgatctgcctctatattttcaacaatcccatcctccctccagataatgagtttctggtggagggtagatggcacagccccaactccatgaatccattcccttcctaatagcaagttaaaattagccttagactgtatcaccaggaatagagttggtcgaactatactgcctacagcaacatctacttgaatggctcccaaagaatagccagttttaccctcataattcgaaagcacaatgttgtgggcagatagatcagtgtcatgtttcccgatcttgtagagcatagatcgaggcattaagttgacagccgctcctccatcaatgagcactttg

SEQ ID NO: 11573 - DNA, 1092 bp, Glycine max
  Gm_smallRNAprecursor_4406
atgttatgagatggttgatgtgatgttatgagatgttaaagtgtggacatgacaatgttgttaatggcggatggcggttcatggcggaaagtcaaaaatccgccataaaaatatggcggatggcgtagcggaaaatggcggatatatatatatatatatatatatatatatatatatatatatatatatatatatatatatatatatatatatatatatatatatatatatatatatactcattgaaattgaaaaaaacaaaggattgcattcaaataaactaaaaaagtttcatgagttcatacaataatcaagtaccaacaccaaataaactcattaaagagttcaaaataagaaaatgataaaaacataatgcaaagtgcaaagtgaaggttgaggctctaatcatcttctccaatcccaacataatcatcttcgttgttatcatatggtaatggagcatctccctttccctcttccccatcagacgcctcaaaattgaccatgatttcttcttcttcagattcaacatcaatattctcctcaacatctagatcctcatcattttcttggactgctttttgcttccttgatgaagatccaacaaccattgcctgttttttaaaactttgggcagcagcaacacttgttttttgctttttccgcctagtatacatcctacactctccaacccccgaagcctgatacacagttgcccaatttagagcatcatcatcttcaaataccaaatcatttccagcatcattatcatcatcttgatccatctctcccacgagccattcattgcatgcatccatatcattaagagaaattggatcaatttcatctcttgcattatatctttgcttcaattgttggttgtatttgacaaacaccaaatcatgcaacctcttgtgctaaagcctatttctttttttggaatgaatatacaacataacaaataaatgttgatttcaatctcaaatatactccaactaaaacttgatcatcaaaattaaataaaattaaaaagtatagttagagttttgtcacaattacttgctcaaacacactccaatttctttcacatct

SEQ ID NO: 11574 - DNA, 1133 bp, Glycine max
  Gm_smallRNAprecursor_4407
tatatatatatatatatatatatatatatatatatatatatatatatatatatactcattgaaattgaaaaaaacaaaggattgcattcaaataaactaaaaaagtttcatgagttcatacaataatcaagtaccaacaccaaataaactcattaaagagttcaaaataagaaaatgataaaaacataatgcaaagtgcaaagtgaaggttgaggctctaatcatcttctccaatcccaacataatcatcttcgttgttatcatatggtaatggagcatctccctttccctcttccccatcagacgcctcaaaattgaccatgatttcttcttcttcagattcaacatcaatattctcctcaacatctagatcctcatcattttcttggactgctttttgcttccttgatgaagatccaacaaccattgcctgttttttaaaactttgggcagcagcaacacttgttttttgctttttccgcctagtatacatcctacactctccaacccccgaagcctgatacacagttgcccaatttagagcatcatcatcttcaaataccaaatcatttccagcatcattatcatcatcttgatccatctctcccacgagccattcattgcatgcatccatatcattaagagaaattggatcaatttcatctcttgcattatatctttgcttcaattgttggttgtatttgacaaacaccaaatcatgcaacctcttgtgctaaagcctatttctttttttggaatgaatatacaacataacaaataaatgttgatttcaatctcaaatatactccaactaaaacttgatcatcaaaattaaataaaattaaaaagtatagttagagttttgtcacaattacttgctcaaacacactccaatttctttcacatcttgaagcactgcaagtcaaactcaaaatcttaatagctagcttctgcaaatttggagtttgtgacccaaacattcgccaccaatatgctgcaataccaattaccaaccaagatcataacttagaattctgaattataacactaatacataaaaaaatagtatgataaaagtttcttactaggagaatgggttttcctttgagccattgcaaagtcggaaccaaagt

SEQ ID NO: 11575 - DNA, 1165 bp, Glycine max
  Gm_smallRNAprecursor_4408
ccctcttgcccacatccaattttgctcaaattggatcctacaagtcctaaatcatgtataaatcgtatttaaaccaaaaacaagcttcaggtcaaggtaaatccaaatctaggtatccaaaacccattaattgagtgaattttcaaggtctgagaagtgaaaatgagaatggggtaattttggagtaaactcttatctcaaacaagtctataacattaatttaaacttgctcaaattggttttacggcgaaaactccaccgattcaaaatttgacccctcaacacccaatttaccctagaaatggctcttgctttcacctttgtcactcatttttttctcatttgctctgcccaagctttcccacaagtcctatttgacattttaaactaggattaactcactttagcctccaattaccactaaccccaaatttagcttttcaaaccctcaaaacctcacacttttccactcacatttaaccctaggttaactctccccatcatctctaccagttttctaccaacaatttcagcacacaaacatcacaaagcatcatcataaaaccctaaaacagaatgggtaaatttgactcacatcaaacatgacaagtttagcatgctttcaacaaattccttcacaaataactaccatagggcattaacctagtagaactacccatcatatctcccaaaaacccaatacccacgaaattcatgtgagaagaagtctacccaaacctgaaattcgaagtcccacaacgtagaggtgcgcttcacgactccgaaaatggcttccttttgcaatttggagtagaaatggtgaacaaagtttggagctttaatggagaggaagaagaagagaaaagcaacgtgagaaggtgaggaaaagctttctgaatttctgctgagtgaagagagagaacgtggctttttaagaaaaatgattttctttttcctatttttttctcataaagcacttgccacttgtcccattttgagtggaacaaaaagaggcccacctcttccccttgatgtgacttcatactcagtcacaaggagagaaaaaattgactttttgaatgctaaaatcctgcctcagtttgcgtgccgcttctctggttccagttcctcgcgtttctctgcacccgtcggggcccgttttcga

SEQ ID NO: 11576 - DNA, 1047 bp, Glycine max
  Gm_smallRNAprecursor_4409
gcattacaatggattacgtatcctattccaaacaaaaaagacttacttaacaaattaaattctgcaaaagtattttcaaaatttgatatgaaatctggattctggcaaatccaaatccaagaattagataggtacaaaacagcgtttactgtaccttttgggcaatatgaatggaacgtaatgccattcggactgaagaatgccccttcagaatttcaaaaaatcatgaatgatatttttaatccctattcaaaattcgtcatcgtctacattgaggatgttttaatcttttcccaaaacattgatcaacatttcaaacatctccagactttcatccatatcattaaacagaatggtttggcagtctccaaatcaaaaatcaatcttttccaaactcgaatttgattccttggtcacaatatatatatatatatatatatatatatatatatcaaggtacaatcattccaatagaaaggtcaatagagtttgctagcaagtttcccaaccaaatcttagacaaaacccagttacaacgatttctaggttgtctaaattatgtaggagaatttgtcccctatttaaacaatattgtcaaaccattgcatgataggctgaaaaagaatccgcctccttggtctgacctccatactcaaacagtcaaagaaatcaaggtcaaagtccaatccataaagtgtttgtatcttcctgttccacaggcattcaaaattgtcgaaacagatgcatcagacataggttatggtggcatcctcaaacaaaaaatacatggttaagatcatgtcattgcatatacttcaaaacattggaatcctgcacaattaaaatattcaactgttaaaaaagaagttttagcaattgttttgtgcatttccaaatttcaatcagatttgttgaatcaaaaatttttaatcagagttgactgtaaatcagccaaagacattttacaaaaagatgttaaaaagcttgcctcaaaacaaatttttgcaagatggcaagcaattttaagtgtctttgattttgacatag

SEQ ID NO: 11577 - DNA, 1164 bp, Glycine max
  Gm_smallRNAprecursor_4410
tcaagaataaagaaaagactcaatcaaaataagtactaaattttttttcaaaacattaagtagcacatgaatttttcacaaaaccttttaccaaagagtttttactctctggtaatcgattaccagattattgtaatcgattcaattacaataatttggtaatcgattaccggtgtgtttgaacgttgaaattcaaattcaattgtgaagagtcacatcctttcacaaaaatgatttgtgtaatcgattacaatgatttggtaattgattaccagtgataggttttgaacaaaaatcaaaagatgtaactcttccaatggttttcaagtttttataaaagttataactcttctaatggttttcttgaccagacttgaagagtctataaaagcaagaccttgacttgcattttaagacacttacttacaacctttacaaacaatcattacaattttctacaacctttgaatctctttgaacttcttcttcttcttccttttgtcaaaagctttccaaagttttctggttttcctaaccttgaatacaaaactgtgttattcatcttttcattcccttctccctttgccaaaaagaattcgttaaggactaaccacctgaattctttttgtgtctctcttctcccttttccaaaagaacaaaggactaaccgtttgaattcttttgtgtctcccttctcccttgccaaaaaattcaaaatgacacagtctgagaattcttttgattcttccatttcccataaacaaaagatttcaaaggactaaccgcctgagaattcttttgtttcccccttcataaagtttcaaaggaataaccgtcggagaactttgtcttaacacattggagggtacatcctttgtggtacaagtagagggtacatctacttgggttattgtgactgagaacaagagagggtacatctcttgtggatcaattctagtggagggtacatccactaggttgatcaaagagaacaagggagggtacatcccttgtggatatttgcttgtaaaggaatttacaaggttgaaaagaaatctcaaggaccgtaggtcgcttggggactggatgtaggcacgggttgttgtcgaaccagtataaaactcttgtgtgtttgtcttcttcttccctactcttttaatttcc

SEQ ID NO: 11578 - DNA, 1199 bp, Glycine max
  Gm_smallRNAprecursor_4411
tttaaaataataatatctacataagtataatataatgttatgtaagatctattatttattacatcaaagaaattttattatcataaagaaacaaagcgtccaaattgtataatgaggtctcttagtattttttgtgagactcattatcataggaaaagttcttttgaggtgatgatgaatatataaatcttgattttgaatttagatcttttatgaatatcgctcatatttaattttatgttattttagataggaagtaagaatgcagtatgattgaaatgaaaatataaacttgaaaacagatatcaagggcacaccggagaccggcttacaaaccccaggttttcataaacaaagaaaccgaagcggcggcagagccgcacaggatcggtgaagggagaagagagaaggatgaaaaatagaaatttattgaatctagaaagaagcgcttacaaaaatcttgtttcagagcacctctcttccgaaacctgaaaaaatggctaaatgaaagggtgcctcacaacatacttgaggactccttatatagccaaaaatctaagaccggtagttgccggtagttttgaccgggactatttgactgtttgttacaagacaagtagttttgaccgggactttaatggctacaggacaggtagtattgtccatcattaattacacattaattacaaacagacggttttgtgaccgaaattaaatttaatctaaacagataccaaaacaatcatcttcgttttggtaaaagggatcttcttcgtcttcttcagcagaacttgtttcttccttctttgaggatgaagcttcttcttcctgttgtaacatttgtagaacttccttcagatttttagctaagacctcctttgatgtcgatcctgctaaaaatgctgccagatgagacttttggttcaaaaacacagaagtctctggatcagccgctttgaggaattctggatgggatttgaaccatagttttacttgttctggatccgctttggatgagtcaaattgtgtccaccattttacaaatgcgtgtctttgtagtgatggatattggtttgtcttttcaatcttgctgtaacgatattgccatgagaatatccatgacagtgcaaagcttgaaaagtatttaagatctgctggaattcgtgattcctgcgaattgtattgtttcttaaattggg

SEQ ID NO: 11579 - DNA, 1141 bp, Glycine max
  Gm_smallRNAprecursor_4412
ataaagaaacaaagcgtccaaattgtataatgaggtctcttagtattttttgtgagactcattatcataggaaaagttcttttgaggtgatgatgaatatataaatcttgattttgaatttagatcttttatgaatatcgctcatatttaattttatgttattttagataggaagtaagaatgcagtatgattgaaatgaaaatataaacttgaaaacagatatcaagggcacaccggagaccggcttacaaaccccaggttttcataaacaaagaaaccgaagcggcggcagagccgcacaggatcggtgaagggagaagagagaaggatgaaaaatagaaatttattgaatctagaaagaagcgcttacaaaaatcttgtttcagagcacctctcttccgaaacctgaaaaaatggctaaatgaaagggtgcctcacaacatacttgaggactccttatatagccaaaaatctaagaccggtagttgccggtagttttgaccgggactatttgactgtttgttacaagacaagtagttttgaccgggactttaatggctacaggacaggtagtattgtccatcattaattacacattaattacaaacagacggttttgtgaccgaaattaaatttaatctaaacagataccaaaacaatcatcttcgttttggtaaaagggatcttcttcgtcttcttcagcagaacttgtttcttccttctttgaggatgaagcttcttcttcctgttgtaacatttgtagaacttccttcagatttttagctaagacctcctttgatgtcgatcctgctaaaaatgctgccagatgagacttttggttcaaaaacacagaagtctctggatcagccgctttgaggaattctggatgggatttgaaccatagttttacttgttctggatccgctttggatgagtcaaattgtgtccaccattttacaaatgcgtgtctttgtagtgatggatattggtttgtcttttcaatcttgctgtaacgatattgccatgagaatatccatgacagtgcaaagcttgaaaagtatttaagatctgctggaattcgtgattcctgcgaattgtattgtttcttaaattgggaaaatccttgttggaccgtttctg

SEQ ID NO: 11580 - DNA, 1154 bp, Glycine max
  Gm_smallRNAprecursor_4413
ataaagaaacaaagcgtccaaattgtataatgaggtctcttagtattttttgtgagactcattatcataggaaaagttcttttgaggtgatgatgaatatataaatcttgattttgaatttagatcttttatgaatatcgctcatatttaattttatgttattttagataggaagtaagaatgcagtatgattgaaatgaaaatataaacttgaaaacagatatcaagggcacaccggagaccggcttacaaaccccaggttttcataaacaaagaaaccgaagcggcggcagagccgcacaggatcggtgaagggagaagagagaaggatgaaaaatagaaatttattgaatctagaaagaagcgcttacaaaaatcttgtttcagagcacctctcttccgaaacctgaaaaaatggctaaatgaaagggtgcctcacaacatacttgaggactccttatatagccaaaaatctaagaccggtagttgccggtagttttgaccgggactatttgactgtttgttacaagacaagtagttttgaccgggactttaatggctacaggacaggtagtattgtccatcattaattacacattaattacaaacagacggttttgtgaccgaaattaaatttaatctaaacagataccaaaacaatcatcttcgttttggtaaaagggatcttcttcgtcttcttcagcagaacttgtttcttccttctttgaggatgaagcttcttcttcctgttgtaacatttgtagaacttccttcagatttttagctaagacctcctttgatgtcgatcctgctaaaaatgctgccagatgagacttttggttcaaaaacacagaagtctctggatcagccgctttgaggaattctggatgggatttgaaccatagttttacttgttctggatccgctttggatgagtcaaattgtgtccaccattttacaaatgcgtgtctttgtagtgatggatattggtttgtcttttcaatcttgctgtaacgatattgccatgagaatatccatgacagtgcaaagcttgaaaagtatttaagatctgctggaattcgtgattcctgcgaattgtattgtttcttaaattgggaaaatccttgttggaccgtttctgggaatatctctgg

SEQ ID NO: 11581 - DNA, 1061 bp, Glycine max
  Gm_smallRNAprecursor_4414
ctcatatttaattttatgttattttagataggaagtaagaatgcagtatgattgaaatgaaaatataaacttgaaaacagatatcaagggcacaccggagaccggcttacaaaccccaggttttcataaacaaagaaaccgaagcggcggcagagccgcacaggatcggtgaagggagaagagagaaggatgaaaaatagaaatttattgaatctagaaagaagcgcttacaaaaatcttgtttcagagcacctctcttccgaaacctgaaaaaatggctaaatgaaagggtgcctcacaacatacttgaggactccttatatagccaaaaatctaagaccggtagttgccggtagttttgaccgggactatttgactgtttgttacaagacaagtagttttgaccgggactttaatggctacaggacaggtagtattgtccatcattaattacacattaattacaaacagacggttttgtgaccgaaattaaatttaatctaaacagataccaaaacaatcatcttcgttttggtaaaagggatcttcttcgtcttcttcagcagaacttgtttcttccttctttgaggatgaagcttcttcttcctgttgtaacatttgtagaacttccttcagatttttagctaagacctcctttgatgtcgatcctgctaaaaatgctgccagatgagacttttggttcaaaaacacagaagtctctggatcagccgctttgaggaattctggatgggatttgaaccatagttttacttgttctggatccgctttggatgagtcaaattgtgtccaccattttacaaatgcgtgtctttgtagtgatggatattggtttgtcttttcaatcttgctgtaacgatattgccatgagaatatccatgacagtgcaaagcttgaaaagtatttaagatctgctggaattcgtgattcctgcgaattgtattgtttcttaaattgggaaaatccttgttggaccgtttctgggaatatctctgggattggtccaaagaagtcccaccattgcaaaaaccaattgggaaaat

SEQ ID NO: 11582 - DNA, 1063 bp, Glycine max
  Gm_smallRNAprecursor_4415
ctcatatttaattttatgttattttagataggaagtaagaatgcagtatgattgaaatgaaaatataaacttgaaaacagatatcaagggcacaccggagaccggcttacaaaccccaggttttcataaacaaagaaaccgaagcggcggcagagccgcacaggatcggtgaagggagaagagagaaggatgaaaaatagaaatttattgaatctagaaagaagcgcttacaaaaatcttgtttcagagcacctctcttccgaaacctgaaaaaatggctaaatgaaagggtgcctcacaacatacttgaggactccttatatagccaaaaatctaagaccggtagttgccggtagttttgaccgggactatttgactgtttgttacaagacaagtagttttgaccgggactttaatggctacaggacaggtagtattgtccatcattaattacacattaattacaaacagacggttttgtgaccgaaattaaatttaatctaaacagataccaaaacaatcatcttcgttttggtaaaagggatcttcttcgtcttcttcagcagaacttgtttcttccttctttgaggatgaagcttcttcttcctgttgtaacatttgtagaacttccttcagatttttagctaagacctcctttgatgtcgatcctgctaaaaatgctgccagatgagacttttggttcaaaaacacagaagtctctggatcagccgctttgaggaattctggatgggatttgaaccatagttttacttgttctggatccgctttggatgagtcaaattgtgtccaccattttacaaatgcgtgtctttgtagtgatggatattggtttgtcttttcaatcttgctgtaacgatattgccatgagaatatccatgacagtgcaaagcttgaaaagtatttaagatctgctggaattcgtgattcctgcgaattgtattgtttcttaaattgggaaaatccttgttggaccgtttctgggaatatctctgggattggtccaaagaagtcccaccattgcaaaaaccaattgggaaaattg

SEQ ID NO: 11583 - DNA, 1063 bp, Glycine max; identical to SEQ ID NO: 11582
  Gm_smallRNAprecursor_4416

SEQ ID NO: 11584 - DNA, 1064 bp, Glycine max
  Gm_smallRNAprecursor_4417
ctcatatttaattttatgttattttagataggaagtaagaatgcagtatgattgaaatgaaaatataaacttgaaaacagatatcaagggcacaccggagaccggcttacaaaccccaggttttcataaacaaagaaaccgaagcggcggcagagccgcacaggatcggtgaagggagaagagagaaggatgaaaaatagaaatttattgaatctagaaagaagcgcttacaaaaatcttgtttcagagcacctctcttccgaaacctgaaaaaatggctaaatgaaagggtgcctcacaacatacttgaggactccttatatagccaaaaatctaagaccggtagttgccggtagttttgaccgggactatttgactgtttgttacaagacaagtagttttgaccgggactttaatggctacaggacaggtagtattgtccatcattaattacacattaattacaaacagacggttttgtgaccgaaattaaatttaatctaaacagataccaaaacaatcatcttcgttttggtaaaagggatcttcttcgtcttcttcagcagaacttgtttcttccttctttgaggatgaagcttcttcttcctgttgtaacatttgtagaacttccttcagatttttagctaagacctcctttgatgtcgatcctgctaaaaatgctgccagatgagacttttggttcaaaaacacagaagtctctggatcagccgctttgaggaattctggatgggatttgaaccatagttttacttgttctggatccgctttggatgagtcaaattgtgtccaccattttacaaatgcgtgtctttgtagtgatggatattggtttgtcttttcaatcttgctgtaacgatattgccatgagaatatccatgacagtgcaaagcttgaaaagtatttaagatctgctggaattcgtgattcctgcgaattgtattgtttcttaaattgggaaaatccttgttggaccgtttctgggaatatctctgggattggtccaaagaagtcccaccattgcaaaaaccaattgggaaaattgt

SEQ ID NO: 11585 - DNA, 1209 bp, Glycine max
  Gm_smallRNAprecursor_4418
ctcatatttaattttatgttattttagataggaagtaagaatgcagtatgattgaaatgaaaatataaacttgaaaacagatatcaagggcacaccggagaccggcttacaaaccccaggttttcataaacaaagaaaccgaagcggcggcagagccgcacaggatcggtgaagggagaagagagaaggatgaaaaatagaaatttattgaatctagaaagaagcgcttacaaaaatcttgtttcagagcacctctcttccgaaacctgaaaaaatggctaaatgaaagggtgcctcacaacatacttgaggactccttatatagccaaaaatctaagaccggtagttgccggtagttttgaccgggactatttgactgtttgttacaagacaagtagttttgaccgggactttaatggctacaggacaggtagtattgtccatcattaattacacattaattacaaacagacggttttgtgaccgaaattaaatttaatctaaacagataccaaaacaatcatcttcgttttggtaaaagggatcttcttcgtcttcttcagcagaacttgtttcttccttctttgaggatgaagcttcttcttcctgttgtaacatttgtagaacttccttcagatttttagctaagacctcctttgatgtcgatcctgctaaaaatgctgccagatgagacttttggttcaaaaacacagaagtctctggatcagccgctttgaggaattctggatgggatttgaaccatagttttacttgttctggatccgctttggatgagtcaaattgtgtccaccattttacaaatgcgtgtctttgtagtgatggatattggtttgtcttttcaatcttgctgtaacgatattgccatgagaatatccatgacagtgcaaagcttgaaaagtatttaagatctgctggaattcgtgattcctgcgaattgtattgtttcttaaattgggaaaatccttgttggaccgtttctgggaatatctctgggattggtccaaagaagtcccaccattgcaaaaaccaattgggaaaattgtaaattgtgttggtcttgaaatatatcagccatgaatgcttgaagcgggtattttggtgccaaaacaccttagtccaagcatcaacgtaatcccaataggtataacctaccggatcaaatggaactgaaaatctctttcctttgtt

SEQ ID NO: 11586 - DNA, 1057 bp, Glycine max
  Gm_smallRNAprecursor_4419
atatttaattttatgttattttagataggaagtaagaatgcagtatgattgaaatgaaaatataaacttgaaaacagatatcaagggcacaccggagaccggcttacaaaccccaggttttcataaacaaagaaaccgaagcggcggcagagccgcacaggatcggtgaagggagaagagagaaggatgaaaaatagaaatttattgaatctagaaagaagcgcttacaaaaatcttgtttcagagcacctctcttccgaaacctgaaaaaatggctaaatgaaagggtgcctcacaacatacttgaggactccttatatagccaaaaatctaagaccggtagttgccggtagttttgaccgggactatttgactgtttgttacaagacaagtagttttgaccgggactttaatggctacaggacaggtagtattgtccatcattaattacacattaattacaaacagacggttttgtgaccgaaattaaatttaatctaaacagataccaaaacaatcatcttcgttttggtaaaagggatcttcttcgtcttcttcagcagaacttgtttcttccttctttgaggatgaagcttcttcttcctgttgtaacatttgtagaacttccttcagatttttagctaagacctcctttgatgtcgatcctgctaaaaatgctgccagatgagacttttggttcaaaaacacagaagtctctggatcagccgctttgaggaattctggatgggatttgaaccatagttttacttgttctggatccgctttggatgagtcaaattgtgtccaccattttacaaatgcgtgtctttgtagtgatggatattggtttgtcttttcaatcttgctgtaacgatattgccatgagaatatccatgacagtgcaaagcttgaaaagtatttaagatctgctggaattcgtgattcctgcgaattgtattgtttcttaaattgggaaaatccttgttggaccgtttctgggaatatctctgggattggtccaaagaagtcccaccattgcaaaaaccaattgggaaaa

SEQ ID NO: 11587 - DNA, 1058 bp, Glycine max
  Gm_smallRNAprecursor_4420
atatttaattttatgttattttagataggaagtaagaatgcagtatgattgaaatgaaaatataaacttgaaaacagatatcaagggcacaccggagaccggcttacaaaccccaggttttcataaacaaagaaaccgaagcggcggcagagccgcacaggatcggtgaagggagaagagagaaggatgaaaaatagaaatttattgaatctagaaagaagcgcttacaaaaatcttgtttcagagcacctctcttccgaaacctgaaaaaatggctaaatgaaagggtgcctcacaacatacttgaggactccttatatagccaaaaatctaagaccggtagttgccggtagttttgaccgggactatttgactgtttgttacaagacaagtagttttgaccgggactttaatggctacaggacaggtagtattgtccatcattaattacacattaattacaaacagacggttttgtgaccgaaattaaatttaatctaaacagataccaaaacaatcatcttcgttttggtaaaagggatcttcttcgtcttcttcagcagaacttgtttcttccttctttgaggatgaagcttcttcttcctgttgtaacatttgtagaacttccttcagatttttagctaagacctcctttgatgtcgatcctgctaaaaatgctgccagatgagacttttggttcaaaaacacagaagtctctggatcagccgctttgaggaattctggatgggatttgaaccatagttttacttgttctggatccgctttggatgagtcaaattgtgtccaccattttacaaatgcgtgtctttgtagtgatggatattggtttgtcttttcaatcttgctgtaacgatattgccatgagaatatccatgacagtgcaaagcttgaaaagtatttaagatctgctggaattcgtgattcctgcgaattgtattgtttcttaaattgggaaaatccttgttggaccgtttctgggaatatctctgggattggtccaaagaagtcccaccattgcaaaaaccaattgggaaaat

SEQ ID NO: 11588 - DNA, 1083 bp, Glycine max
  Gm_smallRNAprecursor_4421
atatttaattttatgttattttagataggaagtaagaatgcagtatgattgaaatgaaaatataaacttgaaaacagatatcaagggcacaccggagaccggcttacaaaccccaggttttcataaacaaagaaaccgaagcggcggcagagccgcacaggatcggtgaagggagaagagagaaggatgaaaaatagaaatttattgaatctagaaagaagcgcttacaaaaatcttgtttcagagcacctctcttccgaaacctgaaaaaatggctaaatgaaagggtgcctcacaacatacttgaggactccttatatagccaaaaatctaagaccggtagttgccggtagttttgaccgggactatttgactgtttgttacaagacaagtagttttgaccgggactttaatggctacaggacaggtagtattgtccatcattaattacacattaattacaaacagacggttttgtgaccgaaattaaatttaatctaaacagataccaaaacaatcatcttcgttttggtaaaagggatcttcttcgtcttcttcagcagaacttgtttcttccttctttgaggatgaagcttcttcttcctgttgtaacatttgtagaacttccttcagatttttagctaagacctcctttgatgtcgatcctgctaaaaatgctgccagatgagacttttggttcaaaaacacagaagtctctggatcagccgctttgaggaattctggatgggatttgaaccatagttttacttgttctggatccgctttggatgagtcaaattgtgtccaccattttacaaatgcgtgtctttgtagtgatggatattggtttgtcttttcaatcttgctgtaacgatattgccatgagaatatccatgacagtgcaaagcttgaaaagtatttaagatctgctggaattcgtgattcctgcgaattgtattgtttcttaaattgggaaaatccttgttggaccgtttctgggaatatctctgggattggtccaaagaagtcccaccattgcaaaaaccaattgggaaaattgtaaattgtgttggtcttgaaata

SEQ ID NO: 11589 - DNA, 1056 bp, Glycine max
  Gm_smallRNAprecursor_4422
tatttaattttatgttattttagataggaagtaagaatgcagtatgattgaaatgaaaatataaacttgaaaacagatatcaagggcacaccggagaccggcttacaaaccccaggttttcataaacaaagaaaccgaagcggcggcagagccgcacaggatcggtgaagggagaagagagaaggatgaaaaatagaaatttattgaatctagaaagaagcgcttacaaaaatcttgtttcagagcacctctcttccgaaacctgaaaaaatggctaaatgaaagggtgcctcacaacatacttgaggactccttatatagccaaaaatctaagaccggtagttgccggtagttttgaccgggactatttgactgtttgttacaagacaagtagttttgaccgggactttaatggctacaggacaggtagtattgtccatcattaattacacattaattacaaacagacggttttgtgaccgaaattaaatttaatctaaacagataccaaaacaatcatcttcgttttggtaaaagggatcttcttcgtcttcttcagcagaacttgtttcttccttctttgaggatgaagcttcttcttcctgttgtaacatttgtagaacttccttcagatttttagctaagacctcctttgatgtcgatcctgctaaaaatgctgccagatgagacttttggttcaaaaacacagaagtctctggatcagccgctttgaggaattctggatgggatttgaaccatagttttacttgttctggatccgctttggatgagtcaaattgtgtccaccattttacaaatgcgtgtctttgtagtgatggatattggtttgtcttttcaatcttgctgtaacgatattgccatgagaatatccatgacagtgcaaagcttgaaaagtatttaagatctgctggaattcgtgattcctgcgaattgtattgtttcttaaattgggaaaatccttgttggaccgtttctgggaatatctctgggattggtccaaagaagtcccaccattgcaaaaaccaattgggaaaa

SEQ ID NO: 11590 - DNA, 1056 bp, Glycine max; identical to SEQ ID NO: 11589
  Gm_smallRNAprecursor_4423

SEQ ID NO: 11591 - DNA, 1057 bp, Glycine max
  Gm_smallRNAprecursor_4424
tatttaattttatgttattttagataggaagtaagaatgcagtatgattgaaatgaaaatataaacttgaaaacagatatcaagggcacaccggagaccggcttacaaaccccaggttttcataaacaaagaaaccgaagcggcggcagagccgcacaggatcggtgaagggagaagagagaaggatgaaaaatagaaatttattgaatctagaaagaagcgcttacaaaaatcttgtttcagagcacctctcttccgaaacctgaaaaaatggctaaatgaaagggtgcctcacaacatacttgaggactccttatatagccaaaaatctaagaccggtagttgccggtagttttgaccgggactatttgactgtttgttacaagacaagtagttttgaccgggactttaatggctacaggacaggtagtattgtccatcattaattacacattaattacaaacagacggttttgtgaccgaaattaaatttaatctaaacagataccaaaacaatcatcttcgttttggtaaaagggatcttcttcgtcttcttcagcagaacttgtttcttccttctttgaggatgaagcttcttcttcctgttgtaacatttgtagaacttccttcagatttttagctaagacctcctttgatgtcgatcctgctaaaaatgctgccagatgagacttttggttcaaaaacacagaagtctctggatcagccgctttgaggaattctggatgggatttgaaccatagttttacttgttctggatccgctttggatgagtcaaattgtgtccaccattttacaaatgcgtgtctttgtagtgatggatattggtttgtcttttcaatcttgctgtaacgatattgccatgagaatatccatgacagtgcaaagcttgaaaagtatttaagatctgctggaattcgtgattcctgcgaattgtattgtttcttaaattgggaaaatccttgttggaccgtttctgggaatatctctgggattggtccaaagaagtcccaccattgcaaaaaccaattgggaaaat

SEQ ID NO: 11592 - DNA, 1059 bp, Glycine max
  Gm_smallRNAprecursor_4425
tatttaattttatgttattttagataggaagtaagaatgcagtatgattgaaatgaaaatataaacttgaaaacagatatcaagggcacaccggagaccggcttacaaaccccaggttttcataaacaaagaaaccgaagcggcggcagagccgcacaggatcggtgaagggagaagagagaaggatgaaaaatagaaatttattgaatctagaaagaagcgcttacaaaaatcttgtttcagagcacctctcttccgaaacctgaaaaaatggctaaatgaaagggtgcctcacaacatacttgaggactccttatatagccaaaaatctaagaccggtagttgccggtagttttgaccgggactatttgactgtttgttacaagacaagtagttttgaccgggactttaatggctacaggacaggtagtattgtccatcattaattacacattaattacaaacagacggttttgtgaccgaaattaaatttaatctaaacagataccaaaacaatcatcttcgttttggtaaaagggatcttcttcgtcttcttcagcagaacttgtttcttccttctttgaggatgaagcttcttcttcctgttgtaacatttgtagaacttccttcagatttttagctaagacctcctttgatgtcgatcctgctaaaaatgctgccagatgagacttttggttcaaaaacacagaagtctctggatcagccgctttgaggaattctggatgggatttgaaccatagttttacttgttctggatccgctttggatgagtcaaattgtgtccaccattttacaaatgcgtgtctttgtagtgatggatattggtttgtcttttcaatcttgctgtaacgatattgccatgagaatatccatgacagtgcaaagcttgaaaagtatttaagatctgctggaattcgtgattcctgcgaattgtattgtttcttaaattgggaaaatccttgttggaccgtttctgggaatatctctgggattggtccaaagaagtcccaccattgcaaaaaccaattgggaaaattg

SEQ ID NO: 11593 - DNA, 1059 bp, Glycine max; identical to SEQ ID NO: 11592
  Gm_smallRNAprecursor_4426

SEQ ID NO: 11594 - DNA, 1082 bp, Glycine max
  Gm_smallRNAprecursor_4427
tatttaattttatgttattttagataggaagtaagaatgcagtatgattgaaatgaaaatataaacttgaaaacagatatcaagggcacaccggagaccggcttacaaaccccaggttttcataaacaaagaaaccgaagcggcggcagagccgcacaggatcggtgaagggagaagagagaaggatgaaaaatagaaatttattgaatctagaaagaagcgcttacaaaaatcttgtttcagagcacctctcttccgaaacctgaaaaaatggctaaatgaaagggtgcctcacaacatacttgaggactccttatatagccaaaaatctaagaccggtagttgccggtagttttgaccgggactatttgactgtttgttacaagacaagtagttttgaccgggactttaatggctacaggacaggtagtattgtccatcattaattacacattaattacaaacagacggttttgtgaccgaaattaaatttaatctaaacagataccaaaacaatcatcttcgttttggtaaaagggatcttcttcgtcttcttcagcagaacttgtttcttccttctttgaggatgaagcttcttcttcctgttgtaacatttgtagaacttccttcagatttttagctaagacctcctttgatgtcgatcctgctaaaaatgctgccagatgagacttttggttcaaaaacacagaagtctctggatcagccgctttgaggaattctggatgggatttgaaccatagttttacttgttctggatccgctttggatgagtcaaattgtgtccaccattttacaaatgcgtgtctttgtagtgatggatattggtttgtcttttcaatcttgctgtaacgatattgccatgagaatatccatgacagtgcaaagcttgaaaagtatttaagatctgctggaattcgtgattcctgcgaattgtattgtttcttaaattgggaaaatccttgttggaccgtttctgggaatatctctgggattggtccaaagaagtcccaccattgcaaaaaccaattgggaaaattgtaaattgtgttggtcttgaaata

SEQ ID NO: 11595 - DNA, 1055 bp, Glycine max
  Gm_smallRNAprecursor_4428
atttaattttatgttattttagataggaagtaagaatgcagtatgattgaaatgaaaatataaacttgaaaacagatatcaagggcacaccggagaccggcttacaaaccccaggttttcataaacaaagaaaccgaagcggcggcagagccgcacaggatcggtgaagggagaagagagaaggatgaaaaatagaaatttattgaatctagaaagaagcgcttacaaaaatcttgtttcagagcacctctcttccgaaacctgaaaaaatggctaaatgaaagggtgcctcacaacatacttgaggactccttatatagccaaaaatctaagaccggtagttgccggtagttttgaccgggactatttgactgtttgttacaagacaagtagttttgaccgggactttaatggctacaggacaggtagtattgtccatcattaattacacattaattacaaacagacggttttgtgaccgaaattaaatttaatctaaacagataccaaaacaatcatcttcgttttggtaaaagggatcttcttcgtcttcttcagcagaacttgtttcttccttctttgaggatgaagcttcttcttcctgttgtaacatttgtagaacttccttcagatttttagctaagacctcctttgatgtcgatcctgctaaaaatgctgccagatgagacttttggttcaaaaacacagaagtctctggatcagccgctttgaggaattctggatgggatttgaaccatagttttacttgttctggatccgctttggatgagtcaaattgtgtccaccattttacaaatgcgtgtctttgtagtgatggatattggtttgtcttttcaatcttgctgtaacgatattgccatgagaatatccatgacagtgcaaagcttgaaaagtatttaagatctgctggaattcgtgattcctgcgaattgtattgtttcttaaattgggaaaatccttgttggaccgtttctgggaatatctctgggattggtccaaagaagtcccaccattgcaaaaaccaattgggaaaa

SEQ ID NO: 11596 - DNA, 1058 bp, Glycine max
  Gm_smallRNAprecursor_4429
atttaattttatgttattttagataggaagtaagaatgcagtatgattgaaatgaaaatataaacttgaaaacagatatcaagggcacaccggagaccggcttacaaaccccaggttttcataaacaaagaaaccgaagcggcggcagagccgcacaggatcggtgaagggagaagagagaaggatgaaaaatagaaatttattgaatctagaaagaagcgcttacaaaaatcttgtttcagagcacctctcttccgaaacctgaaaaaatggctaaatgaaagggtgcctcacaacatacttgaggactccttatatagccaaaaatctaagaccggtagttgccggtagttttgaccgggactatttgactgtttgttacaagacaagtagttttgaccgggactttaatggctacaggacaggtagtattgtccatcattaattacacattaattacaaacagacggttttgtgaccgaaattaaatttaatctaaacagataccaaaacaatcatcttcgttttggtaaaagggatcttcttcgtcttcttcagcagaacttgtttcttccttctttgaggatgaagcttcttcttcctgttgtaacatttgtagaacttccttcagatttttagctaagacctcctttgatgtcgatcctgctaaaaatgctgccagatgagacttttggttcaaaaacacagaagtctctggatcagccgctttgaggaattctggatgggatttgaaccatagttttacttgttctggatccgctttggatgagtcaaattgtgtccaccattttacaaatgcgtgtctttgtagtgatggatattggtttgtcttttcaatcttgctgtaacgatattgccatgagaatatccatgacagtgcaaagcttgaaaagtatttaagatctgctggaattcgtgattcctgcgaattgtattgtttcttaaattgggaaaatccttgttggaccgtttctgggaatatctctgggattggtccaaagaagtcccaccattgcaaaaaccaattgggaaaattg

SEQ ID NO: 11597 - DNA, 1058 bp, Glycine max; identical to SEQ ID NO: 11596
  Gm_smallRNAprecursor_4430

SEQ ID NO: 11598 - DNA, 1081 bp, Glycine max
  Gm_smallRNAprecursor_4431
atttaattttatgttattttagataggaagtaagaatgcagtatgattgaaatgaaaatataaacttgaaaacagatatcaagggcacaccggagaccggcttacaaaccccaggttttcataaacaaagaaaccgaagcggcggcagagccgcacaggatcggtgaagggagaagagagaaggatgaaaaatagaaatttattgaatctagaaagaagcgcttacaaaaatcttgtttcagagcacctctcttccgaaacctgaaaaaatggctaaatgaaagggtgcctcacaacatacttgaggactccttatatagccaaaaatctaagaccggtagttgccggtagttttgaccgggactatttgactgtttgttacaagacaagtagttttgaccgggactttaatggctacaggacaggtagtattgtccatcattaattacacattaattacaaacagacggttttgtgaccgaaattaaatttaatctaaacagataccaaaacaatcatcttcgttttggtaaaagggatcttcttcgtcttcttcagcagaacttgtttcttccttctttgaggatgaagcttcttcttcctgttgtaacatttgtagaacttccttcagatttttagctaagacctcctttgatgtcgatcctgctaaaaatgctgccagatgagacttttggttcaaaaacacagaagtctctggatcagccgctttgaggaattctggatgggatttgaaccatagttttacttgttctggatccgctttggatgagtcaaattgtgtccaccattttacaaatgcgtgtctttgtagtgatggatattggtttgtcttttcaatcttgctgtaacgatattgccatgagaatatccatgacagtgcaaagcttgaaaagtatttaagatctgctggaattcgtgattcctgcgaattgtattgtttcttaaattgggaaaatccttgttggaccgtttctgggaatatctctgggattggtccaaagaagtcccaccattgcaaaaaccaattgggaaaattgtaaattgtgttggtcttgaaata

SEQ ID NO: 11599 - DNA, 1188 bp, Glycine max
  Gm_smallRNAprecursor_4432
ttatgttattttagataggaagtaagaatgcagtatgattgaaatgaaaatataaacttgaaaacagatatcaagggcacaccggagaccggcttacaaaccccaggttttcataaacaaagaaaccgaagcggcggcagagccgcacaggatcggtgaagggagaagagagaaggatgaaaaatagaaatttattgaatctagaaagaagcgcttacaaaaatcttgtttcagagcacctctcttccgaaacctgaaaaaatggctaaatgaaagggtgcctcacaacatacttgaggactccttatatagccaaaaatctaagaccggtagttgccggtagttttgaccgggactatttgactgtttgttacaagacaagtagttttgaccgggactttaatggctacaggacaggtagtattgtccatcattaattacacattaattacaaacagacggttttgtgaccgaaattaaatttaatctaaacagataccaaaacaatcatcttcgttttggtaaaagggatcttcttcgtcttcttcagcagaacttgtttcttccttctttgaggatgaagcttcttcttcctgttgtaacatttgtagaacttccttcagatttttagctaagacctcctttgatgtcgatcctgctaaaaatgctgccagatgagacttttggttcaaaaacacagaagtctctggatcagccgctttgaggaattctggatgggatttgaaccatagttttacttgttctggatccgctttggatgagtcaaattgtgtccaccattttacaaatgcgtgtctttgtagtgatggatattggtttgtcttttcaatcttgctgtaacgatattgccatgagaatatccatgacagtgcaaagcttgaaaagtatttaagatctgctggaattcgtgattcctgcgaattgtattgtttcttaaattgggaaaatccttgttggaccgtttctgggaatatctctgggattggtccaaagaagtcccaccattgcaaaaaccaattgggaaaattgtaaattgtgttggtcttgaaatatatcagccatgaatgcttgaagcgggtattttggtgccaaaacaccttagtccaagcatcaacgtaatcccaataggtataacctaccggatcaaatggaactgaaaatctcttt

SEQ ID NO: 11600 - DNA, 1142 bp, Glycine max
  Gm_smallRNAprecursor_4433
aaaatataaacttgaaaacagatatcaagggcacaccggagaccggcttacaaaccccaggttttcataaacaaagaaaccgaagcggcggcagagccgcacaggatcggtgaagggagaagagagaaggatgaaaaatagaaatttattgaatctagaaagaagcgcttacaaaaatcttgtttcagagcacctctcttccgaaacctgaaaaaatggctaaatgaaagggtgcctcacaacatacttgaggactccttatatagccaaaaatctaagaccggtagttgccggtagttttgaccgggactatttgactgtttgttacaagacaagtagttttgaccgggactttaatggctacaggacaggtagtattgtccatcattaattacacattaattacaaacagacggttttgtgaccgaaattaaatttaatctaaacagataccaaaacaatcatcttcgttttggtaaaagggatcttcttcgtcttcttcagcagaacttgtttcttccttctttgaggatgaagcttcttcttcctgttgtaacatttgtagaacttccttcagatttttagctaagacctcctttgatgtcgatcctgctaaaaatgctgccagatgagacttttggttcaaaaacacagaagtctctggatcagccgctttgaggaattctggatgggatttgaaccatagttttacttgttctggatccgctttggatgagtcaaattgtgtccaccattttacaaatgcgtgtctttgtagtgatggatattggtttgtcttttcaatcttgctgtaacgatattgccatgagaatatccatgacagtgcaaagcttgaaaagtatttaagatctgctggaattcgtgattcctgcgaattgtattgtttcttaaattgggaaaatccttgttggaccgtttctgggaatatctctgggattggtccaaagaagtcccaccattgcaaaaaccaattgggaaaattgtaaattgtgttggtcttgaaatatatcagccatgaatgcttgaagcgggtattttggtgccaaaacaccttagtccaagcatcaacgtaatcccaataggtataacctaccggatcaaatggaactgaaaatctcttt

SEQ ID NO: 11601 - DNA, 1141 bp, Glycine max
  Gm_smallRNAprecursor_4434
aaatataaacttgaaaacagatatcaagggcacaccggagaccggcttacaaaccccaggttttcataaacaaagaaaccgaagcggcggcagagccgcacaggatcggtgaagggagaagagagaaggatgaaaaatagaaatttattgaatctagaaagaagcgcttacaaaaatcttgtttcagagcacctctcttccgaaacctgaaaaaatggctaaatgaaagggtgcctcacaacatacttgaggactccttatatagccaaaaatctaagaccggtagttgccggtagttttgaccgggactatttgactgtttgttacaagacaagtagttttgaccgggactttaatggctacaggacaggtagtattgtccatcattaattacacattaattacaaacagacggttttgtgaccgaaattaaatttaatctaaacagataccaaaacaatcatcttcgttttggtaaaagggatcttcttcgtcttcttcagcagaacttgtttcttccttctttgaggatgaagcttcttcttcctgttgtaacatttgtagaacttccttcagatttttagctaagacctcctttgatgtcgatcctgctaaaaatgctgccagatgagacttttggttcaaaaacacagaagtctctggatcagccgctttgaggaattctggatgggatttgaaccatagttttacttgttctggatccgctttggatgagtcaaattgtgtccaccattttacaaatgcgtgtctttgtagtgatggatattggtttgtcttttcaatcttgctgtaacgatattgccatgagaatatccatgacagtgcaaagcttgaaaagtatttaagatctgctggaattcgtgattcctgcgaattgtattgtttcttaaattgggaaaatccttgttggaccgtttctgggaatatctctgggattggtccaaagaagtcccaccattgcaaaaaccaattgggaaaattgtaaattgtgttggtcttgaaatatatcagccatgaatgcttgaagcgggtattttggtgccaaaacaccttagtccaagcatcaacgtaatcccaataggtataacctaccggatcaaatggaactgaaaatctcttt

SEQ ID NO: 11602 - DNA, 1032 bp, Glycine max
  Gm_smallRNAprecursor_4435
gaagagagaaggatgaaaaatagaaatttattgaatctagaaagaagcgcttacaaaaatcttgtttcagagcacctctcttccgaaacctgaaaaaatggctaaatgaaagggtgcctcacaacatacttgaggactccttatatagccaaaaatctaagaccggtagttgccggtagttttgaccgggactatttgactgtttgttacaagacaagtagttttgaccgggactttaatggctacaggacaggtagtattgtccatcattaattacacattaattacaaacagacggttttgtgaccgaaattaaatttaatctaaacagataccaaaacaatcatcttcgttttggtaaaagggatcttcttcgtcttcttcagcagaacttgtttcttccttctttgaggatgaagcttcttcttcctgttgtaacatttgtagaacttccttcagatttttagctaagacctcctttgatgtcgatcctgctaaaaatgctgccagatgagacttttggttcaaaaacacagaagtctctggatcagccgctttgaggaattctggatgggatttgaaccatagttttacttgttctggatccgctttggatgagtcaaattgtgtccaccattttacaaatgcgtgtctttgtagtgatggatattggtttgtcttttcaatcttgctgtaacgatattgccatgagaatatccatgacagtgcaaagcttgaaaagtatttaagatctgctggaattcgtgattcctgcgaattgtattgtttcttaaattgggaaaatccttgttggaccgtttctgggaatatctctgggattggtccaaagaagtcccaccattgcaaaaaccaattgggaaaattgtaaattgtgttggtcttgaaatatatcagccatgaatgcttgaagcgggtattttggtgccaaaacaccttagtccaagcatcaacgtaatcccaataggtataacctaccggatcaaatggaactgaaaatctctttcctttgtt

SEQ ID NO: 11603 - DNA, 1058 bp, Glycine max
  Gm_smallRNAprecursor_4436
aaatttattgaatctagaaagaagcgcttacaaaaatcttgtttcagagcacctctcttccgaaacctgaaaaaatggctaaatgaaagggtgcctcacaacatacttgaggactccttatatagccaaaaatctaagaccggtagttgccggtagttttgaccgggactatttgactgtttgttacaagacaagtagttttgaccgggactttaatggctacaggacaggtagtattgtccatcattaattacacattaattacaaacagacggttttgtgaccgaaattaaatttaatctaaacagataccaaaacaatcatcttcgttttggtaaaagggatcttcttcgtcttcttcagcagaacttgtttcttccttctttgaggatgaagcttcttcttcctgttgtaacatttgtagaacttccttcagatttttagctaagacctcctttgatgtcgatcctgctaaaaatgctgccagatgagacttttggttcaaaaacacagaagtctctggatcagccgctttgaggaattctggatgggatttgaaccatagttttacttgttctggatccgctttggatgagtcaaattgtgtccaccattttacaaatgcgtgtctttgtagtgatggatattggtttgtcttttcaatcttgctgtaacgatattgccatgagaatatccatgacagtgcaaagcttgaaaagtatttaagatctgctggaattcgtgattcctgcgaattgtattgtttcttaaattgggaaaatccttgttggaccgtttctgggaatatctctgggattggtccaaagaagtcccaccattgcaaaaaccaattgggaaaattgtaaattgtgttggtcttgaaatatatcagccatgaatgcttgaagcgggtattttggtgccaaaacaccttagtccaagcatcaacgtaatcccaataggtataacctaccggatcaaatggaactgaaaatctctttcctttgttcaagtccgaaccaaagtgtcttggttgaagaacttttagtatttggatg

SEQ ID NO: 11604 - DNA, 1131 bp, Glycine max
  Gm_smallRNAprecursor_4437
acaagtagttttgaccgggactttaatggctacaggacaggtagtattgtccatcattaattacacattaattacaaacagacggttttgtgaccgaaattaaatttaatctaaacagataccaaaacaatcatcttcgttttggtaaaagggatcttcttcgtcttcttcagcagaacttgtttcttccttctttgaggatgaagcttcttcttcctgttgtaacatttgtagaacttccttcagatttttagctaagacctcctttgatgtcgatcctgctaaaaatgctgccagatgagacttttggttcaaaaacacagaagtctctggatcagccgctttgaggaattctggatgggatttgaaccatagttttacttgttctggatccgctttggatgagtcaaattgtgtccaccattttacaaatgcgtgtctttgtagtgatggatattggtttgtcttttcaatcttgctgtaacgatattgccatgagaatatccatgacagtgcaaagcttgaaaagtatttaagatctgctggaattcgtgattcctgcgaattgtattgtttcttaaattgggaaaatccttgttggaccgtttctgggaatatctctgggattggtccaaagaagtcccaccattgcaaaaaccaattgggaaaattgtaaattgtgttggtcttgaaatatatcagccatgaatgcttgaagcgggtattttggtgccaaaacaccttagtccaagcatcaacgtaatcccaataggtataacctaccggatcaaatggaactgaaaatctctttcctttgttcaagtccgaaccaaagtgtcttggttgaagaacttttagtatttggatggttgagtgggtgtttaaggtttggtcttttggatctttgaaatgtttgatagatactgagtttgaatctaccaaaatcaattcataaaaagttcttgtcttcaggatggtggttggtttgtagtgaaatcctggtgggaaagccttggccgtcgccttgaagggatttttgtcccaaaattcaggttccatctgcaaaacagttaacaatttatttttataaatataattgttagtttgtttggtaggtggtgtttgagcttt

SEQ ID NO: 11605 - DNA, 1146 bp, Glycine max
  Gm_smallRNAprecursor_4438
gctacaggacaggtagtattgtccatcattaattacacattaattacaaacagacggttttgtgaccgaaattaaatttaatctaaacagataccaaaacaatcatcttcgttttggtaaaagggatcttcttcgtcttcttcagcagaacttgtttcttccttctttgaggatgaagcttcttcttcctgttgtaacatttgtagaacttccttcagatttttagctaagacctcctttgatgtcgatcctgctaaaaatgctgccagatgagacttttggttcaaaaacacagaagtctctggatcagccgctttgaggaattctggatgggatttgaaccatagttttacttgttctggatccgctttggatgagtcaaattgtgtccaccattttacaaatgcgtgtctttgtagtgatggatattggtttgtcttttcaatcttgctgtaacgatattgccatgagaatatccatgacagtgcaaagcttgaaaagtatttaagatctgctggaattcgtgattcctgcgaattgtattgtttcttaaattgggaaaatccttgttggaccgtttctgggaatatctctgggattggtccaaagaagtcccaccattgcaaaaaccaattgggaaaattgtaaattgtgttggtcttgaaatatatcagccatgaatgcttgaagcgggtattttggtgccaaaacaccttagtccaagcatcaacgtaatcccaataggtataacctaccggatcaaatggaactgaaaatctctttcctttgttcaagtccgaaccaaagtgtcttggttgaagaacttttagtatttggatggttgagtgggtgtttaaggtttggtcttttggatctttgaaatgtttgatagatactgagtttgaatctaccaaaatcaattcataaaaagttcttgtcttcaggatggtggttggtttgtagtgaaatcctggtgggaaagccttggccgtcgccttgaagggatttttgtcccaaaattcaggttccatctgcaaaacagttaacaatttatttttataaatataattgttagtttgtttggtaggtggtgtttgagctttggctaaaggtagttttcctttagtattggtggctattttggtc

SEQ ID NO: 11606 - DNA, 1080 bp, Glycine max
  Gm_smallRNAprecursor_4439
ttcagcagaacttgtttcttccttctttgaggatgaagcttcttcttcctgttgtaacatttgtagaacttccttcagatttttagctaagacctcctttgatgtcgatcctgctaaaaatgctgccagatgagacttttggttcaaaaacacagaagtctctggatcagccgctttgaggaattctggatgggatttgaaccatagttttacttgttctggatccgctttggatgagtcaaattgtgtccaccattttacaaatgcgtgtctttgtagtgatggatattggtttgtcttttcaatcttgctgtaacgatattgccatgagaatatccatgacagtgcaaagcttgaaaagtatttaagatctgctggaattcgtgattcctgcgaattgtattgtttcttaaattgggaaaatccttgttggaccgtttctgggaatatctctgggattggtccaaagaagtcccaccattgcaaaaaccaattgggaaaattgtaaattgtgttggtcttgaaatatatcagccatgaatgcttgaagcgggtattttggtgccaaaacaccttagtccaagcatcaacgtaatcccaataggtataacctaccggatcaaatggaactgaaaatctctttcctttgttcaagtccgaaccaaagtgtcttggttgaagaacttttagtatttggatggttgagtgggtgtttaaggtttggtcttttggatctttgaaatgtttgatagatactgagtttgaatctaccaaaatcaattcataaaaagttcttgtcttcaggatggtggttggtttgtagtgaaatcctggtgggaaagccttggccgtcgccttgaagggatttttgtcccaaaattcaggttccatctgcaaaacagttaacaatttatttttataaatataattgttagtttgtttggtaggtggtgtttgagctttggctaaaggtagttttcctttagtattggtggctattttggtcattgacgcattttggatcattgtttgtaaatttgattcagattcatcatcagattctgaggcaatgtctgccca

SEQ ID NO: 11607 - DNA, 1104 bp, Glycine max
  Gm_smallRNAprecursor_4440
ttcagcagaacttgtttcttccttctttgaggatgaagcttcttcttcctgttgtaacatttgtagaacttccttcagatttttagctaagacctcctttgatgtcgatcctgctaaaaatgctgccagatgagacttttggttcaaaaacacagaagtctctggatcagccgctttgaggaattctggatgggatttgaaccatagttttacttgttctggatccgctttggatgagtcaaattgtgtccaccattttacaaatgcgtgtctttgtagtgatggatattggtttgtcttttcaatcttgctgtaacgatattgccatgagaatatccatgacagtgcaaagcttgaaaagtatttaagatctgctggaattcgtgattcctgcgaattgtattgtttcttaaattgggaaaatccttgttggaccgtttctgggaatatctctgggattggtccaaagaagtcccaccattgcaaaaaccaattgggaaaattgtaaattgtgttggtcttgaaatatatcagccatgaatgcttgaagcgggtattttggtgccaaaacaccttagtccaagcatcaacgtaatcccaataggtataacctaccggatcaaatggaactgaaaatctctttcctttgttcaagtccgaaccaaagtgtcttggttgaagaacttttagtatttggatggttgagtgggtgtttaaggtttggtcttttggatctttgaaatgtttgatagatactgagtttgaatctaccaaaatcaattcataaaaagttcttgtcttcaggatggtggttggtttgtagtgaaatcctggtgggaaagccttggccgtcgccttgaagggatttttgtcccaaaattcaggttccatctgcaaaacagttaacaatttatttttataaatataattgttagtttgtttggtaggtggtgtttgagctttggctaaaggtagttttcctttagtattggtggctattttggtcattgacgcattttggatcattgtttgtaaatttgattcagattcatcatcagattctgaggcaatgtctgcccaagattttttgattatttttggaaa

SEQ ID NO: 11608 - DNA, 1107 bp, Glycine max
  Gm_smallRNAprecursor_4441
gtagaacttccttcagatttttagctaagacctcctttgatgtcgatcctgctaaaaatgctgccagatgagacttttggttcaaaaacacagaagtctctggatcagccgctttgaggaattctggatgggatttgaaccatagttttacttgttctggatccgctttggatgagtcaaattgtgtccaccattttacaaatgcgtgtctttgtagtgatggatattggtttgtcttttcaatcttgctgtaacgatattgccatgagaatatccatgacagtgcaaagcttgaaaagtatttaagatctgctggaattcgtgattcctgcgaattgtattgtttcttaaattgggaaaatccttgttggaccgtttctgggaatatctctgggattggtccaaagaagtcccaccattgcaaaaaccaattgggaaaattgtaaattgtgttggtcttgaaatatatcagccatgaatgcttgaagcgggtattttggtgccaaaacaccttagtccaagcatcaacgtaatcccaataggtataacctaccggatcaaatggaactgaaaatctctttcctttgttcaagtccgaaccaaagtgtcttggttgaagaacttttagtatttggatggttgagtgggtgtttaaggtttggtcttttggatctttgaaatgtttgatagatactgagtttgaatctaccaaaatcaattcataaaaagttcttgtcttcaggatggtggttggtttgtagtgaaatcctggtgggaaagccttggccgtcgccttgaagggatttttgtcccaaaattcaggttccatctgcaaaacagttaacaatttatttttataaatataattgttagtttgtttggtaggtggtgtttgagctttggctaaaggtagttttcctttagtattggtggctattttggtcattgacgcattttggatcattgtttgtaaatttgattcagattcatcatcagattctgaggcaatgtctgcccaagattttttgattatttttggaaatttggtcagacccatgtcttgaagggcctgaagggtttcaattggccaagcatagtcggccgatg

SEQ ID NO: 11609 - DNA, 1107 bp, Glycine max; identical to SEQ ID NO: 11608
  Gm_smallRNAprecursor_4442

SEQ ID NO: 11610 - DNA, 1108 bp, Glycine max
  Gm_smallRNAprecursor_4443
gtagaacttccttcagatttttagctaagacctcctttgatgtcgatcctgctaaaaatgctgccagatgagacttttggttcaaaaacacagaagtctctggatcagccgctttgaggaattctggatgggatttgaaccatagttttacttgttctggatccgctttggatgagtcaaattgtgtccaccattttacaaatgcgtgtctttgtagtgatggatattggtttgtcttttcaatcttgctgtaacgatattgccatgagaatatccatgacagtgcaaagcttgaaaagtatttaagatctgctggaattcgtgattcctgcgaattgtattgtttcttaaattgggaaaatccttgttggaccgtttctgggaatatctctgggattggtccaaagaagtcccaccattgcaaaaaccaattgggaaaattgtaaattgtgttggtcttgaaatatatcagccatgaatgcttgaagcgggtattttggtgccaaaacaccttagtccaagcatcaacgtaatcccaataggtataacctaccggatcaaatggaactgaaaatctctttcctttgttcaagtccgaaccaaagtgtcttggttgaagaacttttagtatttggatggttgagtgggtgtttaaggtttggtcttttggatctttgaaatgtttgatagatactgagtttgaatctaccaaaatcaattcataaaaagttcttgtcttcaggatggtggttggtttgtagtgaaatcctggtgggaaagccttggccgtcgccttgaagggatttttgtcccaaaattcaggttccatctgcaaaacagttaacaatttatttttataaatataattgttagtttgtttggtaggtggtgtttgagctttggctaaaggtagttttcctttagtattggtggctattttggtcattgacgcattttggatcattgtttgtaaatttgattcagattcatcatcagattctgaggcaatgtctgcccaagattttttgattatttttggaaatttggtcagacccatgtcttgaagggcctgaagggtttcaattggccaagcatagtcggccgatgt

SEQ ID NO: 11611 - DNA, 1101 bp, Glycine max
  Gm_smallRNAprecursor_4444
gaacttccttcagatttttagctaagacctcctttgatgtcgatcctgctaaaaatgctgccagatgagacttttggttcaaaaacacagaagtctctggatcagccgctttgaggaattctggatgggatttgaaccatagttttacttgttctggatccgctttggatgagtcaaattgtgtccaccattttacaaatgcgtgtctttgtagtgatggatattggtttgtcttttcaatcttgctgtaacgatattgccatgagaatatccatgacagtgcaaagcttgaaaagtatttaagatctgctggaattcgtgattcctgcgaattgtattgtttcttaaattgggaaaatccttgttggaccgtttctgggaatatctctgggattggtccaaagaagtcccaccattgcaaaaaccaattgggaaaattgtaaattgtgttggtcttgaaatatatcagccatgaatgcttgaagcgggtattttggtgccaaaacaccttagtccaagcatcaacgtaatcccaataggtataacctaccggatcaaatggaactgaaaatctctttcctttgttcaagtccgaaccaaagtgtcttggttgaagaacttttagtatttggatggttgagtgggtgtttaaggtttggtcttttggatctttgaaatgtttgatagatactgagtttgaatctaccaaaatcaattcataaaaagttcttgtcttcaggatggtggttggtttgtagtgaaatcctggtgggaaagccttggccgtcgccttgaagggatttttgtcccaaaattcaggttccatctgcaaaacagttaacaatttatttttataaatataattgttagtttgtttggtaggtggtgtttgagctttggctaaaggtagttttcctttagtattggtggctattttggtcattgacgcattttggatcattgtttgtaaatttgattcagattcatcatcagattctgaggcaatgtctgcccaagattttttgattatttttggaaatttggtcagacccatgtcttgaagggcctgaagggtttcaattggccaagcatagtcggccg

SEQ ID NO: 11612 - DNA, 1134 bp, Glycine max
  Gm_smallRNAprecursor_4445
acttccttcagatttttagctaagacctcctttgatgtcgatcctgctaaaaatgctgccagatgagacttttggttcaaaaacacagaagtctctggatcagccgctttgaggaattctggatgggatttgaaccatagttttacttgttctggatccgctttggatgagtcaaattgtgtccaccattttacaaatgcgtgtctttgtagtgatggatattggtttgtcttttcaatcttgctgtaacgatattgccatgagaatatccatgacagtgcaaagcttgaaaagtatttaagatctgctggaattcgtgattcctgcgaattgtattgtttcttaaattgggaaaatccttgttggaccgtttctgggaatatctctgggattggtccaaagaagtcccaccattgcaaaaaccaattgggaaaattgtaaattgtgttggtcttgaaatatatcagccatgaatgcttgaagcgggtattttggtgccaaaacaccttagtccaagcatcaacgtaatcccaataggtataacctaccggatcaaatggaactgaaaatctctttcctttgttcaagtccgaaccaaagtgtcttggttgaagaacttttagtatttggatggttgagtgggtgtttaaggtttggtcttttggatctttgaaatgtttgatagatactgagtttgaatctaccaaaatcaattcataaaaagttcttgtcttcaggatggtggttggtttgtagtgaaatcctggtgggaaagccttggccgtcgccttgaagggatttttgtcccaaaattcaggttccatctgcaaaacagttaacaatttatttttataaatataattgttagtttgtttggtaggtggtgtttgagctttggctaaaggtagttttcctttagtattggtggctattttggtcattgacgcattttggatcattgtttgtaaatttgattcagattcatcatcagattctgaggcaatgtctgcccaagattttttgattatttttggaaatttggtcagacccatgtcttgaagggcctgaagggtttcaattggccaagcatagtcggccgatgtttgtttggcggttgccggtttgggagattcc

SEQ ID NO: 11613 - DNA, 1140 bp, Glycine max
  Gm_smallRNAprecursor_4446
tttttagctaagacctcctttgatgtcgatcctgctaaaaatgctgccagatgagacttttggttcaaaaacacagaagtctctggatcagccgctttgaggaattctggatgggatttgaaccatagttttacttgttctggatccgctttggatgagtcaaattgtgtccaccattttacaaatgcgtgtctttgtagtgatggatattggtttgtcttttcaatcttgctgtaacgatattgccatgagaatatccatgacagtgcaaagcttgaaaagtatttaagatctgctggaattcgtgattcctgcgaattgtattgtttcttaaattgggaaaatccttgttggaccgtttctgggaatatctctgggattggtccaaagaagtcccaccattgcaaaaaccaattgggaaaattgtaaattgtgttggtcttgaaatatatcagccatgaatgcttgaagcgggtattttggtgccaaaacaccttagtccaagcatcaacgtaatcccaataggtataacctaccggatcaaatggaactgaaaatctctttcctttgttcaagtccgaaccaaagtgtcttggttgaagaacttttagtatttggatggttgagtgggtgtttaaggtttggtcttttggatctttgaaatgtttgatagatactgagtttgaatctaccaaaatcaattcataaaaagttcttgtcttcaggatggtggttggtttgtagtgaaatcctggtgggaaagccttggccgtcgccttgaagggatttttgtcccaaaattcaggttccatctgcaaaacagttaacaatttatttttataaatataattgttagtttgtttggtaggtggtgtttgagctttggctaaaggtagttttcctttagtattggtggctattttggtcattgacgcattttggatcattgtttgtaaatttgattcagattcatcatcagattctgaggcaatgtctgcccaagattttttgattatttttggaaatttggtcagacccatgtcttgaagggcctgaagggtttcaattggccaagcatagtcggccgatgtttgtttggcggttgccggtttgggagattcctgagtggatggctcaggt

SEQ ID NO: 11614 - DNA, 1090 bp, Glycine max
  Gm_smallRNAprecursor_4447
gtcgatcctgctaaaaatgctgccagatgagacttttggttcaaaaacacagaagtctctggatcagccgctttgaggaattctggatgggatttgaaccatagttttacttgttctggatccgctttggatgagtcaaattgtgtccaccattttacaaatgcgtgtctttgtagtgatggatattggtttgtcttttcaatcttgctgtaacgatattgccatgagaatatccatgacagtgcaaagcttgaaaagtatttaagatctgctggaattcgtgattcctgcgaattgtattgtttcttaaattgggaaaatccttgttggaccgtttctgggaatatctctgggattggtccaaagaagtcccaccattgcaaaaaccaattgggaaaattgtaaattgtgttggtcttgaaatatatcagccatgaatgcttgaagcgggtattttggtgccaaaacaccttagtccaagcatcaacgtaatcccaataggtataacctaccggatcaaatggaactgaaaatctctttcctttgttcaagtccgaaccaaagtgtcttggttgaagaacttttagtatttggatggttgagtgggtgtttaaggtttggtcttttggatctttgaaatgtttgatagatactgagtttgaatctaccaaaatcaattcataaaaagttcttgtcttcaggatggtggttggtttgtagtgaaatcctggtgggaaagccttggccgtcgccttgaagggatttttgtcccaaaattcaggttccatctgcaaaacagttaacaatttatttttataaatataattgttagtttgtttggtaggtggtgtttgagctttggctaaaggtagttttcctttagtattggtggctattttggtcattgacgcattttggatcattgtttgtaaatttgattcagattcatcatcagattctgaggcaatgtctgcccaagattttttgattatttttggaaatttggtcagacccatgtcttgaagggcctgaagggtttcaattggccaagcatagtcggccgatgtttgtttggcggttgccggtttgg

SEQ ID NO: 11615 - DNA, 1087 bp, Glycine max
  Gm_smallRNAprecursor_4448
gatcctgctaaaaatgctgccagatgagacttttggttcaaaaacacagaagtctctggatcagccgctttgaggaattctggatgggatttgaaccatagttttacttgttctggatccgctttggatgagtcaaattgtgtccaccattttacaaatgcgtgtctttgtagtgatggatattggtttgtcttttcaatcttgctgtaacgatattgccatgagaatatccatgacagtgcaaagcttgaaaagtatttaagatctgctggaattcgtgattcctgcgaattgtattgtttcttaaattgggaaaatccttgttggaccgtttctgggaatatctctgggattggtccaaagaagtcccaccattgcaaaaaccaattgggaaaattgtaaattgtgttggtcttgaaatatatcagccatgaatgcttgaagcgggtattttggtgccaaaacaccttagtccaagcatcaacgtaatcccaataggtataacctaccggatcaaatggaactgaaaatctctttcctttgttcaagtccgaaccaaagtgtcttggttgaagaacttttagtatttggatggttgagtgggtgtttaaggtttggtcttttggatctttgaaatgtttgatagatactgagtttgaatctaccaaaatcaattcataaaaagttcttgtcttcaggatggtggttggtttgtagtgaaatcctggtgggaaagccttggccgtcgccttgaagggatttttgtcccaaaattcaggttccatctgcaaaacagttaacaatttatttttataaatataattgttagtttgtttggtaggtggtgtttgagctttggctaaaggtagttttcctttagtattggtggctattttggtcattgacgcattttggatcattgtttgtaaatttgattcagattcatcatcagattctgaggcaatgtctgcccaagattttttgattatttttggaaatttggtcagacccatgtcttgaagggcctgaagggtttcaattggccaagcatagtcggccgatgtttgtttggcggttgccggtttgg

SEQ ID NO: 11616 - DNA, 1189 bp, Glycine max
  Gm_smallRNAprecursor_4449
acacagaagtctctggatcagccgctttgaggaattctggatgggatttgaaccatagttttacttgttctggatccgctttggatgagtcaaattgtgtccaccattttacaaatgcgtgtctttgtagtgatggatattggtttgtcttttcaatcttgctgtaacgatattgccatgagaatatccatgacagtgcaaagcttgaaaagtatttaagatctgctggaattcgtgattcctgcgaattgtattgtttcttaaattgggaaaatccttgttggaccgtttctgggaatatctctgggattggtccaaagaagtcccaccattgcaaaaaccaattgggaaaattgtaaattgtgttggtcttgaaatatatcagccatgaatgcttgaagcgggtattttggtgccaaaacaccttagtccaagcatcaacgtaatcccaataggtataacctaccggatcaaatggaactgaaaatctctttcctttgttcaagtccgaaccaaagtgtcttggttgaagaacttttagtatttggatggttgagtgggtgtttaaggtttggtcttttggatctttgaaatgtttgatagatactgagtttgaatctaccaaaatcaattcataaaaagttcttgtcttcaggatggtggttggtttgtagtgaaatcctggtgggaaagccttggccgtcgccttgaagggatttttgtcccaaaattcaggttccatctgcaaaacagttaacaatttatttttataaatataattgttagtttgtttggtaggtggtgtttgagctttggctaaaggtagttttcctttagtattggtggctattttggtcattgacgcattttggatcattgtttgtaaatttgattcagattcatcatcagattctgaggcaatgtctgcccaagattttttgattatttttggaaatttggtcagacccatgtcttgaagggcctgaagggtttcaattggccaagcatagtcggccgatgtttgtttggcggttgccggtttgggagattcctgagtggatggctcaggtttgattgaggcaatctgggttgatgacccttctaaattggttttctgggtagatgacccagcctgggttggtgacccagaagaggtagatgatttcttcatggttggttctggaagagc

SEQ ID NO: 11617 - DNA, 1224 bp, Glycine max
  Gm_smallRNAprecursor_4450
cgctttgaggaattctggatgggatttgaaccatagttttacttgttctggatccgctttggatgagtcaaattgtgtccaccattttacaaatgcgtgtctttgtagtgatggatattggtttgtcttttcaatcttgctgtaacgatattgccatgagaatatccatgacagtgcaaagcttgaaaagtatttaagatctgctggaattcgtgattcctgcgaattgtattgtttcttaaattgggaaaatccttgttggaccgtttctgggaatatctctgggattggtccaaagaagtcccaccattgcaaaaaccaattgggaaaattgtaaattgtgttggtcttgaaatatatcagccatgaatgcttgaagcgggtattttggtgccaaaacaccttagtccaagcatcaacgtaatcccaataggtataacctaccggatcaaatggaactgaaaatctctttcctttgttcaagtccgaaccaaagtgtcttggttgaagaacttttagtatttggatggttgagtgggtgtttaaggtttggtcttttggatctttgaaatgtttgatagatactgagtttgaatctaccaaaatcaattcataaaaagttcttgtcttcaggatggtggttggtttgtagtgaaatcctggtgggaaagccttggccgtcgccttgaagggatttttgtcccaaaattcaggttccatctgcaaaacagttaacaatttatttttataaatataattgttagtttgtttggtaggtggtgtttgagctttggctaaaggtagttttcctttagtattggtggctattttggtcattgacgcattttggatcattgtttgtaaatttgattcagattcatcatcagattctgaggcaatgtctgcccaagattttttgattatttttggaaatttggtcagacccatgtcttgaagggcctgaagggtttcaattggccaagcatagtcggccgatgtttgtttggcggttgccggtttgggagattcctgagtggatggctcaggtttgattgaggcaatctgggttgatgacccttctaaattggttttctgggtagatgacccagcctgggttggtgacccagaagaggtagatgatttcttcatggttggttctggaagagccagcctggctcctttgcctgtactccttcctccccgtagggagattcccgatgcctt

SEQ ID NO: 11618 - DNA, 1222 bp, Glycine max
  Gm_smallRNAprecursor_4451
ctttgaggaattctggatgggatttgaaccatagttttacttgttctggatccgctttggatgagtcaaattgtgtccaccattttacaaatgcgtgtctttgtagtgatggatattggtttgtcttttcaatcttgctgtaacgatattgccatgagaatatccatgacagtgcaaagcttgaaaagtatttaagatctgctggaattcgtgattcctgcgaattgtattgtttcttaaattgggaaaatccttgttggaccgtttctgggaatatctctgggattggtccaaagaagtcccaccattgcaaaaaccaattgggaaaattgtaaattgtgttggtcttgaaatatatcagccatgaatgcttgaagcgggtattttggtgccaaaacaccttagtccaagcatcaacgtaatcccaataggtataacctaccggatcaaatggaactgaaaatctctttcctttgttcaagtccgaaccaaagtgtcttggttgaagaacttttagtatttggatggttgagtgggtgtttaaggtttggtcttttggatctttgaaatgtttgatagatactgagtttgaatctaccaaaatcaattcataaaaagttcttgtcttcaggatggtggttggtttgtagtgaaatcctggtgggaaagccttggccgtcgccttgaagggatttttgtcccaaaattcaggttccatctgcaaaacagttaacaatttatttttataaatataattgttagtttgtttggtaggtggtgtttgagctttggctaaaggtagttttcctttagtattggtggctattttggtcattgacgcattttggatcattgtttgtaaatttgattcagattcatcatcagattctgaggcaatgtctgcccaagattttttgattatttttggaaatttggtcagacccatgtcttgaagggcctgaagggtttcaattggccaagcatagtcggccgatgtttgtttggcggttgccggtttgggagattcctgagtggatggctcaggtttgattgaggcaatctgggttgatgacccttctaaattggttttctgggtagatgacccagcctgggttggtgacccagaagaggtagatgatttcttcatggttggttctggaagagccagcctggctcctttgcctgtactccttcctccccgtagggagattcccgatgcctt

SEQ ID NO: 11619 - DNA, 1193 bp, Glycine max
  Gm_smallRNAprecursor_4452
accatagttttacttgttctggatccgctttggatgagtcaaattgtgtccaccattttacaaatgcgtgtctttgtagtgatggatattggtttgtcttttcaatcttgctgtaacgatattgccatgagaatatccatgacagtgcaaagcttgaaaagtatttaagatctgctggaattcgtgattcctgcgaattgtattgtttcttaaattgggaaaatccttgttggaccgtttctgggaatatctctgggattggtccaaagaagtcccaccattgcaaaaaccaattgggaaaattgtaaattgtgttggtcttgaaatatatcagccatgaatgcttgaagcgggtattttggtgccaaaacaccttagtccaagcatcaacgtaatcccaataggtataacctaccggatcaaatggaactgaaaatctctttcctttgttcaagtccgaaccaaagtgtcttggttgaagaacttttagtatttggatggttgagtgggtgtttaaggtttggtcttttggatctttgaaatgtttgatagatactgagtttgaatctaccaaaatcaattcataaaaagttcttgtcttcaggatggtggttggtttgtagtgaaatcctggtgggaaagccttggccgtcgccttgaagggatttttgtcccaaaattcaggttccatctgcaaaacagttaacaatttatttttataaatataattgttagtttgtttggtaggtggtgtttgagctttggctaaaggtagttttcctttagtattggtggctattttggtcattgacgcattttggatcattgtttgtaaatttgattcagattcatcatcagattctgaggcaatgtctgcccaagattttttgattatttttggaaatttggtcagacccatgtcttgaagggcctgaagggtttcaattggccaagcatagtcggccgatgtttgtttggcggttgccggtttgggagattcctgagtggatggctcaggtttgattgaggcaatctgggttgatgacccttctaaattggttttctgggtagatgacccagcctgggttggtgacccagaagaggtagatgatttcttcatggttggttctggaagagccagcctggctcctttgcctgtactccttcctccccgtagggagattcccgatgcc

SEQ ID NO: 11620 - DNA, 1195 bp, Glycine max
  Gm_smallRNAprecursor_4453
accatagttttacttgttctggatccgctttggatgagtcaaattgtgtccaccattttacaaatgcgtgtctttgtagtgatggatattggtttgtcttttcaatcttgctgtaacgatattgccatgagaatatccatgacagtgcaaagcttgaaaagtatttaagatctgctggaattcgtgattcctgcgaattgtattgtttcttaaattgggaaaatccttgttggaccgtttctgggaatatctctgggattggtccaaagaagtcccaccattgcaaaaaccaattgggaaaattgtaaattgtgttggtcttgaaatatatcagccatgaatgcttgaagcgggtattttggtgccaaaacaccttagtccaagcatcaacgtaatcccaataggtataacctaccggatcaaatggaactgaaaatctctttcctttgttcaagtccgaaccaaagtgtcttggttgaagaacttttagtatttggatggttgagtgggtgtttaaggtttggtcttttggatctttgaaatgtttgatagatactgagtttgaatctaccaaaatcaattcataaaaagttcttgtcttcaggatggtggttggtttgtagtgaaatcctggtgggaaagccttggccgtcgccttgaagggatttttgtcccaaaattcaggttccatctgcaaaacagttaacaatttatttttataaatataattgttagtttgtttggtaggtggtgtttgagctttggctaaaggtagttttcctttagtattggtggctattttggtcattgacgcattttggatcattgtttgtaaatttgattcagattcatcatcagattctgaggcaatgtctgcccaagattttttgattatttttggaaatttggtcagacccatgtcttgaagggcctgaagggtttcaattggccaagcatagtcggccgatgtttgtttggcggttgccggtttgggagattcctgagtggatggctcaggtttgattgaggcaatctgggttgatgacccttctaaattggttttctgggtagatgacccagcctgggttggtgacccagaagaggtagatgatttcttcatggttggttctggaagagccagcctggctcctttgcctgtactccttcctccccgtagggagattcccgatgcctt

SEQ ID NO: 11621 - DNA, 1058 bp, Glycine max
  Gm_smallRNAprecursor_4454
tacttgttctggatccgctttggatgagtcaaattgtgtccaccattttacaaatgcgtgtctttgtagtgatggatattggtttgtcttttcaatcttgctgtaacgatattgccatgagaatatccatgacagtgcaaagcttgaaaagtatttaagatctgctggaattcgtgattcctgcgaattgtattgtttcttaaattgggaaaatccttgttggaccgtttctgggaatatctctgggattggtccaaagaagtcccaccattgcaaaaaccaattgggaaaattgtaaattgtgttggtcttgaaatatatcagccatgaatgcttgaagcgggtattttggtgccaaaacaccttagtccaagcatcaacgtaatcccaataggtataacctaccggatcaaatggaactgaaaatctctttcctttgttcaagtccgaaccaaagtgtcttggttgaagaacttttagtatttggatggttgagtgggtgtttaaggtttggtcttttggatctttgaaatgtttgatagatactgagtttgaatctaccaaaatcaattcataaaaagttcttgtcttcaggatggtggttggtttgtagtgaaatcctggtgggaaagccttggccgtcgccttgaagggatttttgtcccaaaattcaggttccatctgcaaaacagttaacaatttatttttataaatataattgttagtttgtttggtaggtggtgtttgagctttggctaaaggtagttttcctttagtattggtggctattttggtcattgacgcattttggatcattgtttgtaaatttgattcagattcatcatcagattctgaggcaatgtctgcccaagattttttgattatttttggaaatttggtcagacccatgtcttgaagggcctgaagggtttcaattggccaagcatagtcggccgatgtttgtttggcggttgccggtttgggagattcctgagtggatggctcaggtttgattgaggcaatctgggttgatgacccttctaaattggttttctggg

SEQ ID NO: 11622 - DNA, 1176 bp, Glycine max
  Gm_smallRNAprecursor_4455
tacttgttctggatccgctttggatgagtcaaattgtgtccaccattttacaaatgcgtgtctttgtagtgatggatattggtttgtcttttcaatcttgctgtaacgatattgccatgagaatatccatgacagtgcaaagcttgaaaagtatttaagatctgctggaattcgtgattcctgcgaattgtattgtttcttaaattgggaaaatccttgttggaccgtttctgggaatatctctgggattggtccaaagaagtcccaccattgcaaaaaccaattgggaaaattgtaaattgtgttggtcttgaaatatatcagccatgaatgcttgaagcgggtattttggtgccaaaacaccttagtccaagcatcaacgtaatcccaataggtataacctaccggatcaaatggaactgaaaatctctttcctttgttcaagtccgaaccaaagtgtcttggttgaagaacttttagtatttggatggttgagtgggtgtttaaggtttggtcttttggatctttgaaatgtttgatagatactgagtttgaatctaccaaaatcaattcataaaaagttcttgtcttcaggatggtggttggtttgtagtgaaatcctggtgggaaagccttggccgtcgccttgaagggatttttgtcccaaaattcaggttccatctgcaaaacagttaacaatttatttttataaatataattgttagtttgtttggtaggtggtgtttgagctttggctaaaggtagttttcctttagtattggtggctattttggtcattgacgcattttggatcattgtttgtaaatttgattcagattcatcatcagattctgaggcaatgtctgcccaagattttttgattatttttggaaatttggtcagacccatgtcttgaagggcctgaagggtttcaattggccaagcatagtcggccgatgtttgtttggcggttgccggtttgggagattcctgagtggatggctcaggtttgattgaggcaatctgggttgatgacccttctaaattggttttctgggtagatgacccagcctgggttggtgacccagaagaggtagatgatttcttcatggttggttctggaagagccagcctggctcctttgcctgtactccttcctccccgtagggagattcc

SEQ ID NO: 11623 - DNA, 1183 bp, Glycine max
  Gm_smallRNAprecursor_4456
tacttgttctggatccgctttggatgagtcaaattgtgtccaccattttacaaatgcgtgtctttgtagtgatggatattggtttgtcttttcaatcttgctgtaacgatattgccatgagaatatccatgacagtgcaaagcttgaaaagtatttaagatctgctggaattcgtgattcctgcgaattgtattgtttcttaaattgggaaaatccttgttggaccgtttctgggaatatctctgggattggtccaaagaagtcccaccattgcaaaaaccaattgggaaaattgtaaattgtgttggtcttgaaatatatcagccatgaatgcttgaagcgggtattttggtgccaaaacaccttagtccaagcatcaacgtaatcccaataggtataacctaccggatcaaatggaactgaaaatctctttcctttgttcaagtccgaaccaaagtgtcttggttgaagaacttttagtatttggatggttgagtgggtgtttaaggtttggtcttttggatctttgaaatgtttgatagatactgagtttgaatctaccaaaatcaattcataaaaagttcttgtcttcaggatggtggttggtttgtagtgaaatcctggtgggaaagccttggccgtcgccttgaagggatttttgtcccaaaattcaggttccatctgcaaaacagttaacaatttatttttataaatataattgttagtttgtttggtaggtggtgtttgagctttggctaaaggtagttttcctttagtattggtggctattttggtcattgacgcattttggatcattgtttgtaaatttgattcagattcatcatcagattctgaggcaatgtctgcccaagattttttgattatttttggaaatttggtcagacccatgtcttgaagggcctgaagggtttcaattggccaagcatagtcggccgatgtttgtttggcggttgccggtttgggagattcctgagtggatggctcaggtttgattgaggcaatctgggttgatgacccttctaaattggttttctgggtagatgacccagcctgggttggtgacccagaagaggtagatgatttcttcatggttggttctggaagagccagcctggctcctttgcctgtactccttcctccccgtagggagattcccgatgcc

SEQ ID NO: 11624 - DNA, 1159 bp, Glycine max
  Gm_smallRNAprecursor_4457
ctggatccgctttggatgagtcaaattgtgtccaccattttacaaatgcgtgtctttgtagtgatggatattggtttgtcttttcaatcttgctgtaacgatattgccatgagaatatccatgacagtgcaaagcttgaaaagtatttaagatctgctggaattcgtgattcctgcgaattgtattgtttcttaaattgggaaaatccttgttggaccgtttctgggaatatctctgggattggtccaaagaagtcccaccattgcaaaaaccaattgggaaaattgtaaattgtgttggtcttgaaatatatcagccatgaatgcttgaagcgggtattttggtgccaaaacaccttagtccaagcatcaacgtaatcccaataggtataacctaccggatcaaatggaactgaaaatctctttcctttgttcaagtccgaaccaaagtgtcttggttgaagaacttttagtatttggatggttgagtgggtgtttaaggtttggtcttttggatctttgaaatgtttgatagatactgagtttgaatctaccaaaatcaattcataaaaagttcttgtcttcaggatggtggttggtttgtagtgaaatcctggtgggaaagccttggccgtcgccttgaagggatttttgtcccaaaattcaggttccatctgcaaaacagttaacaatttatttttataaatataattgttagtttgtttggtaggtggtgtttgagctttggctaaaggtagttttcctttagtattggtggctattttggtcattgacgcattttggatcattgtttgtaaatttgattcagattcatcatcagattctgaggcaatgtctgcccaagattttttgattatttttggaaatttggtcagacccatgtcttgaagggcctgaagggtttcaattggccaagcatagtcggccgatgtttgtttggcggttgccggtttgggagattcctgagtggatggctcaggtttgattgaggcaatctgggttgatgacccttctaaattggttttctgggtagatgacccagcctgggttggtgacccagaagaggtagatgatttcttcatggttggttctggaagagccagcctggctcctttgcctgtactccttcctccccgtag

SEQ ID NO: 11625 - DNA, 1098 bp, Glycine max
  Gm_smallRNAprecursor_4458
gtgtctttgtagtgatggatattggtttgtcttttcaatcttgctgtaacgatattgccatgagaatatccatgacagtgcaaagcttgaaaagtatttaagatctgctggaattcgtgattcctgcgaattgtattgtttcttaaattgggaaaatccttgttggaccgtttctgggaatatctctgggattggtccaaagaagtcccaccattgcaaaaaccaattgggaaaattgtaaattgtgttggtcttgaaatatatcagccatgaatgcttgaagcgggtattttggtgccaaaacaccttagtccaagcatcaacgtaatcccaataggtataacctaccggatcaaatggaactgaaaatctctttcctttgttcaagtccgaaccaaagtgtcttggttgaagaacttttagtatttggatggttgagtgggtgtttaaggtttggtcttttggatctttgaaatgtttgatagatactgagtttgaatctaccaaaatcaattcataaaaagttcttgtcttcaggatggtggttggtttgtagtgaaatcctggtgggaaagccttggccgtcgccttgaagggatttttgtcccaaaattcaggttccatctgcaaaacagttaacaatttatttttataaatataattgttagtttgtttggtaggtggtgtttgagctttggctaaaggtagttttcctttagtattggtggctattttggtcattgacgcattttggatcattgtttgtaaatttgattcagattcatcatcagattctgaggcaatgtctgcccaagattttttgattatttttggaaatttggtcagacccatgtcttgaagggcctgaagggtttcaattggccaagcatagtcggccgatgtttgtttggcggttgccggtttgggagattcctgagtggatggctcaggtttgattgaggcaatctgggttgatgacccttctaaattggttttctgggtagatgacccagcctgggttggtgacccagaagaggtagatgatttcttcatggttggttctggaagagccagcctggctcctttgcctgtactcct

SEQ ID NO: 11626 - DNA, 1098 bp, Glycine max
  Gm_smallRNAprecursor_4459
ttggtttgtcttttcaatcttgctgtaacgatattgccatgagaatatccatgacagtgcaaagcttgaaaagtatttaagatctgctggaattcgtgattcctgcgaattgtattgtttcttaaattgggaaaatccttgttggaccgtttctgggaatatctctgggattggtccaaagaagtcccaccattgcaaaaaccaattgggaaaattgtaaattgtgttggtcttgaaatatatcagccatgaatgcttgaagcgggtattttggtgccaaaacaccttagtccaagcatcaacgtaatcccaataggtataacctaccggatcaaatggaactgaaaatctctttcctttgttcaagtccgaaccaaagtgtcttggttgaagaacttttagtatttggatggttgagtgggtgtttaaggtttggtcttttggatctttgaaatgtttgatagatactgagtttgaatctaccaaaatcaattcataaaaagttcttgtcttcaggatggtggttggtttgtagtgaaatcctggtgggaaagccttggccgtcgccttgaagggatttttgtcccaaaattcaggttccatctgcaaaacagttaacaatttatttttataaatataattgttagtttgtttggtaggtggtgtttgagctttggctaaaggtagttttcctttagtattggtggctattttggtcattgacgcattttggatcattgtttgtaaatttgattcagattcatcatcagattctgaggcaatgtctgcccaagattttttgattatttttggaaatttggtcagacccatgtcttgaagggcctgaagggtttcaattggccaagcatagtcggccgatgtttgtttggcggttgccggtttgggagattcctgagtggatggctcaggtttgattgaggcaatctgggttgatgacccttctaaattggttttctgggtagatgacccagcctgggttggtgacccagaagaggtagatgatttcttcatggttggttctggaagagccagcctggctcctttgcctgtactccttcctccccgtagggagattcc

SEQ ID NO: 11627 - DNA, 1113 bp, Glycine max
  Gm_smallRNAprecursor_4460
ggaaatttggtcagacccatgtcttgaagggcctgaagggtttcaattggccaagcatagtcggccgatgtttgtttggcggttgccggtttgggagattcctgagtggatggctcaggtttgattgaggcaatctgggttgatgacccttctaaattggttttctgggtagatgacccagcctgggttggtgacccagaagaggtagatgatttcttcatggttggttctggaagagccagcctggctcctttgcctgtactccttcctccccgtagggagattcccgatgccttaggaggcattaccacttttctgtaagaattcacgggtaaggtagtcaggtagtgaatttgaggtgcccttgatgtattctatgtcaaaatcaaagacacttaaaattgcttgccatcgtgcaaaaatttgttttgaggcaaggtttttaacatctttttgtaaaatatctttggctgatttacaatcaaccctgattaaaaatttttggtttaataaatccgattgaaatttggaaatgcacaaaacaattgctaaaacttcttttttaacagttgaatattttaattgtgcaggattccaatgttttgatgtatatgcaatgacatgatcttggccatggactctttgtttgaggatgccaccataacctatgtctgaagcatcagtttcgacaattttaaatgcctgtggaataggaagatacagacatttaatggattggactttgactttgatttctttaaccgtttgtgtatggaggtcagaccaaggaggcggatttttcttcagcctatcatgtaatggcttgacaatattatttaaataggggacaaattctcctacgtaatttagacaacctagaaatctttgtaactgggttttgtctaagatttggttggggaatttgctagcaaactctattgacctttcgattggaatgattgtaccttgatatatattgtgaccaaggaatcgaattcgagtttggaaaagattgatttttgatttggagactgccaaaccattttgtttgatgatatgtatgaaggtttggagatgtttgaaatgttggtcaatgttttgggaaaagattaa

SEQ ID NO: 11628 - DNA, 1113 bp, Glycine max; identical to SEQ ID NO: 11627
  Gm_smallRNAprecursor_4461

SEQ ID NO: 11629 - DNA, 1114 bp, Glycine max
  Gm_smallRNAprecursor_4462
ggaaatttggtcagacccatgtcttgaagggcctgaagggtttcaattggccaagcatagtcggccgatgtttgtttggcggttgccggtttgggagattcctgagtggatggctcaggtttgattgaggcaatctgggttgatgacccttctaaattggttttctgggtagatgacccagcctgggttggtgacccagaagaggtagatgatttcttcatggttggttctggaagagccagcctggctcctttgcctgtactccttcctccccgtagggagattcccgatgccttaggaggcattaccacttttctgtaagaattcacgggtaaggtagtcaggtagtgaatttgaggtgcccttgatgtattctatgtcaaaatcaaagacacttaaaattgcttgccatcgtgcaaaaatttgttttgaggcaaggtttttaacatctttttgtaaaatatctttggctgatttacaatcaaccctgattaaaaatttttggtttaataaatccgattgaaatttggaaatgcacaaaacaattgctaaaacttcttttttaacagttgaatattttaattgtgcaggattccaatgttttgatgtatatgcaatgacatgatcttggccatggactctttgtttgaggatgccaccataacctatgtctgaagcatcagtttcgacaattttaaatgcctgtggaataggaagatacagacatttaatggattggactttgactttgatttctttaaccgtttgtgtatggaggtcagaccaaggaggcggatttttcttcagcctatcatgtaatggcttgacaatattatttaaataggggacaaattctcctacgtaatttagacaacctagaaatctttgtaactgggttttgtctaagatttggttggggaatttgctagcaaactctattgacctttcgattggaatgattgtaccttgatatatattgtgaccaaggaatcgaattcgagtttggaaaagattgatttttgatttggagactgccaaaccattttgtttgatgatatgtatgaaggtttggagatgtttgaaatgttggtcaatgttttgggaaaagattaaa

SEQ ID NO: 11630 - DNA, 1207 bp, Glycine max
  Gm_smallRNAprecursor_4463
ggaaatttggtcagacccatgtcttgaagggcctgaagggtttcaattggccaagcatagtcggccgatgtttgtttggcggttgccggtttgggagattcctgagtggatggctcaggtttgattgaggcaatctgggttgatgacccttctaaattggttttctgggtagatgacccagcctgggttggtgacccagaagaggtagatgatttcttcatggttggttctggaagagccagcctggctcctttgcctgtactccttcctccccgtagggagattcccgatgccttaggaggcattaccacttttctgtaagaattcacgggtaaggtagtcaggtagtgaatttgaggtgcccttgatgtattctatgtcaaaatcaaagacacttaaaattgcttgccatcgtgcaaaaatttgttttgaggcaaggtttttaacatctttttgtaaaatatctttggctgatttacaatcaaccctgattaaaaatttttggtttaataaatccgattgaaatttggaaatgcacaaaacaattgctaaaacttcttttttaacagttgaatattttaattgtgcaggattccaatgttttgatgtatatgcaatgacatgatcttggccatggactctttgtttgaggatgccaccataacctatgtctgaagcatcagtttcgacaattttaaatgcctgtggaataggaagatacagacatttaatggattggactttgactttgatttctttaaccgtttgtgtatggaggtcagaccaaggaggcggatttttcttcagcctatcatgtaatggcttgacaatattatttaaataggggacaaattctcctacgtaatttagacaacctagaaatctttgtaactgggttttgtctaagatttggttggggaatttgctagcaaactctattgacctttcgattggaatgattgtaccttgatatatattgtgaccaaggaatcgaattcgagtttggaaaagattgatttttgatttggagactgccaaaccattttgtttgatgatatgtatgaaggtttggagatgtttgaaatgttggtcaatgttttgggaaaagattaaaacatcatctatgtagacaatgacaaattttgaatagggattaaaaatatcgttcataattttttgaaattctgaaggggcattcttcagtccg

SEQ ID NO: 11631 - DNA, 1035 bp, Glycine max
  Gm_smallRNAprecursor_4464
gcggttgccggtttgggagattcctgagtggatggctcaggtttgattgaggcaatctgggttgatgacccttctaaattggttttctgggtagatgacccagcctgggttggtgacccagaagaggtagatgatttcttcatggttggttctggaagagccagcctggctcctttgcctgtactccttcctccccgtagggagattcccgatgccttaggaggcattaccacttttctgtaagaattcacgggtaaggtagtcaggtagtgaatttgaggtgcccttgatgtattctatgtcaaaatcaaagacacttaaaattgcttgccatcgtgcaaaaatttgttttgaggcaaggtttttaacatctttttgtaaaatatctttggctgatttacaatcaaccctgattaaaaatttttggtttaataaatccgattgaaatttggaaatgcacaaaacaattgctaaaacttcttttttaacagttgaatattttaattgtgcaggattccaatgttttgatgtatatgcaatgacatgatcttggccatggactctttgtttgaggatgccaccataacctatgtctgaagcatcagtttcgacaattttaaatgcctgtggaataggaagatacagacatttaatggattggactttgactttgatttctttaaccgtttgtgtatggaggtcagaccaaggaggcggatttttcttcagcctatcatgtaatggcttgacaatattatttaaataggggacaaattctcctacgtaatttagacaacctagaaatctttgtaactgggttttgtctaagatttggttggggaatttgctagcaaactctattgacctttcgattggaatgattgtaccttgatatatattgtgaccaaggaatcgaattcgagtttggaaaagattgatttttgatttggagactgccaaaccattttgtttgatgatatgtatgaaggtttggagatgtttgaaatgttggtcaatgttttgggaaaagattaa

SEQ ID NO: 11632 - DNA, 1247 bp, Glycine max
  Gm_smallRNAprecursor_4465
agatgatttcttcatggttggttctggaagagccagcctggctcctttgcctgtactccttcctccccgtagggagattcccgatgccttaggaggcattaccacttttctgtaagaattcacgggtaaggtagtcaggtagtgaatttgaggtgcccttgatgtattctatgtcaaaatcaaagacacttaaaattgcttgccatcgtgcaaaaatttgttttgaggcaaggtttttaacatctttttgtaaaatatctttggctgatttacaatcaaccctgattaaaaatttttggtttaataaatccgattgaaatttggaaatgcacaaaacaattgctaaaacttcttttttaacagttgaatattttaattgtgcaggattccaatgttttgatgtatatgcaatgacatgatcttggccatggactctttgtttgaggatgccaccataacctatgtctgaagcatcagtttcgacaattttaaatgcctgtggaataggaagatacagacatttaatggattggactttgactttgatttctttaaccgtttgtgtatggaggtcagaccaaggaggcggatttttcttcagcctatcatgtaatggcttgacaatattatttaaataggggacaaattctcctacgtaatttagacaacctagaaatctttgtaactgggttttgtctaagatttggttggggaatttgctagcaaactctattgacctttcgattggaatgattgtaccttgatatatattgtgaccaaggaatcgaattcgagtttggaaaagattgatttttgatttggagactgccaaaccattttgtttgatgatatgtatgaaggtttggagatgtttgaaatgttggtcaatgttttgggaaaagattaaaacatcatctatgtagacaatgacaaattttgaatagggattaaaaatatcgttcataattttttgaaattctgaaggggcattcttcagtccgaatggcatcacgttccattcatattgcccgaaaggtacagtaaacgttgttttgtacctatctgattcttggatttggatttgccaaaatccagatttcatatcaaattttgaaaatatctttgcagaatttaatctgttaagcaaatcttttttgtttggaataggatatctaatccattgtaatgcttgatttaatggtttgtaatttatgactaagcggggtgttccacgctcaatctcagat

SEQ ID NO: 11633 - DNA, 1246 bp, Glycine max
  Gm_smallRNAprecursor_4466
gatgatttcttcatggttggttctggaagagccagcctggctcctttgcctgtactccttcctccccgtagggagattcccgatgccttaggaggcattaccacttttctgtaagaattcacgggtaaggtagtcaggtagtgaatttgaggtgcccttgatgtattctatgtcaaaatcaaagacacttaaaattgcttgccatcgtgcaaaaatttgttttgaggcaaggtttttaacatctttttgtaaaatatctttggctgatttacaatcaaccctgattaaaaatttttggtttaataaatccgattgaaatttggaaatgcacaaaacaattgctaaaacttcttttttaacagttgaatattttaattgtgcaggattccaatgttttgatgtatatgcaatgacatgatcttggccatggactctttgtttgaggatgccaccataacctatgtctgaagcatcagtttcgacaattttaaatgcctgtggaataggaagatacagacatttaatggattggactttgactttgatttctttaaccgtttgtgtatggaggtcagaccaaggaggcggatttttcttcagcctatcatgtaatggcttgacaatattatttaaataggggacaaattctcctacgtaatttagacaacctagaaatctttgtaactgggttttgtctaagatttggttggggaatttgctagcaaactctattgacctttcgattggaatgattgtaccttgatatatattgtgaccaaggaatcgaattcgagtttggaaaagattgatttttgatttggagactgccaaaccattttgtttgatgatatgtatgaaggtttggagatgtttgaaatgttggtcaatgttttgggaaaagattaaaacatcatctatgtagacaatgacaaattttgaatagggattaaaaatatcgttcataattttttgaaattctgaaggggcattcttcagtccgaatggcatcacgttccattcatattgcccgaaaggtacagtaaacgttgttttgtacctatctgattcttggatttggatttgccaaaatccagatttcatatcaaattttgaaaatatctttgcagaatttaatctgttaagcaaatcttttttgtttggaataggatatctaatccattgtaatgcttgatttaatggtttgtaatttatgactaagcggggtgttccacgctcaatctcagat

SEQ ID NO: 11634 - DNA, 1031 bp, Glycine max
  Gm_smallRNAprecursor_4467
ctttttgtaaaatatctttggctgatttacaatcaaccctgattaaaaatttttggtttaataaatccgattgaaatttggaaatgcacaaaacaattgctaaaacttcttttttaacagttgaatattttaattgtgcaggattccaatgttttgatgtatatgcaatgacatgatcttggccatggactctttgtttgaggatgccaccataacctatgtctgaagcatcagtttcgacaattttaaatgcctgtggaataggaagatacagacatttaatggattggactttgactttgatttctttaaccgtttgtgtatggaggtcagaccaaggaggcggatttttcttcagcctatcatgtaatggcttgacaatattatttaaataggggacaaattctcctacgtaatttagacaacctagaaatctttgtaactgggttttgtctaagatttggttggggaatttgctagcaaactctattgacctttcgattggaatgattgtaccttgatatatattgtgaccaaggaatcgaattcgagtttggaaaagattgatttttgatttggagactgccaaaccattttgtttgatgatatgtatgaaggtttggagatgtttgaaatgttggtcaatgttttgggaaaagattaaaacatcatctatgtagacaatgacaaattttgaatagggattaaaaatatcgttcataattttttgaaattctgaaggggcattcttcagtccgaatggcatcacgttccattcatattgcccgaaaggtacagtaaacgttgttttgtacctatctgattcttggatttggatttgccaaaatccagatttcatatcaaattttgaaaatatctttgcagaatttaatctgttaagcaaatcttttttgtttggaataggatatctaatccattgtaatgcttgatttaatggtttgtaatttatgactaagcggggtgttccacgctcaatctcagattgtttgttaacataaaaagccgcacaa

SEQ ID NO: 11635 - DNA, 1234 bp, Glycine max
  Gm_smallRNAprecursor_4468
aatcaaccctgattaaaaatttttggtttaataaatccgattgaaatttggaaatgcacaaaacaattgctaaaacttcttttttaacagttgaatattttaattgtgcaggattccaatgttttgatgtatatgcaatgacatgatcttggccatggactctttgtttgaggatgccaccataacctatgtctgaagcatcagtttcgacaattttaaatgcctgtggaataggaagatacagacatttaatggattggactttgactttgatttctttaaccgtttgtgtatggaggtcagaccaaggaggcggatttttcttcagcctatcatgtaatggcttgacaatattatttaaataggggacaaattctcctacgtaatttagacaacctagaaatctttgtaactgggttttgtctaagatttggttggggaatttgctagcaaactctattgacctttcgattggaatgattgtaccttgatatatattgtgaccaaggaatcgaattcgagtttggaaaagattgatttttgatttggagactgccaaaccattttgtttgatgatatgtatgaaggtttggagatgtttgaaatgttggtcaatgttttgggaaaagattaaaacatcatctatgtagacaatgacaaattttgaatagggattaaaaatatcgttcataattttttgaaattctgaaggggcattcttcagtccgaatggcatcacgttccattcatattgcccgaaaggtacagtaaacgttgttttgtacctatctgattcttggatttggatttgccaaaatccagatttcatatcaaattttgaaaatatctttgcagaatttaatctgttaagcaaatcttttttgtttggaataggatatctaatccattgtaatgcttgatttaatggtttgtaatttatgactaagcggggtgttccacgctcaatctcagattgtttgttaacataaaaagccgcacaagaccatgggcttttgcttttccggattaggcctttatcaagcaaatcctcgatttccttttgacagtattgaagaagttcttcattcatttggattggtctggcttttgtgggaatttgtttttccctaaagtctttctcataagggagatcgacaatatgtttctttctgtcccaaaatgcatgtggcaattcagaacaaacggtcgattcaatatgatttaataaagatcg

SEQ ID NO: 11636 - DNA, 1046 bp, Glycine max
  Gm_smallRNAprecursor_4469
caagaccaacacaatttacaattttcccaattggtttttgcaatggtgggacttctttggaccaatcccagagatattcccagaaacggtccaacaaggattttcccaatttaagaaacaatacaattcgcaggaatcacgaattccagcagatcttaaatacttttcaagctttgcactgtcatgggggggtctcatggcaatatcgttacagcaagattgaaaagacaaaccaatatccatcactacaaagacacgcatttgtaaaatggtggacacaatttgactcatccaaagcggatccagaacaagtaaaactatggttcaaatcccatccagaattcctcaaagcggctgatccagagacttctgtgtttttgaaccaaaagtctcatctggcagcatttttagcaggatcgacatcaaaggaggtcttagctaaaaatctgaaggaagttctacaaatgttacaacaggaagaagaagcttcatcctcaaagaaggaagaaacaagttctgctgaagaagacgaagaagatcccttttaccaaaacgaagatgattgttttggtatctgtttagattaaatttaatttcggtcacaaaaccgtctgtttgtaattaatgtgtaattaatgatggacaatactacctgtcctgtagccattaaagtcccggtcaaaactacttgtcttgtaacaaacagtcaaatagtcccggtcaaaactaccggcaactaccggtcttagatttttggctatataaggagtcctcaagtatgttgtgaggcaccctttcatttagccattttttcaggtttcggaagagaggtgctctgaaacaagatttttgtaagcgcttctttctagattcaataaatttctatttttcatccttctctcttctcccttcaccgatcctgtgcggctctgccgccgcttcggtttctttgtttatgaaaacctggggtttgtaagccggtctccggtgtgcccttgatatctgttttcaagtttatattttcatttcaatcatactgcattctt

SEQ ID NO: 11637 - DNA, 1213 bp, Glycine max
  Gm_smallRNAprecursor_4470
aacacaatttacaattttcccaattggtttttgcaatggtgggacttctttggaccaatcccagagatattcccagaaacggtccaacaaggattttcccaatttaagaaacaatacaattcgcaggaatcacgaattccagcagatcttaaatacttttcaagctttgcactgtcatgggggggtctcatggcaatatcgttacagcaagattgaaaagacaaaccaatatccatcactacaaagacacgcatttgtaaaatggtggacacaatttgactcatccaaagcggatccagaacaagtaaaactatggttcaaatcccatccagaattcctcaaagcggctgatccagagacttctgtgtttttgaaccaaaagtctcatctggcagcatttttagcaggatcgacatcaaaggaggtcttagctaaaaatctgaaggaagttctacaaatgttacaacaggaagaagaagcttcatcctcaaagaaggaagaaacaagttctgctgaagaagacgaagaagatcccttttaccaaaacgaagatgattgttttggtatctgtttagattaaatttaatttcggtcacaaaaccgtctgtttgtaattaatgtgtaattaatgatggacaatactacctgtcctgtagccattaaagtcccggtcaaaactacttgtcttgtaacaaacagtcaaatagtcccggtcaaaactaccggcaactaccggtcttagatttttggctatataaggagtcctcaagtatgttgtgaggcaccctttcatttagccattttttcaggtttcggaagagaggtgctctgaaacaagatttttgtaagcgcttctttctagattcaataaatttctatttttcatccttctctcttctcccttcaccgatcctgtgcggctctgccgccgcttcggtttctttgtttatgaaaacctggggtttgtaagccggtctccggtgtgcccttgatatctgttttcaagtttatattttcatttcaatcatactgcattcttacttcctatctaaaataacataaaattaaatatgagcgatattcataaaagatctaaattcaaaatcaagatttatatattcatcatcacctcaaaagaacttttcctatgataatgagtctcacaaaaaatactaagagacctcattatacaatttggacgctttgtttcttt

SEQ ID NO: 11638 - DNA, 1161 bp, Glycine max
  Gm_smallRNAprecursor_4471
attttggagccaaaatttcactaattatgattagtgaatttcagttatggttcagcccactaatccaagatcaattccaagattctccactaattgtgcttaggtgtcataaggcatgtaaagcatgaatgacgtgcacaaagtgtgactatatgatgtgacaataaggtgtagtaagtaaatgctcacctccccctctaaaatttaattggattgggcttctaccaattcaattaaatttatttcccaacacacacatcaaatattcacttagtgcatatgaaattacaaaactacccctaatacaaaaactactcaaggtgccctaaaatacaagggctaaaaaatcctatatttctagggtaccctacctacattatggagccctaaatacaaggaccaaatataatgacatccaaatctaatatgtacaaagataattggacccaaccttggcccatgcgctacgaaatctaccctaaggttcatgagaaccttatagccttcttcagcagctctagcccaattctcttggagcctcttgctcatggctctagtgactggtcccttcctagggacgattgcatcagttttataccggtcttctggttttaggccaagttgacaaaaacctgattttaaatcaaactttgaaaataagtttgattctctgatcaaggttgggagaaatgaggcgtttgggattggaaacttatcatctttgagaaaatgattgagaggcttatagtaaatgattaaccttttctttccccttaattttcagctcttttttctacgtaaaaagcttggcatgcccaatttgactcggttggctcaatcagaccttgccttagtagatcttagcattcttgtctagctgcttgtagatctaaaggtgtcatccctggatgggttgcttttgttggattgatatcttcatttaatctgaatggtagatcaacaaagtattctttgtttttccataaaggatatggatggttgaaatcttcatgactgtctgcgcatagggaggaaatcttttctttaaactctccaacttcttttgtttaaactctctttcgaatttgatcccgataaaatgtatttggagtttatcggcagcattatagacatccattcctatgaggaggtctatatcag

SEQ ID NO: 11639 - DNA, 1034 bp, Glycine max
  Gm_smallRNAprecursor_4472
tctccactaattgtgcttaggtgtcataaggcatgtaaagcatgaatgacgtgcacaaagtgtgactatatgatgtgacaataaggtgtagtaagtaaatgctcacctccccctctaaaatttaattggattgggcttctaccaattcaattaaatttatttcccaacacacacatcaaatattcacttagtgcatatgaaattacaaaactacccctaatacaaaaactactcaaggtgccctaaaatacaagggctaaaaaatcctatatttctagggtaccctacctacattatggagccctaaatacaaggaccaaatataatgacatccaaatctaatatgtacaaagataattggacccaaccttggcccatgcgctacgaaatctaccctaaggttcatgagaaccttatagccttcttcagcagctctagcccaattctcttggagcctcttgctcatggctctagtgactggtcccttcctagggacgattgcatcagttttataccggtcttctggttttaggccaagttgacaaaaacctgattttaaatcaaactttgaaaataagtttgattctctgatcaaggttgggagaaatgaggcgtttgggattggaaacttatcatctttgagaaaatgattgagaggcttatagtaaatgattaaccttttctttccccttaattttcagctcttttttctacgtaaaaagcttggcatgcccaatttgactcggttggctcaatcagaccttgccttagtagatcttagcattcttgtctagctgcttgtagatctaaaggtgtcatccctggatgggttgcttttgttggattgatatcttcatttaatctgaatggtagatcaacaaagtattctttgtttttccataaaggatatggatggttgaaatcttcatgactgtctgcgcatagggaggaaatcttttctttaaactctccaacttcttttgtttaaactctctttcgaatttgatcccgataaaatgtatttggagtttatc

SEQ ID NO: 11640 - DNA, 1217 bp, Glycine max
  Gm_smallRNAprecursor_4473
tgtaaagcatgaatgacgtgcacaaagtgtgactatatgatgtgacaataaggtgtagtaagtaaatgctcacctccccctctaaaatttaattggattgggcttctaccaattcaattaaatttatttcccaacacacacatcaaatattcacttagtgcatatgaaattacaaaactacccctaatacaaaaactactcaaggtgccctaaaatacaagggctaaaaaatcctatatttctagggtaccctacctacattatggagccctaaatacaaggaccaaatataatgacatccaaatctaatatgtacaaagataattggacccaaccttggcccatgcgctacgaaatctaccctaaggttcatgagaaccttatagccttcttcagcagctctagcccaattctcttggagcctcttgctcatggctctagtgactggtcccttcctagggacgattgcatcagttttataccggtcttctggttttaggccaagttgacaaaaacctgattttaaatcaaactttgaaaataagtttgattctctgatcaaggttgggagaaatgaggcgtttgggattggaaacttatcatctttgagaaaatgattgagaggcttatagtaaatgattaaccttttctttccccttaattttcagctcttttttctacgtaaaaagcttggcatgcccaatttgactcggttggctcaatcagaccttgccttagtagatcttagcattcttgtctagctgcttgtagatctaaaggtgtcatccctggatgggttgcttttgttggattgatatcttcatttaatctgaatggtagatcaacaaagtattctttgtttttccataaaggatatggatggttgaaatcttcatgactgtctgcgcatagggaggaaatcttttctttaaactctccaacttcttttgtttaaactctctttcgaatttgatcccgataaaatgtatttggagtttatcggcagcattatagacatccattcctatgaggaggtctatatcaggcaatttgcttccaatgactttggtctagatgatactataacgaaacaacttgatgcctactggagcatgtgttactaagtcagttctgaaaactttcccatcagctgctacaaaataagctacttcatttttttcaataatcttgtggaagaatatttggatccatcatcg

SEQ ID NO: 11641 - DNA, 1033 bp, Glycine max
  Gm_smallRNAprecursor_4474
gaaaactttcccatcagctgctacaaaataagctacttcatttttttcaataatcttgtggaagaatatttggatccatcatcgtcctttgagctccagtgtctatgaaagcaataactttgataagttttttaaaattttttttcaatacttgaatttcaacacatggttgaagaatcgctggcatgatagactgttcttcatgtatagggaagatggggattagagaagctggagattcttcgtcagaagaatttgtttgattcaaggcaaattcagtctcttcatctagttcactcttttcagaatacatggattctatattatcatattcacctatttgaagatgagagattagtctgaatgcttgttgtgacttcttaggacaattttttgcaaaatgtcctgtctgattgcaaatgaaacatctttgttccctagattttcctttcctccgacttttcataaaaaacttcaatggccttcttttccccttggtgtcagcttgtaagactttctttttctttggtgagcaatgttaagtcttctctctgcatttgatctccaaataaggccttttgcatgctctgctatacttggcttttctgttcatggtattggagaaatactggtgtattggtgttgtctacataatttgtcaacgacctcctgagtgaattgatggatttgtcccatagacatcgtagaaaaatccattttggcggccgctaccatcttgttcaattctggttgtatttcttctggtaatgaagctacatatgtattcttgaggttaggatcattgagaccgttgagaagataaaatctcttattcattctttggaagtgtctgtccaaatcttttatttttaaagaacagcccatcatttcaaagaattcttgcctgatctttctttcaatgatctttccttctccaataaattcttgatggagagttcctagaacagctacaatagatcccaattcatggaactggtcttgacgcacagttcttagattgtgataccattcc

SEQ ID NO: 11642 - DNA, 1186 bp, Glycine max
  Gm_smallRNAprecursor_4475
aaattcagtctcttcatctagttcactcttttcagaatacatggattctatattatcatattcacctatttgaagatgagagattagtctgaatgcttgttgtgacttcttaggacaattttttgcaaaatgtcctgtctgattgcaaatgaaacatctttgttccctagattttcctttcctccgacttttcataaaaaacttcaatggccttcttttccccttggtgtcagcttgtaagactttctttttctttggtgagcaatgttaagtcttctctctgcatttgatctccaaataaggccttttgcatgctctgctatacttggcttttctgttcatggtattggagaaatactggtgtattggtgttgtctacataatttgtcaacgacctcctgagtgaattgatggatttgtcccatagacatcgtagaaaaatccattttggcggccgctaccatcttgttcaattctggttgtatttcttctggtaatgaagctacatatgtattcttgaggttaggatcattgagaccgttgagaagataaaatctcttattcattctttggaagtgtctgtccaaatcttttatttttaaagaacagcccatcatttcaaagaattcttgcctgatctttctttcaatgatctttccttctccaataaattcttgatggagagttcctagaacagctacaatagatcccaattcatggaactggtcttgacgcacagttcttagattgtgataccattcctttaatgttcctctcatccgacaacaaaattcttcaattactttgtaaggatctgcatctttcatgaattttgtatcgagccatgctcccatctcgatgagtttttttctccattctcttggaggagtatcatcaagggtaaaccaaggtcttgcatttgacttggaggatgaaccctttgagataaatggttcttcttctacaggagaatcatagaatggttcttctgtggagcgggccatcaagatgtttgagatgtccatgtatctaacctcttcttttctgtcgaagattctgttctagtttcatcagattcttctgaggtttatagcttgtgttgaattgataactgggagtagggatattgagaatcttgaaagtcatggggatctatctttagagtttctcctaatcttgtgggaga

SEQ ID NO: 11643 - DNA, 1135 bp, Glycine max
  Gm_smallRNAprecursor_4476
cttcatctagttcactcttttcagaatacatggattctatattatcatattcacctatttgaagatgagagattagtctgaatgcttgttgtgacttcttaggacaattttttgcaaaatgtcctgtctgattgcaaatgaaacatctttgttccctagattttcctttcctccgacttttcataaaaaacttcaatggccttcttttccccttggtgtcagcttgtaagactttctttttctttggtgagcaatgttaagtcttctctctgcatttgatctccaaataaggccttttgcatgctctgctatacttggcttttctgttcatggtattggagaaatactggtgtattggtgttgtctacataatttgtcaacgacctcctgagtgaattgatggatttgtcccatagacatcgtagaaaaatccattttggcggccgctaccatcttgttcaattctggttgtatttcttctggtaatgaagctacatatgtattcttgaggttaggatcattgagaccgttgagaagataaaatctcttattcattctttggaagtgtctgtccaaatcttttatttttaaagaacagcccatcatttcaaagaattcttgcctgatctttctttcaatgatctttccttctccaataaattcttgatggagagttcctagaacagctacaatagatcccaattcatggaactggtcttgacgcacagttcttagattgtgataccattcctttaatgttcctctcatccgacaacaaaattcttcaattactttgtaaggatctgcatctttcatgaattttgtatcgagccatgctcccatctcgatgagtttttttctccattctcttggaggagtatcatcaagggtaaaccaaggtcttgcatttgacttggaggatgaaccctttgagataaatggttcttcttctacaggagaatcatagaatggttcttctgtggagcgggccatcaagatgtttgagatgtccatgtatctaacctcttcttttctgtcgaagattctgttctagtttcatcagattcttctgaggtttatagcttgtgttgaattgataactgggagtagggatattgagaatcttgaaagtcat

SEQ ID NO: 11644 - DNA, 1166 bp, Glycine max
  Gm_smallRNAprecursor_4477
ttaaaaaggaataaggatctaagacaacactctatttttctatcatctttgattctatgtatcgatccagatcctgaacttgagctttaagcctctttatttccttttctttagcatcagaagttgcttcgaaagtggtctttctccattcttcttcaaggcgagaaatttccttggaaagttgatggtgttgtttctccatcctttcggacagatacggtaaattttcatcatttgtgctcactttagtacatatcttgtcaatcttctcatttatctttttcaagagattattctgggctctagcattatctgtctgcccgtttaagacttcttcggcttggctagggcttttaagcttcccctctgaccctacttccgtagaaattatgtaaggcttggttgaaacttttgtccctaggtctgtttttctgtcaataaatggaaactcttgatcataggatgtggaagaaaacatcatgcaaggtataggtacctcagggatcttcaaaggtggatgattccaacctagaatttttgtcatccttttctccttccaagaagggtcttgtggatatttcttctttatcccatccacggtccattttcagggtcactcctcctttgtggtggtggagctggtttacaaggccttggctctggctttcatctgtcttcatcatcatcatctgtatcttcatttgtgtctccatcatgatcatcacaggaacagtctgaatcacacattttgggagcaacttcccaaataaagtgtctatttactttatctgaatatattacacttcgatttgccttgacaaatatcggcatcctgttgtcttctttaactttaggtcttatcattaaagaatgaaaaacctctaaagagttgctactattggcttcatctagtttcttgaaggtcgtggttacaagcccattaattgagcattgtagtctttccagtcttattctaatgcagaatagtcatcaaccaaatcttccaccttttgaaactcaagttctagaacataaatctttgttcagatttgaccatcattagtattctgaagtattatccaatcaataggataactatcccttggcctttgggatgaacttggtagatttggattcaaaggtctgtatgagtaattattaacttc

SEQ ID NO: 11645 - DNA, 1166 bp, Glycine max
  Gm_smallRNAprecursor_4478
ctccccaaatttgagcttcatttctagatcagagttgtccttgctccataaagtaaggatagtgaataatcacaatagaacctagttctcttatgtgatctcctgtgattcagactgttcctgtgatgaccatgatggagacacaaatgaagatacagatgatgatgatgaagacagatggaagccagagccaaggccctgtaaaccacctccaccaccacaaaggaggagtgaccctgaaaatggacagtggatggggataaggaagaaatatccacaagaccctttttggaaggagaaaaggatgacagaaattctaggttgaaatcatccatatttgaagatccctgaggcacatataccttgcatgatgttttcttccacatcctatgatcaaaagtttccatctcttcacagaaaaacagacccagtgacaaaagtttcaaccaagccttacataattcctatggaagtagggccagagaggaagctcaaaagcccaagccaagccgaagaagtgttaaactgggagacagataatgccagagcctagaatcagctcttgaaaaagagatagatgagaagattgacaagatatgtacttaagtgaacataaatgatgaaaagttatagtatctgtctaaaaggatgaagaaataataccatcaactttccaaggaaatttctcgccttgaagaagaatggagaaagaccactttcgaaacagcttctgatgccaaagaaaggaaaataaagaggcttatagctcaagtccaggatctggatcgatacatagaatcaaagatgatagaaaaaaaagagggttgtcttagatccttattcctttttacccctccttctcctactttttattctccattcccaaaccctccataatactttttttccaaagctagcccgtcttggtctttgctcatagcctcggcttataagaaaaaaccagaccctccatagggagaatccacaaaattaatatctcttcccaagagttcagtcgaatctcccacaagattaggagaaactctaaagaaagatccccatgactttcaagattctcaagatccctattcctagttatcaattcaacacaagctataaacctcagaagaatctaatgaaactagaacagaatcggacgaatctaa

SEQ ID NO: 11646 - DNA, 1043 bp, Glycine max
  Gm_smallRNAprecursor_4479
tcacagaaaaacagacccagtgacaaaagtttcaaccaagccttacataattcctatggaagtagggccagagaggaagctcaaaagcccaagccaagccgaagaagtgttaaactgggagacagataatgccagagcctagaatcagctcttgaaaaagagatagatgagaagattgacaagatatgtacttaagtgaacataaatgatgaaaagttatagtatctgtctaaaaggatgaagaaataataccatcaactttccaaggaaatttctcgccttgaagaagaatggagaaagaccactttcgaaacagcttctgatgccaaagaaaggaaaataaagaggcttatagctcaagtccaggatctggatcgatacatagaatcaaagatgatagaaaaaaaagagggttgtcttagatccttattcctttttacccctccttctcctactttttattctccattcccaaaccctccataatactttttttccaaagctagcccgtcttggtctttgctcatagcctcggcttataagaaaaaaccagaccctccatagggagaatccacaaaattaatatctcttcccaagagttcagtcgaatctcccacaagattaggagaaactctaaagaaagatccccatgactttcaagattctcaagatccctattcctagttatcaattcaacacaagctataaacctcagaagaatctaatgaaactagaacagaatcggacgaatctaaggaacaatctaaagaatcttcaactgaagcagaaaaatcttattctaacgaggaataagaggttggatacatgggcatctcaaacatcttgatggcccgctccacagacgaaccattctatgattctcccgtagaagaagaaccagtgatctcaaagggttcatcctccaagccaaatgcaagaccttggtttacccttatgatactcccccaagagaatggagaaaaaaactcatcgaggtgggagcatggctcgatacaagattcatgaaagatgcatatccttac

SEQ ID NO: 11647 - DNA, 1043 bp, Glycine max; identical to SEQ ID NO: 11646
  Gm_smallRNAprecursor_4480

SEQ ID NO: 11648 - DNA, 1044 bp, Glycine max
  Gm_smallRNAprecursor_4481
tcacagaaaaacagacccagtgacaaaagtttcaaccaagccttacataattcctatggaagtagggccagagaggaagctcaaaagcccaagccaagccgaagaagtgttaaactgggagacagataatgccagagcctagaatcagctcttgaaaaagagatagatgagaagattgacaagatatgtacttaagtgaacataaatgatgaaaagttatagtatctgtctaaaaggatgaagaaataataccatcaactttccaaggaaatttctcgccttgaagaagaatggagaaagaccactttcgaaacagcttctgatgccaaagaaaggaaaataaagaggcttatagctcaagtccaggatctggatcgatacatagaatcaaagatgatagaaaaaaaagagggttgtcttagatccttattcctttttacccctccttctcctactttttattctccattcccaaaccctccataatactttttttccaaagctagcccgtcttggtctttgctcatagcctcggcttataagaaaaaaccagaccctccatagggagaatccacaaaattaatatctcttcccaagagttcagtcgaatctcccacaagattaggagaaactctaaagaaagatccccatgactttcaagattctcaagatccctattcctagttatcaattcaacacaagctataaacctcagaagaatctaatgaaactagaacagaatcggacgaatctaaggaacaatctaaagaatcttcaactgaagcagaaaaatcttattctaacgaggaataagaggttggatacatgggcatctcaaacatcttgatggcccgctccacagacgaaccattctatgattctcccgtagaagaagaaccagtgatctcaaagggttcatcctccaagccaaatgcaagaccttggtttacccttatgatactcccccaagagaatggagaaaaaaactcatcgaggtgggagcatggctcgatacaagattcatgaaagatgcatatccttaca

SEQ ID NO: 11649 - DNA, 1184 bp, Glycine max
  Gm_smallRNAprecursor_4482
gatccccatgactttcaagattctcaagatccctattcctagttatcaattcaacacaagctataaacctcagaagaatctaatgaaactagaacagaatcggacgaatctaaggaacaatctaaagaatcttcaactgaagcagaaaaatcttattctaacgaggaataagaggttggatacatgggcatctcaaacatcttgatggcccgctccacagacgaaccattctatgattctcccgtagaagaagaaccagtgatctcaaagggttcatcctccaagccaaatgcaagaccttggtttacccttatgatactcccccaagagaatggagaaaaaaactcatcgaggtgggagcatggctcgatacaagattcatgaaagatgcatatccttacaaagtaattaaagaattttgttgtcggatgacgggaacattaaaggaatggtatcacaatctaggagttgtgcgtcaaaaccagttccatgaattgggatctactgcagctattctaggaactctccatcaagaatttattggagaaggaatgatcattgaaagaaagatcaggcaagaattctttgaaacgaggtgttgttctttaaaaataaaatatttggacagacatttccaaagaatgaatcagagattttatcttctcaacggtctcaatgattctagcctcaagaatacatatgtagcttcattaccagaagaaatacaaccagaattgaacaagatggtagcggtcgcccaaatggattttctacgatgtctatgggacaaatccatcaattcactcaggaggtcgttgacaaattatgtagacaacaccagtatttctccgatatcatgaatagaaaagccaagtatatcagaacatgcaaaatgccttacttggagatcaaatgcagcgagaagactttccattgctcaccaaagaaaaagaaagttttacaaactgacaccaacgggaaaagaaggccgttgaagttttttaggaaaagcgggaggaaaggaaaatccaggggacaaagatgtttcatttgcaaccagacaggacattttgcaaaaaattgtcctaaaaagtcacaaaaagccatcagactaatctctcatcttcaaatcgatgaatatgatgatatagaatccatgtattctgaaaagagtgaactagata

SEQ ID NO: 11650 - DNA, 1085 bp, Glycine max
  Gm_smallRNAprecursor_4483
atgggcatctcaaacatcttgatggcccgctccacagacgaaccattctatgattctcccgtagaagaagaaccagtgatctcaaagggttcatcctccaagccaaatgcaagaccttggtttacccttatgatactcccccaagagaatggagaaaaaaactcatcgaggtgggagcatggctcgatacaagattcatgaaagatgcatatccttacaaagtaattaaagaattttgttgtcggatgacgggaacattaaaggaatggtatcacaatctaggagttgtgcgtcaaaaccagttccatgaattgggatctactgcagctattctaggaactctccatcaagaatttattggagaaggaatgatcattgaaagaaagatcaggcaagaattctttgaaacgaggtgttgttctttaaaaataaaatatttggacagacatttccaaagaatgaatcagagattttatcttctcaacggtctcaatgattctagcctcaagaatacatatgtagcttcattaccagaagaaatacaaccagaattgaacaagatggtagcggtcgcccaaatggattttctacgatgtctatgggacaaatccatcaattcactcaggaggtcgttgacaaattatgtagacaacaccagtatttctccgatatcatgaatagaaaagccaagtatatcagaacatgcaaaatgccttacttggagatcaaatgcagcgagaagactttccattgctcaccaaagaaaaagaaagttttacaaactgacaccaacgggaaaagaaggccgttgaagttttttaggaaaagcgggaggaaaggaaaatccaggggacaaagatgtttcatttgcaaccagacaggacattttgcaaaaaattgtcctaaaaagtcacaaaaagccatcagactaatctctcatcttcaaatcgatgaatatgatgatatagaatccatgtattctgaaaagagtgaactagataaggagactgaatttgccttaaatcagacagattcttcagacgaagaatctccagcttctccaatcctcatcttctctatacaag

SEQ ID NO: 11651 - DNA, 1049 bp, Glycine max
  Gm_smallRNAprecursor_4484
aaacatcttgatggcccgctccacagacgaaccattctatgattctcccgtagaagaagaaccagtgatctcaaagggttcatcctccaagccaaatgcaagaccttggtttacccttatgatactcccccaagagaatggagaaaaaaactcatcgaggtgggagcatggctcgatacaagattcatgaaagatgcatatccttacaaagtaattaaagaattttgttgtcggatgacgggaacattaaaggaatggtatcacaatctaggagttgtgcgtcaaaaccagttccatgaattgggatctactgcagctattctaggaactctccatcaagaatttattggagaaggaatgatcattgaaagaaagatcaggcaagaattctttgaaacgaggtgttgttctttaaaaataaaatatttggacagacatttccaaagaatgaatcagagattttatcttctcaacggtctcaatgattctagcctcaagaatacatatgtagcttcattaccagaagaaatacaaccagaattgaacaagatggtagcggtcgcccaaatggattttctacgatgtctatgggacaaatccatcaattcactcaggaggtcgttgacaaattatgtagacaacaccagtatttctccgatatcatgaatagaaaagccaagtatatcagaacatgcaaaatgccttacttggagatcaaatgcagcgagaagactttccattgctcaccaaagaaaaagaaagttttacaaactgacaccaacgggaaaagaaggccgttgaagttttttaggaaaagcgggaggaaaggaaaatccaggggacaaagatgtttcatttgcaaccagacaggacattttgcaaaaaattgtcctaaaaagtcacaaaaagccatcagactaatctctcatcttcaaatcgatgaatatgatgatatagaatccatgtattctgaaaagagtgaactagataaggagactgaatttgccttaaatcagacagattcttcagacgaagaatctccagcttct

SEQ ID NO: 11652 - DNA, 1084 bp, Glycine max
  Gm_smallRNAprecursor_4485
tcaaagggttcatcctccaagccaaatgcaagaccttggtttacccttatgatactcccccaagagaatggagaaaaaaactcatcgaggtgggagcatggctcgatacaagattcatgaaagatgcatatccttacaaagtaattaaagaattttgttgtcggatgacgggaacattaaaggaatggtatcacaatctaggagttgtgcgtcaaaaccagttccatgaattgggatctactgcagctattctaggaactctccatcaagaatttattggagaaggaatgatcattgaaagaaagatcaggcaagaattctttgaaacgaggtgttgttctttaaaaataaaatatttggacagacatttccaaagaatgaatcagagattttatcttctcaacggtctcaatgattctagcctcaagaatacatatgtagcttcattaccagaagaaatacaaccagaattgaacaagatggtagcggtcgcccaaatggattttctacgatgtctatgggacaaatccatcaattcactcaggaggtcgttgacaaattatgtagacaacaccagtatttctccgatatcatgaatagaaaagccaagtatatcagaacatgcaaaatgccttacttggagatcaaatgcagcgagaagactttccattgctcaccaaagaaaaagaaagttttacaaactgacaccaacgggaaaagaaggccgttgaagttttttaggaaaagcgggaggaaaggaaaatccaggggacaaagatgtttcatttgcaaccagacaggacattttgcaaaaaattgtcctaaaaagtcacaaaaagccatcagactaatctctcatcttcaaatcgatgaatatgatgatatagaatccatgtattctgaaaagagtgaactagataaggagactgaatttgccttaaatcagacagattcttcagacgaagaatctccagcttctccaatcctcatcttctctatacaagaagaacaatcgatcaagccagcgattcctcaaccatgtgttgaaattcaagtattgacaaaaaaaagtttaaaaaaccta

SEQ ID NO: 11653 - DNA, 1077 bp, Glycine max
  Gm_smallRNAprecursor_4486
aagggttcatcctccaagccaaatgcaagaccttggtttacccttatgatactcccccaagagaatggagaaaaaaactcatcgaggtgggagcatggctcgatacaagattcatgaaagatgcatatccttacaaagtaattaaagaattttgttgtcggatgacgggaacattaaaggaatggtatcacaatctaggagttgtgcgtcaaaaccagttccatgaattgggatctactgcagctattctaggaactctccatcaagaatttattggagaaggaatgatcattgaaagaaagatcaggcaagaattctttgaaacgaggtgttgttctttaaaaataaaatatttggacagacatttccaaagaatgaatcagagattttatcttctcaacggtctcaatgattctagcctcaagaatacatatgtagcttcattaccagaagaaatacaaccagaattgaacaagatggtagcggtcgcccaaatggattttctacgatgtctatgggacaaatccatcaattcactcaggaggtcgttgacaaattatgtagacaacaccagtatttctccgatatcatgaatagaaaagccaagtatatcagaacatgcaaaatgccttacttggagatcaaatgcagcgagaagactttccattgctcaccaaagaaaaagaaagttttacaaactgacaccaacgggaaaagaaggccgttgaagttttttaggaaaagcgggaggaaaggaaaatccaggggacaaagatgtttcatttgcaaccagacaggacattttgcaaaaaattgtcctaaaaagtcacaaaaagccatcagactaatctctcatcttcaaatcgatgaatatgatgatatagaatccatgtattctgaaaagagtgaactagataaggagactgaatttgccttaaatcagacagattcttcagacgaagaatctccagcttctccaatcctcatcttctctatacaagaagaacaatcgatcaagccagcgattcctcaaccatgtgttgaaattcaagtattgacaaaaaaaagtttaaaaaa

SEQ ID NO: 11654 - DNA, 1033 bp, Glycine max
  Gm_smallRNAprecursor_4487
cacaatctaggagttgtgcgtcaaaaccagttccatgaattgggatctactgcagctattctaggaactctccatcaagaatttattggagaaggaatgatcattgaaagaaagatcaggcaagaattctttgaaacgaggtgttgttctttaaaaataaaatatttggacagacatttccaaagaatgaatcagagattttatcttctcaacggtctcaatgattctagcctcaagaatacatatgtagcttcattaccagaagaaatacaaccagaattgaacaagatggtagcggtcgcccaaatggattttctacgatgtctatgggacaaatccatcaattcactcaggaggtcgttgacaaattatgtagacaacaccagtatttctccgatatcatgaatagaaaagccaagtatatcagaacatgcaaaatgccttacttggagatcaaatgcagcgagaagactttccattgctcaccaaagaaaaagaaagttttacaaactgacaccaacgggaaaagaaggccgttgaagttttttaggaaaagcgggaggaaaggaaaatccaggggacaaagatgtttcatttgcaaccagacaggacattttgcaaaaaattgtcctaaaaagtcacaaaaagccatcagactaatctctcatcttcaaatcgatgaatatgatgatatagaatccatgtattctgaaaagagtgaactagataaggagactgaatttgccttaaatcagacagattcttcagacgaagaatctccagcttctccaatcctcatcttctctatacaagaagaacaatcgatcaagccagcgattcctcaaccatgtgttgaaattcaagtattgacaaaaaaaagtttaaaaaacctatcaaaattattactttcatagacactggagctcaaaggacgatgatggatccagatagtcttccacaagaatattggaaaaatgaagtagcttattttgtagtagctgatgggaaatttttcaaaactgacttaataaca

SEQ ID NO: 11655 - DNA, 1187 bp, Glycine max
  Gm_smallRNAprecursor_4488
tctctcatcttcaaatcgatgaatatgatgatatagaatccatgtattctgaaaagagtgaactagataaggagactgaatttgccttaaatcagacagattcttcagacgaagaatctccagcttctccaatcctcatcttctctatacaagaagaacaatcgatcaagccagcgattcctcaaccatgtgttgaaattcaagtattgacaaaaaaaagtttaaaaaacctatcaaaattattactttcatagacactggagctcaaaggacgatgatggatccagatagtcttccacaagaatattggaaaaatgaagtagcttattttgtagtagctgatgggaaatttttcaaaactgacttaataacacatgctccaataggcatcaagttttttttttcctgattgtatcatctggaccaaagtcattggaaacaaattgtctcacagagacctcctcataggaatggatgtctatattgctgccgataaactccaaatacattctactggatcaaattcaaaaaagaattcaagcctttttcagaaattacaaggtttttctctttagcagaagccccgccagaagttggagagtttaaagaaaagatttcctccctatgcgcagacagtcatgaagatttcaaccatccatatcctttatggaaaaacaaagaatactttgttgatctaccattctgattaaatgaagatatcaatccaacaaaagcaacccatccagggatgacacctttagatctacaagtagccagacaagaatgctaagatctgctgaggcaaggtctgattgacccaacccagtcaaattgggcatgccaagctttttacgtagaaaaaagagctgaaaattaaggggaaagaaaaggttaatcattgactataagcctctcaatcattttctcaaagatgataagtttccaatcccaaacgcctcatttctcccaaccttgatcagggaatcaaacttattttcaaagtttgatttaaaatcaggtttttgtcaacttggcctaaaaccagaagaccagtataaaactgatgcaatcgtccctaggaagggaccagtcactagagccatgagcaagaggctccaagagaattgggctagagctgctgaagaaggctataaggttctcatgaaccttagggtagatttcgtagc

SEQ ID NO: 11656 - DNA, 1188 bp, Glycine max
  Gm_smallRNAprecursor_4489
tctctcatcttcaaatcgatgaatatgatgatatagaatccatgtattctgaaaagagtgaactagataaggagactgaatttgccttaaatcagacagattcttcagacgaagaatctccagcttctccaatcctcatcttctctatacaagaagaacaatcgatcaagccagcgattcctcaaccatgtgttgaaattcaagtattgacaaaaaaaagtttaaaaaacctatcaaaattattactttcatagacactggagctcaaaggacgatgatggatccagatagtcttccacaagaatattggaaaaatgaagtagcttattttgtagtagctgatgggaaatttttcaaaactgacttaataacacatgctccaataggcatcaagttttttttttcctgattgtatcatctggaccaaagtcattggaaacaaattgtctcacagagacctcctcataggaatggatgtctatattgctgccgataaactccaaatacattctactggatcaaattcaaaaaagaattcaagcctttttcagaaattacaaggtttttctctttagcagaagccccgccagaagttggagagtttaaagaaaagatttcctccctatgcgcagacagtcatgaagatttcaaccatccatatcctttatggaaaaacaaagaatactttgttgatctaccattctgattaaatgaagatatcaatccaacaaaagcaacccatccagggatgacacctttagatctacaagtagccagacaagaatgctaagatctgctgaggcaaggtctgattgacccaacccagtcaaattgggcatgccaagctttttacgtagaaaaaagagctgaaaattaaggggaaagaaaaggttaatcattgactataagcctctcaatcattttctcaaagatgataagtttccaatcccaaacgcctcatttctcccaaccttgatcagggaatcaaacttattttcaaagtttgatttaaaatcaggtttttgtcaacttggcctaaaaccagaagaccagtataaaactgatgcaatcgtccctaggaagggaccagtcactagagccatgagcaagaggctccaagagaattgggctagagctgctgaagaaggctataaggttctcatgaaccttagggtagatttcgtagcg

SEQ ID NO: 11657 - DNA, 1097 bp, Glycine max
  Gm_smallRNAprecursor_4490
aaccatgtgttgaaattcaagtattgacaaaaaaaagtttaaaaaacctatcaaaattattactttcatagacactggagctcaaaggacgatgatggatccagatagtcttccacaagaatattggaaaaatgaagtagcttattttgtagtagctgatgggaaatttttcaaaactgacttaataacacatgctccaataggcatcaagttttttttttcctgattgtatcatctggaccaaagtcattggaaacaaattgtctcacagagacctcctcataggaatggatgtctatattgctgccgataaactccaaatacattctactggatcaaattcaaaaaagaattcaagcctttttcagaaattacaaggtttttctctttagcagaagccccgccagaagttggagagtttaaagaaaagatttcctccctatgcgcagacagtcatgaagatttcaaccatccatatcctttatggaaaaacaaagaatactttgttgatctaccattctgattaaatgaagatatcaatccaacaaaagcaacccatccagggatgacacctttagatctacaagtagccagacaagaatgctaagatctgctgaggcaaggtctgattgacccaacccagtcaaattgggcatgccaagctttttacgtagaaaaaagagctgaaaattaaggggaaagaaaaggttaatcattgactataagcctctcaatcattttctcaaagatgataagtttccaatcccaaacgcctcatttctcccaaccttgatcagggaatcaaacttattttcaaagtttgatttaaaatcaggtttttgtcaacttggcctaaaaccagaagaccagtataaaactgatgcaatcgtccctaggaagggaccagtcactagagccatgagcaagaggctccaagagaattgggctagagctgctgaagaaggctataaggttctcatgaaccttagggtagatttcgtagcgcatgggccaaggttgggtccaattatctttgtacatattagatttggatgtcattatatttagtccttgtatttagggctccataatgtagg

SEQ ID NO: 11658 - DNA, 1090 bp, Glycine max
  Gm_smallRNAprecursor_4491
catgtgttgaaattcaagtattgacaaaaaaaagtttaaaaaacctatcaaaattattactttcatagacactggagctcaaaggacgatgatggatccagatagtcttccacaagaatattggaaaaatgaagtagcttattttgtagtagctgatgggaaatttttcaaaactgacttaataacacatgctccaataggcatcaagttttttttttcctgattgtatcatctggaccaaagtcattggaaacaaattgtctcacagagacctcctcataggaatggatgtctatattgctgccgataaactccaaatacattctactggatcaaattcaaaaaagaattcaagcctttttcagaaattacaaggtttttctctttagcagaagccccgccagaagttggagagtttaaagaaaagatttcctccctatgcgcagacagtcatgaagatttcaaccatccatatcctttatggaaaaacaaagaatactttgttgatctaccattctgattaaatgaagatatcaatccaacaaaagcaacccatccagggatgacacctttagatctacaagtagccagacaagaatgctaagatctgctgaggcaaggtctgattgacccaacccagtcaaattgggcatgccaagctttttacgtagaaaaaagagctgaaaattaaggggaaagaaaaggttaatcattgactataagcctctcaatcattttctcaaagatgataagtttccaatcccaaacgcctcatttctcccaaccttgatcagggaatcaaacttattttcaaagtttgatttaaaatcaggtttttgtcaacttggcctaaaaccagaagaccagtataaaactgatgcaatcgtccctaggaagggaccagtcactagagccatgagcaagaggctccaagagaattgggctagagctgctgaagaaggctataaggttctcatgaaccttagggtagatttcgtagcgcatgggccaaggttgggtccaattatctttgtacatattagatttggatgtcattatatttagtccttgtatttagggctccataatg

SEQ ID NO: 11659 - DNA, 1190 bp, Glycine max
  Gm_smallRNAprecursor_4492
acgatgatggatccagatagtcttccacaagaatattggaaaaatgaagtagcttattttgtagtagctgatgggaaatttttcaaaactgacttaataacacatgctccaataggcatcaagttttttttttcctgattgtatcatctggaccaaagtcattggaaacaaattgtctcacagagacctcctcataggaatggatgtctatattgctgccgataaactccaaatacattctactggatcaaattcaaaaaagaattcaagcctttttcagaaattacaaggtttttctctttagcagaagccccgccagaagttggagagtttaaagaaaagatttcctccctatgcgcagacagtcatgaagatttcaaccatccatatcctttatggaaaaacaaagaatactttgttgatctaccattctgattaaatgaagatatcaatccaacaaaagcaacccatccagggatgacacctttagatctacaagtagccagacaagaatgctaagatctgctgaggcaaggtctgattgacccaacccagtcaaattgggcatgccaagctttttacgtagaaaaaagagctgaaaattaaggggaaagaaaaggttaatcattgactataagcctctcaatcattttctcaaagatgataagtttccaatcccaaacgcctcatttctcccaaccttgatcagggaatcaaacttattttcaaagtttgatttaaaatcaggtttttgtcaacttggcctaaaaccagaagaccagtataaaactgatgcaatcgtccctaggaagggaccagtcactagagccatgagcaagaggctccaagagaattgggctagagctgctgaagaaggctataaggttctcatgaaccttagggtagatttcgtagcgcatgggccaaggttgggtccaattatctttgtacatattagatttggatgtcattatatttagtccttgtatttagggctccataatgtaggtagggtaccctagaaatatagaatttttcagcccttgtattttagggcacctagagtagtttttgtattaggggtaattttgtaatttcacatgcactaagtgaatatttgaaatgtgtgtttggaaataaatttaattgaattggtaaaagcccaatccaattaaattttagaggggggg

SEQ ID NO: 11660 - DNA, 1110 bp, Glycine max
  Gm_smallRNAprecursor_4493
aactgaagttcactaagcataattagtgaaattttggctccaaaatttggctccacaaattcaatttcaaattcaagtgaaatttgaattgattcaaatttctctccaattttgtgtgacacttaggctataaatagaggtcatgtgtgtgtattttttaactttgatcatttgaaaattaaacttcagattccaaagctcttttaaaacacaaaatttcgtgcccttctctttctctcccttcattcatctccttcttcctccaagctcttgtccatggcctcctatggtggtgagcatcttctagactcatcttctccttgaagtggcatctcctccctctcttccttctccattccgctgatattcatcttccaagaagcaaaggaatccattgatgaagaagatcctaggcctacaagctccaatggagcttacatcatgtggtatcaagagcatcttcatctaggtgatgttcttttgcttcctctatctttttgttcaatgaattctctttaattccttgttcttcatcttattctccatgtatatcctcaattatcttgtggtttggtgctgttaagattagattaaaaaaaataaaccgattaaatcttagatctatacttgttcttgtacttctatggttcaaattttgtagatctactcttgaatcatgtttttgtgttgattttaggttttatcatttttcattcataatatttttgtgctgaacctttagatctaaattttcttccaaaatatcgattagaaaaaaaaatataaaaatctaagtgtaaatcacttaatccatgttgtcttagagtcatgtttagtcatagtaattgtcacattatgttctaagtttgtgttgaatttttattttgtttattgaattctagatacatttgttcatatattcttgtaattcttagcctatcttttgaattttgagtctaattcatgcatgttatttagttcataacatgttctaaatcaattcctagaagtagacttgttgaactcttttttttttctaagtttcctacatgatgtctatgatgaaattgagttgtggtgctgagttgtgactggatttgtgaatcaaaa

SEQ ID NO: 11661 - DNA, 1130 bp, Glycine max
  Gm_smallRNAprecursor_4494
atcatgaggggtcaagatatttatagtagtcaagaggagactacttctagcccatcctctagtggaagtgaagatgatgtaaggggtgaagagtatagtgaggaagtctacccccatgaagaatgtgacctcttaatggttagaagactccttggaggtcaatcttgtgatctatccccatactaaagagagaacatctttcatacaagatgcaaaattttagataaaacttgttctctcattgtggatagtggatcttgttgcaaaattttagataaaacttatcaacctcagcctcacatagctcaagagctgttaaattttcctgatgaaaatatcacagtcaaatagatccaacaattcttgggaattgtaaattatatcagagattttatccccatagcagcctaatataccagttcattgtccaaactttggaagaaaaactcttctccatggtcaaaagaacaaataataataatcaaggaactcaagaagattgcccaaaatctcccagccttgaagattcctggaacaggttagagaatattacaaactgatgcaagttatcattattggggagctatcatgatagaacaagaaggagagaagaattattaatgtggccatgccagtggacaattcaaggaagttgagaaaagaggcattggcagtaaaaaaaaatggaatcaagaaatttgattttcatttgagaggacaccagtttcaggttcacatggacaattcgtcattcccaaaaattttggaatttaaaaacaagatgccaccagatcctcaaatcttaaggctcaaggattggttctccatatatgatttttctgtgaaacacataaaagggaagaataatttgattcctgatttcttatccaaaccaaacaataagaccgttaaggtgataacctccactcaccccttcccattaatattcatggtaaaaccattatctgaaacagccaaaactattaaggttttccctccaagattgattacccatactcctgcacagatccttgaatatgctaagtctcattacttccattttctacatgaaaccatgagattcaaatacactccagcacaaatatttgatcctgagataccctttggag

SEQ ID NO: 11662 - DNA, 1089 bp, Glycine max
  Gm_smallRNAprecursor_4495
cttatcaacctcagcctcacatagctcaagagctgttaaattttcctgatgaaaatatcacagtcaaatagatccaacaattcttgggaattgtaaattatatcagagattttatccccatagcagcctaatataccagttcattgtccaaactttggaagaaaaactcttctccatggtcaaaagaacaaataataataatcaaggaactcaagaagattgcccaaaatctcccagccttgaagattcctggaacaggttagagaatattacaaactgatgcaagttatcattattggggagctatcatgatagaacaagaaggagagaagaattattaatgtggccatgccagtggacaattcaaggaagttgagaaaagaggcattggcagtaaaaaaaaatggaatcaagaaatttgattttcatttgagaggacaccagtttcaggttcacatggacaattcgtcattcccaaaaattttggaatttaaaaacaagatgccaccagatcctcaaatcttaaggctcaaggattggttctccatatatgatttttctgtgaaacacataaaagggaagaataatttgattcctgatttcttatccaaaccaaacaataagaccgttaaggtgataacctccactcaccccttcccattaatattcatggtaaaaccattatctgaaacagccaaaactattaaggttttccctccaagattgattacccatactcctgcacagatccttgaatatgctaagtctcattacttccattttctacatgaaaccatgagattcaaatacactccagcacaaatatttgatcctgagataccctttggaggtatatttgaactgttctatgagattgggtgggatttgtgtgaaccaaccatatgggtcatttggtgtaatacagtacaatattcaatccccatcaccctaaaaccttttatgacatacaacatcttgacaaatccatataaagatgaatatcttttatggacaatgttagagtggttttctctatagcatggtggcgtatgaagctgaaaaaaattctagacattgagagacaaagag

SEQ ID NO: 11663 - DNA, 1199 bp, Glycine max
  Gm_smallRNAprecursor_4496
ctcttggtagtgcattcctttcttctcttttgatccctcttggtagtgcattcctttcttctcttcctactacgagctttgtgttcttggtaagtattttcttaactggtaacttaaatttttttttttgtgttatatatatgttaagttaattttaattgatatattaatattatttaggtgaggttttttaccctctttgccctacattgtttgattgctcttcctagtatgtgctttcggtaagtgtttcttactgacaacgtaaaatacttttgtgttatatatatatatatatatatatatcaaggtcacaccggagaccggcttacaaaacccaggttttcataaacaaagaaaccgaagcggcggcagagccgcacaggatcggtgaagggagaagagagaaagatgaaaaatagaaatttattgaatctagaaagaagcgcttacaaaaatcttgtttcagagcacctctcttccgaaacctgaaaaaatggctaaatgaaagggtgcctcacaacatacttgaggactccttatatagccaaaaatctaagaccggtagttgccggtagttttgaccgggactatttgactgtttgttacaagacaagtagttttgaccgggactttaatggctacaggacaggtagtattgtccagcattaactacacattaattacaaacagacggttttgtgaccgaaattaaatttaatctaaacagataccaaaacaatcatcttcgttttggtaaaagggatcttcttcgtcttcttcagcagaacttgtttcttccttctttgaggatgaagcttcttcttcctgttgtaacatttgtagaacttccttcagatttttagctaagacctcctttgatgtcgatcctgctaaaaatgctgccagatgagacttttggttcaaaaacacagaagtctctggatcagctgccttgaggaattctggatgggattggaaccatagttttacttgttctggatccgctttggatgagtcaaattgtgtccaccattttacaaatgcgtgtctttgtagtgatggatattggtttgtcttttcagtcttgctgtaacgatattgccatgagaatatccatgacagtgcaaagcttgaaaagtatttaagatctgctggaattcgtgattcctgcgaattgtattgtttcttaaattggg

SEQ ID NO: 11664 - DNA, 1141 bp, Glycine max
  Gm_smallRNAprecursor_4497
gttcttggtaagtattttcttaactggtaacttaaatttttttttttgtgttatatatatgttaagttaattttaattgatatattaatattatttaggtgaggttttttaccctctttgccctacattgtttgattgctcttcctagtatgtgctttcggtaagtgtttcttactgacaacgtaaaatacttttgtgttatatatatatatatatatatatatcaaggtcacaccggagaccggcttacaaaacccaggttttcataaacaaagaaaccgaagcggcggcagagccgcacaggatcggtgaagggagaagagagaaagatgaaaaatagaaatttattgaatctagaaagaagcgcttacaaaaatcttgtttcagagcacctctcttccgaaacctgaaaaaatggctaaatgaaagggtgcctcacaacatacttgaggactccttatatagccaaaaatctaagaccggtagttgccggtagttttgaccgggactatttgactgtttgttacaagacaagtagttttgaccgggactttaatggctacaggacaggtagtattgtccagcattaactacacattaattacaaacagacggttttgtgaccgaaattaaatttaatctaaacagataccaaaacaatcatcttcgttttggtaaaagggatcttcttcgtcttcttcagcagaacttgtttcttccttctttgaggatgaagcttcttcttcctgttgtaacatttgtagaacttccttcagatttttagctaagacctcctttgatgtcgatcctgctaaaaatgctgccagatgagacttttggttcaaaaacacagaagtctctggatcagctgccttgaggaattctggatgggattggaaccatagttttacttgttctggatccgctttggatgagtcaaattgtgtccaccattttacaaatgcgtgtctttgtagtgatggatattggtttgtcttttcagtcttgctgtaacgatattgccatgagaatatccatgacagtgcaaagcttgaaaagtatttaagatctgctggaattcgtgattcctgcgaattgtattgtttcttaaattgggaaaattcttgttggaccgtttctg

SEQ ID NO: 11665 - DNA, 1154 bp, Glycine max
  Gm_smallRNAprecursor_4498
gttcttggtaagtattttcttaactggtaacttaaatttttttttttgtgttatatatatgttaagttaattttaattgatatattaatattatttaggtgaggttttttaccctctttgccctacattgtttgattgctcttcctagtatgtgctttcggtaagtgtttcttactgacaacgtaaaatacttttgtgttatatatatatatatatatatatatcaaggtcacaccggagaccggcttacaaaacccaggttttcataaacaaagaaaccgaagcggcggcagagccgcacaggatcggtgaagggagaagagagaaagatgaaaaatagaaatttattgaatctagaaagaagcgcttacaaaaatcttgtttcagagcacctctcttccgaaacctgaaaaaatggctaaatgaaagggtgcctcacaacatacttgaggactccttatatagccaaaaatctaagaccggtagttgccggtagttttgaccgggactatttgactgtttgttacaagacaagtagttttgaccgggactttaatggctacaggacaggtagtattgtccagcattaactacacattaattacaaacagacggttttgtgaccgaaattaaatttaatctaaacagataccaaaacaatcatcttcgttttggtaaaagggatcttcttcgtcttcttcagcagaacttgtttcttccttctttgaggatgaagcttcttcttcctgttgtaacatttgtagaacttccttcagatttttagctaagacctcctttgatgtcgatcctgctaaaaatgctgccagatgagacttttggttcaaaaacacagaagtctctggatcagctgccttgaggaattctggatgggattggaaccatagttttacttgttctggatccgctttggatgagtcaaattgtgtccaccattttacaaatgcgtgtctttgtagtgatggatattggtttgtcttttcagtcttgctgtaacgatattgccatgagaatatccatgacagtgcaaagcttgaaaagtatttaagatctgctggaattcgtgattcctgcgaattgtattgtttcttaaattgggaaaattcttgttggaccgtttctgggaatatctttgg

SEQ ID NO: 11666 - DNA, 1061 bp, Glycine max
  Gm_smallRNAprecursor_4499
cttcctagtatgtgctttcggtaagtgtttcttactgacaacgtaaaatacttttgtgttatatatatatatatatatatatatcaaggtcacaccggagaccggcttacaaaacccaggttttcataaacaaagaaaccgaagcggcggcagagccgcacaggatcggtgaagggagaagagagaaagatgaaaaatagaaatttattgaatctagaaagaagcgcttacaaaaatcttgtttcagagcacctctcttccgaaacctgaaaaaatggctaaatgaaagggtgcctcacaacatacttgaggactccttatatagccaaaaatctaagaccggtagttgccggtagttttgaccgggactatttgactgtttgttacaagacaagtagttttgaccgggactttaatggctacaggacaggtagtattgtccagcattaactacacattaattacaaacagacggttttgtgaccgaaattaaatttaatctaaacagataccaaaacaatcatcttcgttttggtaaaagggatcttcttcgtcttcttcagcagaacttgtttcttccttctttgaggatgaagcttcttcttcctgttgtaacatttgtagaacttccttcagatttttagctaagacctcctttgatgtcgatcctgctaaaaatgctgccagatgagacttttggttcaaaaacacagaagtctctggatcagctgccttgaggaattctggatgggattggaaccatagttttacttgttctggatccgctttggatgagtcaaattgtgtccaccattttacaaatgcgtgtctttgtagtgatggatattggtttgtcttttcagtcttgctgtaacgatattgccatgagaatatccatgacagtgcaaagcttgaaaagtatttaagatctgctggaattcgtgattcctgcgaattgtattgtttcttaaattgggaaaattcttgttggaccgtttctgggaatatctttgggattggtccaaagaagtcccaccattgcaaaacccaattgggaaaat

SEQ ID NO: 11667 - DNA, 1063 bp, Glycine max
  Gm_smallRNAprecursor_4500
cttcctagtatgtgctttcggtaagtgtttcttactgacaacgtaaaatacttttgtgttatatatatatatatatatatatatcaaggtcacaccggagaccggcttacaaaacccaggttttcataaacaaagaaaccgaagcggcggcagagccgcacaggatcggtgaagggagaagagagaaagatgaaaaatagaaatttattgaatctagaaagaagcgcttacaaaaatcttgtttcagagcacctctcttccgaaacctgaaaaaatggctaaatgaaagggtgcctcacaacatacttgaggactccttatatagccaaaaatctaagaccggtagttgccggtagttttgaccgggactatttgactgtttgttacaagacaagtagttttgaccgggactttaatggctacaggacaggtagtattgtccagcattaactacacattaattacaaacagacggttttgtgaccgaaattaaatttaatctaaacagataccaaaacaatcatcttcgttttggtaaaagggatcttcttcgtcttcttcagcagaacttgtttcttccttctttgaggatgaagcttcttcttcctgttgtaacatttgtagaacttccttcagatttttagctaagacctcctttgatgtcgatcctgctaaaaatgctgccagatgagacttttggttcaaaaacacagaagtctctggatcagctgccttgaggaattctggatgggattggaaccatagttttacttgttctggatccgctttggatgagtcaaattgtgtccaccattttacaaatgcgtgtctttgtagtgatggatattggtttgtcttttcagtcttgctgtaacgatattgccatgagaatatccatgacagtgcaaagcttgaaaagtatttaagatctgctggaattcgtgattcctgcgaattgtattgtttcttaaattgggaaaattcttgttggaccgtttctgggaatatctttgggattggtccaaagaagtcccaccattgcaaaacccaattgggaaaattg

SEQ ID NO: 11668 - DNA, 1063 bp, Glycine max; identical to SEQ ID NO: 11667
  Gm_smallRNAprecursor_4501

SEQ ID NO: 11669 - DNA, 1064 bp, Glycine max
  Gm_smallRNAprecursor_4502
cttcctagtatgtgctttcggtaagtgtttcttactgacaacgtaaaatacttttgtgttatatatatatatatatatatatatcaaggtcacaccggagaccggcttacaaaacccaggttttcataaacaaagaaaccgaagcggcggcagagccgcacaggatcggtgaagggagaagagagaaagatgaaaaatagaaatttattgaatctagaaagaagcgcttacaaaaatcttgtttcagagcacctctcttccgaaacctgaaaaaatggctaaatgaaagggtgcctcacaacatacttgaggactccttatatagccaaaaatctaagaccggtagttgccggtagttttgaccgggactatttgactgtttgttacaagacaagtagttttgaccgggactttaatggctacaggacaggtagtattgtccagcattaactacacattaattacaaacagacggttttgtgaccgaaattaaatttaatctaaacagataccaaaacaatcatcttcgttttggtaaaagggatcttcttcgtcttcttcagcagaacttgtttcttccttctttgaggatgaagcttcttcttcctgttgtaacatttgtagaacttccttcagatttttagctaagacctcctttgatgtcgatcctgctaaaaatgctgccagatgagacttttggttcaaaaacacagaagtctctggatcagctgccttgaggaattctggatgggattggaaccatagttttacttgttctggatccgctttggatgagtcaaattgtgtccaccattttacaaatgcgtgtctttgtagtgatggatattggtttgtcttttcagtcttgctgtaacgatattgccatgagaatatccatgacagtgcaaagcttgaaaagtatttaagatctgctggaattcgtgattcctgcgaattgtattgtttcttaaattgggaaaattcttgttggaccgtttctgggaatatctttgggattggtccaaagaagtcccaccattgcaaaacccaattgggaaaattgt

SEQ ID NO: 11670 - DNA, 1209 bp, Glycine max
  Gm_smallRNAprecursor_4503
cttcctagtatgtgctttcggtaagtgtttcttactgacaacgtaaaatacttttgtgttatatatatatatatatatatatatcaaggtcacaccggagaccggcttacaaaacccaggttttcataaacaaagaaaccgaagcggcggcagagccgcacaggatcggtgaagggagaagagagaaagatgaaaaatagaaatttattgaatctagaaagaagcgcttacaaaaatcttgtttcagagcacctctcttccgaaacctgaaaaaatggctaaatgaaagggtgcctcacaacatacttgaggactccttatatagccaaaaatctaagaccggtagttgccggtagttttgaccgggactatttgactgtttgttacaagacaagtagttttgaccgggactttaatggctacaggacaggtagtattgtccagcattaactacacattaattacaaacagacggttttgtgaccgaaattaaatttaatctaaacagataccaaaacaatcatcttcgttttggtaaaagggatcttcttcgtcttcttcagcagaacttgtttcttccttctttgaggatgaagcttcttcttcctgttgtaacatttgtagaacttccttcagatttttagctaagacctcctttgatgtcgatcctgctaaaaatgctgccagatgagacttttggttcaaaaacacagaagtctctggatcagctgccttgaggaattctggatgggattggaaccatagttttacttgttctggatccgctttggatgagtcaaattgtgtccaccattttacaaatgcgtgtctttgtagtgatggatattggtttgtcttttcagtcttgctgtaacgatattgccatgagaatatccatgacagtgcaaagcttgaaaagtatttaagatctgctggaattcgtgattcctgcgaattgtattgtttcttaaattgggaaaattcttgttggaccgtttctgggaatatctttgggattggtccaaagaagtcccaccattgcaaaacccaattgggaaaattgtaaattgtgttggtcttgaaatatatcagccatgaatgcttgaagcgggtattttggtgccaaaacaccttagtccaagcatgaacgtaatcccaataggtataacctaccggatcaaatggaactgaaaatctctttcctttgtt

SEQ ID NO: 11671 - DNA, 1057 bp, Glycine max
  Gm_smallRNAprecursor_4504
cctagtatgtgctttcggtaagtgtttcttactgacaacgtaaaatacttttgtgttatatatatatatatatatatatatcaaggtcacaccggagaccggcttacaaaacccaggttttcataaacaaagaaaccgaagcggcggcagagccgcacaggatcggtgaagggagaagagagaaagatgaaaaatagaaatttattgaatctagaaagaagcgcttacaaaaatcttgtttcagagcacctctcttccgaaacctgaaaaaatggctaaatgaaagggtgcctcacaacatacttgaggactccttatatagccaaaaatctaagaccggtagttgccggtagttttgaccgggactatttgactgtttgttacaagacaagtagttttgaccgggactttaatggctacaggacaggtagtattgtccagcattaactacacattaattacaaacagacggttttgtgaccgaaattaaatttaatctaaacagataccaaaacaatcatcttcgttttggtaaaagggatcttcttcgtcttcttcagcagaacttgtttcttccttctttgaggatgaagcttcttcttcctgttgtaacatttgtagaacttccttcagatttttagctaagacctcctttgatgtcgatcctgctaaaaatgctgccagatgagacttttggttcaaaaacacagaagtctctggatcagctgccttgaggaattctggatgggattggaaccatagttttacttgttctggatccgctttggatgagtcaaattgtgtccaccattttacaaatgcgtgtctttgtagtgatggatattggtttgtcttttcagtcttgctgtaacgatattgccatgagaatatccatgacagtgcaaagcttgaaaagtatttaagatctgctggaattcgtgattcctgcgaattgtattgtttcttaaattgggaaaattcttgttggaccgtttctgggaatatctttgggattggtccaaagaagtcccaccattgcaaaacccaattgggaaaa

SEQ ID NO: 11672 - DNA, 1058 bp, Glycine max
  Gm_smallRNAprecursor_4505
cctagtatgtgctttcggtaagtgtttcttactgacaacgtaaaatacttttgtgttatatatatatatatatatatatatcaaggtcacaccggagaccggcttacaaaacccaggttttcataaacaaagaaaccgaagcggcggcagagccgcacaggatcggtgaagggagaagagagaaagatgaaaaatagaaatttattgaatctagaaagaagcgcttacaaaaatcttgtttcagagcacctctcttccgaaacctgaaaaaatggctaaatgaaagggtgcctcacaacatacttgaggactccttatatagccaaaaatctaagaccggtagttgccggtagttttgaccgggactatttgactgtttgttacaagacaagtagttttgaccgggactttaatggctacaggacaggtagtattgtccagcattaactacacattaattacaaacagacggttttgtgaccgaaattaaatttaatctaaacagataccaaaacaatcatcttcgttttggtaaaagggatcttcttcgtcttcttcagcagaacttgtttcttccttctttgaggatgaagcttcttcttcctgttgtaacatttgtagaacttccttcagatttttagctaagacctcctttgatgtcgatcctgctaaaaatgctgccagatgagacttttggttcaaaaacacagaagtctctggatcagctgccttgaggaattctggatgggattggaaccatagttttacttgttctggatccgctttggatgagtcaaattgtgtccaccattttacaaatgcgtgtctttgtagtgatggatattggtttgtcttttcagtcttgctgtaacgatattgccatgagaatatccatgacagtgcaaagcttgaaaagtatttaagatctgctggaattcgtgattcctgcgaattgtattgtttcttaaattgggaaaattcttgttggaccgtttctgggaatatctttgggattggtccaaagaagtcccaccattgcaaaacccaattgggaaaat

SEQ ID NO: 11673 - DNA, 1083 bp, Glycine max
  Gm_smallRNAprecursor_4506
cctagtatgtgctttcggtaagtgtttcttactgacaacgtaaaatacttttgtgttatatatatatatatatatatatatcaaggtcacaccggagaccggcttacaaaacccaggttttcataaacaaagaaaccgaagcggcggcagagccgcacaggatcggtgaagggagaagagagaaagatgaaaaatagaaatttattgaatctagaaagaagcgcttacaaaaatcttgtttcagagcacctctcttccgaaacctgaaaaaatggctaaatgaaagggtgcctcacaacatacttgaggactccttatatagccaaaaatctaagaccggtagttgccggtagttttgaccgggactatttgactgtttgttacaagacaagtagttttgaccgggactttaatggctacaggacaggtagtattgtccagcattaactacacattaattacaaacagacggttttgtgaccgaaattaaatttaatctaaacagataccaaaacaatcatcttcgttttggtaaaagggatcttcttcgtcttcttcagcagaacttgtttcttccttctttgaggatgaagcttcttcttcctgttgtaacatttgtagaacttccttcagatttttagctaagacctcctttgatgtcgatcctgctaaaaatgctgccagatgagacttttggttcaaaaacacagaagtctctggatcagctgccttgaggaattctggatgggattggaaccatagttttacttgttctggatccgctttggatgagtcaaattgtgtccaccattttacaaatgcgtgtctttgtagtgatggatattggtttgtcttttcagtcttgctgtaacgatattgccatgagaatatccatgacagtgcaaagcttgaaaagtatttaagatctgctggaattcgtgattcctgcgaattgtattgtttcttaaattgggaaaattcttgttggaccgtttctgggaatatctttgggattggtccaaagaagtcccaccattgcaaaacccaattgggaaaattgtaaattgtgttggtcttgaaata

SEQ ID NO: 11674 - DNA, 1056 bp, Glycine max
  Gm_smallRNAprecursor_4507
ctagtatgtgctttcggtaagtgtttcttactgacaacgtaaaatacttttgtgttatatatatatatatatatatatatcaaggtcacaccggagaccggcttacaaaacccaggttttcataaacaaagaaaccgaagcggcggcagagccgcacaggatcggtgaagggagaagagagaaagatgaaaaatagaaatttattgaatctagaaagaagcgcttacaaaaatcttgtttcagagcacctctcttccgaaacctgaaaaaatggctaaatgaaagggtgcctcacaacatacttgaggactccttatatagccaaaaatctaagaccggtagttgccggtagttttgaccgggactatttgactgtttgttacaagacaagtagttttgaccgggactttaatggctacaggacaggtagtattgtccagcattaactacacattaattacaaacagacggttttgtgaccgaaattaaatttaatctaaacagataccaaaacaatcatcttcgttttggtaaaagggatcttcttcgtcttcttcagcagaacttgtttcttccttctttgaggatgaagcttcttcttcctgttgtaacatttgtagaacttccttcagatttttagctaagacctcctttgatgtcgatcctgctaaaaatgctgccagatgagacttttggttcaaaaacacagaagtctctggatcagctgccttgaggaattctggatgggattggaaccatagttttacttgttctggatccgctttggatgagtcaaattgtgtccaccattttacaaatgcgtgtctttgtagtgatggatattggtttgtcttttcagtcttgctgtaacgatattgccatgagaatatccatgacagtgcaaagcttgaaaagtatttaagatctgctggaattcgtgattcctgcgaattgtattgtttcttaaattgggaaaattcttgttggaccgtttctgggaatatctttgggattggtccaaagaagtcccaccattgcaaaacccaattgggaaaa

SEQ ID NO: 11675 - DNA, 1056 bp, Glycine max; identical to SEQ ID NO: 11674
  Gm_smallRNAprecursor_4508

SEQ ID NO: 11676 - DNA, 1057 bp, Glycine max
  Gm_smallRNAprecursor_4509
ctagtatgtgctttcggtaagtgtttcttactgacaacgtaaaatacttttgtgttatatatatatatatatatatatatcaaggtcacaccggagaccggcttacaaaacccaggttttcataaacaaagaaaccgaagcggcggcagagccgcacaggatcggtgaagggagaagagagaaagatgaaaaatagaaatttattgaatctagaaagaagcgcttacaaaaatcttgtttcagagcacctctcttccgaaacctgaaaaaatggctaaatgaaagggtgcctcacaacatacttgaggactccttatatagccaaaaatctaagaccggtagttgccggtagttttgaccgggactatttgactgtttgttacaagacaagtagttttgaccgggactttaatggctacaggacaggtagtattgtccagcattaactacacattaattacaaacagacggttttgtgaccgaaattaaatttaatctaaacagataccaaaacaatcatcttcgttttggtaaaagggatcttcttcgtcttcttcagcagaacttgtttcttccttctttgaggatgaagcttcttcttcctgttgtaacatttgtagaacttccttcagatttttagctaagacctcctttgatgtcgatcctgctaaaaatgctgccagatgagacttttggttcaaaaacacagaagtctctggatcagctgccttgaggaattctggatgggattggaaccatagttttacttgttctggatccgctttggatgagtcaaattgtgtccaccattttacaaatgcgtgtctttgtagtgatggatattggtttgtcttttcagtcttgctgtaacgatattgccatgagaatatccatgacagtgcaaagcttgaaaagtatttaagatctgctggaattcgtgattcctgcgaattgtattgtttcttaaattgggaaaattcttgttggaccgtttctgggaatatctttgggattggtccaaagaagtcccaccattgcaaaacccaattgggaaaat

SEQ ID NO: 11677 - DNA, 1059 bp, Glycine max
  Gm_smallRNAprecursor_4510
ctagtatgtgctttcggtaagtgtttcttactgacaacgtaaaatacttttgtgttatatatatatatatatatatatatcaaggtcacaccggagaccggcttacaaaacccaggttttcataaacaaagaaaccgaagcggcggcagagccgcacaggatcggtgaagggagaagagagaaagatgaaaaatagaaatttattgaatctagaaagaagcgcttacaaaaatcttgtttcagagcacctctcttccgaaacctgaaaaaatggctaaatgaaagggtgcctcacaacatacttgaggactccttatatagccaaaaatctaagaccggtagttgccggtagttttgaccgggactatttgactgtttgttacaagacaagtagttttgaccgggactttaatggctacaggacaggtagtattgtccagcattaactacacattaattacaaacagacggttttgtgaccgaaattaaatttaatctaaacagataccaaaacaatcatcttcgttttggtaaaagggatcttcttcgtcttcttcagcagaacttgtttcttccttctttgaggatgaagcttcttcttcctgttgtaacatttgtagaacttccttcagatttttagctaagacctcctttgatgtcgatcctgctaaaaatgctgccagatgagacttttggttcaaaaacacagaagtctctggatcagctgccttgaggaattctggatgggattggaaccatagttttacttgttctggatccgctttggatgagtcaaattgtgtccaccattttacaaatgcgtgtctttgtagtgatggatattggtttgtcttttcagtcttgctgtaacgatattgccatgagaatatccatgacagtgcaaagcttgaaaagtatttaagatctgctggaattcgtgattcctgcgaattgtattgtttcttaaattgggaaaattcttgttggaccgtttctgggaatatctttgggattggtccaaagaagtcccaccattgcaaaacccaattgggaaaattg

SEQ ID NO: 11678 - DNA, 1059 bp, Glycine max; identical to SEQ ID NO: 11677
  Gm_smallRNAprecursor_4511

SEQ ID NO: 11679 - DNA, 1082 bp, Glycine max
  Gm_smallRNAprecursor_4512
ctagtatgtgctttcggtaagtgtttcttactgacaacgtaaaatacttttgtgttatatatatatatatatatatatatcaaggtcacaccggagaccggcttacaaaacccaggttttcataaacaaagaaaccgaagcggcggcagagccgcacaggatcggtgaagggagaagagagaaagatgaaaaatagaaatttattgaatctagaaagaagcgcttacaaaaatcttgtttcagagcacctctcttccgaaacctgaaaaaatggctaaatgaaagggtgcctcacaacatacttgaggactccttatatagccaaaaatctaagaccggtagttgccggtagttttgaccgggactatttgactgtttgttacaagacaagtagttttgaccgggactttaatggctacaggacaggtagtattgtccagcattaactacacattaattacaaacagacggttttgtgaccgaaattaaatttaatctaaacagataccaaaacaatcatcttcgttttggtaaaagggatcttcttcgtcttcttcagcagaacttgtttcttccttctttgaggatgaagcttcttcttcctgttgtaacatttgtagaacttccttcagatttttagctaagacctcctttgatgtcgatcctgctaaaaatgctgccagatgagacttttggttcaaaaacacagaagtctctggatcagctgccttgaggaattctggatgggattggaaccatagttttacttgttctggatccgctttggatgagtcaaattgtgtccaccattttacaaatgcgtgtctttgtagtgatggatattggtttgtcttttcagtcttgctgtaacgatattgccatgagaatatccatgacagtgcaaagcttgaaaagtatttaagatctgctggaattcgtgattcctgcgaattgtattgtttcttaaattgggaaaattcttgttggaccgtttctgggaatatctttgggattggtccaaagaagtcccaccattgcaaaacccaattgggaaaattgtaaattgtgttggtcttgaaata

SEQ ID NO: 11680 - DNA, 1055 bp, Glycine max
  Gm_smallRNAprecursor_4513
tagtatgtgctttcggtaagtgtttcttactgacaacgtaaaatacttttgtgttatatatatatatatatatatatatcaaggtcacaccggagaccggcttacaaaacccaggttttcataaacaaagaaaccgaagcggcggcagagccgcacaggatcggtgaagggagaagagagaaagatgaaaaatagaaatttattgaatctagaaagaagcgcttacaaaaatcttgtttcagagcacctctcttccgaaacctgaaaaaatggctaaatgaaagggtgcctcacaacatacttgaggactccttatatagccaaaaatctaagaccggtagttgccggtagttttgaccgggactatttgactgtttgttacaagacaagtagttttgaccgggactttaatggctacaggacaggtagtattgtccagcattaactacacattaattacaaacagacggttttgtgaccgaaattaaatttaatctaaacagataccaaaacaatcatcttcgttttggtaaaagggatcttcttcgtcttcttcagcagaacttgtttcttccttctttgaggatgaagcttcttcttcctgttgtaacatttgtagaacttccttcagatttttagctaagacctcctttgatgtcgatcctgctaaaaatgctgccagatgagacttttggttcaaaaacacagaagtctctggatcagctgccttgaggaattctggatgggattggaaccatagttttacttgttctggatccgctttggatgagtcaaattgtgtccaccattttacaaatgcgtgtctttgtagtgatggatattggtttgtcttttcagtcttgctgtaacgatattgccatgagaatatccatgacagtgcaaagcttgaaaagtatttaagatctgctggaattcgtgattcctgcgaattgtattgtttcttaaattgggaaaattcttgttggaccgtttctgggaatatctttgggattggtccaaagaagtcccaccattgcaaaacccaattgggaaaa

SEQ ID NO: 11681 - DNA, 1058 bp, Glycine max
  Gm_smallRNAprecursor_4514
tagtatgtgctttcggtaagtgtttcttactgacaacgtaaaatacttttgtgttatatatatatatatatatatatatcaaggtcacaccggagaccggcttacaaaacccaggttttcataaacaaagaaaccgaagcggcggcagagccgcacaggatcggtgaagggagaagagagaaagatgaaaaatagaaatttattgaatctagaaagaagcgcttacaaaaatcttgtttcagagcacctctcttccgaaacctgaaaaaatggctaaatgaaagggtgcctcacaacatacttgaggactccttatatagccaaaaatctaagaccggtagttgccggtagttttgaccgggactatttgactgtttgttacaagacaagtagttttgaccgggactttaatggctacaggacaggtagtattgtccagcattaactacacattaattacaaacagacggttttgtgaccgaaattaaatttaatctaaacagataccaaaacaatcatcttcgttttggtaaaagggatcttcttcgtcttcttcagcagaacttgtttcttccttctttgaggatgaagcttcttcttcctgttgtaacatttgtagaacttccttcagatttttagctaagacctcctttgatgtcgatcctgctaaaaatgctgccagatgagacttttggttcaaaaacacagaagtctctggatcagctgccttgaggaattctggatgggattggaaccatagttttacttgttctggatccgctttggatgagtcaaattgtgtccaccattttacaaatgcgtgtctttgtagtgatggatattggtttgtcttttcagtcttgctgtaacgatattgccatgagaatatccatgacagtgcaaagcttgaaaagtatttaagatctgctggaattcgtgattcctgcgaattgtattgtttcttaaattgggaaaattcttgttggaccgtttctgggaatatctttgggattggtccaaagaagtcccaccattgcaaaacccaattgggaaaattg

SEQ ID NO: 11682 - DNA, 1058 bp, Glycine max; identical to SEQ ID NO: 11681
  Gm_smallRNAprecursor_4515

SEQ ID NO: 11683 - DNA, 1081 bp, Glycine max
  Gm_smallRNAprecursor_4516
tagtatgtgctttcggtaagtgtttcttactgacaacgtaaaatacttttgtgttatatatatatatatatatatatatcaaggtcacaccggagaccggcttacaaaacccaggttttcataaacaaagaaaccgaagcggcggcagagccgcacaggatcggtgaagggagaagagagaaagatgaaaaatagaaatttattgaatctagaaagaagcgcttacaaaaatcttgtttcagagcacctctcttccgaaacctgaaaaaatggctaaatgaaagggtgcctcacaacatacttgaggactccttatatagccaaaaatctaagaccggtagttgccggtagttttgaccgggactatttgactgtttgttacaagacaagtagttttgaccgggactttaatggctacaggacaggtagtattgtccagcattaactacacattaattacaaacagacggttttgtgaccgaaattaaatttaatctaaacagataccaaaacaatcatcttcgttttggtaaaagggatcttcttcgtcttcttcagcagaacttgtttcttccttctttgaggatgaagcttcttcttcctgttgtaacatttgtagaacttccttcagatttttagctaagacctcctttgatgtcgatcctgctaaaaatgctgccagatgagacttttggttcaaaaacacagaagtctctggatcagctgccttgaggaattctggatgggattggaaccatagttttacttgttctggatccgctttggatgagtcaaattgtgtccaccattttacaaatgcgtgtctttgtagtgatggatattggtttgtcttttcagtcttgctgtaacgatattgccatgagaatatccatgacagtgcaaagcttgaaaagtatttaagatctgctggaattcgtgattcctgcgaattgtattgtttcttaaattgggaaaattcttgttggaccgtttctgggaatatctttgggattggtccaaagaagtcccaccattgcaaaacccaattgggaaaattgtaaattgtgttggtcttgaaata

SEQ ID NO: 11684 - DNA, 1188 bp, Glycine max
  Gm_smallRNAprecursor_4517
gctttcggtaagtgtttcttactgacaacgtaaaatacttttgtgttatatatatatatatatatatatatcaaggtcacaccggagaccggcttacaaaacccaggttttcataaacaaagaaaccgaagcggcggcagagccgcacaggatcggtgaagggagaagagagaaagatgaaaaatagaaatttattgaatctagaaagaagcgcttacaaaaatcttgtttcagagcacctctcttccgaaacctgaaaaaatggctaaatgaaagggtgcctcacaacatacttgaggactccttatatagccaaaaatctaagaccggtagttgccggtagttttgaccgggactatttgactgtttgttacaagacaagtagttttgaccgggactttaatggctacaggacaggtagtattgtccagcattaactacacattaattacaaacagacggttttgtgaccgaaattaaatttaatctaaacagataccaaaacaatcatcttcgttttggtaaaagggatcttcttcgtcttcttcagcagaacttgtttcttccttctttgaggatgaagcttcttcttcctgttgtaacatttgtagaacttccttcagatttttagctaagacctcctttgatgtcgatcctgctaaaaatgctgccagatgagacttttggttcaaaaacacagaagtctctggatcagctgccttgaggaattctggatgggattggaaccatagttttacttgttctggatccgctttggatgagtcaaattgtgtccaccattttacaaatgcgtgtctttgtagtgatggatattggtttgtcttttcagtcttgctgtaacgatattgccatgagaatatccatgacagtgcaaagcttgaaaagtatttaagatctgctggaattcgtgattcctgcgaattgtattgtttcttaaattgggaaaattcttgttggaccgtttctgggaatatctttgggattggtccaaagaagtcccaccattgcaaaacccaattgggaaaattgtaaattgtgttggtcttgaaatatatcagccatgaatgcttgaagcgggtattttggtgccaaaacaccttagtccaagcatgaacgtaatcccaataggtataacctaccggatcaaatggaactgaaaatctcttt

SEQ ID NO: 11685 - DNA, 1142 bp, Glycine max
  Gm_smallRNAprecursor_4518
tatatatatatatatatatatatatcaaggtcacaccggagaccggcttacaaaacccaggttttcataaacaaagaaaccgaagcggcggcagagccgcacaggatcggtgaagggagaagagagaaagatgaaaaatagaaatttattgaatctagaaagaagcgcttacaaaaatcttgtttcagagcacctctcttccgaaacctgaaaaaatggctaaatgaaagggtgcctcacaacatacttgaggactccttatatagccaaaaatctaagaccggtagttgccggtagttttgaccgggactatttgactgtttgttacaagacaagtagttttgaccgggactttaatggctacaggacaggtagtattgtccagcattaactacacattaattacaaacagacggttttgtgaccgaaattaaatttaatctaaacagataccaaaacaatcatcttcgttttggtaaaagggatcttcttcgtcttcttcagcagaacttgtttcttccttctttgaggatgaagcttcttcttcctgttgtaacatttgtagaacttccttcagatttttagctaagacctcctttgatgtcgatcctgctaaaaatgctgccagatgagacttttggttcaaaaacacagaagtctctggatcagctgccttgaggaattctggatgggattggaaccatagttttacttgttctggatccgctttggatgagtcaaattgtgtccaccattttacaaatgcgtgtctttgtagtgatggatattggtttgtcttttcagtcttgctgtaacgatattgccatgagaatatccatgacagtgcaaagcttgaaaagtatttaagatctgctggaattcgtgattcctgcgaattgtattgtttcttaaattgggaaaattcttgttggaccgtttctgggaatatctttgggattggtccaaagaagtcccaccattgcaaaacccaattgggaaaattgtaaattgtgttggtcttgaaatatatcagccatgaatgcttgaagcgggtattttggtgccaaaacaccttagtccaagcatgaacgtaatcccaataggtataacctaccggatcaaatggaactgaaaatctcttt

SEQ ID NO: 11686 - DNA, 1141 bp, Glycine max
  Gm_smallRNAprecursor_4519
atatatatatatatatatatatatcaaggtcacaccggagaccggcttacaaaacccaggttttcataaacaaagaaaccgaagcggcggcagagccgcacaggatcggtgaagggagaagagagaaagatgaaaaatagaaatttattgaatctagaaagaagcgcttacaaaaatcttgtttcagagcacctctcttccgaaacctgaaaaaatggctaaatgaaagggtgcctcacaacatacttgaggactccttatatagccaaaaatctaagaccggtagttgccggtagttttgaccgggactatttgactgtttgttacaagacaagtagttttgaccgggactttaatggctacaggacaggtagtattgtccagcattaactacacattaattacaaacagacggttttgtgaccgaaattaaatttaatctaaacagataccaaaacaatcatcttcgttttggtaaaagggatcttcttcgtcttcttcagcagaacttgtttcttccttctttgaggatgaagcttcttcttcctgttgtaacatttgtagaacttccttcagatttttagctaagacctcctttgatgtcgatcctgctaaaaatgctgccagatgagacttttggttcaaaaacacagaagtctctggatcagctgccttgaggaattctggatgggattggaaccatagttttacttgttctggatccgctttggatgagtcaaattgtgtccaccattttacaaatgcgtgtctttgtagtgatggatattggtttgtcttttcagtcttgctgtaacgatattgccatgagaatatccatgacagtgcaaagcttgaaaagtatttaagatctgctggaattcgtgattcctgcgaattgtattgtttcttaaattgggaaaattcttgttggaccgtttctgggaatatctttgggattggtccaaagaagtcccaccattgcaaaacccaattgggaaaattgtaaattgtgttggtcttgaaatatatcagccatgaatgcttgaagcgggtattttggtgccaaaacaccttagtccaagcatgaacgtaatcccaataggtataacctaccggatcaaatggaactgaaaatctcttt

SEQ ID NO: 11687 - DNA, 1032 bp, Glycine max
  Gm_smallRNAprecursor_4520
gaagagagaaagatgaaaaatagaaatttattgaatctagaaagaagcgcttacaaaaatcttgtttcagagcacctctcttccgaaacctgaaaaaatggctaaatgaaagggtgcctcacaacatacttgaggactccttatatagccaaaaatctaagaccggtagttgccggtagttttgaccgggactatttgactgtttgttacaagacaagtagttttgaccgggactttaatggctacaggacaggtagtattgtccagcattaactacacattaattacaaacagacggttttgtgaccgaaattaaatttaatctaaacagataccaaaacaatcatcttcgttttggtaaaagggatcttcttcgtcttcttcagcagaacttgtttcttccttctttgaggatgaagcttcttcttcctgttgtaacatttgtagaacttccttcagatttttagctaagacctcctttgatgtcgatcctgctaaaaatgctgccagatgagacttttggttcaaaaacacagaagtctctggatcagctgccttgaggaattctggatgggattggaaccatagttttacttgttctggatccgctttggatgagtcaaattgtgtccaccattttacaaatgcgtgtctttgtagtgatggatattggtttgtcttttcagtcttgctgtaacgatattgccatgagaatatccatgacagtgcaaagcttgaaaagtatttaagatctgctggaattcgtgattcctgcgaattgtattgtttcttaaattgggaaaattcttgttggaccgtttctgggaatatctttgggattggtccaaagaagtcccaccattgcaaaacccaattgggaaaattgtaaattgtgttggtcttgaaatatatcagccatgaatgcttgaagcgggtattttggtgccaaaacaccttagtccaagcatgaacgtaatcccaataggtataacctaccggatcaaatggaactgaaaatctctttcctttgtt

SEQ ID NO: 11688 - DNA, 1058 bp, Glycine max
  Gm_smallRNAprecursor_4521
aaatttattgaatctagaaagaagcgcttacaaaaatcttgtttcagagcacctctcttccgaaacctgaaaaaatggctaaatgaaagggtgcctcacaacatacttgaggactccttatatagccaaaaatctaagaccggtagttgccggtagttttgaccgggactatttgactgtttgttacaagacaagtagttttgaccgggactttaatggctacaggacaggtagtattgtccagcattaactacacattaattacaaacagacggttttgtgaccgaaattaaatttaatctaaacagataccaaaacaatcatcttcgttttggtaaaagggatcttcttcgtcttcttcagcagaacttgtttcttccttctttgaggatgaagcttcttcttcctgttgtaacatttgtagaacttccttcagatttttagctaagacctcctttgatgtcgatcctgctaaaaatgctgccagatgagacttttggttcaaaaacacagaagtctctggatcagctgccttgaggaattctggatgggattggaaccatagttttacttgttctggatccgctttggatgagtcaaattgtgtccaccattttacaaatgcgtgtctttgtagtgatggatattggtttgtcttttcagtcttgctgtaacgatattgccatgagaatatccatgacagtgcaaagcttgaaaagtatttaagatctgctggaattcgtgattcctgcgaattgtattgtttcttaaattgggaaaattcttgttggaccgtttctgggaatatctttgggattggtccaaagaagtcccaccattgcaaaacccaattgggaaaattgtaaattgtgttggtcttgaaatatatcagccatgaatgcttgaagcgggtattttggtgccaaaacaccttagtccaagcatgaacgtaatcccaataggtataacctaccggatcaaatggaactgaaaatctctttcctttgttcaagtccgaaccaaagtgtctcggttgaagaacttttagtatttggatg

SEQ ID NO: 11689 - DNA, 1131 bp, Glycine max
  Gm_smallRNAprecursor_4522
acaagtagttttgaccgggactttaatggctacaggacaggtagtattgtccagcattaactacacattaattacaaacagacggttttgtgaccgaaattaaatttaatctaaacagataccaaaacaatcatcttcgttttggtaaaagggatcttcttcgtcttcttcagcagaacttgtttcttccttctttgaggatgaagcttcttcttcctgttgtaacatttgtagaacttccttcagatttttagctaagacctcctttgatgtcgatcctgctaaaaatgctgccagatgagacttttggttcaaaaacacagaagtctctggatcagctgccttgaggaattctggatgggattggaaccatagttttacttgttctggatccgctttggatgagtcaaattgtgtccaccattttacaaatgcgtgtctttgtagtgatggatattggtttgtcttttcagtcttgctgtaacgatattgccatgagaatatccatgacagtgcaaagcttgaaaagtatttaagatctgctggaattcgtgattcctgcgaattgtattgtttcttaaattgggaaaattcttgttggaccgtttctgggaatatctttgggattggtccaaagaagtcccaccattgcaaaacccaattgggaaaattgtaaattgtgttggtcttgaaatatatcagccatgaatgcttgaagcgggtattttggtgccaaaacaccttagtccaagcatgaacgtaatcccaataggtataacctaccggatcaaatggaactgaaaatctctttcctttgttcaagtccgaaccaaagtgtctcggttgaagaacttttagtatttggatggttgagtgggtgtttaaggtttggtcttttggatctttgaaatgtttgatagatactgagtttgaatctaccaaaatcaattcataaaatgttcttgtcttcaggatggtggttggtttgtagtgaaatcctggtgggaaggccttggccgtcgccttgaatggatttttgtcccaaaattcaggttccatctgcaaaacagttaacaatttatttttataaatataattgttagtttgtttggtaggtggtgtttgagcttt

SEQ ID NO: 11690 - DNA, 1146 bp, Glycine max
  Gm_smallRNAprecursor_4523
gctacaggacaggtagtattgtccagcattaactacacattaattacaaacagacggttttgtgaccgaaattaaatttaatctaaacagataccaaaacaatcatcttcgttttggtaaaagggatcttcttcgtcttcttcagcagaacttgtttcttccttctttgaggatgaagcttcttcttcctgttgtaacatttgtagaacttccttcagatttttagctaagacctcctttgatgtcgatcctgctaaaaatgctgccagatgagacttttggttcaaaaacacagaagtctctggatcagctgccttgaggaattctggatgggattggaaccatagttttacttgttctggatccgctttggatgagtcaaattgtgtccaccattttacaaatgcgtgtctttgtagtgatggatattggtttgtcttttcagtcttgctgtaacgatattgccatgagaatatccatgacagtgcaaagcttgaaaagtatttaagatctgctggaattcgtgattcctgcgaattgtattgtttcttaaattgggaaaattcttgttggaccgtttctgggaatatctttgggattggtccaaagaagtcccaccattgcaaaacccaattgggaaaattgtaaattgtgttggtcttgaaatatatcagccatgaatgcttgaagcgggtattttggtgccaaaacaccttagtccaagcatgaacgtaatcccaataggtataacctaccggatcaaatggaactgaaaatctctttcctttgttcaagtccgaaccaaagtgtctcggttgaagaacttttagtatttggatggttgagtgggtgtttaaggtttggtcttttggatctttgaaatgtttgatagatactgagtttgaatctaccaaaatcaattcataaaatgttcttgtcttcaggatggtggttggtttgtagtgaaatcctggtgggaaggccttggccgtcgccttgaatggatttttgtcccaaaattcaggttccatctgcaaaacagttaacaatttatttttataaatataattgttagtttgtttggtaggtggtgtttgagctttagctaaaggtagttttcctttagtattggtggctgttttggtc

SEQ ID NO: 11691 - DNA, 1031 bp, Glycine max
  Gm_smallRNAprecursor_4524
taaatttaatctaaacagataccaaaacaatcatcttcgttttggtaaaagggatcttcttcgtcttcttcagcagaacttgtttcttccttctttgaggatgaagcttcttcttcctgttgtaacatttgtagaacttccttcagatttttagctaagacctcctttgatgtcgatcctgctaaaaatgctgccagatgagacttttggttcaaaaacacagaagtctctggatcagctgccttgaggaattctggatgggattggaaccatagttttacttgttctggatccgctttggatgagtcaaattgtgtccaccattttacaaatgcgtgtctttgtagtgatggatattggtttgtcttttcagtcttgctgtaacgatattgccatgagaatatccatgacagtgcaaagcttgaaaagtatttaagatctgctggaattcgtgattcctgcgaattgtattgtttcttaaattgggaaaattcttgttggaccgtttctgggaatatctttgggattggtccaaagaagtcccaccattgcaaaacccaattgggaaaattgtaaattgtgttggtcttgaaatatatcagccatgaatgcttgaagcgggtattttggtgccaaaacaccttagtccaagcatgaacgtaatcccaataggtataacctaccggatcaaatggaactgaaaatctctttcctttgttcaagtccgaaccaaagtgtctcggttgaagaacttttagtatttggatggttgagtgggtgtttaaggtttggtcttttggatctttgaaatgtttgatagatactgagtttgaatctaccaaaatcaattcataaaatgttcttgtcttcaggatggtggttggtttgtagtgaaatcctggtgggaaggccttggccgtcgccttgaatggatttttgtcccaaaattcaggttccatctgcaaaacagttaacaatttatttttataaatataattgttagtttgtttggtaggtggtgtttgagcttt

SEQ ID NO: 11692 - DNA, 1134 bp, Glycine max
  Gm_smallRNAprecursor_4525
taaatttaatctaaacagataccaaaacaatcatcttcgttttggtaaaagggatcttcttcgtcttcttcagcagaacttgtttcttccttctttgaggatgaagcttcttcttcctgttgtaacatttgtagaacttccttcagatttttagctaagacctcctttgatgtcgatcctgctaaaaatgctgccagatgagacttttggttcaaaaacacagaagtctctggatcagctgccttgaggaattctggatgggattggaaccatagttttacttgttctggatccgctttggatgagtcaaattgtgtccaccattttacaaatgcgtgtctttgtagtgatggatattggtttgtcttttcagtcttgctgtaacgatattgccatgagaatatccatgacagtgcaaagcttgaaaagtatttaagatctgctggaattcgtgattcctgcgaattgtattgtttcttaaattgggaaaattcttgttggaccgtttctgggaatatctttgggattggtccaaagaagtcccaccattgcaaaacccaattgggaaaattgtaaattgtgttggtcttgaaatatatcagccatgaatgcttgaagcgggtattttggtgccaaaacaccttagtccaagcatgaacgtaatcccaataggtataacctaccggatcaaatggaactgaaaatctctttcctttgttcaagtccgaaccaaagtgtctcggttgaagaacttttagtatttggatggttgagtgggtgtttaaggtttggtcttttggatctttgaaatgtttgatagatactgagtttgaatctaccaaaatcaattcataaaatgttcttgtcttcaggatggtggttggtttgtagtgaaatcctggtgggaaggccttggccgtcgccttgaatggatttttgtcccaaaattcaggttccatctgcaaaacagttaacaatttatttttataaatataattgttagtttgtttggtaggtggtgtttgagctttagctaaaggtagttttcctttagtattggtggctgttttggtcattgacgcattttggatcattgtttgtaaatttgattcagattcatcatcagattctgag

SEQ ID NO: 11693 - DNA, 1104 bp, Glycine max
  Gm_smallRNAprecursor_4526
ttcagcagaacttgtttcttccttctttgaggatgaagcttcttcttcctgttgtaacatttgtagaacttccttcagatttttagctaagacctcctttgatgtcgatcctgctaaaaatgctgccagatgagacttttggttcaaaaacacagaagtctctggatcagctgccttgaggaattctggatgggattggaaccatagttttacttgttctggatccgctttggatgagtcaaattgtgtccaccattttacaaatgcgtgtctttgtagtgatggatattggtttgtcttttcagtcttgctgtaacgatattgccatgagaatatccatgacagtgcaaagcttgaaaagtatttaagatctgctggaattcgtgattcctgcgaattgtattgtttcttaaattgggaaaattcttgttggaccgtttctgggaatatctttgggattggtccaaagaagtcccaccattgcaaaacccaattgggaaaattgtaaattgtgttggtcttgaaatatatcagccatgaatgcttgaagcgggtattttggtgccaaaacaccttagtccaagcatgaacgtaatcccaataggtataacctaccggatcaaatggaactgaaaatctctttcctttgttcaagtccgaaccaaagtgtctcggttgaagaacttttagtatttggatggttgagtgggtgtttaaggtttggtcttttggatctttgaaatgtttgatagatactgagtttgaatctaccaaaatcaattcataaaatgttcttgtcttcaggatggtggttggtttgtagtgaaatcctggtgggaaggccttggccgtcgccttgaatggatttttgtcccaaaattcaggttccatctgcaaaacagttaacaatttatttttataaatataattgttagtttgtttggtaggtggtgtttgagctttagctaaaggtagttttcctttagtattggtggctgttttggtcattgacgcattttggatcattgtttgtaaatttgattcagattcatcatcagattctgaggcaatgtctgcccaagattttttgattatttttggaaa

SEQ ID NO: 11694 - DNA, 1090 bp, Glycine max
  Gm_smallRNAprecursor_4527
gtcgatcctgctaaaaatgctgccagatgagacttttggttcaaaaacacagaagtctctggatcagctgccttgaggaattctggatgggattggaaccatagttttacttgttctggatccgctttggatgagtcaaattgtgtccaccattttacaaatgcgtgtctttgtagtgatggatattggtttgtcttttcagtcttgctgtaacgatattgccatgagaatatccatgacagtgcaaagcttgaaaagtatttaagatctgctggaattcgtgattcctgcgaattgtattgtttcttaaattgggaaaattcttgttggaccgtttctgggaatatctttgggattggtccaaagaagtcccaccattgcaaaacccaattgggaaaattgtaaattgtgttggtcttgaaatatatcagccatgaatgcttgaagcgggtattttggtgccaaaacaccttagtccaagcatgaacgtaatcccaataggtataacctaccggatcaaatggaactgaaaatctctttcctttgttcaagtccgaaccaaagtgtctcggttgaagaacttttagtatttggatggttgagtgggtgtttaaggtttggtcttttggatctttgaaatgtttgatagatactgagtttgaatctaccaaaatcaattcataaaatgttcttgtcttcaggatggtggttggtttgtagtgaaatcctggtgggaaggccttggccgtcgccttgaatggatttttgtcccaaaattcaggttccatctgcaaaacagttaacaatttatttttataaatataattgttagtttgtttggtaggtggtgtttgagctttagctaaaggtagttttcctttagtattggtggctgttttggtcattgacgcattttggatcattgtttgtaaatttgattcagattcatcatcagattctgaggcaatgtctgcccaagattttttgattatttttggaaatttggtcagacccatgtcttgaagggcctgaagggtttcaattggccatgcatagtcggccgatgtttgtttggcggttgccggtttgg

SEQ ID NO: 11695 - DNA, 1087 bp, Glycine max
  Gm_smallRNAprecursor_4528
gatcctgctaaaaatgctgccagatgagacttttggttcaaaaacacagaagtctctggatcagctgccttgaggaattctggatgggattggaaccatagttttacttgttctggatccgctttggatgagtcaaattgtgtccaccattttacaaatgcgtgtctttgtagtgatggatattggtttgtcttttcagtcttgctgtaacgatattgccatgagaatatccatgacagtgcaaagcttgaaaagtatttaagatctgctggaattcgtgattcctgcgaattgtattgtttcttaaattgggaaaattcttgttggaccgtttctgggaatatctttgggattggtccaaagaagtcccaccattgcaaaacccaattgggaaaattgtaaattgtgttggtcttgaaatatatcagccatgaatgcttgaagcgggtattttggtgccaaaacaccttagtccaagcatgaacgtaatcccaataggtataacctaccggatcaaatggaactgaaaatctctttcctttgttcaagtccgaaccaaagtgtctcggttgaagaacttttagtatttggatggttgagtgggtgtttaaggtttggtcttttggatctttgaaatgtttgatagatactgagtttgaatctaccaaaatcaattcataaaatgttcttgtcttcaggatggtggttggtttgtagtgaaatcctggtgggaaggccttggccgtcgccttgaatggatttttgtcccaaaattcaggttccatctgcaaaacagttaacaatttatttttataaatataattgttagtttgtttggtaggtggtgtttgagctttagctaaaggtagttttcctttagtattggtggctgttttggtcattgacgcattttggatcattgtttgtaaatttgattcagattcatcatcagattctgaggcaatgtctgcccaagattttttgattatttttggaaatttggtcagacccatgtcttgaagggcctgaagggtttcaattggccatgcatagtcggccgatgtttgtttggcggttgccggtttgg

SEQ ID NO: 11696 - DNA, 1222 bp, Glycine max
  Gm_smallRNAprecursor_4529
ccttgaggaattctggatgggattggaaccatagttttacttgttctggatccgctttggatgagtcaaattgtgtccaccattttacaaatgcgtgtctttgtagtgatggatattggtttgtcttttcagtcttgctgtaacgatattgccatgagaatatccatgacagtgcaaagcttgaaaagtatttaagatctgctggaattcgtgattcctgcgaattgtattgtttcttaaattgggaaaattcttgttggaccgtttctgggaatatctttgggattggtccaaagaagtcccaccattgcaaaacccaattgggaaaattgtaaattgtgttggtcttgaaatatatcagccatgaatgcttgaagcgggtattttggtgccaaaacaccttagtccaagcatgaacgtaatcccaataggtataacctaccggatcaaatggaactgaaaatctctttcctttgttcaagtccgaaccaaagtgtctcggttgaagaacttttagtatttggatggttgagtgggtgtttaaggtttggtcttttggatctttgaaatgtttgatagatactgagtttgaatctaccaaaatcaattcataaaatgttcttgtcttcaggatggtggttggtttgtagtgaaatcctggtgggaaggccttggccgtcgccttgaatggatttttgtcccaaaattcaggttccatctgcaaaacagttaacaatttatttttataaatataattgttagtttgtttggtaggtggtgtttgagctttagctaaaggtagttttcctttagtattggtggctgttttggtcattgacgcattttggatcattgtttgtaaatttgattcagattcatcatcagattctgaggcaatgtctgcccaagattttttgattatttttggaaatttggtcagacccatgtcttgaagggcctgaagggtttcaattggccatgcatagtcggccgatgtttgtttggcggttgccggtttgggagattcctgagtggatggctcaggtttgattgaggcaatctgggttgatgacccttctaaattttttttctgggtagatgacccagcctgggttggtgacccagaagaggtagatgatttcttgatggttggctctggaagagccagcctggctcctttgcctgtactccttcctccccgtagggagattcccgatgcctt

SEQ ID NO: 11697 - DNA, 1193 bp, Glycine max
  Gm_smallRNAprecursor_4530
accatagttttacttgttctggatccgctttggatgagtcaaattgtgtccaccattttacaaatgcgtgtctttgtagtgatggatattggtttgtcttttcagtcttgctgtaacgatattgccatgagaatatccatgacagtgcaaagcttgaaaagtatttaagatctgctggaattcgtgattcctgcgaattgtattgtttcttaaattgggaaaattcttgttggaccgtttctgggaatatctttgggattggtccaaagaagtcccaccattgcaaaacccaattgggaaaattgtaaattgtgttggtcttgaaatatatcagccatgaatgcttgaagcgggtattttggtgccaaaacaccttagtccaagcatgaacgtaatcccaataggtataacctaccggatcaaatggaactgaaaatctctttcctttgttcaagtccgaaccaaagtgtctcggttgaagaacttttagtatttggatggttgagtgggtgtttaaggtttggtcttttggatctttgaaatgtttgatagatactgagtttgaatctaccaaaatcaattcataaaatgttcttgtcttcaggatggtggttggtttgtagtgaaatcctggtgggaaggccttggccgtcgccttgaatggatttttgtcccaaaattcaggttccatctgcaaaacagttaacaatttatttttataaatataattgttagtttgtttggtaggtggtgtttgagctttagctaaaggtagttttcctttagtattggtggctgttttggtcattgacgcattttggatcattgtttgtaaatttgattcagattcatcatcagattctgaggcaatgtctgcccaagattttttgattatttttggaaatttggtcagacccatgtcttgaagggcctgaagggtttcaattggccatgcatagtcggccgatgtttgtttggcggttgccggtttgggagattcctgagtggatggctcaggtttgattgaggcaatctgggttgatgacccttctaaattttttttctgggtagatgacccagcctgggttggtgacccagaagaggtagatgatttcttgatggttggctctggaagagccagcctggctcctttgcctgtactccttcctccccgtagggagattcccgatgcc

SEQ ID NO: 11698 - DNA, 1195 bp, Glycine max
  Gm_smallRNAprecursor_4531
accatagttttacttgttctggatccgctttggatgagtcaaattgtgtccaccattttacaaatgcgtgtctttgtagtgatggatattggtttgtcttttcagtcttgctgtaacgatattgccatgagaatatccatgacagtgcaaagcttgaaaagtatttaagatctgctggaattcgtgattcctgcgaattgtattgtttcttaaattgggaaaattcttgttggaccgtttctgggaatatctttgggattggtccaaagaagtcccaccattgcaaaacccaattgggaaaattgtaaattgtgttggtcttgaaatatatcagccatgaatgcttgaagcgggtattttggtgccaaaacaccttagtccaagcatgaacgtaatcccaataggtataacctaccggatcaaatggaactgaaaatctctttcctttgttcaagtccgaaccaaagtgtctcggttgaagaacttttagtatttggatggttgagtgggtgtttaaggtttggtcttttggatctttgaaatgtttgatagatactgagtttgaatctaccaaaatcaattcataaaatgttcttgtcttcaggatggtggttggtttgtagtgaaatcctggtgggaaggccttggccgtcgccttgaatggatttttgtcccaaaattcaggttccatctgcaaaacagttaacaatttatttttataaatataattgttagtttgtttggtaggtggtgtttgagctttagctaaaggtagttttcctttagtattggtggctgttttggtcattgacgcattttggatcattgtttgtaaatttgattcagattcatcatcagattctgaggcaatgtctgcccaagattttttgattatttttggaaatttggtcagacccatgtcttgaagggcctgaagggtttcaattggccatgcatagtcggccgatgtttgtttggcggttgccggtttgggagattcctgagtggatggctcaggtttgattgaggcaatctgggttgatgacccttctaaattttttttctgggtagatgacccagcctgggttggtgacccagaagaggtagatgatttcttgatggttggctctggaagagccagcctggctcctttgcctgtactccttcctccccgtagggagattcccgatgcctt

SEQ ID NO: 11699 - DNA, 1058 bp, Glycine max
  Gm_smallRNAprecursor_4532
tacttgttctggatccgctttggatgagtcaaattgtgtccaccattttacaaatgcgtgtctttgtagtgatggatattggtttgtcttttcagtcttgctgtaacgatattgccatgagaatatccatgacagtgcaaagcttgaaaagtatttaagatctgctggaattcgtgattcctgcgaattgtattgtttcttaaattgggaaaattcttgttggaccgtttctgggaatatctttgggattggtccaaagaagtcccaccattgcaaaacccaattgggaaaattgtaaattgtgttggtcttgaaatatatcagccatgaatgcttgaagcgggtattttggtgccaaaacaccttagtccaagcatgaacgtaatcccaataggtataacctaccggatcaaatggaactgaaaatctctttcctttgttcaagtccgaaccaaagtgtctcggttgaagaacttttagtatttggatggttgagtgggtgtttaaggtttggtcttttggatctttgaaatgtttgatagatactgagtttgaatctaccaaaatcaattcataaaatgttcttgtcttcaggatggtggttggtttgtagtgaaatcctggtgggaaggccttggccgtcgccttgaatggatttttgtcccaaaattcaggttccatctgcaaaacagttaacaatttatttttataaatataattgttagtttgtttggtaggtggtgtttgagctttagctaaaggtagttttcctttagtattggtggctgttttggtcattgacgcattttggatcattgtttgtaaatttgattcagattcatcatcagattctgaggcaatgtctgcccaagattttttgattatttttggaaatttggtcagacccatgtcttgaagggcctgaagggtttcaattggccatgcatagtcggccgatgtttgtttggcggttgccggtttgggagattcctgagtggatggctcaggtttgattgaggcaatctgggttgatgacccttctaaattttttttctggg

SEQ ID NO: 11700 - DNA, 1176 bp, Glycine max
  Gm_smallRNAprecursor_4533
tacttgttctggatccgctttggatgagtcaaattgtgtccaccattttacaaatgcgtgtctttgtagtgatggatattggtttgtcttttcagtcttgctgtaacgatattgccatgagaatatccatgacagtgcaaagcttgaaaagtatttaagatctgctggaattcgtgattcctgcgaattgtattgtttcttaaattgggaaaattcttgttggaccgtttctgggaatatctttgggattggtccaaagaagtcccaccattgcaaaacccaattgggaaaattgtaaattgtgttggtcttgaaatatatcagccatgaatgcttgaagcgggtattttggtgccaaaacaccttagtccaagcatgaacgtaatcccaataggtataacctaccggatcaaatggaactgaaaatctctttcctttgttcaagtccgaaccaaagtgtctcggttgaagaacttttagtatttggatggttgagtgggtgtttaaggtttggtcttttggatctttgaaatgtttgatagatactgagtttgaatctaccaaaatcaattcataaaatgttcttgtcttcaggatggtggttggtttgtagtgaaatcctggtgggaaggccttggccgtcgccttgaatggatttttgtcccaaaattcaggttccatctgcaaaacagttaacaatttatttttataaatataattgttagtttgtttggtaggtggtgtttgagctttagctaaaggtagttttcctttagtattggtggctgttttggtcattgacgcattttggatcattgtttgtaaatttgattcagattcatcatcagattctgaggcaatgtctgcccaagattttttgattatttttggaaatttggtcagacccatgtcttgaagggcctgaagggtttcaattggccatgcatagtcggccgatgtttgtttggcggttgccggtttgggagattcctgagtggatggctcaggtttgattgaggcaatctgggttgatgacccttctaaattttttttctgggtagatgacccagcctgggttggtgacccagaagaggtagatgatttcttgatggttggctctggaagagccagcctggctcctttgcctgtactccttcctccccgtagggagattcc

SEQ ID NO: 11701 - DNA, 1183 bp, Glycine max
  Gm_smallRNAprecursor_4534
tacttgttctggatccgctttggatgagtcaaattgtgtccaccattttacaaatgcgtgtctttgtagtgatggatattggtttgtcttttcagtcttgctgtaacgatattgccatgagaatatccatgacagtgcaaagcttgaaaagtatttaagatctgctggaattcgtgattcctgcgaattgtattgtttcttaaattgggaaaattcttgttggaccgtttctgggaatatctttgggattggtccaaagaagtcccaccattgcaaaacccaattgggaaaattgtaaattgtgttggtcttgaaatatatcagccatgaatgcttgaagcgggtattttggtgccaaaacaccttagtccaagcatgaacgtaatcccaataggtataacctaccggatcaaatggaactgaaaatctctttcctttgttcaagtccgaaccaaagtgtctcggttgaagaacttttagtatttggatggttgagtgggtgtttaaggtttggtcttttggatctttgaaatgtttgatagatactgagtttgaatctaccaaaatcaattcataaaatgttcttgtcttcaggatggtggttggtttgtagtgaaatcctggtgggaaggccttggccgtcgccttgaatggatttttgtcccaaaattcaggttccatctgcaaaacagttaacaatttatttttataaatataattgttagtttgtttggtaggtggtgtttgagctttagctaaaggtagttttcctttagtattggtggctgttttggtcattgacgcattttggatcattgtttgtaaatttgattcagattcatcatcagattctgaggcaatgtctgcccaagattttttgattatttttggaaatttggtcagacccatgtcttgaagggcctgaagggtttcaattggccatgcatagtcggccgatgtttgtttggcggttgccggtttgggagattcctgagtggatggctcaggtttgattgaggcaatctgggttgatgacccttctaaattttttttctgggtagatgacccagcctgggttggtgacccagaagaggtagatgatttcttgatggttggctctggaagagccagcctggctcctttgcctgtactccttcctccccgtagggagattcccgatgcc

SEQ ID NO: 11702 - DNA, 1159 bp, Glycine max
  Gm_smallRNAprecursor_4535
ctggatccgctttggatgagtcaaattgtgtccaccattttacaaatgcgtgtctttgtagtgatggatattggtttgtcttttcagtcttgctgtaacgatattgccatgagaatatccatgacagtgcaaagcttgaaaagtatttaagatctgctggaattcgtgattcctgcgaattgtattgtttcttaaattgggaaaattcttgttggaccgtttctgggaatatctttgggattggtccaaagaagtcccaccattgcaaaacccaattgggaaaattgtaaattgtgttggtcttgaaatatatcagccatgaatgcttgaagcgggtattttggtgccaaaacaccttagtccaagcatgaacgtaatcccaataggtataacctaccggatcaaatggaactgaaaatctctttcctttgttcaagtccgaaccaaagtgtctcggttgaagaacttttagtatttggatggttgagtgggtgtttaaggtttggtcttttggatctttgaaatgtttgatagatactgagtttgaatctaccaaaatcaattcataaaatgttcttgtcttcaggatggtggttggtttgtagtgaaatcctggtgggaaggccttggccgtcgccttgaatggatttttgtcccaaaattcaggttccatctgcaaaacagttaacaatttatttttataaatataattgttagtttgtttggtaggtggtgtttgagctttagctaaaggtagttttcctttagtattggtggctgttttggtcattgacgcattttggatcattgtttgtaaatttgattcagattcatcatcagattctgaggcaatgtctgcccaagattttttgattatttttggaaatttggtcagacccatgtcttgaagggcctgaagggtttcaattggccatgcatagtcggccgatgtttgtttggcggttgccggtttgggagattcctgagtggatggctcaggtttgattgaggcaatctgggttgatgacccttctaaattttttttctgggtagatgacccagcctgggttggtgacccagaagaggtagatgatttcttgatggttggctctggaagagccagcctggctcctttgcctgtactccttcctccccgtag

SEQ ID NO: 11703 - DNA, 1098 bp, Glycine max
  Gm_smallRNAprecursor_4536
gtgtctttgtagtgatggatattggtttgtcttttcagtcttgctgtaacgatattgccatgagaatatccatgacagtgcaaagcttgaaaagtatttaagatctgctggaattcgtgattcctgcgaattgtattgtttcttaaattgggaaaattcttgttggaccgtttctgggaatatctttgggattggtccaaagaagtcccaccattgcaaaacccaattgggaaaattgtaaattgtgttggtcttgaaatatatcagccatgaatgcttgaagcgggtattttggtgccaaaacaccttagtccaagcatgaacgtaatcccaataggtataacctaccggatcaaatggaactgaaaatctctttcctttgttcaagtccgaaccaaagtgtctcggttgaagaacttttagtatttggatggttgagtgggtgtttaaggtttggtcttttggatctttgaaatgtttgatagatactgagtttgaatctaccaaaatcaattcataaaatgttcttgtcttcaggatggtggttggtttgtagtgaaatcctggtgggaaggccttggccgtcgccttgaatggatttttgtcccaaaattcaggttccatctgcaaaacagttaacaatttatttttataaatataattgttagtttgtttggtaggtggtgtttgagctttagctaaaggtagttttcctttagtattggtggctgttttggtcattgacgcattttggatcattgtttgtaaatttgattcagattcatcatcagattctgaggcaatgtctgcccaagattttttgattatttttggaaatttggtcagacccatgtcttgaagggcctgaagggtttcaattggccatgcatagtcggccgatgtttgtttggcggttgccggtttgggagattcctgagtggatggctcaggtttgattgaggcaatctgggttgatgacccttctaaattttttttctgggtagatgacccagcctgggttggtgacccagaagaggtagatgatttcttgatggttggctctggaagagccagcctggctcctttgcctgtactcct

SEQ ID NO: 11704 - DNA, 1090 bp, Glycine max
  Gm_smallRNAprecursor_4537
gcgaattgtattgtttcttaaattgggaaaattcttgttggaccgtttctgggaatatctttgggattggtccaaagaagtcccaccattgcaaaacccaattgggaaaattgtaaattgtgttggtcttgaaatatatcagccatgaatgcttgaagcgggtattttggtgccaaaacaccttagtccaagcatgaacgtaatcccaataggtataacctaccggatcaaatggaactgaaaatctctttcctttgttcaagtccgaaccaaagtgtctcggttgaagaacttttagtatttggatggttgagtgggtgtttaaggtttggtcttttggatctttgaaatgtttgatagatactgagtttgaatctaccaaaatcaattcataaaatgttcttgtcttcaggatggtggttggtttgtagtgaaatcctggtgggaaggccttggccgtcgccttgaatggatttttgtcccaaaattcaggttccatctgcaaaacagttaacaatttatttttataaatataattgttagtttgtttggtaggtggtgtttgagctttagctaaaggtagttttcctttagtattggtggctgttttggtcattgacgcattttggatcattgtttgtaaatttgattcagattcatcatcagattctgaggcaatgtctgcccaagattttttgattatttttggaaatttggtcagacccatgtcttgaagggcctgaagggtttcaattggccatgcatagtcggccgatgtttgtttggcggttgccggtttgggagattcctgagtggatggctcaggtttgattgaggcaatctgggttgatgacccttctaaattttttttctgggtagatgacccagcctgggttggtgacccagaagaggtagatgatttcttgatggttggctctggaagagccagcctggctcctttgcctgtactccttcctccccgtagggagattcccgatgccttaggaggcattaccacttttctgtaagaattcacgggtaaggtagtcaggtagtgaatttgaggtgcccttgatgtattctatgtcaa

SEQ ID NO: 11705 - DNA, 1187 bp, Glycine max
  Gm_smallRNAprecursor_4538
atcggcttcgcgaacgtcccacagttcttcctccatgcctcctgaagacctagaacagttgacccaaaaaatcagagaccaactggaggagtcaatcacagaaaaagtgactcgaaagatgatggaatccttcagccagatgcagtcccagttttagtctcatacgcaatcacagggacttgcactacctctagagtcagaggttggtctctcaggtcctcgtgtcagcacaaaggagagttgtgttgctccctcagggaacgatccagggacgggtgactcagacaaatgcgggctatatattgaataaaatccttcccccctggttgccctaggaagactttatgatggatccacaacagttcacaacatccctttgttgcatggtcaagtcaaggttggtgttgaggaggttaaagatgcagaggctctcgttcttgtacccactgacgaggttaccttagtggggcagacacttaacaccttccttgcttggccaacacatcttgtgaagcgtttatcagaacaggtattttactctgattatatgtttatttttttcaattaatttgttcactgtaatcaaaacttgctaattaactatgttttatcaacaggcagctgtgtctctagcaaaacctccagaaagccccgatgaagaggtcgatgatcccttgtacctgatgacattgaccatcccacaactgtttttgaaaccgcttcaggttatgtgggatgctaccatattcggggtgtttaatcaaaacttctcgttgtatataaagcacgaagacctctctgaaattgcacacggtggtcaatgtctcagcgtatctgttatacagttgtggattctgtaagtcattttagattactattaattaccaaagtaattgttttaaattcatacataattaactttgacttaacaacacagccatctgactgagacaagtgtgcgagtggggaattctgatgtgtatggattcctcgagccacagtccattcagagatctgggcaatcacaatttgaatccgaaagttacatcaagagttgaatataaagttcaaaacgagatgtttaccttggagcctacctgaatgggtaagtcaaacacaataattgaatttaaataatctatactactacaataatccatattcgtctctattacagcggacactgg

SEQ ID NO: 11706 - DNA, 1170 bp, Glycine max
  Gm_smallRNAprecursor_4539
agtatgaagtcacatcaaggggaagaggtgggccccttttgctccactcaaaatgagacatgtggcatggcttttacaaaaaggaaagagaaaatctttttaaaataaaagccaaattctctctctccattcagatttcagaaaaaaacttttcctcccccttcccacattgcttttctcttcttcttcctctccattgaagcctccattaaagctccaaaattgctcatcacttctactccaaattgcaaaaggaagccattttcggagtcgtgaagcacacctttacgttgtggggcttcgaatttcaggtatgggtggacttcttctcacatgaaattcgtgggtattgggtctttgggagatatgatgggtagttctactaggttaatgccttatggtagttatttgtgaaagaatttgttgaaagcatgctaaacttgacatgtttgatgtgagtaaagctacccattctgttttagggttttatgatgatgctttgtgatatttgtatgctgaaattgttggtagaaaactggtagagatgatggggagagttaacctagggttaaatgtgagaatggtagtgatgtgagtggaaaagtgtgagattttgagggtttgaaaagctaaatttggggttagtggtaattggagtctaaagtgagttgatcctagtttaaaatgtcaattaggacttgtaggtaagcttgggcagaacaaatgagaaaaatgagtgacaaaggtgaaagcaagagccatttctagggtaaattgggtgttgaggggtcaaattttgaatcggtggagttttcgccttaaaatcagtttgagcaagtctaaattaatgttatagacttgttggagatgagagtttactccaaaattatcccattctcattttcacttctcaaaccttgaaaatccactaaattgatgggttttagatacctagattttgaattgccttggtctgaagcttgtttttggtttaaatatgatttatacatgatttaggacttgtaggatccaatttgagcaaaattggatgtgggcaagatggatttcgaaatctgccctattatgcagaaaaatgttgttgaattgtgcagcaaatttttgatgtgtgcagaaaaatgctagtgcattgctggttatgggaaagatagt

SEQ ID NO: 11707 - DNA, 1224 bp, Glycine max
  Gm_smallRNAprecursor_4540
acatcaccatcgatggggccagacttaattttaatatgtgatggacatgacgatgaagatgccattactactgcaaaataaaatataatacaataaatttaaaaatcaatttatacattatttctagataatataaattaaactacacacatttataaaaacgttataaaatatatattatacaaatttaaataaataacaaaatattatcatttcataacacacacacacacacgcacgcacgcgcgcacgcacgcacgcgcgcacgcacgcacgcgcgcacgcacgcgcgcacgcacgcacgcgcgcacacacacacacacacacacacacacccacgcgcgcacgcacgcacgcacgcacgcacgcacgcacacacacacacacacacacacacacacacacacacacccacgcacgcacgcacgcacacacacacacacacacaaaattgtttagtctaatattattacaaaacctaatattacgtgtacatgatcgctaatatgtctaactaaaatatcatacatatataacacatataatatctcataatatatatttaataacgtaaatttcgtaaaacaaaaaagtattaacctacaaaataaaaataaaacctacctaacgtaaactaccctatcatatatatatatatatatatatatatatatatatatatatattaaaaaaattcaaactaaaaataactaaatcaaataatataacttatcaactcatttatttaaaactcaaaattatttaccctcttattattacaaaagctcaaaattatttagcctaatattacaaaagctgaaaatttacgtgtgcctaaattttagatatatatacctaaaactaatattaacttgtgtctaatattacaaaaactaatattacatgtgcctaactaaaactaatactacgtatgtctaactaaaatatcatacatatataacacatataatatatcaggttatatacaacaaccaaataatattttcatactaactaactaaataatattttcatgctaattaacctaaccttcaagtacctaataatacataaaaattaacaatagagtatattttaaaactgactaacctaatcttgaaatacctattaatactaactaatctaatctttttataatattaaaaacagaatacataaatattagacacttcaaaaaatacttaccagggattatggtggaga

SEQ ID NO: 11708 - DNA, 1055 bp, Glycine max
  Gm_smallRNAprecursor_4541
ggtatcgtagacgctgatcatcggatgaaaacaacgtggatgatcttggagatgacaaagagggatgaataggtgctgtgggtgcttcggatggtctgtggcggcgatgggcagtagcagcggtgctggaggatgatccctttctcttcttcgatggttctgccatttgatgaagttttagtggatttcaattggtggaagtgaaagaggagtgaaaaagaggaagattgggctttacgggacgtgttttggtgaagatttgagtaagatacgaaggtttgaagatttagggatggaggaggcatgaggagaggccttggctgcgcagcaacactggtttcgtgggtatttatagatgaggacaagttgtaatcgattacaaggcttggtaatcaattacaggagtaataagccttctggtaatcaattacaggatgttgtaatcgattacactggatgataattgattactagagcataaactaggctagtttctaaaaaattacctatgtctatgctaaatacatctaatattattaattactaatgcacttaattcaagcattcaaatataaaacacacaggaattcatgaattctatcataataacaagaatttaaacaaaatcaatcaaagtaacatacttaacataaacaatcaatcataagagtaaattaatcaatcaatccttatttatctaaatcactaacatctaagaggcctaattcccttctaatagagaagaatgcttctttggggagaggttttgtgaaaatatcagcaagttgattcttagtatcaacaaactctaatacacaatctccctttagaacatgatctctaagaaaatggtgcctaatttctatatgtttagttctagagtgttaaactggattcttggagagattaattgcacttgtattatcacatctaataggtatatggtcaagaaggattccataattagaaagttgttgcttcatccataagatttgagcacaacaactgtcggcagaaatatatttcgcttctgcagtggataaagcaacactatt

SEQ ID NO: 11709 - DNA, 1157 bp, Glycine max
  Gm_smallRNAprecursor_4542
agacaacaatgatataacagttgctgtgtaaggctcccacacaaactgcatataacaacatagttgtcagcattttagtaaaataacacatattattttttattttacaaatacaataccatgttcttacctcatgacgtttcataatatccaacttgtgacgaaaaactttcacatcatcattgccgatatgttgatttccacgtcgcagccacctacaaagattaaaatttaatataccctaaaaccatttattcttttgaaatgaaagacgcttttaaaaatgactaaactgtgcccgagtggtttattttctacttgggaaggagtcctctttggagccaaagttatacatcgttctcatgcccacatttgtagtaagatgcacatacccccgattgatttagttttataatcggtgacactacacatctctctgtatagaaaagcaagtacggcaggtccccatgcatatgtgctacagtctccaaagtcacgcaaaaattgaaggtaccttagcgaaactttgttactgcttttgtcaacgaacaagacacctccaatgaatcttagtatccatgcatgggtgaaccttcgtacttgttcttcatcgtcgtggttatttatttgtgcaaaatggtgagccagccaacttaatttaaccacactacctttaatttcaccttcttgtggtctgactcccaataattcctcacataaatcagcccaattaagatttgttggaccaattaatggtaaaccatccacacgtagacctaacaatacagagacatcttgaagagtaatagtacactctccgcatctcatgtgaaacgtatgtgtttccggcctccatctttctatcaaagcactaattaatgagacatttatttttaagtatctcatcttcataatccagtaaaaaccagattgtcgaaggaaaggaaaaatttgctctgatatttcttcttccccttgataagtggggacagctcgtctgatgtgtaatttgcggtcttcttcttcattccaaacatgttctgaaacatgcttagcttgcatccataatacgtcaccatcgatcgtgtcagacttaattttaatatttgatgaacatgacgacgaagatgccattgatattgcaaaatataatataa

SEQ ID NO: 11710 - DNA, 1158 bp, Glycine max
  Gm_smallRNAprecursor_4543
agacaacaatgatataacagttgctgtgtaaggctcccacacaaactgcatataacaacatagttgtcagcattttagtaaaataacacatattattttttattttacaaatacaataccatgttcttacctcatgacgtttcataatatccaacttgtgacgaaaaactttcacatcatcattgccgatatgttgatttccacgtcgcagccacctacaaagattaaaatttaatataccctaaaaccatttattcttttgaaatgaaagacgcttttaaaaatgactaaactgtgcccgagtggtttattttctacttgggaaggagtcctctttggagccaaagttatacatcgttctcatgcccacatttgtagtaagatgcacatacccccgattgatttagttttataatcggtgacactacacatctctctgtatagaaaagcaagtacggcaggtccccatgcatatgtgctacagtctccaaagtcacgcaaaaattgaaggtaccttagcgaaactttgttactgcttttgtcaacgaacaagacacctccaatgaatcttagtatccatgcatgggtgaaccttcgtacttgttcttcatcgtcgtggttatttatttgtgcaaaatggtgagccagccaacttaatttaaccacactacctttaatttcaccttcttgtggtctgactcccaataattcctcacataaatcagcccaattaagatttgttggaccaattaatggtaaaccatccacacgtagacctaacaatacagagacatcttgaagagtaatagtacactctccgcatctcatgtgaaacgtatgtgtttccggcctccatctttctatcaaagcactaattaatgagacatttatttttaagtatctcatcttcataatccagtaaaaaccagattgtcgaaggaaaggaaaaatttgctctgatatttcttcttccccttgataagtggggacagctcgtctgatgtgtaatttgcggtcttcttcttcattccaaacatgttctgaaacatgcttagcttgcatccataatacgtcaccatcgatcgtgtcagacttaattttaatatttgatgaacatgacgacgaagatgccattgatattgcaaaatataatataat

SEQ ID NO: 11711 - DNA, 1155 bp, Glycine max
  Gm_smallRNAprecursor_4544
acaacaatgatataacagttgctgtgtaaggctcccacacaaactgcatataacaacatagttgtcagcattttagtaaaataacacatattattttttattttacaaatacaataccatgttcttacctcatgacgtttcataatatccaacttgtgacgaaaaactttcacatcatcattgccgatatgttgatttccacgtcgcagccacctacaaagattaaaatttaatataccctaaaaccatttattcttttgaaatgaaagacgcttttaaaaatgactaaactgtgcccgagtggtttattttctacttgggaaggagtcctctttggagccaaagttatacatcgttctcatgcccacatttgtagtaagatgcacatacccccgattgatttagttttataatcggtgacactacacatctctctgtatagaaaagcaagtacggcaggtccccatgcatatgtgctacagtctccaaagtcacgcaaaaattgaaggtaccttagcgaaactttgttactgcttttgtcaacgaacaagacacctccaatgaatcttagtatccatgcatgggtgaaccttcgtacttgttcttcatcgtcgtggttatttatttgtgcaaaatggtgagccagccaacttaatttaaccacactacctttaatttcaccttcttgtggtctgactcccaataattcctcacataaatcagcccaattaagatttgttggaccaattaatggtaaaccatccacacgtagacctaacaatacagagacatcttgaagagtaatagtacactctccgcatctcatgtgaaacgtatgtgtttccggcctccatctttctatcaaagcactaattaatgagacatttatttttaagtatctcatcttcataatccagtaaaaaccagattgtcgaaggaaaggaaaaatttgctctgatatttcttcttccccttgataagtggggacagctcgtctgatgtgtaatttgcggtcttcttcttcattccaaacatgttctgaaacatgcttagcttgcatccataatacgtcaccatcgatcgtgtcagacttaattttaatatttgatgaacatgacgacgaagatgccattgatattgcaaaatataatataa

SEQ ID NO: 11712 - DNA, 1036 bp, Glycine max
  Gm_smallRNAprecursor_4545
tgttcttacctcatgacgtttcataatatccaacttgtgacgaaaaactttcacatcatcattgccgatatgttgatttccacgtcgcagccacctacaaagattaaaatttaatataccctaaaaccatttattcttttgaaatgaaagacgcttttaaaaatgactaaactgtgcccgagtggtttattttctacttgggaaggagtcctctttggagccaaagttatacatcgttctcatgcccacatttgtagtaagatgcacatacccccgattgatttagttttataatcggtgacactacacatctctctgtatagaaaagcaagtacggcaggtccccatgcatatgtgctacagtctccaaagtcacgcaaaaattgaaggtaccttagcgaaactttgttactgcttttgtcaacgaacaagacacctccaatgaatcttagtatccatgcatgggtgaaccttcgtacttgttcttcatcgtcgtggttatttatttgtgcaaaatggtgagccagccaacttaatttaaccacactacctttaatttcaccttcttgtggtctgactcccaataattcctcacataaatcagcccaattaagatttgttggaccaattaatggtaaaccatccacacgtagacctaacaatacagagacatcttgaagagtaatagtacactctccgcatctcatgtgaaacgtatgtgtttccggcctccatctttctatcaaagcactaattaatgagacatttatttttaagtatctcatcttcataatccagtaaaaaccagattgtcgaaggaaaggaaaaatttgctctgatatttcttcttccccttgataagtggggacagctcgtctgatgtgtaatttgcggtcttcttcttcattccaaacatgttctgaaacatgcttagcttgcatccataatacgtcaccatcgatcgtgtcagacttaattttaatatttgatgaacatgacgacgaagatgccattgatattgcaaaatataatataa

SEQ ID NO: 11713 - DNA, 1037 bp, Glycine max
  Gm_smallRNAprecursor_4546
tgttcttacctcatgacgtttcataatatccaacttgtgacgaaaaactttcacatcatcattgccgatatgttgatttccacgtcgcagccacctacaaagattaaaatttaatataccctaaaaccatttattcttttgaaatgaaagacgcttttaaaaatgactaaactgtgcccgagtggtttattttctacttgggaaggagtcctctttggagccaaagttatacatcgttctcatgcccacatttgtagtaagatgcacatacccccgattgatttagttttataatcggtgacactacacatctctctgtatagaaaagcaagtacggcaggtccccatgcatatgtgctacagtctccaaagtcacgcaaaaattgaaggtaccttagcgaaactttgttactgcttttgtcaacgaacaagacacctccaatgaatcttagtatccatgcatgggtgaaccttcgtacttgttcttcatcgtcgtggttatttatttgtgcaaaatggtgagccagccaacttaatttaaccacactacctttaatttcaccttcttgtggtctgactcccaataattcctcacataaatcagcccaattaagatttgttggaccaattaatggtaaaccatccacacgtagacctaacaatacagagacatcttgaagagtaatagtacactctccgcatctcatgtgaaacgtatgtgtttccggcctccatctttctatcaaagcactaattaatgagacatttatttttaagtatctcatcttcataatccagtaaaaaccagattgtcgaaggaaaggaaaaatttgctctgatatttcttcttccccttgataagtggggacagctcgtctgatgtgtaatttgcggtcttcttcttcattccaaacatgttctgaaacatgcttagcttgcatccataatacgtcaccatcgatcgtgtcagacttaattttaatatttgatgaacatgacgacgaagatgccattgatattgcaaaatataatataat

SEQ ID NO: 11714 - DNA, 1157 bp, Glycine max
  Gm_smallRNAprecursor_4547
aactctcccacttccacaagtcaaacataaacacaccatccccacttgcccacctttcaactgagctcacgcactcctacgtagcccttatcctcgttcctctcaacatcgggtccccatcaacccctccaagcatccataatatccaaacaattcaatttcatttatcatgaagctaccctaaaccaagaaaacagagtagaggcagaaaactctgcccaaaactcattcaaattccacagttttccctactcaaatatcccagtaacattctcttcgttccgattcttcaaccgttggatcgccttgaaagttttactggacgttcctagtacataactctacattttgaccgttgggatctgctagcaaatgcctggaacacgagatatactacctttcccataaccagcaatgcacaagtatttttctgcacatgttaaaaatctgctgcacaattcaacaacatttttctgcataatagggcaaatttcgaaatccaacttgcccacatccaattttgctcaaattggatcctacaagtcctaaatcatgtataaatcatatttaaaccaaaagcaaacttcagaccaaggcaaatcaaaatatatgtatccaaaacccaccaatttagtgaattctcaaggtttgagaagtgaaaatgagaattggataattttggggtaaactctcatcccaatcaagtctataacattgatttaaacttgctcaaactagttttaaggcaaaaactcgacctattcaaaatttggcctctcaacacccaatttaccctagaaaatggctcttttctttcacatttgtcactcatttttcttatttgttctgcctaagctttcctacaagtcctaattgacattttaaactaggatcaactcactttagactccaatttccactaaccccaaatttggcttttctaaccctcaaatctcacttttctacctacaacattatcattctcacatttaaccctaagttaactctccccatcatctctaccagttttctatcaacaatttcagcatacataaatcacaaagcatcatcataaaaccctaaatcagcatgggtaattttactcacatcaaacatgtcaagtttagcatgatttcaacaaattccttcacaaatga

SEQ ID NO: 11715 - DNA, 1043 bp, Glycine max
  Gm_smallRNAprecursor_4548
tatggctgagtgtttcggataaggagaaaagggagcaacgagaaactcaacagaataagattgtaccatggccctatctggagcataacaccaacaactccctgagcatacaggccttaagccatcatttggctggtttgaataggtaataattactgaattcactaagacactaaagcttcttattctatgagggttcatataaaattgataagggtttagatcttccaagtaataagaaatatttgtgaaccaacttagcaatcccaccttggatgatttgaaataataaaataaattgtagttcttgtctaatatttctagcaaatttccaaaacataactccaatagtgaataaaaagaagatagaaaaagacaatgttgttttcttcttaatcttatattttaggcaaaattgtaaaattggtcccccactttatctccaattacggatttggtccccctataatctaattcacaaatttggccccccagttttataaatccctgcaaaattggtcctgaaagcctgatttggatgttgaccgttaacctcagacgttgactgccacgtgtcaatgccatgtgtgattaccacgtgtcaatgccacgtgtcaatgtctaagtggtttcctgtaaagacttcattttttgtaggtaaaattgcacttttggtctctcagttttactccaatttcgattttgatccccctatagtttaattcacacatttagttccccagttttataaatccctttataaattgttcctacaaaattggtcttttgaatggtttagccactggtgctagagacatggtaggtcttgataaatctcgcacttctttttcatcgcaagtttttcactcacttgaaacccagagaaaaatcactttttgtctttctcccacttccgggattgttcaacttgggaaagtggcgcatgaatcccaacctgggtctgaaattttcagatctcttactttaacaggttctgtaataaccccctatttttttttttctttttttgctcccccatgtgg

SEQ ID NO: 11716 - DNA, 1167 bp, Glycine max
  Gm_smallRNAprecursor_4549
taactggaaccacagtctaacgggttttttaccgtactacaccctctctctccaaaaaaaatgcctaatatacactagtttgggaatattttcccaaactacaccagtttgaagcttttcatgaaagtcgggttctggcaccccgacttcccttcttccttttttttataaataagtttatatattattaaaattaaatattatattatataaaattatttttaattgattttaaaattatttatttattaaattaatttatgtaatataattttgttattaagaaaatgatcttattaaatttaggtatttttgttatattatttaaattatttaagatattttttgggtgaatatatgttttaaaatctgaattttgtataataatatatttattttagattcttgctacattgattcgtgtgacaataaaccaaaggagttgtcgtagttgtgcaaaatgtgttgtaaagtgaataacatcagcacataggtcatgggatcaacattgacagatttacaggcagccatgacgtgagaacacggtaaatgtttagcctgatattcaccacaatcacacttttgggattgtaacattactctaaaccttccaggtggtctcggtgtttcaagtggggattgagtctctgttataataaaagtgtgattgtgtctgtcgaattcatttacaatgtgtgtattagattcttgttgaccactattcattgtatcgaagacgacttcagaatactgtgaatcggagttgatcattgcctgagtttgtcgacctctattagcaaagagttgtgtggtcttgaaataagtctcctcaaccaacgatgatatcgaaaaatgtcttgtgttttttaacatggaattaacagactccgaaaaattggtagttatatgtccccaacgttttccctcatcgaagcattgtacccatttttgtttgggtaattgatcaagccattcagctgcacttggcttatttgcacaaatatccccaagatgtcgccagtgcatcttctccgtgtatgcgtaacctgtaaatattcaatcaatgtatttatgttataaaatttgattgaaagaaaattataacgaataaataaaatagattctcaccagccaacatgagtggtttctttaaatgttagcagtttg

SEQ ID NO: 11717 - DNA, 1195 bp, Glycine max
  Gm_smallRNAprecursor_4550
cacggccatacaaaggacctttggctgatgaagtttttgccaaacggaaaaagttccttggtcttccttgttccacttctatcaaaaacctgtgagtctccaaaattgatcaaccttttattagttactatatgataatcttttatctatgttttcttaattttactttctgtgaaaattgagtcaaagaaatgaagtataaataattgtattatttgaaaatgagtctccacaaggactatcatatatttggcccatcaccataagtgaggaggagttatagctacacattatttaatacattttgtatgatactctttcattaaaatttatggagaattacaaaattataaattatggagtagaatttattcttggggtgtctttgtttcagaatttttttatattttactttccatattttaagtggattccatcattgctgcatatatataaaaacacatattattaaggccacacgaattgctccttggctgaaagccaagtatttgcagattcataagttgaggatagcagaatatggaacttatcttaaaaacaggaatttaactgtaaataatacagcatcacaagagtttattttgtgtaaatgagaggccacgtcatgctgtgaatctgcaaatacttagctttcctcaacttaaaatataagttccatattctgctatcctcaacttatgaatctgcaaatacttggctttcagccaaggagcaatattcgtgtggccttaataatatgtgtttttatatatatgcagcaatgatggaatccacttaaaatatggaaagtaaaatataaaaaaattctgaaacaaagacactccaagcatgtgatatgattcttcggagtttaaaaaatattttggatggaacggggaatctttcatcaagtatgtattgaagtagtctctcacctaactataaaggttattattggaaactacacgtttacgattattttttgtctattaaaaatttgtattaatatttataataattaagtttgagtaaaaaaaaaatatcgaacgtctaaataaatagtgtcaaattgtcgtatcttaatccaaattcgagttttattgtattaagtatcaaatacttgtgaaatattcatatattccagaagatgcccagatatctcagtccttaaaccccttgctaaatccatataata

SEQ ID NO: 11718 - DNA, 1196 bp, Glycine max
  Gm_smallRNAprecursor_4551
cacggccatacaaaggacctttggctgatgaagtttttgccaaacggaaaaagttccttggtcttccttgttccacttctatcaaaaacctgtgagtctccaaaattgatcaaccttttattagttactatatgataatcttttatctatgttttcttaattttactttctgtgaaaattgagtcaaagaaatgaagtataaataattgtattatttgaaaatgagtctccacaaggactatcatatatttggcccatcaccataagtgaggaggagttatagctacacattatttaatacattttgtatgatactctttcattaaaatttatggagaattacaaaattataaattatggagtagaatttattcttggggtgtctttgtttcagaatttttttatattttactttccatattttaagtggattccatcattgctgcatatatataaaaacacatattattaaggccacacgaattgctccttggctgaaagccaagtatttgcagattcataagttgaggatagcagaatatggaacttatcttaaaaacaggaatttaactgtaaataatacagcatcacaagagtttattttgtgtaaatgagaggccacgtcatgctgtgaatctgcaaatacttagctttcctcaacttaaaatataagttccatattctgctatcctcaacttatgaatctgcaaatacttggctttcagccaaggagcaatattcgtgtggccttaataatatgtgtttttatatatatgcagcaatgatggaatccacttaaaatatggaaagtaaaatataaaaaaattctgaaacaaagacactccaagcatgtgatatgattcttcggagtttaaaaaatattttggatggaacggggaatctttcatcaagtatgtattgaagtagtctctcacctaactataaaggttattattggaaactacacgtttacgattattttttgtctattaaaaatttgtattaatatttataataattaagtttgagtaaaaaaaaaatatcgaacgtctaaataaatagtgtcaaattgtcgtatcttaatccaaattcgagttttattgtattaagtatcaaatacttgtgaaatattcatatattccagaagatgcccagatatctcagtccttaaaccccttgctaaatccatataatat

SEQ ID NO: 11719 - DNA, 1194 bp, Glycine max
  Gm_smallRNAprecursor_4552
acggccatacaaaggacctttggctgatgaagtttttgccaaacggaaaaagttccttggtcttccttgttccacttctatcaaaaacctgtgagtctccaaaattgatcaaccttttattagttactatatgataatcttttatctatgttttcttaattttactttctgtgaaaattgagtcaaagaaatgaagtataaataattgtattatttgaaaatgagtctccacaaggactatcatatatttggcccatcaccataagtgaggaggagttatagctacacattatttaatacattttgtatgatactctttcattaaaatttatggagaattacaaaattataaattatggagtagaatttattcttggggtgtctttgtttcagaatttttttatattttactttccatattttaagtggattccatcattgctgcatatatataaaaacacatattattaaggccacacgaattgctccttggctgaaagccaagtatttgcagattcataagttgaggatagcagaatatggaacttatcttaaaaacaggaatttaactgtaaataatacagcatcacaagagtttattttgtgtaaatgagaggccacgtcatgctgtgaatctgcaaatacttagctttcctcaacttaaaatataagttccatattctgctatcctcaacttatgaatctgcaaatacttggctttcagccaaggagcaatattcgtgtggccttaataatatgtgtttttatatatatgcagcaatgatggaatccacttaaaatatggaaagtaaaatataaaaaaattctgaaacaaagacactccaagcatgtgatatgattcttcggagtttaaaaaatattttggatggaacggggaatctttcatcaagtatgtattgaagtagtctctcacctaactataaaggttattattggaaactacacgtttacgattattttttgtctattaaaaatttgtattaatatttataataattaagtttgagtaaaaaaaaaatatcgaacgtctaaataaatagtgtcaaattgtcgtatcttaatccaaattcgagttttattgtattaagtatcaaatacttgtgaaatattcatatattccagaagatgcccagatatctcagtccttaaaccccttgctaaatccatataata

SEQ ID NO: 11720 - DNA, 1164 bp, Glycine max
  Gm_smallRNAprecursor_4553
acctttggctgatgaagtttttgccaaacggaaaaagttccttggtcttccttgttccacttctatcaaaaacctgtgagtctccaaaattgatcaaccttttattagttactatatgataatcttttatctatgttttcttaattttactttctgtgaaaattgagtcaaagaaatgaagtataaataattgtattatttgaaaatgagtctccacaaggactatcatatatttggcccatcaccataagtgaggaggagttatagctacacattatttaatacattttgtatgatactctttcattaaaatttatggagaattacaaaattataaattatggagtagaatttattcttggggtgtctttgtttcagaatttttttatattttactttccatattttaagtggattccatcattgctgcatatatataaaaacacatattattaaggccacacgaattgctccttggctgaaagccaagtatttgcagattcataagttgaggatagcagaatatggaacttatcttaaaaacaggaatttaactgtaaataatacagcatcacaagagtttattttgtgtaaatgagaggccacgtcatgctgtgaatctgcaaatacttagctttcctcaacttaaaatataagttccatattctgctatcctcaacttatgaatctgcaaatacttggctttcagccaaggagcaatattcgtgtggccttaataatatgtgtttttatatatatgcagcaatgatggaatccacttaaaatatggaaagtaaaatataaaaaaattctgaaacaaagacactccaagcatgtgatatgattcttcggagtttaaaaaatattttggatggaacggggaatctttcatcaagtatgtattgaagtagtctctcacctaactataaaggttattattggaaactacacgtttacgattattttttgtctattaaaaatttgtattaatatttataataattaagtttgagtaaaaaaaaaatatcgaacgtctaaataaatagtgtcaaattgtcgtatcttaatccaaattcgagttttattgtattaagtatcaaatacttgtgaaatattcatatattccagaagatgcccagatatctcagtccttaaaccccttgc

SEQ ID NO: 11721 - DNA, 1148 bp, Glycine max
  Gm_smallRNAprecursor_4554
ctgatgaagtttttgccaaacggaaaaagttccttggtcttccttgttccacttctatcaaaaacctgtgagtctccaaaattgatcaaccttttattagttactatatgataatcttttatctatgttttcttaattttactttctgtgaaaattgagtcaaagaaatgaagtataaataattgtattatttgaaaatgagtctccacaaggactatcatatatttggcccatcaccataagtgaggaggagttatagctacacattatttaatacattttgtatgatactctttcattaaaatttatggagaattacaaaattataaattatggagtagaatttattcttggggtgtctttgtttcagaatttttttatattttactttccatattttaagtggattccatcattgctgcatatatataaaaacacatattattaaggccacacgaattgctccttggctgaaagccaagtatttgcagattcataagttgaggatagcagaatatggaacttatcttaaaaacaggaatttaactgtaaataatacagcatcacaagagtttattttgtgtaaatgagaggccacgtcatgctgtgaatctgcaaatacttagctttcctcaacttaaaatataagttccatattctgctatcctcaacttatgaatctgcaaatacttggctttcagccaaggagcaatattcgtgtggccttaataatatgtgtttttatatatatgcagcaatgatggaatccacttaaaatatggaaagtaaaatataaaaaaattctgaaacaaagacactccaagcatgtgatatgattcttcggagtttaaaaaatattttggatggaacggggaatctttcatcaagtatgtattgaagtagtctctcacctaactataaaggttattattggaaactacacgtttacgattattttttgtctattaaaaatttgtattaatatttataataattaagtttgagtaaaaaaaaaatatcgaacgtctaaataaatagtgtcaaattgtcgtatcttaatccaaattcgagttttattgtattaagtatcaaatacttgtgaaatattcatatattccagaagatgcccagatatctcagtccttaaa

SEQ ID NO: 11722 - DNA, 1033 bp, Glycine max
  Gm_smallRNAprecursor_4555
catgatgtgtcgaagtgaaaaaagaaaaacaagtttcatagggaatataggaaaacttgttggaagcaaatatagggaccatttttattttattatgtttctggttaaatagggaccctgttattattctctcgaaatattgaatagactaaggaatttgttttataattcaggtttatgatgagctgaattatattactacctgttgcttaggggtaagaaactcaattttatttcaataaggttttaaatttaagtattatacataggcattcataatcccgcctggcctgacagaaggcattcatgttggcatcaacctgcgtcataattcctacaaaataacataagtgaaaaattttcaagttacaacaagaaatgaaaaacaatcaaaaaggaaataaaaactaaccttcaaggtcccgaacaggatccaaatatagcaaaagggccacaaggcgaccaagctatgaagcacggacactctagtcctttgccatgtccggtgtccgacacgcgttcgtgtcagtgttcgacatcgacacgacacccgtactacgttctatattttggacattacaggtgttcacgtgtccatgtccgtgtcgtgtccggtgtccgtgtcggtgtcaatgcttcatagcgaccaagcaagtagttgtcgagggagcgattcgaggaatttgaggtctcggtgttcattaacactcaacagctcctttgggtgcttgttgtaccgctaaggacattattgctagtagaaagggaacaataggttccgtgccgagtcatagaaatagtctttcccggtgagtggccgtatggttactttgaagcaaccggttttaaaactcttataagaagaaatgaaaggatgaaataaaggacgctttggcagccaaatcagtgatatccaccgaaccttatcctacggacaactacaaaagtgttgcaggaaaagtctgggcattgctggcatagagctatacaagcaaaatgctcggagcgcctgcatggctgctcacttgtttca

SEQ ID NO: 11723 - DNA, 1065 bp, Glycine max
  Gm_smallRNAprecursor_4556
gggaatataggaaaacttgttggaagcaaatatagggaccatttttattttattatgtttctggttaaatagggaccctgttattattctctcgaaatattgaatagactaaggaatttgttttataattcaggtttatgatgagctgaattatattactacctgttgcttaggggtaagaaactcaattttatttcaataaggttttaaatttaagtattatacataggcattcataatcccgcctggcctgacagaaggcattcatgttggcatcaacctgcgtcataattcctacaaaataacataagtgaaaaattttcaagttacaacaagaaatgaaaaacaatcaaaaaggaaataaaaactaaccttcaaggtcccgaacaggatccaaatatagcaaaagggccacaaggcgaccaagctatgaagcacggacactctagtcctttgccatgtccggtgtccgacacgcgttcgtgtcagtgttcgacatcgacacgacacccgtactacgttctatattttggacattacaggtgttcacgtgtccatgtccgtgtcgtgtccggtgtccgtgtcggtgtcaatgcttcatagcgaccaagcaagtagttgtcgagggagcgattcgaggaatttgaggtctcggtgttcattaacactcaacagctcctttgggtgcttgttgtaccgctaaggacattattgctagtagaaagggaacaataggttccgtgccgagtcatagaaatagtctttcccggtgagtggccgtatggttactttgaagcaaccggttttaaaactcttataagaagaaatgaaaggatgaaataaaggacgctttggcagccaaatcagtgatatccaccgaaccttatcctacggacaactacaaaagtgttgcaggaaaagtctgggcattgctggcatagagctatacaagcaaaatgctcggagcgcctgcatggctgctcacttgtttcaatgcaattgtgttggtgcaacattgagtatccagaggacacccatactaaaatcatcaaaggggaccttcac

SEQ ID NO: 11724 - DNA, 1040 bp, Glycine max
  Gm_smallRNAprecursor_4557
agttgagaatgttggaatcaacaaagtgctcattgatggaggagcggctgtcaacttaatgcctcgatctatgctctacaagatcgggaaacatgacactgatctatctgcccacaacattgtgctttcgaattatgagggtaaaactggctattctttgggagccattcaagtagatgttgctgtaggcagtatagttcgaccaactcttttcctggtgatacagtctaaggctaattttaacttgctattaggaagggagtggattcatggagttggagctgtgccatctacccttcaccagaagctcattatctggagggaagatgggattgtggaaaatatagaggcggatcaaagcttctataagtcagaggtcgataatgttactgcacaaacctttgacaaaaagttggctaacatagcgccttgtggtgacaaggaggctgttgtcgaatcgagtgacaatgttgtccactctgtcaaactccatcctacttatgggtttatatgggagagggaggaaattaatgatgttccctctgaagatggagtcattccaccaactgggtggaatatatatgaagattaatatgactgaggccgctgcatgggccagaattacggcttatatggccgaaaatagactaaatacggcctttgaggctgagtctcaacaaaatatggcagttgaagccaagatcgaagatcatgaaaacaaagaaacaaaggatcgaagactggattgcatatatgacgatgagccgctgggtttcgagaaaaatcccgtaagtgaggtgccaaagatgcaggctcaagatcctttggaagaggtcgatattggagatggctcgattaaaaggccaacttatatcagtgccaatatcacctcaagtttaaaagaaaagctggtacctcttcttagagagtttaaagactgttttgcttgggattaccacgaaatgcctgggttaaacagagaaatggtcgaaatgaagttacctattaaggagggaaaaagaccagtaaaacaactacca

SEQ ID NO: 11725 - DNA, 1157 bp, Glycine max
  Gm_smallRNAprecursor_4558
aagaccagtaaaacaactaccaagaagattcgcaccagaaatcatgtccaagatcaaggaagagatcgaaaggctgctgaggtgtaaattcatcagagctgccaggtatgtcgaatggttagcaaatatagtccctgtcattaaaaagaatggaactcttagagtatgcatagattttagggatttaaataatgctacacctaaagatgaatatgctatgccagtagcggaaatgttggtagattcggcagctggtttcgagtttttaagcatgttagatggttattctggttataaccaaatatttattgctgaaaatgatgtgtcgaaaacagcatttcgatgccctggtgctttaggcacttatgaatgggtggttatgccctttgggttgaaaaatgctggggccacttatcaaagggctatgaattccatgtttcatgattttattgacacatttatgcaaatttatattgatgatataatcatcaaatcctcctcagaagatagccatttggattatcttaggcaatctttcgaacgaatgaggaaacatggattaaaaatgaatccattaaaatgtgctttttgtgtgcgtgcaggagatttccttggtttcgtggtgcataaaaaaggcattgagataaatcaaaataagacaaaggctattcttgagacgaagcctccttcgactaaaaaacagcttcagtctttgctaggaaaaatcaacttcttgaggcgattcatttcgaatctaagtggcaaagctcagattttttcgccattacttcgactcaagaaagatgaaccattcaaatggaatgaagagcatcaaaaggctttcgatgaaattaaagaatatctgatcaagcctcctgtgttaatgcctcctagtcgaaacaagtctatgaaattgtatattgctgcgtctgacaagaccattggtagcatgttggctcaggaagatgatgatggcatagaacatgcaatttattatcttagtcgtgtactaaatgatgcagaaactagatatactgccatagaaaaactctgtctttgtctgtatttctcttgtgcaaaacttaagcaatatataaagcctgttgatgtttatgtgtattctcattatgatgttattaagcacatgttgtcaaaac

SEQ ID NO: 11726 - DNA, 1114 bp, Glycine max
  Gm_smallRNAprecursor_4559
aatctaagtggcaaagctcagattttttcgccattacttcgactcaagaaagatgaaccattcaaatggaatgaagagcatcaaaaggctttcgatgaaattaaagaatatctgatcaagcctcctgtgttaatgcctcctagtcgaaacaagtctatgaaattgtatattgctgcgtctgacaagaccattggtagcatgttggctcaggaagatgatgatggcatagaacatgcaatttattatcttagtcgtgtactaaatgatgcagaaactagatatactgccatagaaaaactctgtctttgtctgtatttctcttgtgcaaaacttaagcaatatataaagcctgttgatgtttatgtgtattctcattatgatgttattaagcacatgttgtcaaaaccgattttacacagtagaattggaaaatgggctttagcattaacagaatattctttaacgtacaagcctttgaaatctgttaagggtcaaattgtggcagattttattgtagatcactcagtggtcgaaatgtcgcaagactatgtcgatacagagccatggattttgtatttcgatggttcgaaacacaaacatggaactggaattggagttttaataatatcccccaataaagttccaactaagttcaaatataaaatcaaagggctttgttctaataatgaggctgagtatgaagctctaattacaggccttgaaattttaattagcctgggggcaagaaatgttaatataagaggtgattcagaattagtgttgaggcaattaacacaagaatacaaatgtgttaatgaacacttagcaaaatattttgttatagcaagttctcttctgaatcatttcgattatattaacattgagcatgtacctcgacaagaaaaccgagaagcaaatgatttagcccaaatagcttcagggtacaaaatgtcgaaggaaaagttaactcagttgatcgaaataaaagataaactggtgttaccagagccattaagcactaaattgccaatgccaaaacttgtgggggcaagtataccacaaaataatgaagatgaaagtatgaatgatcttcaggaaaaaattcaaattttgg

SEQ ID NO: 11727 - DNA, 1110 bp, Glycine max
  Gm_smallRNAprecursor_4560
tattgtagatcactcagtggtcgaaatgtcgcaagactatgtcgatacagagccatggattttgtatttcgatggttcgaaacacaaacatggaactggaattggagttttaataatatcccccaataaagttccaactaagttcaaatataaaatcaaagggctttgttctaataatgaggctgagtatgaagctctaattacaggccttgaaattttaattagcctgggggcaagaaatgttaatataagaggtgattcagaattagtgttgaggcaattaacacaagaatacaaatgtgttaatgaacacttagcaaaatattttgttatagcaagttctcttctgaatcatttcgattatattaacattgagcatgtacctcgacaagaaaaccgagaagcaaatgatttagcccaaatagcttcagggtacaaaatgtcgaaggaaaagttaactcagttgatcgaaataaaagataaactggtgttaccagagccattaagcactaaattgccaatgccaaaacttgtgggggcaagtataccacaaaataatgaagatgaaagtatgaatgatcttcaggaaaaaattcaaattttggccattgacaatatgttagataatgattggagaaagtccattattgaatatttggaaaatccaataggcaatgtggctcgaaagatcaaatatagggctttaaattacgtgattgtgggaaatgatttgtttaaaaagactgcagaaggagtgttgttaaaatgtctaagtgaatcagaagcatacttggcagtttcccatgttcacagtggggcttgtggatcacatcaagcaggccataaaatgaaatggcttttatttcgacaaggtttgtattggccttcgatgttaaaagactgcatagaattcgctaaaggctgtcaggaatgccaaaagcatgcagggatacagcatgtacctgctagtgagttacactccataatcaaaccttggcctttcagaggatgggctttggatttaattggcgaaatcaagcctgcctcttctaagaaccagcgttatattatagttggtatcgattactttacaaaatggatcgaagcagt

SEQ ID NO: 11728 - DNA, 1082 bp, Glycine max
  Gm_smallRNAprecursor_4561
cagtggtcgaaatgtcgcaagactatgtcgatacagagccatggattttgtatttcgatggttcgaaacacaaacatggaactggaattggagttttaataatatcccccaataaagttccaactaagttcaaatataaaatcaaagggctttgttctaataatgaggctgagtatgaagctctaattacaggccttgaaattttaattagcctgggggcaagaaatgttaatataagaggtgattcagaattagtgttgaggcaattaacacaagaatacaaatgtgttaatgaacacttagcaaaatattttgttatagcaagttctcttctgaatcatttcgattatattaacattgagcatgtacctcgacaagaaaaccgagaagcaaatgatttagcccaaatagcttcagggtacaaaatgtcgaaggaaaagttaactcagttgatcgaaataaaagataaactggtgttaccagagccattaagcactaaattgccaatgccaaaacttgtgggggcaagtataccacaaaataatgaagatgaaagtatgaatgatcttcaggaaaaaattcaaattttggccattgacaatatgttagataatgattggagaaagtccattattgaatatttggaaaatccaataggcaatgtggctcgaaagatcaaatatagggctttaaattacgtgattgtgggaaatgatttgtttaaaaagactgcagaaggagtgttgttaaaatgtctaagtgaatcagaagcatacttggcagtttcccatgttcacagtggggcttgtggatcacatcaagcaggccataaaatgaaatggcttttatttcgacaaggtttgtattggccttcgatgttaaaagactgcatagaattcgctaaaggctgtcaggaatgccaaaagcatgcagggatacagcatgtacctgctagtgagttacactccataatcaaaccttggcctttcagaggatgggctttggatttaattggcgaaatcaagcctgcctcttctaagaaccagcgttatattatagttggtatcgattactttacaaaa

SEQ ID NO: 11729 - DNA, 1086 bp, Glycine max
  Gm_smallRNAprecursor_4562
cggcaaccagcttctgaatcgaatcagcggccttctcctggagttctttgcgtttagcctgctctgttacaattttctgccttagatcatcgacctgagacagcaaatttgtaatagttgcctcccaggaggagatattatcatcacaggctttgatctcagaagatccttctttcgcctctttggtgagacgctcgacttcacgttgagccgctcgggctttctcgagcagaaggatatgtgcctgctaagtacatggggtttcactttaaaaaaagggaaaataatataataagaatcaagggtcagaaatcaatcacatcagatttccctttttactccccagcgtgacacgtgtcccactcagcctagaaaggtggaattaatgatgggtaatggaagggttctcttcaatggatttaagtacgtctgcccgtgcgtattccattgataacttcaaaagcaggcaatcttggcgtactgtagaggttatatcagcatcagatgaggacgaagcaccaggattcttttcacttgaggtgttggcttgactggtgttcagcaggagtcgaagggctgcagcagggtcttcgtcttgcatttgaatgaatgtatcctctgcgatccctatgctagcggaaagcttagatgtcgaagacactgggaaaatgtctgaacctccagcttcagcctcttgtatggcctcttcatcgggaaagtgttcttcagatgaacttctctgactcgatccctgaggactgctgggtccaataccttgaccttcaccctgttcctcaacattcactgcatccgtctcaggagcaggagaggttcgagcacatgagggtatttcttctacagaaacattttgttgtacctgattcgaattgtcatgaaaaaggttaacaaatagtttcgtattagctatgattaaaatcatattaagaatggtacctcgacggtagggtgttcttgtggtaagtccggttgttcgacaaggttgcccatctcagcaatagagggagtagtttctgtttcagcgccaccaacatcagtcgaaggtggttggacgtcaacaggttgatt

SEQ ID NO: 11730 - DNA, 1135 bp, Glycine max
  Gm_smallRNAprecursor_4563
aaatttcaaatagaaaaagagaataaaagataaactatttaatgtattacatgaatattttaaaatcaaaataagataaagaaaacaatgaaactttaaaatgttattattaataataaatattttatcttattaaatataaaaaaatattaggttatgtcaatcaagttcttttttaaaatctggtgctggatccatgtgcgccgagttgttggatttgagccttacttcttgggctttggagaatttctattgggcttggtgtttttcaatcgggtgttgctaggtgcacctaacattttttaaaatactaaaattgcccctacacttttttcgtatttgtgatgagtgtgtgtgaaggtgattcgtaaatcgtacgaatcaagttgatccgtaaggttgatacaaatcaagttgatccgtatgttgatattaagcatacagatcccgcggctcatttgggttagtgcggatcaaggtgatccgtattgttccataaaagacttacgaatcaagttgatgcgtaaaaagcttacggatcaacttgatttgtaagccttttatggaacaatagagatcaacttgatccgtagaaaccttacagatcaagttgatctgtaaggcttctacgaatcaagttgatccgtaagtcttttacggatcaacttaaatgacttacagatcaagggtatttttgtcatttcacttcatgtgctggatgcatcagcaataatgttgggtacacctatcaacaccctttccaatccggtcagtactcgacccaaaacccgggaaaaaaaactagaaagttctgggaggtgcaggaagtaattaccgtaacactaacacaaattggtgaagtaaccaaaccattgtcgttctcgcgcgccaaatgctatgctagctttacctcggtggagcaacacccttgtctccctattcaagaaacaccaaacattggaacaatgcaagcagattcaatccatcatcgtcacttccggtctctattcaacacaagacaacaacactcttttcctcaccaaactcctccaatgtgtcccattttctcaaaatcaaaatacatgtctcttgcttctcttcgacaccatcaacactcccaacactcgcctcttaa

SEQ ID NO: 11731 - DNA, 1136 bp, Glycine max
  Gm_smallRNAprecursor_4564
aaatttcaaatagaaaaagagaataaaagataaactatttaatgtattacatgaatattttaaaatcaaaataagataaagaaaacaatgaaactttaaaatgttattattaataataaatattttatcttattaaatataaaaaaatattaggttatgtcaatcaagttcttttttaaaatctggtgctggatccatgtgcgccgagttgttggatttgagccttacttcttgggctttggagaatttctattgggcttggtgtttttcaatcgggtgttgctaggtgcacctaacattttttaaaatactaaaattgcccctacacttttttcgtatttgtgatgagtgtgtgtgaaggtgattcgtaaatcgtacgaatcaagttgatccgtaaggttgatacaaatcaagttgatccgtatgttgatattaagcatacagatcccgcggctcatttgggttagtgcggatcaaggtgatccgtattgttccataaaagacttacgaatcaagttgatgcgtaaaaagcttacggatcaacttgatttgtaagccttttatggaacaatagagatcaacttgatccgtagaaaccttacagatcaagttgatctgtaaggcttctacgaatcaagttgatccgtaagtcttttacggatcaacttaaatgacttacagatcaagggtatttttgtcatttcacttcatgtgctggatgcatcagcaataatgttgggtacacctatcaacaccctttccaatccggtcagtactcgacccaaaacccgggaaaaaaaactagaaagttctgggaggtgcaggaagtaattaccgtaacactaacacaaattggtgaagtaaccaaaccattgtcgttctcgcgcgccaaatgctatgctagctttacctcggtggagcaacacccttgtctccctattcaagaaacaccaaacattggaacaatgcaagcagattcaatccatcatcgtcacttccggtctctattcaacacaagacaacaacactcttttcctcaccaaactcctccaatgtgtcccattttctcaaaatcaaaatacatgtctcttgcttctcttcgacaccatcaacactcccaacactcgcctcttaaa

SEQ ID NO: 11732 - DNA, 1117 bp, Glycine max
  Gm_smallRNAprecursor_4565
ctttaattataagatcattttaactaatttataccacttaaaaaaaataattataactttaaatttatcaattatttatattatcatttcaaaattacctttttattctttctatatctacatatttattctcattaatgtttagaaatataataactaaatatggatatgtagataaaaataattaatgcatctaaaaatgagaaaaaagtcttataaaaatggacaaaccaattttaaaaaacatcttataattagaaacgaaggaagtattattttatattacttcctcctatgctttttatttgttgtttttgttatatagaaatcaataaatacaataattttttttaattccaataaaatagttgtggaatttcctgtctacttattttccactccacactaaatatatgtgtaaattaattaaaaattataaaataagtaaagatatcattgacaataagggtgggaatagaccaggccgtctacagggcctacgacctggcctacataaagcctgacctgaattggtctatttaattaaaaggttagaaccatacttttttaaaaacctattaaattaaatagatcaggcttaggcttgttaacaagtcttataagtctgataggtcggcctatatatatatacttatattattttttgggtaccaatttatacttatattaatttttgggtacaattaattatttttttgaaactagcagacttttgattacacattactactccataactttcatccctataatgactttaattacaatttaggtatgagtcatgtgcccttttatattactcattaattatctttattggctttcatcaaataagaaatattaaagatttaatgtgaagaaagcttttaaaaggctatcagactagactagacttttaaaaaggtcagaccaaaataaaagtctttgataaactataagtcaggctcaagcttcaaaaatcgtaggttaggctcaagtcttttaaagtctaatctaacctattctcacccttaattgacaaaacaataattaatgtgatattaaactttgttaatgatagataaatagatttttttttttcaaaaatcctatagtt

SEQ ID NO: 11733 - DNA, 1089 bp, Glycine max
  Gm_smallRNAprecursor_4566
gtaagagtttttaacactacatgtttggagcaaaaacaataagtgttggaaacaagaaaagaagagcaagtggatttcaattaccgatgcttgaaaatgaataagaaaactcgggtcgtggatgcctacctctaaaaaccaatctctcccttttaggtatttgttttctttctaacttgtggatgccattatgccaacataatcttctcactactaaaaaaagagtttttcacgacgattaataattacttttaatgacaattttgaaccgttgttaaaaataacgacattaaaacgaattttttttatgaaggttattataataaccgtctttataagctgaaactttaaaagacgattatttgttattaatcatctttgaaagttatgtttgacaaagcttttaaagatgattattagctattaaccatctttgaaaattatgtctaacaaagctttcaaagatggttatttgttattaaccgtcttggaaagtaatgtctgacaaagctttcaaagacggttaataacaaataaccgtcttaaaaagtcttgtctaacaaaactttcaaagatggttattaaccgtcttaaaaagttctgtcagacatgactttctaagacggttattgatgcaagcttcattggagcttgtaggcctaggatcttcttcatcaatggattcctttgcttcttggaagataaatggcagcggaatggagaaaggaagagagagaagagacgtcacttcaaggagaagatgagtctagaagaagctcaccaccataggaggccatggataatagcttggaggaagaaggagatgaatgaggggagagggagagaagagcacgaaattttgtgctctaaatgagctttgaaatctgaagtttaatattcaaatgatcaaagttgaaaaaaatgcacacacatgacctctatttatagcctaagtgtcacaaaattggagggaaattcaaatttcacttgaatttgaaattgaatttgtggagccaaaatttcactaattatgattagtgaattttagttatggtttagcccactaatccaagatcaatttcaagattc

SEQ ID NO: 11734 - DNA, 1045 bp, Glycine max
  Gm_smallRNAprecursor_4567
ggcaatcaacaattaaggatttttgccttactattttactcttacctccctcagtgatcttgctaaatccatgattttttgttttttgtgttggaggcaatttgttgagctctattttggttttaggggaaggtcagaaaataaatgaagatagtattattgtcaagattgagctctattttgtgtagtttagaataattaatattgggtgttaagattgaggtcattgttattattgtaaacattgtgtagggattcagaaagtattgtttgatctttggatatgtcaaattcttcctccttgatcttgtgttaaaaataattaaaaataatattcaatttaaagacggtgcttatatcagcaccgttttttaaagtaggcattctaagacgatgcttacatcagcaacgtcttagaatgtttactttcaaagacgttgctgaggtaagcacgtcttagaatgtttactttcaaagacggtgcttaccccaacaacgtctttgaaagtaggcattcaaagacggtgtttacctcagcaacgtctttgaaagtaggcattctaagacgttgcttagtcgtagaatcgcttttttccagtagtgataaaaaatcgtcttagaaagatatgtaacattctaagacggtggttagctaacaatcatcttagaaatatatccttctaaaacggttgtgaggtaagtatcatcttagaaatgtacatttttaagacggtcgtgagctaagcatcgtcttagaaagatacctttctaagacagtcgttagttaaccaccgtcttagaaatgtgactttctaagacggtcgtcagacaatgtattctattgggttactaacaacttgtaaattacagatgtcataagacaaggtattctattgagctcgaccctcaactattccattgaaaaacctttcgaattagaaaaaagtaaacagacaaatacacatggacaaaacgaacaacaaagtttatggtatcttactttctggaaaactaaacacaaatggtaccacgacagtgctggaaa

SEQ ID NO: 11735 - DNA, 1036 bp, Glycine max
  Gm_smallRNAprecursor_4568
tcacctaaagaaatttcgaccatcatttactacaatggtcacattgtagacgactcaatttgtggattggtgtacacatatgtgaattcaatatttatttaagttagtcgttctattacgtttacacaatttatttgaaaaattaacaatcgtcttcctattcgagcaactaaaaaagttgctcaattgttattttgtgtccctatttcatttcatatatttcagcacaattacaagacaatgacgatctcaaaggtgcaatggaaataattcttcagaatccacaattgaattctacagaattctatgttgttactgaccttattcctcaaccacaaccatcttcaccataaccctcatgtcccgaatcaatgtgacaagaatatgaacgagatcagttgagtcctatgaagcaccgacaccgacatggacaccggacacgacatggacacgaacacgtagacacctataatgtccaaaatatagaatgtagtgcgagtgttgtgtcggtgtcggacactgacacgaacgcgtgtcggacaccggacacgacaaggggctggagtgtccgtgtttcataggttgaatcctgatgcaagggcaaagaggattgcaaagggttgtcttgtttcaattcgcattcctactaagatggacgaaaaagaaaatgaacggaaaagtataaaaaaatgtgaaatttggcggcaacatggtcataacaaaaataattgtcctaacatatctccatcttaagtttttccttagtcaaatgtaattatttaagtattttattgataatgtaatataatgttcttctataaataaattgttaaacaaaaagtcttctcatttttaattaaatttaatgacataaacaaactaattatatttagtaatataattatattaaaaaattcagattttaaataaaaatattcacctaaaaaatatgttaagtaaattaaataataaaacaaaaataattatatttaataatatcattttctttaaaaaaaattaaaaaataaaattataa

SEQ ID NO: 11736 - DNA, 1206 bp, Glycine max
  Gm_smallRNAprecursor_4569
ccacattgaggcctaaggcatctaaaaaaattgtatcagtatttgatatgctcctgaccaaaaacaactttggtatgtccataccttagtaaaataaaatcctatcgcgaaaagatagaaaaatagcaaggaaattaatgagttacattacattagactatgttttaaaaattgtctcagattcaaaagtgtttagacagaacacagtaaggcaaatttctcaaactaggttacttttagaaactaattcccaaatgggggctgttttgaaactttttccaggggggtctgtttttgaaggggactcgccagtggggttggcgagttggacacgtggcagcgcctggtggactcgccagtggagttggcgagttgctgtccacgtggcggccacgtggcgggtcccgccactcatactgacgaaatgctttttacggaaaaaaaaattttaacttcaaacgcgtataacttttgataggaatgtccgtttgaggctcataatatgtcaaaatgctcgaaattgaatgaagaatcctttggcaactccccgaatttggtcaactcattttcccaaaaaatgcctctaagtagctcaaaaataggatttaagattaaaaaaatgggtggttgaatcttactcgcttttttgggaaaatgagttgaccaaatccccttcggggatttgccaaaggattcttcattcaatttcgagcattttgacatattatgagcctcaaacggacattcctatcaaaagttatacgcgtttgaagttaaaatttttttttccgtaaaaagcatttcgtcagtacgagtggcgggacccgccacgtggccgccacgtggacagcaactcgccaactccactggcgagtccaccaggtgctgccacgtgtccaactcgccaaccccactggcgagtccccttcaaaaacagaccccccctgaaaaaagtttcaaaacagcccccttttgggaattagtttctaaaagtaacctagtttgagaaatttgccacacagtaacaccggtctccattaagttcacaacatgtttgatgttgtctttggttgtcctaatattgtggcacaatcattttggttaaatagaaatgtttaaaatgtggcataatcaagtagacctaccgatctaatttttcaccagaaatatctccaccaggcctatggaaatgggaagaccaggttg

SEQ ID NO: 11737 - DNA, 1206 bp, Glycine max; identical to SEQ ID NO: 11736
  Gm_smallRNAprecursor_4570

SEQ ID NO: 11738 - DNA, 1207 bp, Glycine max
  Gm_smallRNAprecursor_4571
ccacattgaggcctaaggcatctaaaaaaattgtatcagtatttgatatgctcctgaccaaaaacaactttggtatgtccataccttagtaaaataaaatcctatcgcgaaaagatagaaaaatagcaaggaaattaatgagttacattacattagactatgttttaaaaattgtctcagattcaaaagtgtttagacagaacacagtaaggcaaatttctcaaactaggttacttttagaaactaattcccaaatgggggctgttttgaaactttttccaggggggtctgtttttgaaggggactcgccagtggggttggcgagttggacacgtggcagcgcctggtggactcgccagtggagttggcgagttgctgtccacgtggcggccacgtggcgggtcccgccactcatactgacgaaatgctttttacggaaaaaaaaattttaacttcaaacgcgtataacttttgataggaatgtccgtttgaggctcataatatgtcaaaatgctcgaaattgaatgaagaatcctttggcaactccccgaatttggtcaactcattttcccaaaaaatgcctctaagtagctcaaaaataggatttaagattaaaaaaatgggtggttgaatcttactcgcttttttgggaaaatgagttgaccaaatccccttcggggatttgccaaaggattcttcattcaatttcgagcattttgacatattatgagcctcaaacggacattcctatcaaaagttatacgcgtttgaagttaaaatttttttttccgtaaaaagcatttcgtcagtacgagtggcgggacccgccacgtggccgccacgtggacagcaactcgccaactccactggcgagtccaccaggtgctgccacgtgtccaactcgccaaccccactggcgagtccccttcaaaaacagaccccccctgaaaaaagtttcaaaacagcccccttttgggaattagtttctaaaagtaacctagtttgagaaatttgccacacagtaacaccggtctccattaagttcacaacatgtttgatgttgtctttggttgtcctaatattgtggcacaatcattttggttaaatagaaatgtttaaaatgtggcataatcaagtagacctaccgatctaatttttcaccagaaatatctccaccaggcctatggaaatgggaagaccaggttga

SEQ ID NO: 11739 - DNA, 1207 bp, Glycine max; identical to SEQ ID NO: 11738
  Gm_smallRNAprecursor_4572

SEQ ID NO: 11740 - DNA, 1060 bp, Glycine max
  Gm_smallRNAprecursor_4573
ctcaaaatattattcacataaaattgaattaaaataatgaccatattaatctatcataaaaagtataaattttaaaaataaaaaagtgataattataatttgtacatatattttttagaagacttctatttacctcgtcttttcaatcaataatgacaaattagaaaagaaatttagggtacctatttaaaaaagaggtaaatttttgaaaaactttctctgaatgaatatttttttccttttaatcattaattgacaaaaatggagaagtggtttggtgattgtatccctagcggttgacaaaaacctcatcgatcaaacaagtgttcaaatattgaataatggcaagacccattttgttatcttcattgatgttatacaaatgacagatgttaggtgcactcaacattttttaaaaaatgtcaaaactgttcctatgctttttttgcatttatgttgggtgtgcgtgagagtgatccgtaaatcgtatggattaagctgatccgtaaggttgatacggatcatgttaatccgtaaaaagcttaggatcaagttgatccgtaagacttttacggatcaagtaagtcttttacggatcaacttaaaaggcttacggattaaggatattttaatcttttttccttaagtgctgggtgtaccagcaataatgctgactgcacctagcatcagcctatacaaatttatgatcatcccttgacatgggtaatagcacatttgaatttggacttgcttggaaaattctttataaattggttataggatttttttaaaaaaactaaaattaataatgtataagttagtttgtaaaaactcttatattaaattcttcaaaaacttattttttaatttatgcataaattattttaacttaaaaatgaatttattttttcctttttatttgtttattaataaatacttccttagaaatttatctaagcatatcctttatctaatccaatgacagtgcaaagacaacaataactaatataaatattatcgtggtccaaagtgagccaccaaagtccagcagaaagttctt

SEQ ID NO: 11741 - DNA, 1051 bp, Glycine max
  Gm_smallRNAprecursor_4574
ggaaacaagaagagaaggtaactcttctgaacttatcttttactcttaacgtcttgcctcatatttctttattttttcagagtcaaaagaaagatgatagcattgacactaccacgacttcaaaacgctcgaagcatgcggtcgtcgaattagacgaagagaaagatgcaagttttatttctaatgtcaatattatagctttctttcaagtctatattctgacaattctttaccctcgtaatgcaagaagaagaggaaagacctcttataagaaaaagaaagttacctgcgacttcgaccaagtctgctgaacaaacagaggcaggcaatttccaggctcaaatgcctaagaagaaaaagaaaatgaagcaggtcgagcctgaaccttctgtggctgttgagggtggtgagccaatcaagaagaaaaagaaaaagaccaagccttcaaaagaacaaggtgacaatcaacctgttgacgtccaaccaccttcgaccgatattgacggcactgaagtagaggctactccttctattgctgagatgggcaaccctgtcgatcaaccggactcaccacaagaacaacctgccgtcgaggtattatcctcttaatgtgttttaaatcatagcttatacgaaactatttgttaacctttttccatgataattcgaatcaggtacaacaaaatgtttctgtagaagaaataccctcacatgctcgaacatctcccgctcctgagacggatgcagtgaatgttgaggaacagggtgaaggtcaaggcattggatccagcagtcctcatggatcgagtcagaaaagttcatccgaagaaaactttttcgatgaagaggccataaaagaggctgaagctggaggttcggacatttacccggcgtcttcaacatctaagctttccgctagcatagggatcgcagaagatacattcatccaaatgcaagacgaagaccctgctgcagcccttcgactcctgctgaacacaagtcaagccaacacctcaagtgaaaaggttcctggtgcttcatcctcatctga

SEQ ID NO: 11742 - DNA, 1038 bp, Glycine max
  Gm_smallRNAprecursor_4575
ttggttataaccagaataaccatctaacatgcttaaaaattcgaagccagctgccgaatctaccaacatttccgctactggcatagcatattcatctaggtgtagcattatttaaatccctaaaatctatgcatactctaagagttccattctttttaatgacagggactatatttgctaaccattcgacatacctggcagatctgatgaatttacaccttagcagcctttcgatctcttccttaattttggacatgatttctggtgcgaatcttcttggtagttgttttactggtctttttccctccttaatcggtaatttcatttcgaccatttctctgcttaacccaggcatttcgtggtaatcccaagcaaaacagtctttaaattctctaagaagaagcaccagtttttcttttagacttgaggtgatattggcactgatataggttggcctttttatcgagccatctccaatgtcgatttcctccaaaggatcttgagcctgcatctttggcacctcacttatgggatttttctcaaaacccagcggctcatcatcataaatacaatcaagtcttcgatcctttgtttctttgttttcgtgatcttcgatcttggcttcaactgccatattttgttgagattcagcctcaaaggccgtatttagtctattttcggccatataagccgtaattctggcccatgcagtggcctcagtcatattaatcttcatatatattccacccagttggtggaatgactccatcttcagagggaacagcatcaatttcctccctctcccatataaacccataggtaggatggagtttgacagagtggataacattgtcacttgattcgacaacagcctccttgtcaccacaaggtgctatgttagccaactttttgtcaaaggttcgtgcagtaacattatcaacctctgacttatagaagctttgatctgcctctatattttcaacaatcccatcctccctccagataatgagtttctggtggagggtagatggcacagcc

SEQ ID NO: 11743 - DNA, 1104 bp, Glycine max
  Gm_smallRNAprecursor_4576
ttgtttcagttttcatcgatctagagtttctaaaagcacgattttttgctgttctttctggtcaatttttcttttcatagggatattggatttccttctctttttttttcttttggttctcgaggaatgagttcctctgggtagatagattcctttcctaaagtggcctcgtgtacaccaaaaccaaacataaatttgcacataaaatctctattttccttccactttcttctctgtttgattttttattttttattttttactcttcccttaatcagtcttatgtttcatgatattcccctttttcagtttctccttggacaattttccgttagatttgccttttctttgtgtatcttgtgccatatattgagccataataagtacttttttttatgagagtggacaatatgctacatatatagtttctatatatgttactttgtgtttaggagctatagttgcatggacagatagattaacagtcgttatttgcggatgtagcatcatcaagattcacatgcaaacgcaggtggtgggtgggactgtgatgcaatctaagtgctactgtgccaaccaaagccataggtcttttggaagtgagaatcttgatgatgctgcatcagccataaacgacttcaactttaaaaagttggataaggactattctaacctcaacaagtgggcaagaaaaaaatataaaaaagaattgaaaaaccaaaaaaactgttgttgggggatacacacatgacacagccaaaaccttcagacatgatctgatctgtgcatttaaaccaagagaggtgacctttccaactttggcttttgttggtgtcaggtgggtttttgtgtttgtgttttgccctttgttttttcagtttatggtgtactaattttttattggtacaatattaatggatataggcatggccttgcagtgtttctgtttctgcttctgttctgtctttttatatatatatatatatatatatatatatatatatatatatatatatatatatatatatataccattgttgttatttactattattattactagctagctatgcacattaattagctcttcaggcgttttgcaga

SEQ ID NO: 11744 - DNA, 1131 bp, Glycine max
  Gm_smallRNAprecursor_4577
atatatatatatatatatatatatatatatatatatatatatatatatatactcattgaaattgaaaaaaacaaaggattgcattcaaataaactaaaaaagtttcatgagttcatacaataatcaagtaccaacaccaaataaactcattaaagagttcaaaataagaaaatgataaaaacataatgcaaagtgcaaagtgaaggttgaggctctaatcatcttctccaatcccaacataatcatcttcgttgttatcatatggtaatggagcatctccctttccctcttccccatcagacgcctcaaaattgaccatgatttcttcttcttcagattcaacatcaatattctcctcaacatctagatcctcatcattttcttggactgctttttgcttccttgatgaagatccaacaaccattgcctgttttttaaaactttgggcagcagcaacacttgttttttgctttttccgcctagtatacatcctacactctccaacccccgaagcctgatacacagttgcccaatttagagcatcatcatcttcaaataccaaatcatttccagcatcattatcatcatcttgatccatctctcccacgagccattcattgcatgcatccatatcattaagagaaattggatcaatttcatctcttgcattatatctttgcttcaattgttggttgtatttgacaaacaccaaatcatgcaacctcttgtgctaaagcctatttctttttttggaatgaatatacaacataacaaataaatgttgatttcaatctcaaatatactccaactaaaacttgatcatcaaaattaaataaaattaaaaagtatagttagagttttgtcacaattacttgctcaaacacactccaatttctttcacatcttgaagcactgcaagtcaaactcaaaatcttaatagctagcttctgcaaatttggagtttgtgacccaaacattcgccaccaatatgctgcaataccaattaccaaccaagatcataacttagaattctgaattataacactaatacataaaaaaatagtatgataaaagtttcttactaggagaatgggttttcctttgagccattgcaaagtcggaaccaaagtg

SEQ ID NO: 11745 - DNA, 1033 bp, Glycine max
  Gm_smallRNAprecursor_4578
aaagaggctttcaatggagacaaaccaacatggatcttgatgggttgtagaagaagaaagttgaaattggaatgattcatagaaagataaatttgtcattatactcttctattattagtttaattattttttgtacattctataattatttcagacacctagacacttatacgtagtattgaataatgttaaagataatatttcattacttgttttgacttgacatgttattagtataaaaaaagataaaattgcattttttttgttctctaatttgttttcaattttgattttggtcttcttttaaaattattgaggaattttatcttcctattttattcaatcagacaatcttggtcctccaatccaaaattggaagttaattgttacaaaagaatattgattgttacgtgtcacattcttattggatgatgagtgtcaagtatcatgttctgattgaccattgataacaacaatgcatttcatcttccatggattccacatccaatcagaacatgacacatgacagttatcatccaataagaacgtgacacatgacagtcaacattcatgtgtaacagtcaacgtccaattctagattgatggatcaaaattgcatggtggaataaaataagaggacaaaattcgtaaagggatcaaaatcgaaattgaagacaaattgggggaccaaaaatacaattttgcctaaaatattttttgaaatacaacataattttaaatcaacttttaagaatggattttttaatttttatttaaaaattgacaattttaattttaattttcaaactgaatcatgattaaaaaaaacaactacctcttcatctattccaaatttcaagttttaaaattttattttaaaaaaattaattttaagactgcatgttgataattgtggaagtgagtaaccatcattttcattaaatgaaaaatatttttttttaaaaaaatagtaaatttaaagtattgaagtctttttaaaattatgataaattttagaataaatttagaaaaa

SEQ ID NO: 11746 - DNA, 1033 bp, Glycine max
  Gm_smallRNAprecursor_4579
aaaagagtatgacaaaatctcaagggtttgggtgagattgtttgatagatgttttataaagtctaataaactctatcgaaatttgtatatttttcaatatcaaaagactttttatagttataaaaaatcataattgaataccaccgaattttgttgtcttccataaaaaatcttaaaagtcttaattgaataccacaagacttatttatacttaaaaaatcttgattgaataccataagatttttttaggcaattacatttttggtcctccagtttatctctagtttcgggtttggtctctcagtaatttaatttacgaattgggtcctcctattttataaaatcgtgcaatgttggttcctcaggccataattggacgttgatcgttagcaagtgatgttgactttcacgtgtcacattcttattggatgatgactgccacatgtcatgttctgattggtcaatgaaaacaacaatgcatttcatctttcatggaattgacatccaatcagaacatgacacgtgacagtcatcatccaataagaacgtgacacgtgacaatcaacatcacttgctaatggttaacgtccaattgtgacttgggggaccaatattgcacgattttacaaaatagaaggacccaattcgtgaattaaattactaggggaccaaatccgaaactggagataaattaggagaccaaaaatgtaattttgtcattttttttataaaaagaagtcttttaaaatcctaatccaatacacttattgattgaataccacatgacttttttttattaaaaaaatgttttaacatcatttgaaatcctaatgcaatacacctccctaaataagtcttctgatattcaattaagacttttaagattttttaaggaagacaataaaatccggtagtattcaattatgatttttttataacttataaaaagtcttttgatattaaaaaatatacaaatttcaatgaattgctttttaagaaggattttgatggattttattggacattttagtat

SEQ ID NO: 11747 - DNA, 1166 bp, Glycine max
  Gm_smallRNAprecursor_4580
attttactgttttttttcttatatctaaatataaataatataaggttatgccatatggacatggtcatttttacccctaacaatcttagaagtaaatatagaccatgtttttacaccatacccttataccatttatatttacatattagcaaaaagaaacagtaaaatcttaaggacaaatagttaagaaacttgttcattagctgcaaatatccttccctcctcaagtgcaaacttcttgtgtagccgctcttggtgctcagaaaatcctaaaaacaaatccctcttattactagctatcttgaattctttagttcctgaatatacaaccttcaaattgttgctcgttcccctctttgacaatgaggaggatcttcataggacttcatccaactgatgtttgtcggcagtttcatcatccaccacccttttcttctgtgccttctcacgttcattgttgttaaacccatatttatgccttcttcccttcatgtcttgtttgatcacaactttagctgaatctcccatcttcagcatagttgaatctcctgtcttattgtccaatgccacattttgatggcctgtatctcttttgttcgtatgttctactgcttcaatttcacattgcatagagcaatcagaattttcaagtcatcaccaaaggcttctgcatcagcgttgacactctccaccctctttggtttatgcttctgtgttttcttccatgcttcctccttataattctcagatttattggaggtcccactagaaggatcagcaccaatccgtgcctgttcctcctctaccagctcaatatctttcctttcacctttgcttttgaaaactacactgtaatttacaaaacaaaagttgaaaggaaagatattgacctgatagacgaggaagaagcacagattggtggggattgttctagtgcaacctcgaataaagctgggatttataacgaggaggcacggaagaaaacacagaagcataaaccaaagagggtggagagtgtcaatgctgatgcagaagcctttggtgatcactcagaaattctgattgctttatgcattctgaagctgaagcactagaacatacgaagaaaagagatacaggccatcaaagtgtggcattggacaatgagacaggagtttcaactatgc

SEQ ID NO: 11748 - DNA, 1046 bp, Glycine max
  Gm_smallRNAprecursor_4581
atgttattttagataggaagtaagaatgcagtatgattgaaatgaaaatataaacttgaaaacagatatcaagggcacaccggagaccggcttacaaaccccaggttttcataaacaaagaaaccgaagcggcggcagagccgcacaggatcggtgaagggagaagagagaaggatgaaaaatagaaatttattgaatctagaaagaagcgcttacaaaaatcttgtttcagagcacctctcttccgaaacctgaaaaaatggctaaatgaaagggtgcctcacaacatacttgaggactccttatatagccaaaaatctaagaccggtagttgccggtagttttgaccgggactatttgactgtttgttacaagacaagtagttttgaccgggactttaatggctacaggacaggtagtattgtccatcattaattacacattaattacaaacagacggttttgtgaccgaaattaaatttaatctaaacagataccaaaacaatcatcttcgttttggtaaaagggatcttcttcgtcttcttcagcagaacttgtttcttccttctttgaggatgaagcttcttcttcctgttgtaacatttgtagaacttccttcagatttttagctaagacctcctttgatgtcgatcctgctaaaaatgctgccagatgagacttttggttcaaaaacacagaagtctctggatcagccgctttgaggaattctggatgggatttgaaccatagttttacttgttctggatccgctttggatgagtcaaattgtgtccaccattttacaaatgcgtgtctttgtagtgatggatattggtttgtcttttcaatcttgctgtaacgatattgccatgagaatatccatgacagtgcaaagcttgaaaagtatttaagatctgctggaattcgtgattcctgcgaattgtattgtttcttaaattgggaaaatccttgttggaccgtttctgggaatatctctgggattggtccaaagaagtcccaccattgcaaaaaccaattgggaaaat

SEQ ID NO: 11749 - DNA, 1031 bp, Glycine max
  Gm_smallRNAprecursor_4582
acaagtagttttgaccgggactttaatggctacaggacaggtagtattgtccatcattaattacacattaattacaaacagacggttttgtgaccgaaattaaatttaatctaaacagataccaaaacaatcatcttcgttttggtaaaagggatcttcttcgtcttcttcagcagaacttgtttcttccttctttgaggatgaagcttcttcttcctgttgtaacatttgtagaacttccttcagatttttagctaagacctcctttgatgtcgatcctgctaaaaatgctgccagatgagacttttggttcaaaaacacagaagtctctggatcagccgctttgaggaattctggatgggatttgaaccatagttttacttgttctggatccgctttggatgagtcaaattgtgtccaccattttacaaatgcgtgtctttgtagtgatggatattggtttgtcttttcaatcttgctgtaacgatattgccatgagaatatccatgacagtgcaaagcttgaaaagtatttaagatctgctggaattcgtgattcctgcgaattgtattgtttcttaaattgggaaaatccttgttggaccgtttctgggaatatctctgggattggtccaaagaagtcccaccattgcaaaaaccaattgggaaaattgtaaattgtgttggtcttgaaatatatcagccatgaatgcttgaagcgggtattttggtgccaaaacaccttagtccaagcatcaacgtaatcccaataggtataacctaccggatcaaatggaactgaaaatctctttcctttgttcaagtccgaaccaaagtgtcttggttgaagaacttttagtatttggatggttgagtgggtgtttaaggtttggtcttttggatctttgaaatgtttgatagatactgagtttgaatctaccaaaatcaattcataaaaagttcttgtcttcaggatggtggttggtttgtagtgaaatcctggtgggaaagccttggccgtcgccttgaagg

SEQ ID NO: 11750 - DNA, 1031 bp, Glycine max; identical to SEQ ID NO: 11749
  Gm_smallRNAprecursor_4583

SEQ ID NO: 11751 - DNA, 1114 bp, Glycine max
  Gm_smallRNAprecursor_4584
ggactttaatggctacaggacaggtagtattgtccatcattaattacacattaattacaaacagacggttttgtgaccgaaattaaatttaatctaaacagataccaaaacaatcatcttcgttttggtaaaagggatcttcttcgtcttcttcagcagaacttgtttcttccttctttgaggatgaagcttcttcttcctgttgtaacatttgtagaacttccttcagatttttagctaagacctcctttgatgtcgatcctgctaaaaatgctgccagatgagacttttggttcaaaaacacagaagtctctggatcagccgctttgaggaattctggatgggatttgaaccatagttttacttgttctggatccgctttggatgagtcaaattgtgtccaccattttacaaatgcgtgtctttgtagtgatggatattggtttgtcttttcaatcttgctgtaacgatattgccatgagaatatccatgacagtgcaaagcttgaaaagtatttaagatctgctggaattcgtgattcctgcgaattgtattgtttcttaaattgggaaaatccttgttggaccgtttctgggaatatctctgggattggtccaaagaagtcccaccattgcaaaaaccaattgggaaaattgtaaattgtgttggtcttgaaatatatcagccatgaatgcttgaagcgggtattttggtgccaaaacaccttagtccaagcatcaacgtaatcccaataggtataacctaccggatcaaatggaactgaaaatctctttcctttgttcaagtccgaaccaaagtgtcttggttgaagaacttttagtatttggatggttgagtgggtgtttaaggtttggtcttttggatctttgaaatgtttgatagatactgagtttgaatctaccaaaatcaattcataaaaagttcttgtcttcaggatggtggttggtttgtagtgaaatcctggtgggaaagccttggccgtcgccttgaagggatttttgtcccaaaattcaggttccatctgcaaaacagttaacaatttatttttataaatataattgttagtttgtttggtaggtggtgtttgagcttt

SEQ ID NO: 11752 - DNA, 1146 bp, Glycine max
  Gm_smallRNAprecursor_4585
tacaggacaggtagtattgtccatcattaattacacattaattacaaacagacggttttgtgaccgaaattaaatttaatctaaacagataccaaaacaatcatcttcgttttggtaaaagggatcttcttcgtcttcttcagcagaacttgtttcttccttctttgaggatgaagcttcttcttcctgttgtaacatttgtagaacttccttcagatttttagctaagacctcctttgatgtcgatcctgctaaaaatgctgccagatgagacttttggttcaaaaacacagaagtctctggatcagccgctttgaggaattctggatgggatttgaaccatagttttacttgttctggatccgctttggatgagtcaaattgtgtccaccattttacaaatgcgtgtctttgtagtgatggatattggtttgtcttttcaatcttgctgtaacgatattgccatgagaatatccatgacagtgcaaagcttgaaaagtatttaagatctgctggaattcgtgattcctgcgaattgtattgtttcttaaattgggaaaatccttgttggaccgtttctgggaatatctctgggattggtccaaagaagtcccaccattgcaaaaaccaattgggaaaattgtaaattgtgttggtcttgaaatatatcagccatgaatgcttgaagcgggtattttggtgccaaaacaccttagtccaagcatcaacgtaatcccaataggtataacctaccggatcaaatggaactgaaaatctctttcctttgttcaagtccgaaccaaagtgtcttggttgaagaacttttagtatttggatggttgagtgggtgtttaaggtttggtcttttggatctttgaaatgtttgatagatactgagtttgaatctaccaaaatcaattcataaaaagttcttgtcttcaggatggtggttggtttgtagtgaaatcctggtgggaaagccttggccgtcgccttgaagggatttttgtcccaaaattcaggttccatctgcaaaacagttaacaatttatttttataaatataattgttagtttgtttggtaggtggtgtttgagctttggctaaaggtagttttcctttagtattggtggctattttggtcat

SEQ ID NO: 11753 - DNA, 1146 bp, Glycine max; identical to SEQ ID NO: 11752
  Gm_smallRNAprecursor_4586

SEQ ID NO: 11754 - DNA, 1147 bp, Glycine max
  Gm_smallRNAprecursor_4587
tacaggacaggtagtattgtccatcattaattacacattaattacaaacagacggttttgtgaccgaaattaaatttaatctaaacagataccaaaacaatcatcttcgttttggtaaaagggatcttcttcgtcttcttcagcagaacttgtttcttccttctttgaggatgaagcttcttcttcctgttgtaacatttgtagaacttccttcagatttttagctaagacctcctttgatgtcgatcctgctaaaaatgctgccagatgagacttttggttcaaaaacacagaagtctctggatcagccgctttgaggaattctggatgggatttgaaccatagttttacttgttctggatccgctttggatgagtcaaattgtgtccaccattttacaaatgcgtgtctttgtagtgatggatattggtttgtcttttcaatcttgctgtaacgatattgccatgagaatatccatgacagtgcaaagcttgaaaagtatttaagatctgctggaattcgtgattcctgcgaattgtattgtttcttaaattgggaaaatccttgttggaccgtttctgggaatatctctgggattggtccaaagaagtcccaccattgcaaaaaccaattgggaaaattgtaaattgtgttggtcttgaaatatatcagccatgaatgcttgaagcgggtattttggtgccaaaacaccttagtccaagcatcaacgtaatcccaataggtataacctaccggatcaaatggaactgaaaatctctttcctttgttcaagtccgaaccaaagtgtcttggttgaagaacttttagtatttggatggttgagtgggtgtttaaggtttggtcttttggatctttgaaatgtttgatagatactgagtttgaatctaccaaaatcaattcataaaaagttcttgtcttcaggatggtggttggtttgtagtgaaatcctggtgggaaagccttggccgtcgccttgaagggatttttgtcccaaaattcaggttccatctgcaaaacagttaacaatttatttttataaatataattgttagtttgtttggtaggtggtgtttgagctttggctaaaggtagttttcctttagtattggtggctattttggtcatt

SEQ ID NO: 11755 - DNA, 1147 bp, Glycine max; identical to SEQ ID NO: 11754
  Gm_smallRNAprecursor_4588

SEQ ID NO: 11756 - DNA, 1247 bp, Glycine max
  Gm_smallRNAprecursor_4589
tacaggacaggtagtattgtccatcattaattacacattaattacaaacagacggttttgtgaccgaaattaaatttaatctaaacagataccaaaacaatcatcttcgttttggtaaaagggatcttcttcgtcttcttcagcagaacttgtttcttccttctttgaggatgaagcttcttcttcctgttgtaacatttgtagaacttccttcagatttttagctaagacctcctttgatgtcgatcctgctaaaaatgctgccagatgagacttttggttcaaaaacacagaagtctctggatcagccgctttgaggaattctggatgggatttgaaccatagttttacttgttctggatccgctttggatgagtcaaattgtgtccaccattttacaaatgcgtgtctttgtagtgatggatattggtttgtcttttcaatcttgctgtaacgatattgccatgagaatatccatgacagtgcaaagcttgaaaagtatttaagatctgctggaattcgtgattcctgcgaattgtattgtttcttaaattgggaaaatccttgttggaccgtttctgggaatatctctgggattggtccaaagaagtcccaccattgcaaaaaccaattgggaaaattgtaaattgtgttggtcttgaaatatatcagccatgaatgcttgaagcgggtattttggtgccaaaacaccttagtccaagcatcaacgtaatcccaataggtataacctaccggatcaaatggaactgaaaatctctttcctttgttcaagtccgaaccaaagtgtcttggttgaagaacttttagtatttggatggttgagtgggtgtttaaggtttggtcttttggatctttgaaatgtttgatagatactgagtttgaatctaccaaaatcaattcataaaaagttcttgtcttcaggatggtggttggtttgtagtgaaatcctggtgggaaagccttggccgtcgccttgaagggatttttgtcccaaaattcaggttccatctgcaaaacagttaacaatttatttttataaatataattgttagtttgtttggtaggtggtgtttgagctttggctaaaggtagttttcctttagtattggtggctattttggtcattgacgcattttggatcattgtttgtaaatttgattcagattcatcatcagattctgaggcaatgtctgcccaagattttttgattatttttggaaatttgg

SEQ ID NO: 11757 - DNA, 1247 bp, Glycine max; identical to SEQ ID NO: 11756
  Gm_smallRNAprecursor_4590

SEQ ID NO: 11758 - DNA, 1072 bp, Glycine max
  Gm_smallRNAprecursor_4591
gcttcttcttcctgttgtaacatttgtagaacttccttcagatttttagctaagacctcctttgatgtcgatcctgctaaaaatgctgccagatgagacttttggttcaaaaacacagaagtctctggatcagccgctttgaggaattctggatgggatttgaaccatagttttacttgttctggatccgctttggatgagtcaaattgtgtccaccattttacaaatgcgtgtctttgtagtgatggatattggtttgtcttttcaatcttgctgtaacgatattgccatgagaatatccatgacagtgcaaagcttgaaaagtatttaagatctgctggaattcgtgattcctgcgaattgtattgtttcttaaattgggaaaatccttgttggaccgtttctgggaatatctctgggattggtccaaagaagtcccaccattgcaaaaaccaattgggaaaattgtaaattgtgttggtcttgaaatatatcagccatgaatgcttgaagcgggtattttggtgccaaaacaccttagtccaagcatcaacgtaatcccaataggtataacctaccggatcaaatggaactgaaaatctctttcctttgttcaagtccgaaccaaagtgtcttggttgaagaacttttagtatttggatggttgagtgggtgtttaaggtttggtcttttggatctttgaaatgtttgatagatactgagtttgaatctaccaaaatcaattcataaaaagttcttgtcttcaggatggtggttggtttgtagtgaaatcctggtgggaaagccttggccgtcgccttgaagggatttttgtcccaaaattcaggttccatctgcaaaacagttaacaatttatttttataaatataattgttagtttgtttggtaggtggtgtttgagctttggctaaaggtagttttcctttagtattggtggctattttggtcattgacgcattttggatcattgtttgtaaatttgattcagattcatcatcagattctgaggcaatgtctgcccaagattttttgattatttttggaaatttgg

SEQ ID NO: 11759 - DNA, 1124 bp, Glycine max
  Gm_smallRNAprecursor_4592
ccttcagatttttagctaagacctcctttgatgtcgatcctgctaaaaatgctgccagatgagacttttggttcaaaaacacagaagtctctggatcagccgctttgaggaattctggatgggatttgaaccatagttttacttgttctggatccgctttggatgagtcaaattgtgtccaccattttacaaatgcgtgtctttgtagtgatggatattggtttgtcttttcaatcttgctgtaacgatattgccatgagaatatccatgacagtgcaaagcttgaaaagtatttaagatctgctggaattcgtgattcctgcgaattgtattgtttcttaaattgggaaaatccttgttggaccgtttctgggaatatctctgggattggtccaaagaagtcccaccattgcaaaaaccaattgggaaaattgtaaattgtgttggtcttgaaatatatcagccatgaatgcttgaagcgggtattttggtgccaaaacaccttagtccaagcatcaacgtaatcccaataggtataacctaccggatcaaatggaactgaaaatctctttcctttgttcaagtccgaaccaaagtgtcttggttgaagaacttttagtatttggatggttgagtgggtgtttaaggtttggtcttttggatctttgaaatgtttgatagatactgagtttgaatctaccaaaatcaattcataaaaagttcttgtcttcaggatggtggttggtttgtagtgaaatcctggtgggaaagccttggccgtcgccttgaagggatttttgtcccaaaattcaggttccatctgcaaaacagttaacaatttatttttataaatataattgttagtttgtttggtaggtggtgtttgagctttggctaaaggtagttttcctttagtattggtggctattttggtcattgacgcattttggatcattgtttgtaaatttgattcagattcatcatcagattctgaggcaatgtctgcccaagattttttgattatttttggaaatttggtcagacccatgtcttgaagggcctgaagggtttcaattggccaagcatagtcggccgatgtttgtttggcggttgccggtttggga

SEQ ID NO: 11760 - DNA, 1130 bp, Glycine max
  Gm_smallRNAprecursor_4593
ccttcagatttttagctaagacctcctttgatgtcgatcctgctaaaaatgctgccagatgagacttttggttcaaaaacacagaagtctctggatcagccgctttgaggaattctggatgggatttgaaccatagttttacttgttctggatccgctttggatgagtcaaattgtgtccaccattttacaaatgcgtgtctttgtagtgatggatattggtttgtcttttcaatcttgctgtaacgatattgccatgagaatatccatgacagtgcaaagcttgaaaagtatttaagatctgctggaattcgtgattcctgcgaattgtattgtttcttaaattgggaaaatccttgttggaccgtttctgggaatatctctgggattggtccaaagaagtcccaccattgcaaaaaccaattgggaaaattgtaaattgtgttggtcttgaaatatatcagccatgaatgcttgaagcgggtattttggtgccaaaacaccttagtccaagcatcaacgtaatcccaataggtataacctaccggatcaaatggaactgaaaatctctttcctttgttcaagtccgaaccaaagtgtcttggttgaagaacttttagtatttggatggttgagtgggtgtttaaggtttggtcttttggatctttgaaatgtttgatagatactgagtttgaatctaccaaaatcaattcataaaaagttcttgtcttcaggatggtggttggtttgtagtgaaatcctggtgggaaagccttggccgtcgccttgaagggatttttgtcccaaaattcaggttccatctgcaaaacagttaacaatttatttttataaatataattgttagtttgtttggtaggtggtgtttgagctttggctaaaggtagttttcctttagtattggtggctattttggtcattgacgcattttggatcattgtttgtaaatttgattcagattcatcatcagattctgaggcaatgtctgcccaagattttttgattatttttggaaatttggtcagacccatgtcttgaagggcctgaagggtttcaattggccaagcatagtcggccgatgtttgtttggcggttgccggtttgggagattcc

SEQ ID NO: 11761 - DNA, 1087 bp, Glycine max
  Gm_smallRNAprecursor_4594
tcctgctaaaaatgctgccagatgagacttttggttcaaaaacacagaagtctctggatcagccgctttgaggaattctggatgggatttgaaccatagttttacttgttctggatccgctttggatgagtcaaattgtgtccaccattttacaaatgcgtgtctttgtagtgatggatattggtttgtcttttcaatcttgctgtaacgatattgccatgagaatatccatgacagtgcaaagcttgaaaagtatttaagatctgctggaattcgtgattcctgcgaattgtattgtttcttaaattgggaaaatccttgttggaccgtttctgggaatatctctgggattggtccaaagaagtcccaccattgcaaaaaccaattgggaaaattgtaaattgtgttggtcttgaaatatatcagccatgaatgcttgaagcgggtattttggtgccaaaacaccttagtccaagcatcaacgtaatcccaataggtataacctaccggatcaaatggaactgaaaatctctttcctttgttcaagtccgaaccaaagtgtcttggttgaagaacttttagtatttggatggttgagtgggtgtttaaggtttggtcttttggatctttgaaatgtttgatagatactgagtttgaatctaccaaaatcaattcataaaaagttcttgtcttcaggatggtggttggtttgtagtgaaatcctggtgggaaagccttggccgtcgccttgaagggatttttgtcccaaaattcaggttccatctgcaaaacagttaacaatttatttttataaatataattgttagtttgtttggtaggtggtgtttgagctttggctaaaggtagttttcctttagtattggtggctattttggtcattgacgcattttggatcattgtttgtaaatttgattcagattcatcatcagattctgaggcaatgtctgcccaagattttttgattatttttggaaatttggtcagacccatgtcttgaagggcctgaagggtttcaattggccaagcatagtcggccgatgtttgtttggcggttgccggtttggga

SEQ ID NO: 11762 - DNA, 1174 bp, Glycine max
  Gm_smallRNAprecursor_4595
cgggtattttggtgccaaaacaccttagtccaagcatcaacgtaatcccaataggtataacctaccggatcaaatggaactgaaaatctctttcctttgttcaagtccgaaccaaagtgtcttggttgaagaacttttagtatttggatggttgagtgggtgtttaaggtttggtcttttggatctttgaaatgtttgatagatactgagtttgaatctaccaaaatcaattcataaaaagttcttgtcttcaggatggtggttggtttgtagtgaaatcctggtgggaaagccttggccgtcgccttgaagggatttttgtcccaaaattcaggttccatctgcaaaacagttaacaatttatttttataaatataattgttagtttgtttggtaggtggtgtttgagctttggctaaaggtagttttcctttagtattggtggctattttggtcattgacgcattttggatcattgtttgtaaatttgattcagattcatcatcagattctgaggcaatgtctgcccaagattttttgattatttttggaaatttggtcagacccatgtcttgaagggcctgaagggtttcaattggccaagcatagtcggccgatgtttgtttggcggttgccggtttgggagattcctgagtggatggctcaggtttgattgaggcaatctgggttgatgacccttctaaattggttttctgggtagatgacccagcctgggttggtgacccagaagaggtagatgatttcttcatggttggttctggaagagccagcctggctcctttgcctgtactccttcctccccgtagggagattcccgatgccttaggaggcattaccacttttctgtaagaattcacgggtaaggtagtcaggtagtgaatttgaggtgcccttgatgtattctatgtcaaaatcaaagacacttaaaattgcttgccatcgtgcaaaaatttgttttgaggcaaggtttttaacatctttttgtaaaatatctttggctgatttacaatcaaccctgattaaaaatttttggtttaataaatccgattgaaatttggaaatgcacaaaacaattgctaaaacttcttttttaacagttgaatattttaattgtgcaggattccaatgttttgatgtatatgcaatgacatga

SEQ ID NO: 11763 - DNA, 1173 bp, Glycine max
  Gm_smallRNAprecursor_4596
gggtattttggtgccaaaacaccttagtccaagcatcaacgtaatcccaataggtataacctaccggatcaaatggaactgaaaatctctttcctttgttcaagtccgaaccaaagtgtcttggttgaagaacttttagtatttggatggttgagtgggtgtttaaggtttggtcttttggatctttgaaatgtttgatagatactgagtttgaatctaccaaaatcaattcataaaaagttcttgtcttcaggatggtggttggtttgtagtgaaatcctggtgggaaagccttggccgtcgccttgaagggatttttgtcccaaaattcaggttccatctgcaaaacagttaacaatttatttttataaatataattgttagtttgtttggtaggtggtgtttgagctttggctaaaggtagttttcctttagtattggtggctattttggtcattgacgcattttggatcattgtttgtaaatttgattcagattcatcatcagattctgaggcaatgtctgcccaagattttttgattatttttggaaatttggtcagacccatgtcttgaagggcctgaagggtttcaattggccaagcatagtcggccgatgtttgtttggcggttgccggtttgggagattcctgagtggatggctcaggtttgattgaggcaatctgggttgatgacccttctaaattggttttctgggtagatgacccagcctgggttggtgacccagaagaggtagatgatttcttcatggttggttctggaagagccagcctggctcctttgcctgtactccttcctccccgtagggagattcccgatgccttaggaggcattaccacttttctgtaagaattcacgggtaaggtagtcaggtagtgaatttgaggtgcccttgatgtattctatgtcaaaatcaaagacacttaaaattgcttgccatcgtgcaaaaatttgttttgaggcaaggtttttaacatctttttgtaaaatatctttggctgatttacaatcaaccctgattaaaaatttttggtttaataaatccgattgaaatttggaaatgcacaaaacaattgctaaaacttcttttttaacagttgaatattttaattgtgcaggattccaatgttttgatgtatatgcaatgacatga

SEQ ID NO: 11764 - DNA, 1176 bp, Glycine max
  Gm_smallRNAprecursor_4597
gggtattttggtgccaaaacaccttagtccaagcatcaacgtaatcccaataggtataacctaccggatcaaatggaactgaaaatctctttcctttgttcaagtccgaaccaaagtgtcttggttgaagaacttttagtatttggatggttgagtgggtgtttaaggtttggtcttttggatctttgaaatgtttgatagatactgagtttgaatctaccaaaatcaattcataaaaagttcttgtcttcaggatggtggttggtttgtagtgaaatcctggtgggaaagccttggccgtcgccttgaagggatttttgtcccaaaattcaggttccatctgcaaaacagttaacaatttatttttataaatataattgttagtttgtttggtaggtggtgtttgagctttggctaaaggtagttttcctttagtattggtggctattttggtcattgacgcattttggatcattgtttgtaaatttgattcagattcatcatcagattctgaggcaatgtctgcccaagattttttgattatttttggaaatttggtcagacccatgtcttgaagggcctgaagggtttcaattggccaagcatagtcggccgatgtttgtttggcggttgccggtttgggagattcctgagtggatggctcaggtttgattgaggcaatctgggttgatgacccttctaaattggttttctgggtagatgacccagcctgggttggtgacccagaagaggtagatgatttcttcatggttggttctggaagagccagcctggctcctttgcctgtactccttcctccccgtagggagattcccgatgccttaggaggcattaccacttttctgtaagaattcacgggtaaggtagtcaggtagtgaatttgaggtgcccttgatgtattctatgtcaaaatcaaagacacttaaaattgcttgccatcgtgcaaaaatttgttttgaggcaaggtttttaacatctttttgtaaaatatctttggctgatttacaatcaaccctgattaaaaatttttggtttaataaatccgattgaaatttggaaatgcacaaaacaattgctaaaacttcttttttaacagttgaatattttaattgtgcaggattccaatgttttgatgtatatgcaatgacatgatct

SEQ ID NO: 11765 - DNA, 1129 bp, Glycine max
  Gm_smallRNAprecursor_4598
ctgcaaaacagttaacaatttatttttataaatataattgttagtttgtttggtaggtggtgtttgagctttggctaaaggtagttttcctttagtattggtggctattttggtcattgacgcattttggatcattgtttgtaaatttgattcagattcatcatcagattctgaggcaatgtctgcccaagattttttgattatttttggaaatttggtcagacccatgtcttgaagggcctgaagggtttcaattggccaagcatagtcggccgatgtttgtttggcggttgccggtttgggagattcctgagtggatggctcaggtttgattgaggcaatctgggttgatgacccttctaaattggttttctgggtagatgacccagcctgggttggtgacccagaagaggtagatgatttcttcatggttggttctggaagagccagcctggctcctttgcctgtactccttcctccccgtagggagattcccgatgccttaggaggcattaccacttttctgtaagaattcacgggtaaggtagtcaggtagtgaatttgaggtgcccttgatgtattctatgtcaaaatcaaagacacttaaaattgcttgccatcgtgcaaaaatttgttttgaggcaaggtttttaacatctttttgtaaaatatctttggctgatttacaatcaaccctgattaaaaatttttggtttaataaatccgattgaaatttggaaatgcacaaaacaattgctaaaacttcttttttaacagttgaatattttaattgtgcaggattccaatgttttgatgtatatgcaatgacatgatcttggccatggactctttgtttgaggatgccaccataacctatgtctgaagcatcagtttcgacaattttaaatgcctgtggaataggaagatacagacatttaatggattggactttgactttgatttctttaaccgtttgtgtatggaggtcagaccaaggaggcggatttttcttcagcctatcatgtaatggcttgacaatattatttaaataggggacaaattctcctacgtaatttagacaacctagaaatctttgtaactgggttttgtctaagatttggttggggaa

SEQ ID NO: 11766 - DNA, 1115 bp, Glycine max
  Gm_smallRNAprecursor_4599
acaatttatttttataaatataattgttagtttgtttggtaggtggtgtttgagctttggctaaaggtagttttcctttagtattggtggctattttggtcattgacgcattttggatcattgtttgtaaatttgattcagattcatcatcagattctgaggcaatgtctgcccaagattttttgattatttttggaaatttggtcagacccatgtcttgaagggcctgaagggtttcaattggccaagcatagtcggccgatgtttgtttggcggttgccggtttgggagattcctgagtggatggctcaggtttgattgaggcaatctgggttgatgacccttctaaattggttttctgggtagatgacccagcctgggttggtgacccagaagaggtagatgatttcttcatggttggttctggaagagccagcctggctcctttgcctgtactccttcctccccgtagggagattcccgatgccttaggaggcattaccacttttctgtaagaattcacgggtaaggtagtcaggtagtgaatttgaggtgcccttgatgtattctatgtcaaaatcaaagacacttaaaattgcttgccatcgtgcaaaaatttgttttgaggcaaggtttttaacatctttttgtaaaatatctttggctgatttacaatcaaccctgattaaaaatttttggtttaataaatccgattgaaatttggaaatgcacaaaacaattgctaaaacttcttttttaacagttgaatattttaattgtgcaggattccaatgttttgatgtatatgcaatgacatgatcttggccatggactctttgtttgaggatgccaccataacctatgtctgaagcatcagtttcgacaattttaaatgcctgtggaataggaagatacagacatttaatggattggactttgactttgatttctttaaccgtttgtgtatggaggtcagaccaaggaggcggatttttcttcagcctatcatgtaatggcttgacaatattatttaaataggggacaaattctcctacgtaatttagacaacctagaaatctttgtaactgggttttgtctaagatttggttggggaa

SEQ ID NO: 11767 - DNA, 1071 bp, Glycine max
  Gm_smallRNAprecursor_4600
taaattggttttctgggtagatgacccagcctgggttggtgacccagaagaggtagatgatttcttcatggttggttctggaagagccagcctggctcctttgcctgtactccttcctccccgtagggagattcccgatgccttaggaggcattaccacttttctgtaagaattcacgggtaaggtagtcaggtagtgaatttgaggtgcccttgatgtattctatgtcaaaatcaaagacacttaaaattgcttgccatcgtgcaaaaatttgttttgaggcaaggtttttaacatctttttgtaaaatatctttggctgatttacaatcaaccctgattaaaaatttttggtttaataaatccgattgaaatttggaaatgcacaaaacaattgctaaaacttcttttttaacagttgaatattttaattgtgcaggattccaatgttttgatgtatatgcaatgacatgatcttggccatggactctttgtttgaggatgccaccataacctatgtctgaagcatcagtttcgacaattttaaatgcctgtggaataggaagatacagacatttaatggattggactttgactttgatttctttaaccgtttgtgtatggaggtcagaccaaggaggcggatttttcttcagcctatcatgtaatggcttgacaatattatttaaataggggacaaattctcctacgtaatttagacaacctagaaatctttgtaactgggttttgtctaagatttggttggggaatttgctagcaaactctattgacctttcgattggaatgattgtaccttgatatatattgtgaccaaggaatcgaattcgagtttggaaaagattgatttttgatttggagactgccaaaccattttgtttgatgatatgtatgaaggtttggagatgtttgaaatgttggtcaatgttttgggaaaagattaaaacatcatctatgtagacaatgacaaattttgaatagggattaaaaatatcgttcataattttttgaaattctgaaggggcattcttcagtccgaatggcatcacgttcc

SEQ ID NO: 11768 - DNA, 1073 bp, Glycine max
  Gm_smallRNAprecursor_4601
taaattggttttctgggtagatgacccagcctgggttggtgacccagaagaggtagatgatttcttcatggttggttctggaagagccagcctggctcctttgcctgtactccttcctccccgtagggagattcccgatgccttaggaggcattaccacttttctgtaagaattcacgggtaaggtagtcaggtagtgaatttgaggtgcccttgatgtattctatgtcaaaatcaaagacacttaaaattgcttgccatcgtgcaaaaatttgttttgaggcaaggtttttaacatctttttgtaaaatatctttggctgatttacaatcaaccctgattaaaaatttttggtttaataaatccgattgaaatttggaaatgcacaaaacaattgctaaaacttcttttttaacagttgaatattttaattgtgcaggattccaatgttttgatgtatatgcaatgacatgatcttggccatggactctttgtttgaggatgccaccataacctatgtctgaagcatcagtttcgacaattttaaatgcctgtggaataggaagatacagacatttaatggattggactttgactttgatttctttaaccgtttgtgtatggaggtcagaccaaggaggcggatttttcttcagcctatcatgtaatggcttgacaatattatttaaataggggacaaattctcctacgtaatttagacaacctagaaatctttgtaactgggttttgtctaagatttggttggggaatttgctagcaaactctattgacctttcgattggaatgattgtaccttgatatatattgtgaccaaggaatcgaattcgagtttggaaaagattgatttttgatttggagactgccaaaccattttgtttgatgatatgtatgaaggtttggagatgtttgaaatgttggtcaatgttttgggaaaagattaaaacatcatctatgtagacaatgacaaattttgaatagggattaaaaatatcgttcataattttttgaaattctgaaggggcattcttcagtccgaatggcatcacgttccat

SEQ ID NO: 11769 - DNA, 1178 bp, Glycine max
  Gm_smallRNAprecursor_4602
tggttggttctggaagagccagcctggctcctttgcctgtactccttcctccccgtagggagattcccgatgccttaggaggcattaccacttttctgtaagaattcacgggtaaggtagtcaggtagtgaatttgaggtgcccttgatgtattctatgtcaaaatcaaagacacttaaaattgcttgccatcgtgcaaaaatttgttttgaggcaaggtttttaacatctttttgtaaaatatctttggctgatttacaatcaaccctgattaaaaatttttggtttaataaatccgattgaaatttggaaatgcacaaaacaattgctaaaacttcttttttaacagttgaatattttaattgtgcaggattccaatgttttgatgtatatgcaatgacatgatcttggccatggactctttgtttgaggatgccaccataacctatgtctgaagcatcagtttcgacaattttaaatgcctgtggaataggaagatacagacatttaatggattggactttgactttgatttctttaaccgtttgtgtatggaggtcagaccaaggaggcggatttttcttcagcctatcatgtaatggcttgacaatattatttaaataggggacaaattctcctacgtaatttagacaacctagaaatctttgtaactgggttttgtctaagatttggttggggaatttgctagcaaactctattgacctttcgattggaatgattgtaccttgatatatattgtgaccaaggaatcgaattcgagtttggaaaagattgatttttgatttggagactgccaaaccattttgtttgatgatatgtatgaaggtttggagatgtttgaaatgttggtcaatgttttgggaaaagattaaaacatcatctatgtagacaatgacaaattttgaatagggattaaaaatatcgttcataattttttgaaattctgaaggggcattcttcagtccgaatggcatcacgttccattcatattgcccgaaaggtacagtaaacgttgttttgtacctatctgattcttggatttggatttgccaaaatccagatttcatatcaaattttgaaaatatctttgcagaatttaatctgttaagcaaatcttttttgtttggaataggatatctaatccattgtaatgcttg

SEQ ID NO: 11770 - DNA, 1196 bp, Glycine max
  Gm_smallRNAprecursor_4603
aaggtttttaacatctttttgtaaaatatctttggctgatttacaatcaaccctgattaaaaatttttggtttaataaatccgattgaaatttggaaatgcacaaaacaattgctaaaacttcttttttaacagttgaatattttaattgtgcaggattccaatgttttgatgtatatgcaatgacatgatcttggccatggactctttgtttgaggatgccaccataacctatgtctgaagcatcagtttcgacaattttaaatgcctgtggaataggaagatacagacatttaatggattggactttgactttgatttctttaaccgtttgtgtatggaggtcagaccaaggaggcggatttttcttcagcctatcatgtaatggcttgacaatattatttaaataggggacaaattctcctacgtaatttagacaacctagaaatctttgtaactgggttttgtctaagatttggttggggaatttgctagcaaactctattgacctttcgattggaatgattgtaccttgatatatattgtgaccaaggaatcgaattcgagtttggaaaagattgatttttgatttggagactgccaaaccattttgtttgatgatatgtatgaaggtttggagatgtttgaaatgttggtcaatgttttgggaaaagattaaaacatcatctatgtagacaatgacaaattttgaatagggattaaaaatatcgttcataattttttgaaattctgaaggggcattcttcagtccgaatggcatcacgttccattcatattgcccgaaaggtacagtaaacgttgttttgtacctatctgattcttggatttggatttgccaaaatccagatttcatatcaaattttgaaaatatctttgcagaatttaatctgttaagcaaatcttttttgtttggaataggatatctaatccattgtaatgcttgatttaatggtttgtaatttatgactaagcggggtgttccacgctcaatctcagattgtttgttaacataaaaagccgcacaagaccatgggcttttgcttttccggattaggcctttatcaagcaaatcctcgatttccttttgacagtattgaagaagttcttcattcatttggattggtctggcttttgtgggaatttgtttttccctaaagtctttctcataagggagat

SEQ ID NO: 11771 - DNA, 1080 bp, Glycine max
  Gm_smallRNAprecursor_4604
caagcattcatggctgatatatttcaagaccaacacaatttacaattttcccaattggtttttgcaatggtgggacttctttggaccaatcccagagatattcccagaaacggtccaacaaggattttcccaatttaagaaacaatacaattcgcaggaatcacgaattccagcagatcttaaatacttttcaagctttgcactgtcatgggggggtctcatggcaatatcgttacagcaagattgaaaagacaaaccaatatccatcactacaaagacacgcatttgtaaaatggtggacacaatttgactcatccaaagcggatccagaacaagtaaaactatggttcaaatcccatccagaattcctcaaagcggctgatccagagacttctgtgtttttgaaccaaaagtctcatctggcagcatttttagcaggatcgacatcaaaggaggtcttagctaaaaatctgaaggaagttctacaaatgttacaacaggaagaagaagcttcatcctcaaagaaggaagaaacaagttctgctgaagaagacgaagaagatcccttttaccaaaacgaagatgattgttttggtatctgtttagattaaatttaatttcggtcacaaaaccgtctgtttgtaattaatgtgtaattaatgatggacaatactacctgtcctgtagccattaaagtcccggtcaaaactacttgtcttgtaacaaacagtcaaatagtcccggtcaaaactaccggcaactaccggtcttagatttttggctatataaggagtcctcaagtatgttgtgaggcaccctttcatttagccattttttcaggtttcggaagagaggtgctctgaaacaagatttttgtaagcgcttctttctagattcaataaatttctatttttcatccttctctcttctcccttcaccgatcctgtgcggctctgccgccgcttcggtttctttgtttatgaaaacctggggtttgtaagccggtctccggtgtgcccttgatatctgttttcaagtttatattttcatttcaatcatactgcattcttacttcctatc

SEQ ID NO: 11772 - DNA, 1081 bp, Glycine max
  Gm_smallRNAprecursor_4605
caagcattcatggctgatatatttcaagaccaacacaatttacaattttcccaattggtttttgcaatggtgggacttctttggaccaatcccagagatattcccagaaacggtccaacaaggattttcccaatttaagaaacaatacaattcgcaggaatcacgaattccagcagatcttaaatacttttcaagctttgcactgtcatgggggggtctcatggcaatatcgttacagcaagattgaaaagacaaaccaatatccatcactacaaagacacgcatttgtaaaatggtggacacaatttgactcatccaaagcggatccagaacaagtaaaactatggttcaaatcccatccagaattcctcaaagcggctgatccagagacttctgtgtttttgaaccaaaagtctcatctggcagcatttttagcaggatcgacatcaaaggaggtcttagctaaaaatctgaaggaagttctacaaatgttacaacaggaagaagaagcttcatcctcaaagaaggaagaaacaagttctgctgaagaagacgaagaagatcccttttaccaaaacgaagatgattgttttggtatctgtttagattaaatttaatttcggtcacaaaaccgtctgtttgtaattaatgtgtaattaatgatggacaatactacctgtcctgtagccattaaagtcccggtcaaaactacttgtcttgtaacaaacagtcaaatagtcccggtcaaaactaccggcaactaccggtcttagatttttggctatataaggagtcctcaagtatgttgtgaggcaccctttcatttagccattttttcaggtttcggaagagaggtgctctgaaacaagatttttgtaagcgcttctttctagattcaataaatttctatttttcatccttctctcttctcccttcaccgatcctgtgcggctctgccgccgcttcggtttctttgtttatgaaaacctggggtttgtaagccggtctccggtgtgcccttgatatctgttttcaagtttatattttcatttcaatcatactgcattcttacttcctatct

SEQ ID NO: 11773 - DNA, 1082 bp, Glycine max
  Gm_smallRNAprecursor_4606
caagcattcatggctgatatatttcaagaccaacacaatttacaattttcccaattggtttttgcaatggtgggacttctttggaccaatcccagagatattcccagaaacggtccaacaaggattttcccaatttaagaaacaatacaattcgcaggaatcacgaattccagcagatcttaaatacttttcaagctttgcactgtcatgggggggtctcatggcaatatcgttacagcaagattgaaaagacaaaccaatatccatcactacaaagacacgcatttgtaaaatggtggacacaatttgactcatccaaagcggatccagaacaagtaaaactatggttcaaatcccatccagaattcctcaaagcggctgatccagagacttctgtgtttttgaaccaaaagtctcatctggcagcatttttagcaggatcgacatcaaaggaggtcttagctaaaaatctgaaggaagttctacaaatgttacaacaggaagaagaagcttcatcctcaaagaaggaagaaacaagttctgctgaagaagacgaagaagatcccttttaccaaaacgaagatgattgttttggtatctgtttagattaaatttaatttcggtcacaaaaccgtctgtttgtaattaatgtgtaattaatgatggacaatactacctgtcctgtagccattaaagtcccggtcaaaactacttgtcttgtaacaaacagtcaaatagtcccggtcaaaactaccggcaactaccggtcttagatttttggctatataaggagtcctcaagtatgttgtgaggcaccctttcatttagccattttttcaggtttcggaagagaggtgctctgaaacaagatttttgtaagcgcttctttctagattcaataaatttctatttttcatccttctctcttctcccttcaccgatcctgtgcggctctgccgccgcttcggtttctttgtttatgaaaacctggggtttgtaagccggtctccggtgtgcccttgatatctgttttcaagtttatattttcatttcaatcatactgcattcttacttcctatcta

SEQ ID NO: 11774 - DNA, 1057 bp, Glycine max
  Gm_smallRNAprecursor_4607
tttcaagaccaacacaatttacaattttcccaattggtttttgcaatggtgggacttctttggaccaatcccagagatattcccagaaacggtccaacaaggattttcccaatttaagaaacaatacaattcgcaggaatcacgaattccagcagatcttaaatacttttcaagctttgcactgtcatgggggggtctcatggcaatatcgttacagcaagattgaaaagacaaaccaatatccatcactacaaagacacgcatttgtaaaatggtggacacaatttgactcatccaaagcggatccagaacaagtaaaactatggttcaaatcccatccagaattcctcaaagcggctgatccagagacttctgtgtttttgaaccaaaagtctcatctggcagcatttttagcaggatcgacatcaaaggaggtcttagctaaaaatctgaaggaagttctacaaatgttacaacaggaagaagaagcttcatcctcaaagaaggaagaaacaagttctgctgaagaagacgaagaagatcccttttaccaaaacgaagatgattgttttggtatctgtttagattaaatttaatttcggtcacaaaaccgtctgtttgtaattaatgtgtaattaatgatggacaatactacctgtcctgtagccattaaagtcccggtcaaaactacttgtcttgtaacaaacagtcaaatagtcccggtcaaaactaccggcaactaccggtcttagatttttggctatataaggagtcctcaagtatgttgtgaggcaccctttcatttagccattttttcaggtttcggaagagaggtgctctgaaacaagatttttgtaagcgcttctttctagattcaataaatttctatttttcatccttctctcttctcccttcaccgatcctgtgcggctctgccgccgcttcggtttctttgtttatgaaaacctggggtttgtaagccggtctccggtgtgcccttgatatctgttttcaagtttatattttcatttcaatcatactgcattcttacttccta

SEQ ID NO: 11775 - DNA, 1064 bp, Glycine max
  Gm_smallRNAprecursor_4608
tttcaagaccaacacaatttacaattttcccaattggtttttgcaatggtgggacttctttggaccaatcccagagatattcccagaaacggtccaacaaggattttcccaatttaagaaacaatacaattcgcaggaatcacgaattccagcagatcttaaatacttttcaagctttgcactgtcatgggggggtctcatggcaatatcgttacagcaagattgaaaagacaaaccaatatccatcactacaaagacacgcatttgtaaaatggtggacacaatttgactcatccaaagcggatccagaacaagtaaaactatggttcaaatcccatccagaattcctcaaagcggctgatccagagacttctgtgtttttgaaccaaaagtctcatctggcagcatttttagcaggatcgacatcaaaggaggtcttagctaaaaatctgaaggaagttctacaaatgttacaacaggaagaagaagcttcatcctcaaagaaggaagaaacaagttctgctgaagaagacgaagaagatcccttttaccaaaacgaagatgattgttttggtatctgtttagattaaatttaatttcggtcacaaaaccgtctgtttgtaattaatgtgtaattaatgatggacaatactacctgtcctgtagccattaaagtcccggtcaaaactacttgtcttgtaacaaacagtcaaatagtcccggtcaaaactaccggcaactaccggtcttagatttttggctatataaggagtcctcaagtatgttgtgaggcaccctttcatttagccattttttcaggtttcggaagagaggtgctctgaaacaagatttttgtaagcgcttctttctagattcaataaatttctatttttcatccttctctcttctcccttcaccgatcctgtgcggctctgccgccgcttcggtttctttgtttatgaaaacctggggtttgtaagccggtctccggtgtgcccttgatatctgttttcaagtttatattttcatttcaatcatactgcattcttacttcctatctaaaa

SEQ ID NO: 11776 - DNA, 1059 bp, Glycine max
  Gm_smallRNAprecursor_4609
ttcaagaccaacacaatttacaattttcccaattggtttttgcaatggtgggacttctttggaccaatcccagagatattcccagaaacggtccaacaaggattttcccaatttaagaaacaatacaattcgcaggaatcacgaattccagcagatcttaaatacttttcaagctttgcactgtcatgggggggtctcatggcaatatcgttacagcaagattgaaaagacaaaccaatatccatcactacaaagacacgcatttgtaaaatggtggacacaatttgactcatccaaagcggatccagaacaagtaaaactatggttcaaatcccatccagaattcctcaaagcggctgatccagagacttctgtgtttttgaaccaaaagtctcatctggcagcatttttagcaggatcgacatcaaaggaggtcttagctaaaaatctgaaggaagttctacaaatgttacaacaggaagaagaagcttcatcctcaaagaaggaagaaacaagttctgctgaagaagacgaagaagatcccttttaccaaaacgaagatgattgttttggtatctgtttagattaaatttaatttcggtcacaaaaccgtctgtttgtaattaatgtgtaattaatgatggacaatactacctgtcctgtagccattaaagtcccggtcaaaactacttgtcttgtaacaaacagtcaaatagtcccggtcaaaactaccggcaactaccggtcttagatttttggctatataaggagtcctcaagtatgttgtgaggcaccctttcatttagccattttttcaggtttcggaagagaggtgctctgaaacaagatttttgtaagcgcttctttctagattcaataaatttctatttttcatccttctctcttctcccttcaccgatcctgtgcggctctgccgccgcttcggtttctttgtttatgaaaacctggggtttgtaagccggtctccggtgtgcccttgatatctgttttcaagtttatattttcatttcaatcatactgcattcttacttcctatct

SEQ ID NO: 11777 - DNA, 1060 bp, Glycine max
  Gm_smallRNAprecursor_4610
ttcaagaccaacacaatttacaattttcccaattggtttttgcaatggtgggacttctttggaccaatcccagagatattcccagaaacggtccaacaaggattttcccaatttaagaaacaatacaattcgcaggaatcacgaattccagcagatcttaaatacttttcaagctttgcactgtcatgggggggtctcatggcaatatcgttacagcaagattgaaaagacaaaccaatatccatcactacaaagacacgcatttgtaaaatggtggacacaatttgactcatccaaagcggatccagaacaagtaaaactatggttcaaatcccatccagaattcctcaaagcggctgatccagagacttctgtgtttttgaaccaaaagtctcatctggcagcatttttagcaggatcgacatcaaaggaggtcttagctaaaaatctgaaggaagttctacaaatgttacaacaggaagaagaagcttcatcctcaaagaaggaagaaacaagttctgctgaagaagacgaagaagatcccttttaccaaaacgaagatgattgttttggtatctgtttagattaaatttaatttcggtcacaaaaccgtctgtttgtaattaatgtgtaattaatgatggacaatactacctgtcctgtagccattaaagtcccggtcaaaactacttgtcttgtaacaaacagtcaaatagtcccggtcaaaactaccggcaactaccggtcttagatttttggctatataaggagtcctcaagtatgttgtgaggcaccctttcatttagccattttttcaggtttcggaagagaggtgctctgaaacaagatttttgtaagcgcttctttctagattcaataaatttctatttttcatccttctctcttctcccttcaccgatcctgtgcggctctgccgccgcttcggtttctttgtttatgaaaacctggggtttgtaagccggtctccggtgtgcccttgatatctgttttcaagtttatattttcatttcaatcatactgcattcttacttcctatcta

SEQ ID NO: 11778 - DNA, 1060 bp, Glycine max; identical to SEQ ID NO: 11777
  Gm_smallRNAprecursor_4611

SEQ ID NO: 11779 - DNA, 1063 bp, Glycine max
  Gm_smallRNAprecursor_4612
ttcaagaccaacacaatttacaattttcccaattggtttttgcaatggtgggacttctttggaccaatcccagagatattcccagaaacggtccaacaaggattttcccaatttaagaaacaatacaattcgcaggaatcacgaattccagcagatcttaaatacttttcaagctttgcactgtcatgggggggtctcatggcaatatcgttacagcaagattgaaaagacaaaccaatatccatcactacaaagacacgcatttgtaaaatggtggacacaatttgactcatccaaagcggatccagaacaagtaaaactatggttcaaatcccatccagaattcctcaaagcggctgatccagagacttctgtgtttttgaaccaaaagtctcatctggcagcatttttagcaggatcgacatcaaaggaggtcttagctaaaaatctgaaggaagttctacaaatgttacaacaggaagaagaagcttcatcctcaaagaaggaagaaacaagttctgctgaagaagacgaagaagatcccttttaccaaaacgaagatgattgttttggtatctgtttagattaaatttaatttcggtcacaaaaccgtctgtttgtaattaatgtgtaattaatgatggacaatactacctgtcctgtagccattaaagtcccggtcaaaactacttgtcttgtaacaaacagtcaaatagtcccggtcaaaactaccggcaactaccggtcttagatttttggctatataaggagtcctcaagtatgttgtgaggcaccctttcatttagccattttttcaggtttcggaagagaggtgctctgaaacaagatttttgtaagcgcttctttctagattcaataaatttctatttttcatccttctctcttctcccttcaccgatcctgtgcggctctgccgccgcttcggtttctttgtttatgaaaacctggggtttgtaagccggtctccggtgtgcccttgatatctgttttcaagtttatattttcatttcaatcatactgcattcttacttcctatctaaaa

SEQ ID NO: 11780 - DNA, 1056 bp, Glycine max
  Gm_smallRNAprecursor_4613
aagaccaacacaatttacaattttcccaattggtttttgcaatggtgggacttctttggaccaatcccagagatattcccagaaacggtccaacaaggattttcccaatttaagaaacaatacaattcgcaggaatcacgaattccagcagatcttaaatacttttcaagctttgcactgtcatgggggggtctcatggcaatatcgttacagcaagattgaaaagacaaaccaatatccatcactacaaagacacgcatttgtaaaatggtggacacaatttgactcatccaaagcggatccagaacaagtaaaactatggttcaaatcccatccagaattcctcaaagcggctgatccagagacttctgtgtttttgaaccaaaagtctcatctggcagcatttttagcaggatcgacatcaaaggaggtcttagctaaaaatctgaaggaagttctacaaatgttacaacaggaagaagaagcttcatcctcaaagaaggaagaaacaagttctgctgaagaagacgaagaagatcccttttaccaaaacgaagatgattgttttggtatctgtttagattaaatttaatttcggtcacaaaaccgtctgtttgtaattaatgtgtaattaatgatggacaatactacctgtcctgtagccattaaagtcccggtcaaaactacttgtcttgtaacaaacagtcaaatagtcccggtcaaaactaccggcaactaccggtcttagatttttggctatataaggagtcctcaagtatgttgtgaggcaccctttcatttagccattttttcaggtttcggaagagaggtgctctgaaacaagatttttgtaagcgcttctttctagattcaataaatttctatttttcatccttctctcttctcccttcaccgatcctgtgcggctctgccgccgcttcggtttctttgtttatgaaaacctggggtttgtaagccggtctccggtgtgcccttgatatctgttttcaagtttatattttcatttcaatcatactgcattcttacttcctatct

SEQ ID NO: 11781 - DNA, 1056 bp, Glycine max; identical to SEQ ID NO: 11780
  Gm_smallRNAprecursor_4614

SEQ ID NO: 11782 - DNA, 1057 bp, Glycine max
  Gm_smallRNAprecursor_4615
aagaccaacacaatttacaattttcccaattggtttttgcaatggtgggacttctttggaccaatcccagagatattcccagaaacggtccaacaaggattttcccaatttaagaaacaatacaattcgcaggaatcacgaattccagcagatcttaaatacttttcaagctttgcactgtcatgggggggtctcatggcaatatcgttacagcaagattgaaaagacaaaccaatatccatcactacaaagacacgcatttgtaaaatggtggacacaatttgactcatccaaagcggatccagaacaagtaaaactatggttcaaatcccatccagaattcctcaaagcggctgatccagagacttctgtgtttttgaaccaaaagtctcatctggcagcatttttagcaggatcgacatcaaaggaggtcttagctaaaaatctgaaggaagttctacaaatgttacaacaggaagaagaagcttcatcctcaaagaaggaagaaacaagttctgctgaagaagacgaagaagatcccttttaccaaaacgaagatgattgttttggtatctgtttagattaaatttaatttcggtcacaaaaccgtctgtttgtaattaatgtgtaattaatgatggacaatactacctgtcctgtagccattaaagtcccggtcaaaactacttgtcttgtaacaaacagtcaaatagtcccggtcaaaactaccggcaactaccggtcttagatttttggctatataaggagtcctcaagtatgttgtgaggcaccctttcatttagccattttttcaggtttcggaagagaggtgctctgaaacaagatttttgtaagcgcttctttctagattcaataaatttctatttttcatccttctctcttctcccttcaccgatcctgtgcggctctgccgccgcttcggtttctttgtttatgaaaacctggggtttgtaagccggtctccggtgtgcccttgatatctgttttcaagtttatattttcatttcaatcatactgcattcttacttcctatcta

SEQ ID NO: 11783 - DNA, 1057 bp, Glycine max; identical to SEQ ID NO: 11782
  Gm_smallRNAprecursor_4616

SEQ ID NO: 11784 - DNA, 1057 bp, Glycine max; identical to SEQ ID NO: 11782
  Gm_smallRNAprecursor_4617

SEQ ID NO: 11785 - DNA, 1057 bp, Glycine max; identical to SEQ ID NO: 11782
  Gm_smallRNAprecursor_4618

SEQ ID NO: 11786 - DNA, 1155 bp, Glycine max
  Gm_smallRNAprecursor_4619
gggacttctttggaccaatcccagagatattcccagaaacggtccaacaaggattttcccaatttaagaaacaatacaattcgcaggaatcacgaattccagcagatcttaaatacttttcaagctttgcactgtcatgggggggtctcatggcaatatcgttacagcaagattgaaaagacaaaccaatatccatcactacaaagacacgcatttgtaaaatggtggacacaatttgactcatccaaagcggatccagaacaagtaaaactatggttcaaatcccatccagaattcctcaaagcggctgatccagagacttctgtgtttttgaaccaaaagtctcatctggcagcatttttagcaggatcgacatcaaaggaggtcttagctaaaaatctgaaggaagttctacaaatgttacaacaggaagaagaagcttcatcctcaaagaaggaagaaacaagttctgctgaagaagacgaagaagatcccttttaccaaaacgaagatgattgttttggtatctgtttagattaaatttaatttcggtcacaaaaccgtctgtttgtaattaatgtgtaattaatgatggacaatactacctgtcctgtagccattaaagtcccggtcaaaactacttgtcttgtaacaaacagtcaaatagtcccggtcaaaactaccggcaactaccggtcttagatttttggctatataaggagtcctcaagtatgttgtgaggcaccctttcatttagccattttttcaggtttcggaagagaggtgctctgaaacaagatttttgtaagcgcttctttctagattcaataaatttctatttttcatccttctctcttctcccttcaccgatcctgtgcggctctgccgccgcttcggtttctttgtttatgaaaacctggggtttgtaagccggtctccggtgtgcccttgatatctgttttcaagtttatattttcatttcaatcatactgcattcttacttcctatctaaaataacataaaattaaatatgagcgatattcataaaagatctaaattcaaaatcaagatttatatattcatcatcacctcaaaagaacttttcctatgataatgagtctcacaaaaaatactaagagacctcattatacaatt

SEQ ID NO: 11787 - DNA, 1142 bp, Glycine max
  Gm_smallRNAprecursor_4620
accaatcccagagatattcccagaaacggtccaacaaggattttcccaatttaagaaacaatacaattcgcaggaatcacgaattccagcagatcttaaatacttttcaagctttgcactgtcatgggggggtctcatggcaatatcgttacagcaagattgaaaagacaaaccaatatccatcactacaaagacacgcatttgtaaaatggtggacacaatttgactcatccaaagcggatccagaacaagtaaaactatggttcaaatcccatccagaattcctcaaagcggctgatccagagacttctgtgtttttgaaccaaaagtctcatctggcagcatttttagcaggatcgacatcaaaggaggtcttagctaaaaatctgaaggaagttctacaaatgttacaacaggaagaagaagcttcatcctcaaagaaggaagaaacaagttctgctgaagaagacgaagaagatcccttttaccaaaacgaagatgattgttttggtatctgtttagattaaatttaatttcggtcacaaaaccgtctgtttgtaattaatgtgtaattaatgatggacaatactacctgtcctgtagccattaaagtcccggtcaaaactacttgtcttgtaacaaacagtcaaatagtcccggtcaaaactaccggcaactaccggtcttagatttttggctatataaggagtcctcaagtatgttgtgaggcaccctttcatttagccattttttcaggtttcggaagagaggtgctctgaaacaagatttttgtaagcgcttctttctagattcaataaatttctatttttcatccttctctcttctcccttcaccgatcctgtgcggctctgccgccgcttcggtttctttgtttatgaaaacctggggtttgtaagccggtctccggtgtgcccttgatatctgttttcaagtttatattttcatttcaatcatactgcattcttacttcctatctaaaataacataaaattaaatatgagcgatattcataaaagatctaaattcaaaatcaagatttatatattcatcatcacctcaaaagaacttttcctatgataatgagtctcacaaaaaatactaagagacctcattatacaatt

SEQ ID NO: 11788 - DNA, 1198 bp, Glycine max
  Gm_smallRNAprecursor_4621
acggtccaacaaggattttcccaatttaagaaacaatacaattcgcaggaatcacgaattccagcagatcttaaatacttttcaagctttgcactgtcatgggggggtctcatggcaatatcgttacagcaagattgaaaagacaaaccaatatccatcactacaaagacacgcatttgtaaaatggtggacacaatttgactcatccaaagcggatccagaacaagtaaaactatggttcaaatcccatccagaattcctcaaagcggctgatccagagacttctgtgtttttgaaccaaaagtctcatctggcagcatttttagcaggatcgacatcaaaggaggtcttagctaaaaatctgaaggaagttctacaaatgttacaacaggaagaagaagcttcatcctcaaagaaggaagaaacaagttctgctgaagaagacgaagaagatcccttttaccaaaacgaagatgattgttttggtatctgtttagattaaatttaatttcggtcacaaaaccgtctgtttgtaattaatgtgtaattaatgatggacaatactacctgtcctgtagccattaaagtcccggtcaaaactacttgtcttgtaacaaacagtcaaatagtcccggtcaaaactaccggcaactaccggtcttagatttttggctatataaggagtcctcaagtatgttgtgaggcaccctttcatttagccattttttcaggtttcggaagagaggtgctctgaaacaagatttttgtaagcgcttctttctagattcaataaatttctatttttcatccttctctcttctcccttcaccgatcctgtgcggctctgccgccgcttcggtttctttgtttatgaaaacctggggtttgtaagccggtctccggtgtgcccttgatatctgttttcaagtttatattttcatttcaatcatactgcattcttacttcctatctaaaataacataaaattaaatatgagcgatattcataaaagatctaaattcaaaatcaagatttatatattcatcatcacctcaaaagaacttttcctatgataatgagtctcacaaaaaatactaagagacctcattatacaatttggacgctttgtttcttttaaaaaaattataaagcaagatgatgaattagcaacttcaagtcttcaagaattccacaaact

SEQ ID NO: 11789 - DNA, 1187 bp, Glycine max
  Gm_smallRNAprecursor_4622
ggcagaatgacgaccatttgccagtgtccgctgcaatagagacgaatatgggttattgtagtagtatagattatttaaattcaattattgtgtttgacttacctattcaggtagactccaaggtaaacatctcgttttgaactctgtatccaactcttgatgtaactttcggattcaaattgtgattgcccagatctctgaatggactgtggctcgaggaatccatacacatcataattccctgctcgcacacttgtctcagtcagatggttgtgttgttaagtcaaagttaattatgtatgaatttaaaacaattactttggtaattaatagtaatctaaaatgacttacagaatccacaactgtataatagatatgctgagacattgaccaccatgtgcaatttcagagagatcttcgtgctttatatacaacgggaagttttgattaaacaccccaaatatggtagcatcccacataacctgaagaggcttcaaaaacagttgtgggatggtcaatgtcatcaggtacaggggatcatcgacctcttcatccaggctttttggaggttttgctggagacacaactgcctgttgataaaacatagttaattagcaagttttgattacagtgaacaaattaattgaaaaaaataaacatataatcagagtaaaatacatattctgataaacgcttcacaagatgtgttggccaagcaaggaaggtgttaagtgcctgccccactaaggtaacctcgtcagtgggtacaggaacgagagcctctgcatctttaacctcctcaacaccaaccttgacttggccatgcaacaaagggatgttgtgaactgttgtggatccctcataaagtattcatagggcaaccaggcgggaaggattttcttcaatgtatagcccgcatttgtttgagtcacccgtccctggatcgttccttgagggagcaacacaactctcctttgtgctgacacgaggacctgagggaccaacctctggctctggaggtagtggaagtccctgtgattgcatctgagattgaaactgggactgcatctggctgaaggatgccatcatctttcgattcactttttctgtgattgactcctccagttggtctctgatttgttgggtcagctattctaggtcttcaggaggcatggaggaagaactgc

SEQ ID NO: 11790 - DNA, 1116 bp, Glycine max
  Gm_smallRNAprecursor_4623
ttcataacccccacgagacaatacgtggggggcagtgttttgcttctgggaggcctgtgcctttttccgcacatcctgcaaaattttaacattaatgaaaatgattattacaataaattataagaagtgattttgttgtggaaaacaactaaaatgacaaagtacatacctcccatgaggggtctctgcgggtctgacaaaactgggtccatttctccttgctaatgccatatttttcacagacaatgtcgttcgcaccgtccttgtcggctgtaagtgcccatttcctagtcaagtcagatttaaactgcctccagcgctcgccgacaatttgaagaattttcttctttgtcctactgtcagaagcttcagggatttcaaattctgcctgacaaacaataaattaggttttattgtaagtaaataacaaatttagactattaaagaaaatcaacgaagaaaactcaaatacctgaatatcctcccatatcaaatccttctgagcagtagggacttccttccaggtgtcatatgtcacgtcgaccttatcacgagcgacaatccccaaatatgttcttaatttcttcttgtggggaccgtcggtcttgccggtagcaggatcgacgttgaccacaggtctttctgccccaggtggtctagtggccaatgatcgtagtcgtgtcgccttgcgtgtccgcttcaacgtagatggagatgctgatgcgtctaaaggaggagaaggtagaggaggaggaggcgaggcaggtggagtagccatggtcctttaaaaagaaaagttgagttagttaatattatcaaaaaacactgtatgagttatgtaaatgaatgtaccgaaatgaaatactatattagaaaattacgttagacgatgttaattaattctccttcatcatgatcattacgattagcatgaacgtcgtcaacttcttcttctccgacgctgttagaagtcatttgtgtagacaaaggactaacataagtgtccatgtatgaattatcatcttctacattaataccaattgttttcccgtgtagaaccacagaccacctttcatcacaagggtcttgcacataaaatactttcttagcttgttc

SEQ ID NO: 11791 - DNA, 1093 bp, Glycine max
  Gm_smallRNAprecursor_4624
attccacattttttttctactttcccattcatttttgtcttcgtccatctcaataggaatgcgagttgaaacggaacaaccctttgcagtcctctttctccttggatcaggaccccactaatcttcttcatattcttgtcacattgatctgtgtggcataaaccaaaggagttgtcgtagacgtgcaaaatgtgttgttaagtgaatagcagcggcacatagttcatgggatcaacattgacagatttacaagcaaccacgacatgagaacacggtaagtgtttagcctgatattcaccacaatcacacttttgggattgtaacattactttaaaccttccaggtggtttgggtgtttgaagtggggattgagtctttgttacaataaatgtgtgattgtgtctgtcaaattcatttacaatatgtgtatttgattcttgttgactgttattcattacctcagagacgacttccaaatactgtgagtcgaagttgatcattgcctgagtttgtcgacctctaattgtgcggtcttgaagtacgtctcctcaaccaacgatgataccggcaaatgtcttgtattttttaacatgaaattaacagactcagacaaattggtagttatatgtccccaacgtttcccctcatcgaagcattgtacataattttgtttgggtaattgattaagtcattcagttgcacttgacttattcacacaaatatccccaagatgtcgttagtgcatcttctttgtgtatgcgtaacctgtaaattttcaatctattacattatgaaatttgattgaaagtagagtttaacgaagaaataaaatagattctcaccagccagcatgagtggtttctttacatgtttgcagtttgagttacagcaaagaaaattgtgtgcaatgtggcacaagaaaaaggaataagatgtgtcctaaaccaataagttacttgggttgttataggcacttataattaaggggtgtctgtctgaaatgagagaaatgttaatttgcaaagtaacatgtcttctcaaattctttaggaaaaaccccccaagctgaagttgtgtctccccttctataatg

SEQ ID NO: 11792 - DNA, 1057 bp, Glycine max
  Gm_smallRNAprecursor_4625
ttcacttctcattcctgtccccataattccaagttttgacaagaaaattaccgtagtcggcagggtacaaggttaagaatacgtagcagcaattaaaaaatagttttatttgataaccttcttgaaaaaacacaaattaagaaaataaataaataaataaatgctttgttcactaattccgccacaaaagcaatgacatgctcagtttaccagtctaaataagctgctgctttcgtatatatggttacaaaagcaaaagcccttttacctttttctccaaaatcttcttttcaattttcaattgtcacgttccttgtttctctcctataaattggcttctccaccctccattgtccctcctcacccatcaaccccttcaattccgttttattctctttctttctctgaaattttttcagtcttctggatttgtggcatgaaaagaaaaaaaaaaaagaaaagataagtattgttgccaagagagtacagaagaatctgtaaagctcaggagggatagcgccacaacactcatgattttatatcataatatatttggcgctatctatcctgagtttcacgggttcttcttacgggatatatcaaaagttttccttaccattattgaaagcctttaagaaccgtgttgatagctttttttagtagtgtgcaaggttcgatcaccatgcccctccttacctctcctagcaactcactgaaaactatacttcttttcattttatttttatctatgaatgctacttaatttgctagctatatatgaatatggtcatagttggcgttcagaaattattaagatcttggtagctatgaggacgattaggagttgtacgaatttgttcatcactagtttttttttttttttactgaacttttattttctcactttgcattttcttcttcttaattaaccctcatatatctcaggttataattaacttggtatgcatgctattaatttcttgttttcgtttcctttgtttttctgtttgcttctgatcaatttatgtaaaacaagagaatggtgaccaaatgcttt

SEQ ID NO: 11793 - DNA, 1056 bp, Glycine max
  Gm_smallRNAprecursor_4626
tcacttctcattcctgtccccataattccaagttttgacaagaaaattaccgtagtcggcagggtacaaggttaagaatacgtagcagcaattaaaaaatagttttatttgataaccttcttgaaaaaacacaaattaagaaaataaataaataaataaatgctttgttcactaattccgccacaaaagcaatgacatgctcagtttaccagtctaaataagctgctgctttcgtatatatggttacaaaagcaaaagcccttttacctttttctccaaaatcttcttttcaattttcaattgtcacgttccttgtttctctcctataaattggcttctccaccctccattgtccctcctcacccatcaaccccttcaattccgttttattctctttctttctctgaaattttttcagtcttctggatttgtggcatgaaaagaaaaaaaaaaaagaaaagataagtattgttgccaagagagtacagaagaatctgtaaagctcaggagggatagcgccacaacactcatgattttatatcataatatatttggcgctatctatcctgagtttcacgggttcttcttacgggatatatcaaaagttttccttaccattattgaaagcctttaagaaccgtgttgatagctttttttagtagtgtgcaaggttcgatcaccatgcccctccttacctctcctagcaactcactgaaaactatacttcttttcattttatttttatctatgaatgctacttaatttgctagctatatatgaatatggtcatagttggcgttcagaaattattaagatcttggtagctatgaggacgattaggagttgtacgaatttgttcatcactagtttttttttttttttactgaacttttattttctcactttgcattttcttcttcttaattaaccctcatatatctcaggttataattaacttggtatgcatgctattaatttcttgttttcgtttcctttgtttttctgtttgcttctgatcaatttatgtaaaacaagagaatggtgaccaaatgcttt

SEQ ID NO: 11794 - DNA, 1056 bp, Glycine max; identical to SEQ ID NO: 11793
  Gm_smallRNAprecursor_4627

SEQ ID NO: 11795 - DNA, 1058 bp, Glycine max
  Gm_smallRNAprecursor_4628
acaaaacagcaacgattctaggcttttggaataaggttcaaaacagcgctcaagtggacttgactttcctataaataaataaataaaatattggaaaatgtttttttcttttggcaacaaataatccaataagaaggatagaaaatgaaggaaaggaaaattgcttttaccatcaaccctattacccattttttttctctcagtaaatgttagttttattacaaatatcactaagaaaattatttgatttaaaaagaaaaaaaattacccaatctttaaagtgagagatttaaaaagaaatggaaaggattgtataactttcttctatttgattgaaagaaaaatagaaaaaataaactttcagactctttaatactatcattttagaaatcattcgatatttaacatgatttggagatgatttcttgtgtaaaagtaggggtgggaataggtcagaccggcttacagaggcctacgacctggcctacataaagtctgccctggattggcctatttaattaaaaggctaggctcaggtttttttaaaagtctatttaattaaataggtcaggcttaggcttattaaaaagccttataaacctgataggccggcctatgtatatatatatatataattaatatttttttaaaactagcaaatttcattcttataattaagtaaaacttttaattacaaggtgtattctagagcaaataaaaatcatatcatattatcatattacgttcctatacaaatcatatcttatcatatccaattacgttcttatacaaaaattatatcctatcatttacgttcctatgcaaaaatcatatcatttttctatcaggtttccttttttttaattctcctattacgttcctaaataaaagattgattgtaaaaaggctataaggccaggcttttaaaaagaccaggccgaaccaaaataaaagcctttgataggctataggtcaggctcaggcctcaaagattcatcgtaggctaggctcaggcctttcaaagcctggcctggcctgacctattctcacccctatgt

SEQ ID NO: 11796 - DNA, 1046 bp, Glycine max
  Gm_smallRNAprecursor_4629
tttcggtaagtgtttcttactgacaacgtaaaatacttttgtgttatatatatatatatatatatatatcaaggtcacaccggagaccggcttacaaaacccaggttttcataaacaaagaaaccgaagcggcggcagagccgcacaggatcggtgaagggagaagagagaaagatgaaaaatagaaatttattgaatctagaaagaagcgcttacaaaaatcttgtttcagagcacctctcttccgaaacctgaaaaaatggctaaatgaaagggtgcctcacaacatacttgaggactccttatatagccaaaaatctaagaccggtagttgccggtagttttgaccgggactatttgactgtttgttacaagacaagtagttttgaccgggactttaatggctacaggacaggtagtattgtccagcattaactacacattaattacaaacagacggttttgtgaccgaaattaaatttaatctaaacagataccaaaacaatcatcttcgttttggtaaaagggatcttcttcgtcttcttcagcagaacttgtttcttccttctttgaggatgaagcttcttcttcctgttgtaacatttgtagaacttccttcagatttttagctaagacctcctttgatgtcgatcctgctaaaaatgctgccagatgagacttttggttcaaaaacacagaagtctctggatcagctgccttgaggaattctggatgggattggaaccatagttttacttgttctggatccgctttggatgagtcaaattgtgtccaccattttacaaatgcgtgtctttgtagtgatggatattggtttgtcttttcagtcttgctgtaacgatattgccatgagaatatccatgacagtgcaaagcttgaaaagtatttaagatctgctggaattcgtgattcctgcgaattgtattgtttcttaaattgggaaaattcttgttggaccgtttctgggaatatctttgggattggtccaaagaagtcccaccattgcaaaacccaattgggaaaat

SEQ ID NO: 11797 - DNA, 1173 bp, Glycine max
  Gm_smallRNAprecursor_4630
aacgtaaaatacttttgtgttatatatatatatatatatatatatcaaggtcacaccggagaccggcttacaaaacccaggttttcataaacaaagaaaccgaagcggcggcagagccgcacaggatcggtgaagggagaagagagaaagatgaaaaatagaaatttattgaatctagaaagaagcgcttacaaaaatcttgtttcagagcacctctcttccgaaacctgaaaaaatggctaaatgaaagggtgcctcacaacatacttgaggactccttatatagccaaaaatctaagaccggtagttgccggtagttttgaccgggactatttgactgtttgttacaagacaagtagttttgaccgggactttaatggctacaggacaggtagtattgtccagcattaactacacattaattacaaacagacggttttgtgaccgaaattaaatttaatctaaacagataccaaaacaatcatcttcgttttggtaaaagggatcttcttcgtcttcttcagcagaacttgtttcttccttctttgaggatgaagcttcttcttcctgttgtaacatttgtagaacttccttcagatttttagctaagacctcctttgatgtcgatcctgctaaaaatgctgccagatgagacttttggttcaaaaacacagaagtctctggatcagctgccttgaggaattctggatgggattggaaccatagttttacttgttctggatccgctttggatgagtcaaattgtgtccaccattttacaaatgcgtgtctttgtagtgatggatattggtttgtcttttcagtcttgctgtaacgatattgccatgagaatatccatgacagtgcaaagcttgaaaagtatttaagatctgctggaattcgtgattcctgcgaattgtattgtttcttaaattgggaaaattcttgttggaccgtttctgggaatatctttgggattggtccaaagaagtcccaccattgcaaaacccaattgggaaaattgtaaattgtgttggtcttgaaatatatcagccatgaatgcttgaagcgggtattttggtgccaaaacaccttagtccaagcatgaacgtaatcccaataggtataacctaccggatcaaatggaactgaaaatctctttcctttgttcaa

SEQ ID NO: 11798 - DNA, 1158 bp, Glycine max
  Gm_smallRNAprecursor_4631
tgtgttatatatatatatatatatatatatcaaggtcacaccggagaccggcttacaaaacccaggttttcataaacaaagaaaccgaagcggcggcagagccgcacaggatcggtgaagggagaagagagaaagatgaaaaatagaaatttattgaatctagaaagaagcgcttacaaaaatcttgtttcagagcacctctcttccgaaacctgaaaaaatggctaaatgaaagggtgcctcacaacatacttgaggactccttatatagccaaaaatctaagaccggtagttgccggtagttttgaccgggactatttgactgtttgttacaagacaagtagttttgaccgggactttaatggctacaggacaggtagtattgtccagcattaactacacattaattacaaacagacggttttgtgaccgaaattaaatttaatctaaacagataccaaaacaatcatcttcgttttggtaaaagggatcttcttcgtcttcttcagcagaacttgtttcttccttctttgaggatgaagcttcttcttcctgttgtaacatttgtagaacttccttcagatttttagctaagacctcctttgatgtcgatcctgctaaaaatgctgccagatgagacttttggttcaaaaacacagaagtctctggatcagctgccttgaggaattctggatgggattggaaccatagttttacttgttctggatccgctttggatgagtcaaattgtgtccaccattttacaaatgcgtgtctttgtagtgatggatattggtttgtcttttcagtcttgctgtaacgatattgccatgagaatatccatgacagtgcaaagcttgaaaagtatttaagatctgctggaattcgtgattcctgcgaattgtattgtttcttaaattgggaaaattcttgttggaccgtttctgggaatatctttgggattggtccaaagaagtcccaccattgcaaaacccaattgggaaaattgtaaattgtgttggtcttgaaatatatcagccatgaatgcttgaagcgggtattttggtgccaaaacaccttagtccaagcatgaacgtaatcccaataggtataacctaccggatcaaatggaactgaaaatctctttcctttgttcaa

SEQ ID NO: 11799 - DNA, 1182 bp, Glycine max
  Gm_smallRNAprecursor_4632
tgtttcagagcacctctcttccgaaacctgaaaaaatggctaaatgaaagggtgcctcacaacatacttgaggactccttatatagccaaaaatctaagaccggtagttgccggtagttttgaccgggactatttgactgtttgttacaagacaagtagttttgaccgggactttaatggctacaggacaggtagtattgtccagcattaactacacattaattacaaacagacggttttgtgaccgaaattaaatttaatctaaacagataccaaaacaatcatcttcgttttggtaaaagggatcttcttcgtcttcttcagcagaacttgtttcttccttctttgaggatgaagcttcttcttcctgttgtaacatttgtagaacttccttcagatttttagctaagacctcctttgatgtcgatcctgctaaaaatgctgccagatgagacttttggttcaaaaacacagaagtctctggatcagctgccttgaggaattctggatgggattggaaccatagttttacttgttctggatccgctttggatgagtcaaattgtgtccaccattttacaaatgcgtgtctttgtagtgatggatattggtttgtcttttcagtcttgctgtaacgatattgccatgagaatatccatgacagtgcaaagcttgaaaagtatttaagatctgctggaattcgtgattcctgcgaattgtattgtttcttaaattgggaaaattcttgttggaccgtttctgggaatatctttgggattggtccaaagaagtcccaccattgcaaaacccaattgggaaaattgtaaattgtgttggtcttgaaatatatcagccatgaatgcttgaagcgggtattttggtgccaaaacaccttagtccaagcatgaacgtaatcccaataggtataacctaccggatcaaatggaactgaaaatctctttcctttgttcaagtccgaaccaaagtgtctcggttgaagaacttttagtatttggatggttgagtgggtgtttaaggtttggtcttttggatctttgaaatgtttgatagatactgagtttgaatctaccaaaatcaattcataaaatgttcttgtcttcaggatggtggttggtttgtagtgaaatcctggtgggaaggccttggccgtcgccttgaatg

SEQ ID NO: 11800 - DNA, 1031 bp, Glycine max
  Gm_smallRNAprecursor_4633
acaagtagttttgaccgggactttaatggctacaggacaggtagtattgtccagcattaactacacattaattacaaacagacggttttgtgaccgaaattaaatttaatctaaacagataccaaaacaatcatcttcgttttggtaaaagggatcttcttcgtcttcttcagcagaacttgtttcttccttctttgaggatgaagcttcttcttcctgttgtaacatttgtagaacttccttcagatttttagctaagacctcctttgatgtcgatcctgctaaaaatgctgccagatgagacttttggttcaaaaacacagaagtctctggatcagctgccttgaggaattctggatgggattggaaccatagttttacttgttctggatccgctttggatgagtcaaattgtgtccaccattttacaaatgcgtgtctttgtagtgatggatattggtttgtcttttcagtcttgctgtaacgatattgccatgagaatatccatgacagtgcaaagcttgaaaagtatttaagatctgctggaattcgtgattcctgcgaattgtattgtttcttaaattgggaaaattcttgttggaccgtttctgggaatatctttgggattggtccaaagaagtcccaccattgcaaaacccaattgggaaaattgtaaattgtgttggtcttgaaatatatcagccatgaatgcttgaagcgggtattttggtgccaaaacaccttagtccaagcatgaacgtaatcccaataggtataacctaccggatcaaatggaactgaaaatctctttcctttgttcaagtccgaaccaaagtgtctcggttgaagaacttttagtatttggatggttgagtgggtgtttaaggtttggtcttttggatctttgaaatgtttgatagatactgagtttgaatctaccaaaatcaattcataaaatgttcttgtcttcaggatggtggttggtttgtagtgaaatcctggtgggaaggccttggccgtcgccttgaatg

SEQ ID NO: 11801 - DNA, 1031 bp, Glycine max; identical to SEQ ID NO: 11800
  Gm_smallRNAprecursor_4634

SEQ ID NO: 11802 - DNA, 1114 bp, Glycine max
  Gm_smallRNAprecursor_4635
ggactttaatggctacaggacaggtagtattgtccagcattaactacacattaattacaaacagacggttttgtgaccgaaattaaatttaatctaaacagataccaaaacaatcatcttcgttttggtaaaagggatcttcttcgtcttcttcagcagaacttgtttcttccttctttgaggatgaagcttcttcttcctgttgtaacatttgtagaacttccttcagatttttagctaagacctcctttgatgtcgatcctgctaaaaatgctgccagatgagacttttggttcaaaaacacagaagtctctggatcagctgccttgaggaattctggatgggattggaaccatagttttacttgttctggatccgctttggatgagtcaaattgtgtccaccattttacaaatgcgtgtctttgtagtgatggatattggtttgtcttttcagtcttgctgtaacgatattgccatgagaatatccatgacagtgcaaagcttgaaaagtatttaagatctgctggaattcgtgattcctgcgaattgtattgtttcttaaattgggaaaattcttgttggaccgtttctgggaatatctttgggattggtccaaagaagtcccaccattgcaaaacccaattgggaaaattgtaaattgtgttggtcttgaaatatatcagccatgaatgcttgaagcgggtattttggtgccaaaacaccttagtccaagcatgaacgtaatcccaataggtataacctaccggatcaaatggaactgaaaatctctttcctttgttcaagtccgaaccaaagtgtctcggttgaagaacttttagtatttggatggttgagtgggtgtttaaggtttggtcttttggatctttgaaatgtttgatagatactgagtttgaatctaccaaaatcaattcataaaatgttcttgtcttcaggatggtggttggtttgtagtgaaatcctggtgggaaggccttggccgtcgccttgaatggatttttgtcccaaaattcaggttccatctgcaaaacagttaacaatttatttttataaatataattgttagtttgtttggtaggtggtgtttgagcttt

SEQ ID NO: 11803 - DNA, 1146 bp, Glycine max
  Gm_smallRNAprecursor_4636
tacaggacaggtagtattgtccagcattaactacacattaattacaaacagacggttttgtgaccgaaattaaatttaatctaaacagataccaaaacaatcatcttcgttttggtaaaagggatcttcttcgtcttcttcagcagaacttgtttcttccttctttgaggatgaagcttcttcttcctgttgtaacatttgtagaacttccttcagatttttagctaagacctcctttgatgtcgatcctgctaaaaatgctgccagatgagacttttggttcaaaaacacagaagtctctggatcagctgccttgaggaattctggatgggattggaaccatagttttacttgttctggatccgctttggatgagtcaaattgtgtccaccattttacaaatgcgtgtctttgtagtgatggatattggtttgtcttttcagtcttgctgtaacgatattgccatgagaatatccatgacagtgcaaagcttgaaaagtatttaagatctgctggaattcgtgattcctgcgaattgtattgtttcttaaattgggaaaattcttgttggaccgtttctgggaatatctttgggattggtccaaagaagtcccaccattgcaaaacccaattgggaaaattgtaaattgtgttggtcttgaaatatatcagccatgaatgcttgaagcgggtattttggtgccaaaacaccttagtccaagcatgaacgtaatcccaataggtataacctaccggatcaaatggaactgaaaatctctttcctttgttcaagtccgaaccaaagtgtctcggttgaagaacttttagtatttggatggttgagtgggtgtttaaggtttggtcttttggatctttgaaatgtttgatagatactgagtttgaatctaccaaaatcaattcataaaatgttcttgtcttcaggatggtggttggtttgtagtgaaatcctggtgggaaggccttggccgtcgccttgaatggatttttgtcccaaaattcaggttccatctgcaaaacagttaacaatttatttttataaatataattgttagtttgtttggtaggtggtgtttgagctttagctaaaggtagttttcctttagtattggtggctgttttggtcat

SEQ ID NO: 11804 - DNA, 1146 bp, Glycine max; identical to SEQ ID NO: 11803
  Gm_smallRNAprecursor_4637

SEQ ID NO: 11805 - DNA, 1147 bp, Glycine max
  Gm_smallRNAprecursor_4638
tacaggacaggtagtattgtccagcattaactacacattaattacaaacagacggttttgtgaccgaaattaaatttaatctaaacagataccaaaacaatcatcttcgttttggtaaaagggatcttcttcgtcttcttcagcagaacttgtttcttccttctttgaggatgaagcttcttcttcctgttgtaacatttgtagaacttccttcagatttttagctaagacctcctttgatgtcgatcctgctaaaaatgctgccagatgagacttttggttcaaaaacacagaagtctctggatcagctgccttgaggaattctggatgggattggaaccatagttttacttgttctggatccgctttggatgagtcaaattgtgtccaccattttacaaatgcgtgtctttgtagtgatggatattggtttgtcttttcagtcttgctgtaacgatattgccatgagaatatccatgacagtgcaaagcttgaaaagtatttaagatctgctggaattcgtgattcctgcgaattgtattgtttcttaaattgggaaaattcttgttggaccgtttctgggaatatctttgggattggtccaaagaagtcccaccattgcaaaacccaattgggaaaattgtaaattgtgttggtcttgaaatatatcagccatgaatgcttgaagcgggtattttggtgccaaaacaccttagtccaagcatgaacgtaatcccaataggtataacctaccggatcaaatggaactgaaaatctctttcctttgttcaagtccgaaccaaagtgtctcggttgaagaacttttagtatttggatggttgagtgggtgtttaaggtttggtcttttggatctttgaaatgtttgatagatactgagtttgaatctaccaaaatcaattcataaaatgttcttgtcttcaggatggtggttggtttgtagtgaaatcctggtgggaaggccttggccgtcgccttgaatggatttttgtcccaaaattcaggttccatctgcaaaacagttaacaatttatttttataaatataattgttagtttgtttggtaggtggtgtttgagctttagctaaaggtagttttcctttagtattggtggctgttttggtcatt

SEQ ID NO: 11806 - DNA, 1147 bp, Glycine max; identical to SEQ ID NO: 11805
  Gm_smallRNAprecursor_4639

SEQ ID NO: 11807 - DNA, 1247 bp, Glycine max
  Gm_smallRNAprecursor_4640
tacaggacaggtagtattgtccagcattaactacacattaattacaaacagacggttttgtgaccgaaattaaatttaatctaaacagataccaaaacaatcatcttcgttttggtaaaagggatcttcttcgtcttcttcagcagaacttgtttcttccttctttgaggatgaagcttcttcttcctgttgtaacatttgtagaacttccttcagatttttagctaagacctcctttgatgtcgatcctgctaaaaatgctgccagatgagacttttggttcaaaaacacagaagtctctggatcagctgccttgaggaattctggatgggattggaaccatagttttacttgttctggatccgctttggatgagtcaaattgtgtccaccattttacaaatgcgtgtctttgtagtgatggatattggtttgtcttttcagtcttgctgtaacgatattgccatgagaatatccatgacagtgcaaagcttgaaaagtatttaagatctgctggaattcgtgattcctgcgaattgtattgtttcttaaattgggaaaattcttgttggaccgtttctgggaatatctttgggattggtccaaagaagtcccaccattgcaaaacccaattgggaaaattgtaaattgtgttggtcttgaaatatatcagccatgaatgcttgaagcgggtattttggtgccaaaacaccttagtccaagcatgaacgtaatcccaataggtataacctaccggatcaaatggaactgaaaatctctttcctttgttcaagtccgaaccaaagtgtctcggttgaagaacttttagtatttggatggttgagtgggtgtttaaggtttggtcttttggatctttgaaatgtttgatagatactgagtttgaatctaccaaaatcaattcataaaatgttcttgtcttcaggatggtggttggtttgtagtgaaatcctggtgggaaggccttggccgtcgccttgaatggatttttgtcccaaaattcaggttccatctgcaaaacagttaacaatttatttttataaatataattgttagtttgtttggtaggtggtgtttgagctttagctaaaggtagttttcctttagtattggtggctgttttggtcattgacgcattttggatcattgtttgtaaatttgattcagattcatcatcagattctgaggcaatgtctgcccaagattttttgattatttttggaaatttgg

SEQ ID NO: 11808 - DNA, 1247 bp, Glycine max; identical to SEQ ID NO: 11807
  Gm_smallRNAprecursor_4641

SEQ ID NO: 11809 - DNA, 1072 bp, Glycine max
  Gm_smallRNAprecursor_4642
gcttcttcttcctgttgtaacatttgtagaacttccttcagatttttagctaagacctcctttgatgtcgatcctgctaaaaatgctgccagatgagacttttggttcaaaaacacagaagtctctggatcagctgccttgaggaattctggatgggattggaaccatagttttacttgttctggatccgctttggatgagtcaaattgtgtccaccattttacaaatgcgtgtctttgtagtgatggatattggtttgtcttttcagtcttgctgtaacgatattgccatgagaatatccatgacagtgcaaagcttgaaaagtatttaagatctgctggaattcgtgattcctgcgaattgtattgtttcttaaattgggaaaattcttgttggaccgtttctgggaatatctttgggattggtccaaagaagtcccaccattgcaaaacccaattgggaaaattgtaaattgtgttggtcttgaaatatatcagccatgaatgcttgaagcgggtattttggtgccaaaacaccttagtccaagcatgaacgtaatcccaataggtataacctaccggatcaaatggaactgaaaatctctttcctttgttcaagtccgaaccaaagtgtctcggttgaagaacttttagtatttggatggttgagtgggtgtttaaggtttggtcttttggatctttgaaatgtttgatagatactgagtttgaatctaccaaaatcaattcataaaatgttcttgtcttcaggatggtggttggtttgtagtgaaatcctggtgggaaggccttggccgtcgccttgaatggatttttgtcccaaaattcaggttccatctgcaaaacagttaacaatttatttttataaatataattgttagtttgtttggtaggtggtgtttgagctttagctaaaggtagttttcctttagtattggtggctgttttggtcattgacgcattttggatcattgtttgtaaatttgattcagattcatcatcagattctgaggcaatgtctgcccaagattttttgattatttttggaaatttgg

SEQ ID NO: 11810 - DNA, 1087 bp, Glycine max
  Gm_smallRNAprecursor_4643
tcctgctaaaaatgctgccagatgagacttttggttcaaaaacacagaagtctctggatcagctgccttgaggaattctggatgggattggaaccatagttttacttgttctggatccgctttggatgagtcaaattgtgtccaccattttacaaatgcgtgtctttgtagtgatggatattggtttgtcttttcagtcttgctgtaacgatattgccatgagaatatccatgacagtgcaaagcttgaaaagtatttaagatctgctggaattcgtgattcctgcgaattgtattgtttcttaaattgggaaaattcttgttggaccgtttctgggaatatctttgggattggtccaaagaagtcccaccattgcaaaacccaattgggaaaattgtaaattgtgttggtcttgaaatatatcagccatgaatgcttgaagcgggtattttggtgccaaaacaccttagtccaagcatgaacgtaatcccaataggtataacctaccggatcaaatggaactgaaaatctctttcctttgttcaagtccgaaccaaagtgtctcggttgaagaacttttagtatttggatggttgagtgggtgtttaaggtttggtcttttggatctttgaaatgtttgatagatactgagtttgaatctaccaaaatcaattcataaaatgttcttgtcttcaggatggtggttggtttgtagtgaaatcctggtgggaaggccttggccgtcgccttgaatggatttttgtcccaaaattcaggttccatctgcaaaacagttaacaatttatttttataaatataattgttagtttgtttggtaggtggtgtttgagctttagctaaaggtagttttcctttagtattggtggctgttttggtcattgacgcattttggatcattgtttgtaaatttgattcagattcatcatcagattctgaggcaatgtctgcccaagattttttgattatttttggaaatttggtcagacccatgtcttgaagggcctgaagggtttcaattggccatgcatagtcggccgatgtttgtttggcggttgccggtttggga

SEQ ID NO: 11811 - DNA, 1174 bp, Glycine max
  Gm_smallRNAprecursor_4644
cgggtattttggtgccaaaacaccttagtccaagcatgaacgtaatcccaataggtataacctaccggatcaaatggaactgaaaatctctttcctttgttcaagtccgaaccaaagtgtctcggttgaagaacttttagtatttggatggttgagtgggtgtttaaggtttggtcttttggatctttgaaatgtttgatagatactgagtttgaatctaccaaaatcaattcataaaatgttcttgtcttcaggatggtggttggtttgtagtgaaatcctggtgggaaggccttggccgtcgccttgaatggatttttgtcccaaaattcaggttccatctgcaaaacagttaacaatttatttttataaatataattgttagtttgtttggtaggtggtgtttgagctttagctaaaggtagttttcctttagtattggtggctgttttggtcattgacgcattttggatcattgtttgtaaatttgattcagattcatcatcagattctgaggcaatgtctgcccaagattttttgattatttttggaaatttggtcagacccatgtcttgaagggcctgaagggtttcaattggccatgcatagtcggccgatgtttgtttggcggttgccggtttgggagattcctgagtggatggctcaggtttgattgaggcaatctgggttgatgacccttctaaattttttttctgggtagatgacccagcctgggttggtgacccagaagaggtagatgatttcttgatggttggctctggaagagccagcctggctcctttgcctgtactccttcctccccgtagggagattcccgatgccttaggaggcattaccacttttctgtaagaattcacgggtaaggtagtcaggtagtgaatttgaggtgcccttgatgtattctatgtcaaaatcaaagacacttaaaattgcttgccatcgtgcaaaaatttgttttgaggcaaggtttttaacatctttttgtaaaatatctttggctgatttacaatcaaccctgattaaaaaattttggtttaataaatccgattgaaatttggaaatgcacaaaacaattgctaaaacctcttttttaacagttgaatattttaattgtgcaggattccaatgttttgatgtatatgcaatgacatga

SEQ ID NO: 11812 - DNA, 1173 bp, Glycine max
  Gm_smallRNAprecursor_4645
gggtattttggtgccaaaacaccttagtccaagcatgaacgtaatcccaataggtataacctaccggatcaaatggaactgaaaatctctttcctttgttcaagtccgaaccaaagtgtctcggttgaagaacttttagtatttggatggttgagtgggtgtttaaggtttggtcttttggatctttgaaatgtttgatagatactgagtttgaatctaccaaaatcaattcataaaatgttcttgtcttcaggatggtggttggtttgtagtgaaatcctggtgggaaggccttggccgtcgccttgaatggatttttgtcccaaaattcaggttccatctgcaaaacagttaacaatttatttttataaatataattgttagtttgtttggtaggtggtgtttgagctttagctaaaggtagttttcctttagtattggtggctgttttggtcattgacgcattttggatcattgtttgtaaatttgattcagattcatcatcagattctgaggcaatgtctgcccaagattttttgattatttttggaaatttggtcagacccatgtcttgaagggcctgaagggtttcaattggccatgcatagtcggccgatgtttgtttggcggttgccggtttgggagattcctgagtggatggctcaggtttgattgaggcaatctgggttgatgacccttctaaattttttttctgggtagatgacccagcctgggttggtgacccagaagaggtagatgatttcttgatggttggctctggaagagccagcctggctcctttgcctgtactccttcctccccgtagggagattcccgatgccttaggaggcattaccacttttctgtaagaattcacgggtaaggtagtcaggtagtgaatttgaggtgcccttgatgtattctatgtcaaaatcaaagacacttaaaattgcttgccatcgtgcaaaaatttgttttgaggcaaggtttttaacatctttttgtaaaatatctttggctgatttacaatcaaccctgattaaaaaattttggtttaataaatccgattgaaatttggaaatgcacaaaacaattgctaaaacctcttttttaacagttgaatattttaattgtgcaggattccaatgttttgatgtatatgcaatgacatga

SEQ ID NO: 11813 - DNA, 1176 bp, Glycine max
  Gm_smallRNAprecursor_4646
gggtattttggtgccaaaacaccttagtccaagcatgaacgtaatcccaataggtataacctaccggatcaaatggaactgaaaatctctttcctttgttcaagtccgaaccaaagtgtctcggttgaagaacttttagtatttggatggttgagtgggtgtttaaggtttggtcttttggatctttgaaatgtttgatagatactgagtttgaatctaccaaaatcaattcataaaatgttcttgtcttcaggatggtggttggtttgtagtgaaatcctggtgggaaggccttggccgtcgccttgaatggatttttgtcccaaaattcaggttccatctgcaaaacagttaacaatttatttttataaatataattgttagtttgtttggtaggtggtgtttgagctttagctaaaggtagttttcctttagtattggtggctgttttggtcattgacgcattttggatcattgtttgtaaatttgattcagattcatcatcagattctgaggcaatgtctgcccaagattttttgattatttttggaaatttggtcagacccatgtcttgaagggcctgaagggtttcaattggccatgcatagtcggccgatgtttgtttggcggttgccggtttgggagattcctgagtggatggctcaggtttgattgaggcaatctgggttgatgacccttctaaattttttttctgggtagatgacccagcctgggttggtgacccagaagaggtagatgatttcttgatggttggctctggaagagccagcctggctcctttgcctgtactccttcctccccgtagggagattcccgatgccttaggaggcattaccacttttctgtaagaattcacgggtaaggtagtcaggtagtgaatttgaggtgcccttgatgtattctatgtcaaaatcaaagacacttaaaattgcttgccatcgtgcaaaaatttgttttgaggcaaggtttttaacatctttttgtaaaatatctttggctgatttacaatcaaccctgattaaaaaattttggtttaataaatccgattgaaatttggaaatgcacaaaacaattgctaaaacctcttttttaacagttgaatattttaattgtgcaggattccaatgttttgatgtatatgcaatgacatgatct

SEQ ID NO: 11814 - DNA, 1044 bp, Glycine max
  Gm_smallRNAprecursor_4647
ttaaacaatcgtatacacataataccgcatggagagaaaaaaagaaaaaaaaataggggattattacagaacctgttaaagtaagagatctgaaaattttagacccaggttaatattcatgcgccactttcccaagttgaacaaccctggaaatgggagagagacaaagtgtgatttttctatgggttccaagtgagtgaaaaacttgtgatgaaaaagaagtgcaagatttatcaagacctaccatgtctctagcaccagtagctaaaccattcaaaagaccaattttccaggaacaatttataaagagatttataaaactgggagactaaatgtgtgaattaaactataggggaaccaaaatcaaaattggagtaaaactggggaaccaaaagtataattttacctacaaaaaatgaagtctttacaaggaaccacttagacgttgacacatatcattgacatgtgacattgacatgtgacaatcacacgtgacagtcaacgtctgaggttaacggtcaacgtccaaatcgggctttcaggaccaattttgcagggatttataaaattggggaccaaatttgtgaattaaattatatgaggaccaaatccgtaattggagataaagtggggtaccaattttgtaattttgctataaatcaattatattgtaaaataattaatgtcgctatatataaatactaaaatttttaatatacatttaaatttagataataaattttatgacaattaattttgatctaataattaatttatttacttatataaatttttatgaaatctatgatttttatttaaaatttatatatgcaaaaaaaatacattattagatcaaaattaattgtaataagatcaaaaaatacattagtaaatttatgttaataaacctatgatttttatttataatttatatatgtaaacaaattaattattagattaaaattaattgttacaaaatttattatctaaatttacatgtgcattaaatatacattagaatatttagtattatatataacatta

SEQ ID NO: 11815 - DNA, 1164 bp, Glycine max
  Gm_smallRNAprecursor_4648
atatatattgccaactttcaaaaacgggccccgacgggtgcagagaaacgcgaggaactggaatcatagaagcggcacgcaaaccgaggcatgattttagtattcaaaaggtcaaatttttctctccttgtggctgagtatgaagtcacatcaaggggaagaggtgggccccttttgctccactcaaaatgagacatgtggcatggcttttacaaaaaggaaagagaaaatctttttaaaataaaagccaaattctctctctccattcagatttcagaaaaaaacttttcctcccccttcccacattgcttttctcttcttcttcctctccattgaagcctccattaaagctccaaaattgctcatcacttctactccaaattgcaaaaggaagccattttcggagtcgtgaagcacacctttacgttgtggggcttcgaatttcaggtatgggtggacttcttctcacatgaaattcgtgggtattgggtctttgggagatatgatgggtagttctactaggttaatgccttatggtagttatttgtgaaagaatttgttgaaagcatgctaaacttgacatgtttgatgtgagtaaagctacccattctgttttagggttttatgatgatgctttgtgatatttgtatgctgaaattgttggtagaaaactggtagagatgatggggagagttaacctagggttaaatgtgagaatggtagtgatgtgagtggaaaagtgtgagattttgagggtttgaaaagctaaatttggggttagtggtaattggagtctaaagtgagttgatcctagtttaaaatgtcaattaggacttgtaggtaagcttgggcagaacaaatgagaaaaatgagtgacaaaggtgaaagcaagagccatttctagggtaaattgggtgttgaggggtcaaattttgaatcggtggagttttcgccttaaaatcagtttgagcaagtctaaattaatgttatagacttgttggagatgagagtttactccaaaattatcccattctcattttcacttctcaaaccttgaaaatccactaaattgatgggttttagatacctagattttgaattgccttggtctgaagcttgtttttggtttaaatatgatttatacatgatttaggacttgtagga

SEQ ID NO: 11816 - DNA, 1039 bp, Glycine max
  Gm_smallRNAprecursor_4649
ttcgggcaatcaaagaatacaacatcaaaaatcattttgattgcagaacaatttactctgaccagagaatgctaaacttcgtctgcaagttacatgaaaatggttgtacatggagcttgggcgcatgcaattcaaagaggcataacaaatggattatcaagagtatcagaagtcatcacacttgtctcgtgccgatgttcagacaagatcatcgccaactcgacaaacacgtcatagcacagatcatccaaccaattgtcaaaacaaacccaaccgtctccatcaagacattgattgcagagatcaaaacgttcatgaattatacctcatcctacaagaagacatggttagcaaagcaaagagtgttggagatgatggaaattgggaagaatcatatgtcaaactgccaaaacttttcggagctttgtaatcttgtgttcccaggactgtggtcactgctcaaacagagtcattgtatgaggggggagaaatagtaccgggcaaaagattgtttaaacgtgtcttttggtcatttggtccatgcattaatggttttgcatattgcaaacccatagtacaagtagatggtacatggctttacgggaagtatactgacacactgttgatagctaccgcacaagatagagctaaccatatcttcccgattacctatgtcattgtagaaggggagacaacttcagcttgaggttttttctaaagaatttgagaagacatgttactccgcaaattaacatttctctcatttcagaccgacagctcttaattataagtgcctacaacaacccaagtaacttatgggtccaggatggacacatcccatttcttttgtctgcgccacattgcacaaaattttcttcgcggtaaatcaaactgcaaacatttaaagaaaccacttggctggtgagaatctattttatttattcgttataattttctttcaatcaaattttataacataatacattgattgaatatttataggttacgcatacacggagaagatgcactggcgacatct

SEQ ID NO: 11817 - DNA, 1051 bp, Glycine max
  Gm_smallRNAprecursor_4650
actggcgacatcttggggatattcgtgcgaataagccaagtgcggctgaatggcttgatcaattacccaaacaaaaatgggtacaatgcttcgatgagcggaaattttggggacatatgaataccaatttgtcgaagtctattaattccatgttcaaaaacacaagacatttaccggtgtcatcgttggttgaggagacgtatttcaagaccgcacaactctttgctaatagaggtcgacaaactcatacaatgatcaacttcggctcacagtattctgaagtcgtcttcgatgcaatgaatagtggtcaacaagaatctaattcacacattataaatgaattcgacagacacaatcacacttttattataacagagactcaatccccacttgaatcacccagaccacctgaaaggtttagagtaatgttacaatcccaaaagtgtgattgtggtgaatatcaggctaaacatttatcatgttctcacgtcatggttgcctgtaaatctgtcaatgttgatctcatgacctatgtgccgatgttattcactttacaacacattttgcacatctacgacaattcctttggtttactgccacacgaatcaatgtggcaagaatatgaaggagatcagtggaggcctggtccaaggagaaagaggactgcaaggggtcgtcccgttttaactcgcattcccattgagatggacgaagacgaaaatgaacgagcaagtagaaaaaaatgtggactttgccgataacatgatcatagtataaacaattgtcctaatatatcctaatattaaatttttctttagccaaatgtcattgtttaaatattttattgataatgcagtataatattcttttataaataaattgttaaaagttttagttttatcatttttaattaaatctaatgacataaacaaactaattatatttagtaaaataattaaatttaatatttaaatttttttttccaaaataaatatattattatacaaaattcagattttaaaacaaatattcaatcaaaaatatctcaaat

SEQ ID NO: 11818 - DNA, 1052 bp, Glycine max
  Gm_smallRNAprecursor_4651
actggcgacatcttggggatattcgtgcgaataagccaagtgcggctgaatggcttgatcaattacccaaacaaaaatgggtacaatgcttcgatgagcggaaattttggggacatatgaataccaatttgtcgaagtctattaattccatgttcaaaaacacaagacatttaccggtgtcatcgttggttgaggagacgtatttcaagaccgcacaactctttgctaatagaggtcgacaaactcatacaatgatcaacttcggctcacagtattctgaagtcgtcttcgatgcaatgaatagtggtcaacaagaatctaattcacacattataaatgaattcgacagacacaatcacacttttattataacagagactcaatccccacttgaatcacccagaccacctgaaaggtttagagtaatgttacaatcccaaaagtgtgattgtggtgaatatcaggctaaacatttatcatgttctcacgtcatggttgcctgtaaatctgtcaatgttgatctcatgacctatgtgccgatgttattcactttacaacacattttgcacatctacgacaattcctttggtttactgccacacgaatcaatgtggcaagaatatgaaggagatcagtggaggcctggtccaaggagaaagaggactgcaaggggtcgtcccgttttaactcgcattcccattgagatggacgaagacgaaaatgaacgagcaagtagaaaaaaatgtggactttgccgataacatgatcatagtataaacaattgtcctaatatatcctaatattaaatttttctttagccaaatgtcattgtttaaatattttattgataatgcagtataatattcttttataaataaattgttaaaagttttagttttatcatttttaattaaatctaatgacataaacaaactaattatatttagtaaaataattaaatttaatatttaaatttttttttccaaaataaatatattattatacaaaattcagattttaaaacaaatattcaatcaaaaatatctcaaata

SEQ ID NO: 11819 - DNA, 1069 bp, Glycine max
  Gm_smallRNAprecursor_4652
catacaggcgactgaagaaagcgtttgatgacagtgcaccaattcctttgtcaggtgttgaagtttttgatcgtgtgaagaacatttgcaatatatatgggaagacacaaaagaaagatggtgctcccaaaaacatttggaagaaaaggtccatcttctttgatcttccatactggtgcaacttagatgagagacattgtttagatgtgatgcatgttgaaaaaaatgtatgtgacagtttggttggcacactgcttaacattaaagggaagacaaaagatggtttgaaatgtcgtcaagatttagtggaaatgggagtacgataccagttgcatcctgtgtcaaaaggtcttcgaacgtatttgccgcccgcatgtcatacgatgtcaacgtatgagaaaaaaagtttttgtcattgtctgaaaaatgtcaaagtcccacaaggatactcttcaaatatcaaaagccttgtatcagtggatgaaatgaattttgtggggttgaagtcccatgattgtcacgttttgatgcaacgattattgcctgttgccattcgtggaatattgcctgacaaagttagggttgcaataactcgattgtgttttttctttaatgcaatctgtagcaaagtgattgaccctaaacagttggatgatttggaaaatgaggctgccattatcatttgtcaattggagatgtactttcccccaactttttttgacataatgattcacttgttcatcttgttcgagaaatatgtttatgtgggcctgtatatttgcggtggatgtatccggttgagcggtacatgaaggtgttgaaaagttacacgaagaatcaatataggccagaagcaagcattgttgaaaggtacgtggcaaaagaagctattgagtgttgctcaacttacatcgaagatgcatcacctgttggtattcctgaaagtcgtcatgaagctacacgacaaggtaggggcacgcgaggattcaatgttgtaaccatggatcgtcagaaactatcacaagcgcattggtatgtacttaacaacacagctgaggtaataccatac

SEQ ID NO: 11820 - DNA, 1034 bp, Glycine max
  Gm_smallRNAprecursor_4653
aaaggagagatcataaagctcttgaatcagcaagatcccaatgatgattgtaatagtctctatgttatccccattgtgggaatggaaggcttgggaaagtccactcttgcaaagtttgtgttcaatgataagaggattcatgagtgtttccctttgaagatgtgggtgtgtgtttctgaagacttcgacattaagcaactggttattaaaatcatcaactctgctaatgattctgcttttcttgctgatgctcctgatccccaactgaattttaacatattggatatagagcagctgcaaaagcaattgagaaacaaacttgctggtcgagaattcttacttttcttggatgatgtgtggaatgagaaccatgttaaatagggttgagttgagagatttaatacaaataggtgctaatggaagtaaaattcttgtgactacacataatcattttgttgcttccatgatggggaccgttccctcccatattttagaaggccttcctttggaggattcattgtggcatcttgtcaaatgggcatttaaagagaaagaagaagaagaaaagtatcctcatttgataaatattggcaaagaaattgtgaaaaaatgcagtggcattccattttcagtgagaacgttagggagtttgctattttcaaaatttgaggcaaatgagtgggaatatgtgagaaacaatgaagtttggaattttcaaccggaaaagatgacattttaccagcactttaagctacaatctcttgcctatttaatgtaacctttcccgggtcactcagattcttccttacatcatcagaaaaggataggacacagttagatgttaccaatcagtatttgcatgaactggtgtcaagatcttttattcaagattttgtcaactatggcatttcctatttatttaaaatacatgatttggtgcatgatcttcccctgtatcttataaaagttaagtgtctacttgtaaatttccacattcaaagtatacccgagaatgttcaacacctatcttttgt

SEQ ID NO: 11821 - DNA, 1045 bp, Glycine max
  Gm_smallRNAprecursor_4654
cttgctggtcgagaattcttacttttcttggatgatgtgtggaatgagaaccatgttaaatagggttgagttgagagatttaatacaaataggtgctaatggaagtaaaattcttgtgactacacataatcattttgttgcttccatgatggggaccgttccctcccatattttagaaggccttcctttggaggattcattgtggcatcttgtcaaatgggcatttaaagagaaagaagaagaagaaaagtatcctcatttgataaatattggcaaagaaattgtgaaaaaatgcagtggcattccattttcagtgagaacgttagggagtttgctattttcaaaatttgaggcaaatgagtgggaatatgtgagaaacaatgaagtttggaattttcaaccggaaaagatgacattttaccagcactttaagctacaatctcttgcctatttaatgtaacctttcccgggtcactcagattcttccttacatcatcagaaaaggataggacacagttagatgttaccaatcagtatttgcatgaactggtgtcaagatcttttattcaagattttgtcaactatggcatttcctatttatttaaaatacatgatttggtgcatgatcttcccctgtatcttataaaagttaagtgtctacttgtaaatttccacattcaaagtatacccgagaatgttcaacacctatcttttgtcgaagaagatttgcatggcaaatcattcactgcaaaatcagtaggtatgagaaccattttatttcctaacaatggtgtgggagccaacagtgaatgatttgccaagattttctttacattgattttgatgtacaaatacttgtagattttggatttaagtgattctacatttgaaactttgcctcgtttcattggaaagttaaaacacttaagatatctcaatctttgtaataataagaaaattaagagacttcctaattccatttgtaagctccaaaatttacaaattctgtctttacgtggaagcatggagcttgaagcattgtcca

SEQ ID NO: 11822 - DNA, 1185 bp, Glycine max
  Gm_smallRNAprecursor_4655
aatggctccacctaaagaaattttgaccatcatttaccacaatggtcacattgcagacgacctattacgtttacataattcatttgaaaaattaacaattgtctccttactggagcaactgaaaaagttgcttaattgttattttgtgtccttatttcgtttcatcaaggtcagacacgttatatttcagcaacacaactacaagacaatgacgatcttaggcgcatgtaattcaaagaggcataacaaatggattatcaagagtatcagaggtcatcacacttgtctcgcgtcaatgtttagataagatcattgacaacttgacaaacacgtcataacacagatcatccaaccaattgtcaaaacaaactcaaccatctccatcaagacgttgattgcagagatcaaaacgttaatgaattatatcacatcctacaataagacattgttagcaaagcaaagagcgttggagatgattcatggaaaccgggaagaatcatatgccaaactgccaaaacttttgggagctttgcaatcttctattctcgggactgtggtcgctgctcaaacagatcttgtgtatgacaaaagagaaattgtatcgagcaaaagaatgtttagatgtgtcttttggtcatttggtccatgcattaaaggctttgcatattgcaaacccatagtacaagtagatggtacatggctttacgggaagtatactggtacagctacaacacaagatggagctaaccatatctttctgattgcctacgccattgtagaaggggagacaacttcagcttggggttttttcctaaacaaaattgcagctgaatggcttcatcaattacccaaacaaaattgggtataatgctttgatgagggaaaactttggagatatatgactaccaatttgtctgagtctgttaattccatgttaaaagacacaagacatttgctggtgtcattgttggtcaaggagacgtatttcaaaaccgcacaactctttgctattagaggtcaacaaactcagacaataatcaacttcggctcatagtattctgaagtcgtctctgatgcaatgaatagcggtcaacaagaatctaatacacacgttgtaaatgaattcgacagacacaattatacttttattataatagagactcaatccccacttcaaacacacag

SEQ ID NO: 11823 - DNA, 1083 bp, Glycine max
  Gm_smallRNAprecursor_4656
gaattccgttgtgcatttctttttacaaacttagttgcacaatgaaaatacacttttgctactctaatgggagtgcaaaaaacaaaatatacattgaaatcacaattatgttgtacaatgtttttagcactccgagggcgagccctggtgcagcggtaaagttgtgccttggtgacttgttggtcatgggttcgaatccggaaacagcctctttgcatatgcaagggtaagactgcgtacaatatccctcccccataccttcgcatagcgaagagcctctgggcaatggggtacgaagttttaatgtttttagcactccaatagaaatgtatttaggttgtgcattatggggaattgcattttttaaaattttgaaagatatatgggaggccaatagcactatgttgaggccaatggcaagccgttgtccatgatatatgtgagggtgatgttagatgcacccagcattttaagtgaatggacgaagatgtccttcacttaagttgatccgtatgactcatatgtattaacttgatccgtatgagtcatagttgatctatatgagtcatagttgatccctatgagtcatacggatcaacttgatctatatgtgtaattttaacttacggatcaacttgatttgtatagatctcacggatcaacttgatctgtatagatcttacgaatcaacttgatcagtacttataacttacacatacggatcaactcacgcacacccagcaaaatgcagcaaaatggcgtaccttaaatgtcgacgacgacgaaacaaccaccgcaacaatcaccaccgacccgtaacactttcacctcgacccaagcgacaactctctcaataatgaaaaaccaacacaaatcaacaatagagggagaaagtgaagaaaaaaacaatggaggcataagagaaaaaataacactgcaaccaacttcaaaaggaagaagacaccaggggcatttagggaattaaaaacaattgctgggtgcacaagcaataatgctggtgcacctagcatcaccctatatgtgagccgtaacggcctataatgacttaggcccaaatcgact

SEQ ID NO: 11824 - DNA, 1082 bp, Glycine max
  Gm_smallRNAprecursor_4657
gaaaaaatatataaaattcctcctcgggagattcatctccacgtttaatgataaacaatgcgaagaatataatttcaatagcacatagtaattgctaggcaactagttgggaatttccaataatggatagctggcccactacagggtaaaatttatttccgtgtgtttgaattgatagggaatggggtctacattcaataaaaaatatcttagtcttctcggatgattcatttagcaaatctacattgacaagtataaataaattaatttataaaaacaaaatgataatggaaacagtagtctttattaatataagcactactagtttgtttctctttacactaaaaggcctcaaactcaaacctacccactttccctcacatatcaacaaatattcaacaccctcaacagagagagagagagagagagagggttctgaaccaattccttcatcagaagaaggagaggttttggttattccactgcaactggaggaggcatccaaagggatcgcattgatcccaaatccaagcttcaatattcttctctctttcccactcaaaatattaattttatttgggatcatgctatccctttggatttctcctttagtggcttctataatgatggctctcatggattttgcttgctagctgcaccacaacacaaacacttccatatacgcctctcaattaacactactatactactcatgcattatgtggctgaaggagaatcacataactcatttctgtaagtccatattcttttccttttaattgaaacccttttagctcttacacacttgccttggctatttccttagctctatatatcttatgttctttctcaatcttagaaattaacaatttcacagaagcaaatagtttttctatgataagaatctatccaggagtattaagtatattattcgatcataaaagagatataaaattagttaggtagttaaaaaagaataaaaagattattaattgataaaaaaaagtatattattcgtaaaaacaggtcttgcattatttcgcgttcataggctttgttgaattcatatcccttttatgaaa

SEQ ID NO: 11825 - DNA, 1082 bp, Glycine max; identical to SEQ ID NO: 11824
  Gm_smallRNAprecursor_4658

SEQ ID NO: 11826 - DNA, 1196 bp, Glycine max
  Gm_smallRNAprecursor_4659
cggccatacaaaggacctttggctgatgaagtttttgccaaacggaaaaagttccttggtcttccttgttccacttctatcaaaaacctgtgagtctccaaaattgatcaaccttttattagttactatatgataatcttttatctatgttttcttaattttactttctgtgaaaattgagtcaaagaaatgaagtataaataattgtattatttgaaaatgagtctccacaaggactatcatatatttggcccatcaccataagtgaggaggagttatagctacacattatttaatacattttgtatgatactctttcattaaaatttatggagaattacaaaattataaattatggagtagaatttattcttggggtgtctttgtttcagaatttttttatattttactttccatattttaagtggattccatcattgctgcatatatataaaaacacatattattaaggccacacgaattgctccttggctgaaagccaagtatttgcagattcataagttgaggatagcagaatatggaacttatcttaaaaacaggaatttaactgtaaataatacagcatcacaagagtttattttgtgtaaatgagaggccacgtcatgctgtgaatctgcaaatacttagctttcctcaacttaaaatataagttccatattctgctatcctcaacttatgaatctgcaaatacttggctttcagccaaggagcaatattcgtgtggccttaataatatgtgtttttatatatatgcagcaatgatggaatccacttaaaatatggaaagtaaaatataaaaaaattctgaaacaaagacactccaagcatgtgatatgattcttcggagtttaaaaaatattttggatggaacggggaatctttcatcaagtatgtattgaagtagtctctcacctaactataaaggttattattggaaactacacgtttacgattattttttgtctattaaaaatttgtattaatatttataataattaagtttgagtaaaaaaaaaatatcgaacgtctaaataaatagtgtcaaattgtcgtatcttaatccaaattcgagttttattgtattaagtatcaaatacttgtgaaatattcatatattccagaagatgcccagatatctcagtccttaaaccccttgctaaatccatataatatat

SEQ ID NO: 11827 - DNA, 1194 bp, Glycine max
  Gm_smallRNAprecursor_4660
ggccatacaaaggacctttggctgatgaagtttttgccaaacggaaaaagttccttggtcttccttgttccacttctatcaaaaacctgtgagtctccaaaattgatcaaccttttattagttactatatgataatcttttatctatgttttcttaattttactttctgtgaaaattgagtcaaagaaatgaagtataaataattgtattatttgaaaatgagtctccacaaggactatcatatatttggcccatcaccataagtgaggaggagttatagctacacattatttaatacattttgtatgatactctttcattaaaatttatggagaattacaaaattataaattatggagtagaatttattcttggggtgtctttgtttcagaatttttttatattttactttccatattttaagtggattccatcattgctgcatatatataaaaacacatattattaaggccacacgaattgctccttggctgaaagccaagtatttgcagattcataagttgaggatagcagaatatggaacttatcttaaaaacaggaatttaactgtaaataatacagcatcacaagagtttattttgtgtaaatgagaggccacgtcatgctgtgaatctgcaaatacttagctttcctcaacttaaaatataagttccatattctgctatcctcaacttatgaatctgcaaatacttggctttcagccaaggagcaatattcgtgtggccttaataatatgtgtttttatatatatgcagcaatgatggaatccacttaaaatatggaaagtaaaatataaaaaaattctgaaacaaagacactccaagcatgtgatatgattcttcggagtttaaaaaatattttggatggaacggggaatctttcatcaagtatgtattgaagtagtctctcacctaactataaaggttattattggaaactacacgtttacgattattttttgtctattaaaaatttgtattaatatttataataattaagtttgagtaaaaaaaaaatatcgaacgtctaaataaatagtgtcaaattgtcgtatcttaatccaaattcgagttttattgtattaagtatcaaatacttgtgaaatattcatatattccagaagatgcccagatatctcagtccttaaaccccttgctaaatccatataatata

SEQ ID NO: 11828 - DNA, 1195 bp, Glycine max
  Gm_smallRNAprecursor_4661
ggccatacaaaggacctttggctgatgaagtttttgccaaacggaaaaagttccttggtcttccttgttccacttctatcaaaaacctgtgagtctccaaaattgatcaaccttttattagttactatatgataatcttttatctatgttttcttaattttactttctgtgaaaattgagtcaaagaaatgaagtataaataattgtattatttgaaaatgagtctccacaaggactatcatatatttggcccatcaccataagtgaggaggagttatagctacacattatttaatacattttgtatgatactctttcattaaaatttatggagaattacaaaattataaattatggagtagaatttattcttggggtgtctttgtttcagaatttttttatattttactttccatattttaagtggattccatcattgctgcatatatataaaaacacatattattaaggccacacgaattgctccttggctgaaagccaagtatttgcagattcataagttgaggatagcagaatatggaacttatcttaaaaacaggaatttaactgtaaataatacagcatcacaagagtttattttgtgtaaatgagaggccacgtcatgctgtgaatctgcaaatacttagctttcctcaacttaaaatataagttccatattctgctatcctcaacttatgaatctgcaaatacttggctttcagccaaggagcaatattcgtgtggccttaataatatgtgtttttatatatatgcagcaatgatggaatccacttaaaatatggaaagtaaaatataaaaaaattctgaaacaaagacactccaagcatgtgatatgattcttcggagtttaaaaaatattttggatggaacggggaatctttcatcaagtatgtattgaagtagtctctcacctaactataaaggttattattggaaactacacgtttacgattattttttgtctattaaaaatttgtattaatatttataataattaagtttgagtaaaaaaaaaatatcgaacgtctaaataaatagtgtcaaattgtcgtatcttaatccaaattcgagttttattgtattaagtatcaaatacttgtgaaatattcatatattccagaagatgcccagatatctcagtccttaaaccccttgctaaatccatataatatat

SEQ ID NO: 11829 - DNA, 1164 bp, Glycine max
  Gm_smallRNAprecursor_4662
ctttggctgatgaagtttttgccaaacggaaaaagttccttggtcttccttgttccacttctatcaaaaacctgtgagtctccaaaattgatcaaccttttattagttactatatgataatcttttatctatgttttcttaattttactttctgtgaaaattgagtcaaagaaatgaagtataaataattgtattatttgaaaatgagtctccacaaggactatcatatatttggcccatcaccataagtgaggaggagttatagctacacattatttaatacattttgtatgatactctttcattaaaatttatggagaattacaaaattataaattatggagtagaatttattcttggggtgtctttgtttcagaatttttttatattttactttccatattttaagtggattccatcattgctgcatatatataaaaacacatattattaaggccacacgaattgctccttggctgaaagccaagtatttgcagattcataagttgaggatagcagaatatggaacttatcttaaaaacaggaatttaactgtaaataatacagcatcacaagagtttattttgtgtaaatgagaggccacgtcatgctgtgaatctgcaaatacttagctttcctcaacttaaaatataagttccatattctgctatcctcaacttatgaatctgcaaatacttggctttcagccaaggagcaatattcgtgtggccttaataatatgtgtttttatatatatgcagcaatgatggaatccacttaaaatatggaaagtaaaatataaaaaaattctgaaacaaagacactccaagcatgtgatatgattcttcggagtttaaaaaatattttggatggaacggggaatctttcatcaagtatgtattgaagtagtctctcacctaactataaaggttattattggaaactacacgtttacgattattttttgtctattaaaaatttgtattaatatttataataattaagtttgagtaaaaaaaaaatatcgaacgtctaaataaatagtgtcaaattgtcgtatcttaatccaaattcgagttttattgtattaagtatcaaatacttgtgaaatattcatatattccagaagatgcccagatatctcagtccttaaaccccttgcta

SEQ ID NO: 11830 - DNA, 1148 bp, Glycine max
  Gm_smallRNAprecursor_4663
gatgaagtttttgccaaacggaaaaagttccttggtcttccttgttccacttctatcaaaaacctgtgagtctccaaaattgatcaaccttttattagttactatatgataatcttttatctatgttttcttaattttactttctgtgaaaattgagtcaaagaaatgaagtataaataattgtattatttgaaaatgagtctccacaaggactatcatatatttggcccatcaccataagtgaggaggagttatagctacacattatttaatacattttgtatgatactctttcattaaaatttatggagaattacaaaattataaattatggagtagaatttattcttggggtgtctttgtttcagaatttttttatattttactttccatattttaagtggattccatcattgctgcatatatataaaaacacatattattaaggccacacgaattgctccttggctgaaagccaagtatttgcagattcataagttgaggatagcagaatatggaacttatcttaaaaacaggaatttaactgtaaataatacagcatcacaagagtttattttgtgtaaatgagaggccacgtcatgctgtgaatctgcaaatacttagctttcctcaacttaaaatataagttccatattctgctatcctcaacttatgaatctgcaaatacttggctttcagccaaggagcaatattcgtgtggccttaataatatgtgtttttatatatatgcagcaatgatggaatccacttaaaatatggaaagtaaaatataaaaaaattctgaaacaaagacactccaagcatgtgatatgattcttcggagtttaaaaaatattttggatggaacggggaatctttcatcaagtatgtattgaagtagtctctcacctaactataaaggttattattggaaactacacgtttacgattattttttgtctattaaaaatttgtattaatatttataataattaagtttgagtaaaaaaaaaatatcgaacgtctaaataaatagtgtcaaattgtcgtatcttaatccaaattcgagttttattgtattaagtatcaaatacttgtgaaatattcatatattccagaagatgcccagatatctcagtccttaaacc

SEQ ID NO: 11831 - DNA, 1052 bp, Glycine max
  Gm_smallRNAprecursor_4664
atcgtattgcttgcttgctttaatttctttgaataaatagcggacttctggaaaaagaaaacactataagaagttgaaaagcaaacaattatgtgcaaattattggcattgtaatgaagctttcagctagggatcgaaaattgtatattggatcgcaccatccatcgtctaagtagcttatcctcttcaatggatgatttatgcttggacacaatataataattgtgattcgattttttttcccaacaaatattaattattaattttttattaacgaaaaaaaattgaaatacgaacttttcttccctccctcccttctcattttacacccttataactctcggcataattgtagtttgacagtcgacactaccacaaatgacaatccttcaatgacaaaaattagtggattattcatcaatttccataaccacgcatccaaggaaattgtgttatcctatcatcgataacgttgtgataacctatgaagcatggatactccagtcttttgtcgtgttcagtgtctgacacgcgtccgtgtcagagtccgacaccgacacgacatccgtactatattctatattttggacgttacaggtatctaggtgtccgtgtccgtatcggtatcggtgcttcataggtgataacaatatagttaattaataattaaatataagacaagtcgtaagttagcatcatgtccctgcaaaaataatttcctttagggttgaaatgagcattagtctttggaagggaaaataaataccaataaaatgcagcgttgatggaaaatcctttccgccaagcagaaactacaaaaaggccaaccagcacgatcccaaaatgaaacggttttattagtgttttatatgcaatcaaatgagaaaaaacgaaagatgaaaatgacagattgaagaaaagagtaagactgaaaatgttaatcaattccacatcctacatgtgatctaaagtttttttgttgggttctcctcctttacgagacatggagttataatttatgaattaaaattatctgctttgaacattctcta

SEQ ID NO: 11832 - DNA, 1071 bp, Glycine max
  Gm_smallRNAprecursor_4665
taaatagcggacttctggaaaaagaaaacactataagaagttgaaaagcaaacaattatgtgcaaattattggcattgtaatgaagctttcagctagggatcgaaaattgtatattggatcgcaccatccatcgtctaagtagcttatcctcttcaatggatgatttatgcttggacacaatataataattgtgattcgattttttttcccaacaaatattaattattaattttttattaacgaaaaaaaattgaaatacgaacttttcttccctccctcccttctcattttacacccttataactctcggcataattgtagtttgacagtcgacactaccacaaatgacaatccttcaatgacaaaaattagtggattattcatcaatttccataaccacgcatccaaggaaattgtgttatcctatcatcgataacgttgtgataacctatgaagcatggatactccagtcttttgtcgtgttcagtgtctgacacgcgtccgtgtcagagtccgacaccgacacgacatccgtactatattctatattttggacgttacaggtatctaggtgtccgtgtccgtatcggtatcggtgcttcataggtgataacaatatagttaattaataattaaatataagacaagtcgtaagttagcatcatgtccctgcaaaaataatttcctttagggttgaaatgagcattagtctttggaagggaaaataaataccaataaaatgcagcgttgatggaaaatcctttccgccaagcagaaactacaaaaaggccaaccagcacgatcccaaaatgaaacggttttattagtgttttatatgcaatcaaatgagaaaaaacgaaagatgaaaatgacagattgaagaaaagagtaagactgaaaatgttaatcaattccacatcctacatgtgatctaaagtttttttgttgggttctcctcctttacgagacatggagttataatttatgaattaaaattatctgctttgaacattctctagagcttgaaattgatggccgttgatttttattttttatttttataaaaaaga

SEQ ID NO: 11833 - DNA, 1077 bp, Glycine max
  Gm_smallRNAprecursor_4666
taaatagcggacttctggaaaaagaaaacactataagaagttgaaaagcaaacaattatgtgcaaattattggcattgtaatgaagctttcagctagggatcgaaaattgtatattggatcgcaccatccatcgtctaagtagcttatcctcttcaatggatgatttatgcttggacacaatataataattgtgattcgattttttttcccaacaaatattaattattaattttttattaacgaaaaaaaattgaaatacgaacttttcttccctccctcccttctcattttacacccttataactctcggcataattgtagtttgacagtcgacactaccacaaatgacaatccttcaatgacaaaaattagtggattattcatcaatttccataaccacgcatccaaggaaattgtgttatcctatcatcgataacgttgtgataacctatgaagcatggatactccagtcttttgtcgtgttcagtgtctgacacgcgtccgtgtcagagtccgacaccgacacgacatccgtactatattctatattttggacgttacaggtatctaggtgtccgtgtccgtatcggtatcggtgcttcataggtgataacaatatagttaattaataattaaatataagacaagtcgtaagttagcatcatgtccctgcaaaaataatttcctttagggttgaaatgagcattagtctttggaagggaaaataaataccaataaaatgcagcgttgatggaaaatcctttccgccaagcagaaactacaaaaaggccaaccagcacgatcccaaaatgaaacggttttattagtgttttatatgcaatcaaatgagaaaaaacgaaagatgaaaatgacagattgaagaaaagagtaagactgaaaatgttaatcaattccacatcctacatgtgatctaaagtttttttgttgggttctcctcctttacgagacatggagttataatttatgaattaaaattatctgctttgaacattctctagagcttgaaattgatggccgttgatttttattttttatttttataaaaaagaagcctc

SEQ ID NO: 11834 - DNA, 1095 bp, Glycine max
  Gm_smallRNAprecursor_4667
aagagatgcatagaagaggtgatatttataatgaattaataatgatagaaaattattatagaaactattagaccactatagtctcgaataatttttaaacaacacacaactattttatttccaatttacaaataaaacatagttatgtggattagaaaattatctaaactatgatagtctcatactctatactacatctcatctctcgttttttttataagaaacaaataataataaaaaatatacgatttgtttcttaaaaaaaaaaaaagactgctggtagtaataatttttcttaaataatgtatgtatgcttacaggaacatgggaatccctagcgttcctcttagggtcagtggcagagaagacagtgtagacaagaacgaaggtaccaataatctcagcacccaaagcagtaccattgttgtagccatcagcaacagagttggcaccacctccatacctgttgtagtatgctttttggaaccccttggccaatccagtaccacagatagcaccggcacactgtgccaccatgtacaacaacgcccttatcaacgacaccttgcgtcctaggaacaacccgaatgtcaccgccgggtttatgtgtcctcctacaacgacaccaagtccacaaaattatattttcttcttgcatgcatatataatacacgttcaacatcttaccttctaactagtagaatagtatggtgtgttgcttcatagtttatagatatgaatgttcctagctatataatttcactactaaaaagcaatgaatcagtgactaagtttagtggagaaaagaactgttttttctttatcaactctggtgtcactaaattatagtgaccaatttttttaaaatttatatatataaattatttcttcactagttttaatttttctagtgatataaagggaaaaaaatattttttgttatcattgatatgaaatattttttgaagggatgatgtgatacctgaaataccggcggtgcagtaaacaaggatgaagatcatgccaccaaaggcccaagcgatgcccaaaatgccaaccccatcacagtcggtgccacctaccgttgtatcagtc

SEQ ID NO: 11835 - DNA, 1099 bp, Glycine max
  Gm_smallRNAprecursor_4668
gtcagcacataaagggccaaaacggccgctcctctcggcctccaaaatagcctatatatacttgataacctaggattgtctctgcaaaacactgaagagctaattaatgtagttacagctaactagtaacattgtaataataaatagtaacaacaatgatagataaataaataaaaaagacagaacagaaacactgcaaggccatacctatatccattaaagtacaaataaaaaattagtacaccataaattgaaaaacaaagggcaaaaaaacacaaacccacctgacaccaacaaaaagcaaagtgggaaaggtcaccacctctcttggtttaaatgcacagatcagatcatgtctcaaggttttggctgtgccatgctcatgtgtgtatcccccaacaacagtttttggttttttcattatgttttttttttttgcccacttgttgaggttagaatagtccttatctaactttttaaagtgaagtcgtttatggctgatgcagcatcatcaagattctcagttccaaaagacctatggcttggctggcacagcacttagattgcatcaagtcccacccaccacctgcgcttgcatgtgaatcttgatgatgctacatccgcaaataacgactgttaatctatctgtccatgcaactatagctcctaaaacaaagtaacatatatatagaagctatatgtagcatactgttcactctcataaaaaaaaggtacttattatggctcaatataagccatacgcagagaaaaggaaaatctaactccaaggagaaactggaaaatagaaaaaagggaatatcatgaaacatagagactgattaagggagagtaaaaaaaaaatcaaagagagaagtagacagaagaaggtggaaggaaaatagagattttatgtgcaaatttatgtgtggttttggtacacgagaccactttagtaaaggaacctacccagatgaaatcattcctcaagaaccaaaagaagaaaaatataaataataaaaagaaaaaaagagacaaggaaatccaatatccctatgaaaagaaaacttgaccagaaagaacgtcaacaaaaaatcgtgct

SEQ ID NO: 11836 - DNA, 1157 bp, Glycine max
  Gm_smallRNAprecursor_4669
aacaatgatataacagttgttgtgtaaggctcccacacaaactgcatataacaacatagttgtcaacattttagtaaaataacacatatcattttttattttattttacaaatacaataccatgttcttacctcatgacgtttcataatatctaacttgcaacgaaaaactctcacatcatcattgccgatatgttggtttccacgtcgcagccacttacaaagattaaaatttaatataccctaaaaccatttattctattgaaatgaaagacgcttttaaaaatgactaacctgtgccccaatggtttattttctacttgggaaggagtcctctttggagcaaggttggacatcgttcccatgcccacatttctagtaagatgcacatacctccgattgatttagttttataatcggtggcactgcacatctctctgtatagaaaacgaagtacggcagctccccatgcatatgtgccacagtcttcaaagtcacgtaaaaattgaaggtaccttagcgaaactttgttactgcttttgtcaacgaacaagacacctccgatgaatctcagtatccatgcacgggcaaaccttcgtacttgttcttcgtcgtcgtcgttatttatttgtgtaaaatagtgagccagccaacttaatttaaccacactacctttaatttccccttcttgtggtctgactcccaataattcctcacataaatcagcccaatcaagatttgttggaccgattaatggtaaaccatccacacgtatacctaacaatacagagacgtcttggagagtattagtacactctccgcatctcatgtgaaacgtatgtgtttccggcctccatctttctatcagatcactaattaatgagacatttatttttaagtatcccatcttcataatccagtaaaaaccagattgtcgaagaaaaggaaaaatttgctctggaatttcttcttccccttgatacgtggggacagctcgtctgatatgtaatttccgatcttcttccccattccaaacatgttctggaacatgcttaggttgcatccataatacatcaccatcaatggggccagacttaattttaatatgtgatgaacatgacgatgaatatgccattactactacaaaataaaatataa

SEQ ID NO: 11837 - DNA, 1158 bp, Glycine max
  Gm_smallRNAprecursor_4670
aacaatgatataacagttgttgtgtaaggctcccacacaaactgcatataacaacatagttgtcaacattttagtaaaataacacatatcattttttattttattttacaaatacaataccatgttcttacctcatgacgtttcataatatctaacttgcaacgaaaaactctcacatcatcattgccgatatgttggtttccacgtcgcagccacttacaaagattaaaatttaatataccctaaaaccatttattctattgaaatgaaagacgcttttaaaaatgactaacctgtgccccaatggtttattttctacttgggaaggagtcctctttggagcaaggttggacatcgttcccatgcccacatttctagtaagatgcacatacctccgattgatttagttttataatcggtggcactgcacatctctctgtatagaaaacgaagtacggcagctccccatgcatatgtgccacagtcttcaaagtcacgtaaaaattgaaggtaccttagcgaaactttgttactgcttttgtcaacgaacaagacacctccgatgaatctcagtatccatgcacgggcaaaccttcgtacttgttcttcgtcgtcgtcgttatttatttgtgtaaaatagtgagccagccaacttaatttaaccacactacctttaatttccccttcttgtggtctgactcccaataattcctcacataaatcagcccaatcaagatttgttggaccgattaatggtaaaccatccacacgtatacctaacaatacagagacgtcttggagagtattagtacactctccgcatctcatgtgaaacgtatgtgtttccggcctccatctttctatcagatcactaattaatgagacatttatttttaagtatcccatcttcataatccagtaaaaaccagattgtcgaagaaaaggaaaaatttgctctggaatttcttcttccccttgatacgtggggacagctcgtctgatatgtaatttccgatcttcttccccattccaaacatgttctggaacatgcttaggttgcatccataatacatcaccatcaatggggccagacttaattttaatatgtgatgaacatgacgatgaatatgccattactactacaaaataaaatataat

SEQ ID NO: 11838 - DNA, 1155 bp, Glycine max
  Gm_smallRNAprecursor_4671
caatgatataacagttgttgtgtaaggctcccacacaaactgcatataacaacatagttgtcaacattttagtaaaataacacatatcattttttattttattttacaaatacaataccatgttcttacctcatgacgtttcataatatctaacttgcaacgaaaaactctcacatcatcattgccgatatgttggtttccacgtcgcagccacttacaaagattaaaatttaatataccctaaaaccatttattctattgaaatgaaagacgcttttaaaaatgactaacctgtgccccaatggtttattttctacttgggaaggagtcctctttggagcaaggttggacatcgttcccatgcccacatttctagtaagatgcacatacctccgattgatttagttttataatcggtggcactgcacatctctctgtatagaaaacgaagtacggcagctccccatgcatatgtgccacagtcttcaaagtcacgtaaaaattgaaggtaccttagcgaaactttgttactgcttttgtcaacgaacaagacacctccgatgaatctcagtatccatgcacgggcaaaccttcgtacttgttcttcgtcgtcgtcgttatttatttgtgtaaaatagtgagccagccaacttaatttaaccacactacctttaatttccccttcttgtggtctgactcccaataattcctcacataaatcagcccaatcaagatttgttggaccgattaatggtaaaccatccacacgtatacctaacaatacagagacgtcttggagagtattagtacactctccgcatctcatgtgaaacgtatgtgtttccggcctccatctttctatcagatcactaattaatgagacatttatttttaagtatcccatcttcataatccagtaaaaaccagattgtcgaagaaaaggaaaaatttgctctggaatttcttcttccccttgatacgtggggacagctcgtctgatatgtaatttccgatcttcttccccattccaaacatgttctggaacatgcttaggttgcatccataatacatcaccatcaatggggccagacttaattttaatatgtgatgaacatgacgatgaatatgccattactactacaaaataaaatataa

SEQ ID NO: 11839 - DNA, 1053 bp, Glycine max
  Gm_smallRNAprecursor_4672
ccaacttaatttaaccacactacctttaatttccccttcttgtggtctgactcccaataattcctcacataaatcagcccaatcaagatttgttggaccgattaatggtaaaccatccacacgtatacctaacaatacagagacgtcttggagagtattagtacactctccgcatctcatgtgaaacgtatgtgtttccggcctccatctttctatcagatcactaattaatgagacatttatttttaagtatcccatcttcataatccagtaaaaaccagattgtcgaagaaaaggaaaaatttgctctggaatttcttcttccccttgatacgtggggacagctcgtctgatatgtaatttccgatcttcttccccattccaaacatgttctggaacatgcttaggttgcatccataatacatcaccatcaatggggccagacttaattttaatatgtgatgaacatgacgatgaatatgccattactactacaaaataaaatataatacaataaatttacaaatcaatttatacattatttgtagataatataaattaaactacgcacatttataaaaacgttattaaatatatattataaaaatttaaataaataacaaaatattattatttcataacaaaatatattatacaaataataaaatttaaatatattctacaaataataaaatttaaaaatattctacaaataaaaaaatttaaatatattctacaaataatttcaaatacatgcgcacactaatttaaataattaacataatgtattctacaattaacaaataaataattcaataaaatatggactaacaaataaattaaaatacaaacaaatattgaaatgctaaaaattatttaaacaatatatatacaaaaataataataatgtacaatgtatcatatatttaataacgtaaatttcctaacaaagaatattaacctacaaactaaaaataaaacataccatgtactaacttaaactaccctatcatatatatatattttaaaaaaaattcaaactaaaaataacta

SEQ ID NO: 11840 - DNA, 1084 bp, Glycine max
  Gm_smallRNAprecursor_4673
ttagttgctatcagccttttatttgaacacaagttttttcttaatagaaacaaattggtactgtagacaaggttatcaaactcgagagttttcgtagacttgtgagagtttcatagaatcgacttgtggactcaactcgtagactcattagagtctactttatataaaaataataacaaaatatttataaataatatactaattaaacatttcaaaaatataataaagcaaaatagtaaatcataaagtttataatatttcaataaccaaggctagcaataatacatcactactagataataacttgcaaacgttatagtagtggtaggtcattctcatcgagggtttgaagttattagagaataagagtttgatattattaaaggtgagaattttgtatttgagaataacacactaaatgaaagtatgttgaatactaaacaaacaaaaaaataaaataaaaaatgacttacattttggtctaatttttttaacttgctaactcgttgactcgatggtaaactcgagagtctaccgaatttacttagagtttatagagtttgcataaagtttactaaaaaagagtttactcaagagtcaactcgcagaggacaagtggactcgtaaactcgtaagagttagtgagttaactcgagagtttgataaacatgactgtagaaactcatttacatttgagtgtgatgttagtgatgatcttgaaacacaatttctcatctaaaaccaaaaatccaactcctcaaattaaggataaatttgacttgacctgtgctctcctacaacctaagataaggtagtcattaatttcatttggattaggtttcaaaaacaatttattgcattaggcttaacaaggtgcaagggattcattttagtaataggttggctatttggctcagtggctaagaaaatcaaacaatgcattgatcatttccaccttatgtatgtactcaacattcttagaatcatgcaaaatcaagaaattaagaacaatcgttctctcacagttactatttcatacatctcactggacatttatgaagtgtttggcttacccaaccatgat

SEQ ID NO: 11841 - DNA, 1056 bp, Glycine max
  Gm_smallRNAprecursor_4674
tatatatatatagtaggatcaaacggactaatagaagtaagaatgcagtatgattgatgaaatgaaaatataaacttgaaaacagatatcaagggcacaccggagaccggcttacaaatcccaggttttcataaacaaagaaaccgaagcggcggccgcacaggatcggtgaagggagaagagagaaggatgaaaaatagaaatttattgaatctaaaaagaagcgcttacaaaaatcttgtttcagagcacctctcttccgaaacctgaaaaatggctaaaatgaaagggtgcctcacaacatgcttgaggactccttatatagccaaaaatctaagaccggtagttgctggtagttttgaccgagactatttgactgtttgttacaagacaagtagttttgaccgagactttaatggctacaggacaggtagtattgtccagcattaattacacattaattacaaacagacggttttgtgaccgaaattaaatttaatctaaacagataccaaaacaatcatcttcgttttggtaaaagggatcttcttcgtagcagaacttgtttcttccttctttgaggatgaagcttcttcttcctgttgtaacatttgtagaacttctttcagatttttagctaagacctcctttgatgtcgatcctgctaaaaatgctgccagatgagacttttggttcaaaaacacagaagtctctggatcagctgctttgagaaattttggatgggattggaaccatagttttacttgttctggatccgctttataaaattatcatataatttatatctatttatgaaaatatacttaattaaagatatttatactaattatttgagttaagatacataaatattctattattaattatataataatatataaataaaatatctgatattttaaattattttttattatatatcttaccttttatttagtatatatatatatataaatttaagaattcaaaaacagagttggatgacacgtaacgaagtagtttttaaaggtttggatgtcacatgtcattgattca

SEQ ID NO: 11842 - DNA, 1056 bp, Glycine max; identical to SEQ ID NO: 11841
  Gm_smallRNAprecursor_4675

SEQ ID NO: 11843 - DNA, 1057 bp, Glycine max
  Gm_smallRNAprecursor_4676
tatatatatatagtaggatcaaacggactaatagaagtaagaatgcagtatgattgatgaaatgaaaatataaacttgaaaacagatatcaagggcacaccggagaccggcttacaaatcccaggttttcataaacaaagaaaccgaagcggcggccgcacaggatcggtgaagggagaagagagaaggatgaaaaatagaaatttattgaatctaaaaagaagcgcttacaaaaatcttgtttcagagcacctctcttccgaaacctgaaaaatggctaaaatgaaagggtgcctcacaacatgcttgaggactccttatatagccaaaaatctaagaccggtagttgctggtagttttgaccgagactatttgactgtttgttacaagacaagtagttttgaccgagactttaatggctacaggacaggtagtattgtccagcattaattacacattaattacaaacagacggttttgtgaccgaaattaaatttaatctaaacagataccaaaacaatcatcttcgttttggtaaaagggatcttcttcgtagcagaacttgtttcttccttctttgaggatgaagcttcttcttcctgttgtaacatttgtagaacttctttcagatttttagctaagacctcctttgatgtcgatcctgctaaaaatgctgccagatgagacttttggttcaaaaacacagaagtctctggatcagctgctttgagaaattttggatgggattggaaccatagttttacttgttctggatccgctttataaaattatcatataatttatatctatttatgaaaatatacttaattaaagatatttatactaattatttgagttaagatacataaatattctattattaattatataataatatataaataaaatatctgatattttaaattattttttattatatatcttaccttttatttagtatatatatatatataaatttaagaattcaaaaacagagttggatgacacgtaacgaagtagtttttaaaggtttggatgtcacatgtcattgattcat

SEQ ID NO: 11844 - DNA, 1202 bp, Glycine max
  Gm_smallRNAprecursor_4677
tatatatatatagtaggatcaaacggactaatagaagtaagaatgcagtatgattgatgaaatgaaaatataaacttgaaaacagatatcaagggcacaccggagaccggcttacaaatcccaggttttcataaacaaagaaaccgaagcggcggccgcacaggatcggtgaagggagaagagagaaggatgaaaaatagaaatttattgaatctaaaaagaagcgcttacaaaaatcttgtttcagagcacctctcttccgaaacctgaaaaatggctaaaatgaaagggtgcctcacaacatgcttgaggactccttatatagccaaaaatctaagaccggtagttgctggtagttttgaccgagactatttgactgtttgttacaagacaagtagttttgaccgagactttaatggctacaggacaggtagtattgtccagcattaattacacattaattacaaacagacggttttgtgaccgaaattaaatttaatctaaacagataccaaaacaatcatcttcgttttggtaaaagggatcttcttcgtagcagaacttgtttcttccttctttgaggatgaagcttcttcttcctgttgtaacatttgtagaacttctttcagatttttagctaagacctcctttgatgtcgatcctgctaaaaatgctgccagatgagacttttggttcaaaaacacagaagtctctggatcagctgctttgagaaattttggatgggattggaaccatagttttacttgttctggatccgctttataaaattatcatataatttatatctatttatgaaaatatacttaattaaagatatttatactaattatttgagttaagatacataaatattctattattaattatataataatatataaataaaatatctgatattttaaattattttttattatatatcttaccttttatttagtatatatatatatataaatttaagaattcaaaaacagagttggatgacacgtaacgaagtagtttttaaaggtttggatgtcacatgtcattgattcataaataatataaattgatttgatgattaaaatatttattggtcattaaaaaattattttcaaatatttattggtcataaaaaaattatttcattaaactatttttttattatttaaactgtatttcaaaatatgtttatcaatcag

SEQ ID NO: 11845 - DNA, 1076 bp, Glycine max
  Gm_smallRNAprecursor_4678
atatatatagtaggatcaaacggactaatagaagtaagaatgcagtatgattgatgaaatgaaaatataaacttgaaaacagatatcaagggcacaccggagaccggcttacaaatcccaggttttcataaacaaagaaaccgaagcggcggccgcacaggatcggtgaagggagaagagagaaggatgaaaaatagaaatttattgaatctaaaaagaagcgcttacaaaaatcttgtttcagagcacctctcttccgaaacctgaaaaatggctaaaatgaaagggtgcctcacaacatgcttgaggactccttatatagccaaaaatctaagaccggtagttgctggtagttttgaccgagactatttgactgtttgttacaagacaagtagttttgaccgagactttaatggctacaggacaggtagtattgtccagcattaattacacattaattacaaacagacggttttgtgaccgaaattaaatttaatctaaacagataccaaaacaatcatcttcgttttggtaaaagggatcttcttcgtagcagaacttgtttcttccttctttgaggatgaagcttcttcttcctgttgtaacatttgtagaacttctttcagatttttagctaagacctcctttgatgtcgatcctgctaaaaatgctgccagatgagacttttggttcaaaaacacagaagtctctggatcagctgctttgagaaattttggatgggattggaaccatagttttacttgttctggatccgctttataaaattatcatataatttatatctatttatgaaaatatacttaattaaagatatttatactaattatttgagttaagatacataaatattctattattaattatataataatatataaataaaatatctgatattttaaattattttttattatatatcttaccttttatttagtatatatatatatataaatttaagaattcaaaaacagagttggatgacacgtaacgaagtagtttttaaaggtttggatgtcacatgtcattgattcataaataatataaattgatttgat

SEQ ID NO: 11846 - DNA, 1052 bp, Glycine max
  Gm_smallRNAprecursor_4679
tatatatagtaggatcaaacggactaatagaagtaagaatgcagtatgattgatgaaatgaaaatataaacttgaaaacagatatcaagggcacaccggagaccggcttacaaatcccaggttttcataaacaaagaaaccgaagcggcggccgcacaggatcggtgaagggagaagagagaaggatgaaaaatagaaatttattgaatctaaaaagaagcgcttacaaaaatcttgtttcagagcacctctcttccgaaacctgaaaaatggctaaaatgaaagggtgcctcacaacatgcttgaggactccttatatagccaaaaatctaagaccggtagttgctggtagttttgaccgagactatttgactgtttgttacaagacaagtagttttgaccgagactttaatggctacaggacaggtagtattgtccagcattaattacacattaattacaaacagacggttttgtgaccgaaattaaatttaatctaaacagataccaaaacaatcatcttcgttttggtaaaagggatcttcttcgtagcagaacttgtttcttccttctttgaggatgaagcttcttcttcctgttgtaacatttgtagaacttctttcagatttttagctaagacctcctttgatgtcgatcctgctaaaaatgctgccagatgagacttttggttcaaaaacacagaagtctctggatcagctgctttgagaaattttggatgggattggaaccatagttttacttgttctggatccgctttataaaattatcatataatttatatctatttatgaaaatatacttaattaaagatatttatactaattatttgagttaagatacataaatattctattattaattatataataatatataaataaaatatctgatattttaaattattttttattatatatcttaccttttatttagtatatatatatatataaatttaagaattcaaaaacagagttggatgacacgtaacgaagtagtttttaaaggtttggatgtcacatgtcattgattca

SEQ ID NO: 11847 - DNA, 1052 bp, Glycine max; identical to SEQ ID NO: 11846
  Gm_smallRNAprecursor_4680

SEQ ID NO: 11848 - DNA, 1075 bp, Glycine max
  Gm_smallRNAprecursor_4681
tatatatagtaggatcaaacggactaatagaagtaagaatgcagtatgattgatgaaatgaaaatataaacttgaaaacagatatcaagggcacaccggagaccggcttacaaatcccaggttttcataaacaaagaaaccgaagcggcggccgcacaggatcggtgaagggagaagagagaaggatgaaaaatagaaatttattgaatctaaaaagaagcgcttacaaaaatcttgtttcagagcacctctcttccgaaacctgaaaaatggctaaaatgaaagggtgcctcacaacatgcttgaggactccttatatagccaaaaatctaagaccggtagttgctggtagttttgaccgagactatttgactgtttgttacaagacaagtagttttgaccgagactttaatggctacaggacaggtagtattgtccagcattaattacacattaattacaaacagacggttttgtgaccgaaattaaatttaatctaaacagataccaaaacaatcatcttcgttttggtaaaagggatcttcttcgtagcagaacttgtttcttccttctttgaggatgaagcttcttcttcctgttgtaacatttgtagaacttctttcagatttttagctaagacctcctttgatgtcgatcctgctaaaaatgctgccagatgagacttttggttcaaaaacacagaagtctctggatcagctgctttgagaaattttggatgggattggaaccatagttttacttgttctggatccgctttataaaattatcatataatttatatctatttatgaaaatatacttaattaaagatatttatactaattatttgagttaagatacataaatattctattattaattatataataatatataaataaaatatctgatattttaaattattttttattatatatcttaccttttatttagtatatatatatatataaatttaagaattcaaaaacagagttggatgacacgtaacgaagtagtttttaaaggtttggatgtcacatgtcattgattcataaataatataaattgatttgat

SEQ ID NO: 11849 - DNA, 1051 bp, Glycine max
  Gm_smallRNAprecursor_4682
atatatagtaggatcaaacggactaatagaagtaagaatgcagtatgattgatgaaatgaaaatataaacttgaaaacagatatcaagggcacaccggagaccggcttacaaatcccaggttttcataaacaaagaaaccgaagcggcggccgcacaggatcggtgaagggagaagagagaaggatgaaaaatagaaatttattgaatctaaaaagaagcgcttacaaaaatcttgtttcagagcacctctcttccgaaacctgaaaaatggctaaaatgaaagggtgcctcacaacatgcttgaggactccttatatagccaaaaatctaagaccggtagttgctggtagttttgaccgagactatttgactgtttgttacaagacaagtagttttgaccgagactttaatggctacaggacaggtagtattgtccagcattaattacacattaattacaaacagacggttttgtgaccgaaattaaatttaatctaaacagataccaaaacaatcatcttcgttttggtaaaagggatcttcttcgtagcagaacttgtttcttccttctttgaggatgaagcttcttcttcctgttgtaacatttgtagaacttctttcagatttttagctaagacctcctttgatgtcgatcctgctaaaaatgctgccagatgagacttttggttcaaaaacacagaagtctctggatcagctgctttgagaaattttggatgggattggaaccatagttttacttgttctggatccgctttataaaattatcatataatttatatctatttatgaaaatatacttaattaaagatatttatactaattatttgagttaagatacataaatattctattattaattatataataatatataaataaaatatctgatattttaaattattttttattatatatcttaccttttatttagtatatatatatatataaatttaagaattcaaaaacagagttggatgacacgtaacgaagtagtttttaaaggtttggatgtcacatgtcattgattca

SEQ ID NO: 11850 - DNA, 1051 bp, Glycine max; identical to SEQ ID NO: 11849
  Gm_smallRNAprecursor_4683

SEQ ID NO: 11851 - DNA, 1074 bp, Glycine max
  Gm_smallRNAprecursor_4684
atatatagtaggatcaaacggactaatagaagtaagaatgcagtatgattgatgaaatgaaaatataaacttgaaaacagatatcaagggcacaccggagaccggcttacaaatcccaggttttcataaacaaagaaaccgaagcggcggccgcacaggatcggtgaagggagaagagagaaggatgaaaaatagaaatttattgaatctaaaaagaagcgcttacaaaaatcttgtttcagagcacctctcttccgaaacctgaaaaatggctaaaatgaaagggtgcctcacaacatgcttgaggactccttatatagccaaaaatctaagaccggtagttgctggtagttttgaccgagactatttgactgtttgttacaagacaagtagttttgaccgagactttaatggctacaggacaggtagtattgtccagcattaattacacattaattacaaacagacggttttgtgaccgaaattaaatttaatctaaacagataccaaaacaatcatcttcgttttggtaaaagggatcttcttcgtagcagaacttgtttcttccttctttgaggatgaagcttcttcttcctgttgtaacatttgtagaacttctttcagatttttagctaagacctcctttgatgtcgatcctgctaaaaatgctgccagatgagacttttggttcaaaaacacagaagtctctggatcagctgctttgagaaattttggatgggattggaaccatagttttacttgttctggatccgctttataaaattatcatataatttatatctatttatgaaaatatacttaattaaagatatttatactaattatttgagttaagatacataaatattctattattaattatataataatatataaataaaatatctgatattttaaattattttttattatatatcttaccttttatttagtatatatatatatataaatttaagaattcaaaaacagagttggatgacacgtaacgaagtagtttttaaaggtttggatgtcacatgtcattgattcataaataatataaattgatttgat

SEQ ID NO: 11852 - DNA, 1181 bp, Glycine max
  Gm_smallRNAprecursor_4685
taggatcaaacggactaatagaagtaagaatgcagtatgattgatgaaatgaaaatataaacttgaaaacagatatcaagggcacaccggagaccggcttacaaatcccaggttttcataaacaaagaaaccgaagcggcggccgcacaggatcggtgaagggagaagagagaaggatgaaaaatagaaatttattgaatctaaaaagaagcgcttacaaaaatcttgtttcagagcacctctcttccgaaacctgaaaaatggctaaaatgaaagggtgcctcacaacatgcttgaggactccttatatagccaaaaatctaagaccggtagttgctggtagttttgaccgagactatttgactgtttgttacaagacaagtagttttgaccgagactttaatggctacaggacaggtagtattgtccagcattaattacacattaattacaaacagacggttttgtgaccgaaattaaatttaatctaaacagataccaaaacaatcatcttcgttttggtaaaagggatcttcttcgtagcagaacttgtttcttccttctttgaggatgaagcttcttcttcctgttgtaacatttgtagaacttctttcagatttttagctaagacctcctttgatgtcgatcctgctaaaaatgctgccagatgagacttttggttcaaaaacacagaagtctctggatcagctgctttgagaaattttggatgggattggaaccatagttttacttgttctggatccgctttataaaattatcatataatttatatctatttatgaaaatatacttaattaaagatatttatactaattatttgagttaagatacataaatattctattattaattatataataatatataaataaaatatctgatattttaaattattttttattatatatcttaccttttatttagtatatatatatatataaatttaagaattcaaaaacagagttggatgacacgtaacgaagtagtttttaaaggtttggatgtcacatgtcattgattcataaataatataaattgatttgatgattaaaatatttattggtcattaaaaaattattttcaaatatttattggtcataaaaaaattatttcattaaactatttttttattatttaaactgtatttcaaaatatgttta

SEQ ID NO: 11853 - DNA, 1042 bp, Glycine max
  Gm_smallRNAprecursor_4686
tcggtgaagggagaagagagaaggatgaaaaatagaaatttattgaatctaaaaagaagcgcttacaaaaatcttgtttcagagcacctctcttccgaaacctgaaaaatggctaaaatgaaagggtgcctcacaacatgcttgaggactccttatatagccaaaaatctaagaccggtagttgctggtagttttgaccgagactatttgactgtttgttacaagacaagtagttttgaccgagactttaatggctacaggacaggtagtattgtccagcattaattacacattaattacaaacagacggttttgtgaccgaaattaaatttaatctaaacagataccaaaacaatcatcttcgttttggtaaaagggatcttcttcgtagcagaacttgtttcttccttctttgaggatgaagcttcttcttcctgttgtaacatttgtagaacttctttcagatttttagctaagacctcctttgatgtcgatcctgctaaaaatgctgccagatgagacttttggttcaaaaacacagaagtctctggatcagctgctttgagaaattttggatgggattggaaccatagttttacttgttctggatccgctttataaaattatcatataatttatatctatttatgaaaatatacttaattaaagatatttatactaattatttgagttaagatacataaatattctattattaattatataataatatataaataaaatatctgatattttaaattattttttattatatatcttaccttttatttagtatatatatatatataaatttaagaattcaaaaacagagttggatgacacgtaacgaagtagtttttaaaggtttggatgtcacatgtcattgattcataaataatataaattgatttgatgattaaaatatttattggtcattaaaaaattattttcaaatatttattggtcataaaaaaattatttcattaaactatttttttattatttaaactgtatttcaaaatatgtttatcaatcagttttt

SEQ ID NO: 11854 - DNA, 1032 bp, Glycine max
  Gm_smallRNAprecursor_4687
gaagggagaagagagaaggatgaaaaatagaaatttattgaatctaaaaagaagcgcttacaaaaatcttgtttcagagcacctctcttccgaaacctgaaaaatggctaaaatgaaagggtgcctcacaacatgcttgaggactccttatatagccaaaaatctaagaccggtagttgctggtagttttgaccgagactatttgactgtttgttacaagacaagtagttttgaccgagactttaatggctacaggacaggtagtattgtccagcattaattacacattaattacaaacagacggttttgtgaccgaaattaaatttaatctaaacagataccaaaacaatcatcttcgttttggtaaaagggatcttcttcgtagcagaacttgtttcttccttctttgaggatgaagcttcttcttcctgttgtaacatttgtagaacttctttcagatttttagctaagacctcctttgatgtcgatcctgctaaaaatgctgccagatgagacttttggttcaaaaacacagaagtctctggatcagctgctttgagaaattttggatgggattggaaccatagttttacttgttctggatccgctttataaaattatcatataatttatatctatttatgaaaatatacttaattaaagatatttatactaattatttgagttaagatacataaatattctattattaattatataataatatataaataaaatatctgatattttaaattattttttattatatatcttaccttttatttagtatatatatatatataaatttaagaattcaaaaacagagttggatgacacgtaacgaagtagtttttaaaggtttggatgtcacatgtcattgattcataaataatataaattgatttgatgattaaaatatttattggtcattaaaaaattattttcaaatatttattggtcataaaaaaattatttcattaaactatttttttattatttaaactgtatttcaaaatatgtttatcaatcag

SEQ ID NO: 11855 - DNA, 1058 bp, Glycine max
  Gm_smallRNAprecursor_4688
aaaatagaaatttattgaatctaaaaagaagcgcttacaaaaatcttgtttcagagcacctctcttccgaaacctgaaaaatggctaaaatgaaagggtgcctcacaacatgcttgaggactccttatatagccaaaaatctaagaccggtagttgctggtagttttgaccgagactatttgactgtttgttacaagacaagtagttttgaccgagactttaatggctacaggacaggtagtattgtccagcattaattacacattaattacaaacagacggttttgtgaccgaaattaaatttaatctaaacagataccaaaacaatcatcttcgttttggtaaaagggatcttcttcgtagcagaacttgtttcttccttctttgaggatgaagcttcttcttcctgttgtaacatttgtagaacttctttcagatttttagctaagacctcctttgatgtcgatcctgctaaaaatgctgccagatgagacttttggttcaaaaacacagaagtctctggatcagctgctttgagaaattttggatgggattggaaccatagttttacttgttctggatccgctttataaaattatcatataatttatatctatttatgaaaatatacttaattaaagatatttatactaattatttgagttaagatacataaatattctattattaattatataataatatataaataaaatatctgatattttaaattattttttattatatatcttaccttttatttagtatatatatatatataaatttaagaattcaaaaacagagttggatgacacgtaacgaagtagtttttaaaggtttggatgtcacatgtcattgattcataaataatataaattgatttgatgattaaaatatttattggtcattaaaaaattattttcaaatatttattggtcataaaaaaattatttcattaaactatttttttattatttaaactgtatttcaaaatatgtttatcaatcagttttttttttataaaacatttattggtgattaaaaataaatttataaat

SEQ ID NO: 11856 - DNA, 1080 bp, Glycine max
  Gm_smallRNAprecursor_4689
atgatttcgttttagaaacaatggccctatttgatacaggggctgattcaaactgcattttagaaggattaattcctacaaaattccttgagaaaacctcagaaaaattaagtacggcaaacggctcaaaattaaaaattaattttaagctatcaaatgcaataattgaaaaccaaggtcttaagattaacacaaactttcttctggtaaaaaaccttaagaatgaagtaatcttaggaacgcccttcattagagccctgtttcccatccaaatatctaatgaaggaataaccacaaatcatttaggaagaaaaattatatttaatttttctactaaaccaatttccagaaatataaatcttatagaaaataagattaatcaaattaacttcttaaaagaagaagtatcttttaataatattcagatacaactgggaaaaccccaagtaaaagaaagaattcaatctttattaaatcatattgaatcgaccgtttgttctgaattgccacatgcattttgggacagaaagaaacatattgtcgatctcccttatgagaaagactttagggaaaaacaaattcccacaaaagccagaccaatccaaatgaatgaagaacttcttcaatattgtcaaaaggaaatcaaggatttgcttgataaaggcctaatccggaaaagcaaaagcccatggtcttgtgcggctttttatgttaacaaacaatctgagattgagcgtggaacaccccgcttagtcataaattacaaaccattaaatcaagcattacaatggattagatatcctattccaaacaaaaaagatttgcttaacagattaaattctgcaaagatattttcaaaatttgatatgaaatctggattttggcaaatccaaatccaagaatcagataggtacaaaacatcgtttactgtacctttcgggcaatatgaatggaacgtgatgccattcggactgaagaatgccccttcagaatttcaaaaaattatgaacgatatttttaatccttattcaaaatttgtcattgtctacatagatgatgttttaatcttttcccaaaaca

SEQ ID NO: 11857 - DNA, 1073 bp, Glycine max
  Gm_smallRNAprecursor_4690
tgtacctttcgggcaatatgaatggaacgtgatgccattcggactgaagaatgccccttcagaatttcaaaaaattatgaacgatatttttaatccttattcaaaatttgtcattgtctacatagatgatgttttaatcttttcccaaaacattgaccaacatttcaaacacctccaaaccttcatacatatcatcaaacaaaatggtttggcagtctccaaagcaaaaatcaatcttttccaaactcgaattcgattccttggtcacaatatatatcaaggtacaatcattccaatcgaaaggtcaatagagtttgctagcaaattccccaaccaaatcttagacaaaacccagttacaaagatttctaggttgtctaaattacgtaggagaatttgtctcctatttaaataatattgtcaagccattacatgataggctggagaaaaatccgcctccttggtctgacctccatacacaaacagttaaagaaatcaaagtcaaagtccaatccattaaatgtctgtatcttcctattccacaggcatttaaaattgtcgaaactgatgcttcagacataggttatggtggcatcctcaaacaaagagtccatggccaagatcatgtcattgcatatacatcaaaacattggaatcctgcacaattaaaatattcaactgttaaaaaagaggttttagcaattgttttgtgcatttccaaatttcaatcggatttattaaaccaaaaatttttaatcagggttgattgtaaatcagccaaaagatattttacaaaaagatgttaaaaaccttgcctcaaaacaaatttttgcacgatggcaagcaattttaagtgtctttgattttgacatagaatacatcaagggcacctcaaattcactacctgactaccttacccgtgaattcttacagaaaaagtagtaatgcctcctaaggcatcgggaatctccctacggggaggaaggagtacaggcaaaggagccaggctggctcttccagagccaaccatcaagaaatcatctaccacttctgggtcaccaacccaagctgggt

SEQ ID NO: 11858 - DNA, 1071 bp, Glycine max
  Gm_smallRNAprecursor_4691
tacctttcgggcaatatgaatggaacgtgatgccattcggactgaagaatgccccttcagaatttcaaaaaattatgaacgatatttttaatccttattcaaaatttgtcattgtctacatagatgatgttttaatcttttcccaaaacattgaccaacatttcaaacacctccaaaccttcatacatatcatcaaacaaaatggtttggcagtctccaaagcaaaaatcaatcttttccaaactcgaattcgattccttggtcacaatatatatcaaggtacaatcattccaatcgaaaggtcaatagagtttgctagcaaattccccaaccaaatcttagacaaaacccagttacaaagatttctaggttgtctaaattacgtaggagaatttgtctcctatttaaataatattgtcaagccattacatgataggctggagaaaaatccgcctccttggtctgacctccatacacaaacagttaaagaaatcaaagtcaaagtccaatccattaaatgtctgtatcttcctattccacaggcatttaaaattgtcgaaactgatgcttcagacataggttatggtggcatcctcaaacaaagagtccatggccaagatcatgtcattgcatatacatcaaaacattggaatcctgcacaattaaaatattcaactgttaaaaaagaggttttagcaattgttttgtgcatttccaaatttcaatcggatttattaaaccaaaaatttttaatcagggttgattgtaaatcagccaaaagatattttacaaaaagatgttaaaaaccttgcctcaaaacaaatttttgcacgatggcaagcaattttaagtgtctttgattttgacatagaatacatcaagggcacctcaaattcactacctgactaccttacccgtgaattcttacagaaaaagtagtaatgcctcctaaggcatcgggaatctccctacggggaggaaggagtacaggcaaaggagccaggctggctcttccagagccaaccatcaagaaatcatctaccacttctgggtcaccaacccaagctgggt

SEQ ID NO: 11859 - DNA, 1174 bp, Glycine max
  Gm_smallRNAprecursor_4692
aaagagtccatggccaagatcatgtcattgcatatacatcaaaacattggaatcctgcacaattaaaatattcaactgttaaaaaagaggttttagcaattgttttgtgcatttccaaatttcaatcggatttattaaaccaaaaatttttaatcagggttgattgtaaatcagccaaaagatattttacaaaaagatgttaaaaaccttgcctcaaaacaaatttttgcacgatggcaagcaattttaagtgtctttgattttgacatagaatacatcaagggcacctcaaattcactacctgactaccttacccgtgaattcttacagaaaaagtagtaatgcctcctaaggcatcgggaatctccctacggggaggaaggagtacaggcaaaggagccaggctggctcttccagagccaaccatcaagaaatcatctaccacttctgggtcaccaacccaagctgggtcatctacccagaaaaccaatttagaagggtcatcaacccagattgcctcaatcaaacctgagccatccactcaggaatctcccaaaccggcaaccgccaaacaaacatcggccgactatgcatggccaattgaaacccttcaggcccttcaagacatgggtctgaccaaatttccaaaaataatcaaaaaatcttgggcagacattgcctcagaatctgatgatgaatctgaatcaaatttacaaacaatgatccaaaatgcgtcaatgaccaaaacagccaccaatactaaaggaaaactacctttagccaaagctcaaacaccacctaccaaacaaactaacaattatatttataaaaataaattgttaactattttgtagatggaacctgaattttgggacaaaaatcccttcaaggcgacggccaaggctttcccaccaggatttcactacaaaccaaccaccatcctgaagacaagaactttttatgaattgattttggtagattcaaactcagtatctatcaaacatttcaaagatccaaaagaccaaaccttaaacacccactcaaccatccaaatactaaaagttcttcaaccaagacactttggttcggacttgaacaaaggaaagagattttcagttccatttgatccggtaggttatacctattgggattacgttgatgcttggactaaggt

SEQ ID NO: 11860 - DNA, 1173 bp, Glycine max
  Gm_smallRNAprecursor_4693
aagagtccatggccaagatcatgtcattgcatatacatcaaaacattggaatcctgcacaattaaaatattcaactgttaaaaaagaggttttagcaattgttttgtgcatttccaaatttcaatcggatttattaaaccaaaaatttttaatcagggttgattgtaaatcagccaaaagatattttacaaaaagatgttaaaaaccttgcctcaaaacaaatttttgcacgatggcaagcaattttaagtgtctttgattttgacatagaatacatcaagggcacctcaaattcactacctgactaccttacccgtgaattcttacagaaaaagtagtaatgcctcctaaggcatcgggaatctccctacggggaggaaggagtacaggcaaaggagccaggctggctcttccagagccaaccatcaagaaatcatctaccacttctgggtcaccaacccaagctgggtcatctacccagaaaaccaatttagaagggtcatcaacccagattgcctcaatcaaacctgagccatccactcaggaatctcccaaaccggcaaccgccaaacaaacatcggccgactatgcatggccaattgaaacccttcaggcccttcaagacatgggtctgaccaaatttccaaaaataatcaaaaaatcttgggcagacattgcctcagaatctgatgatgaatctgaatcaaatttacaaacaatgatccaaaatgcgtcaatgaccaaaacagccaccaatactaaaggaaaactacctttagccaaagctcaaacaccacctaccaaacaaactaacaattatatttataaaaataaattgttaactattttgtagatggaacctgaattttgggacaaaaatcccttcaaggcgacggccaaggctttcccaccaggatttcactacaaaccaaccaccatcctgaagacaagaactttttatgaattgattttggtagattcaaactcagtatctatcaaacatttcaaagatccaaaagaccaaaccttaaacacccactcaaccatccaaatactaaaagttcttcaaccaagacactttggttcggacttgaacaaaggaaagagattttcagttccatttgatccggtaggttatacctattgggattacgttgatgcttggactaaggt

SEQ ID NO: 11861 - DNA, 1173 bp, Glycine max; identical to SEQ ID NO: 11860
  Gm_smallRNAprecursor_4694

SEQ ID NO: 11862 - DNA, 1130 bp, Glycine max
  Gm_smallRNAprecursor_4695
caaacctgagccatccactcaggaatctcccaaaccggcaaccgccaaacaaacatcggccgactatgcatggccaattgaaacccttcaggcccttcaagacatgggtctgaccaaatttccaaaaataatcaaaaaatcttgggcagacattgcctcagaatctgatgatgaatctgaatcaaatttacaaacaatgatccaaaatgcgtcaatgaccaaaacagccaccaatactaaaggaaaactacctttagccaaagctcaaacaccacctaccaaacaaactaacaattatatttataaaaataaattgttaactattttgtagatggaacctgaattttgggacaaaaatcccttcaaggcgacggccaaggctttcccaccaggatttcactacaaaccaaccaccatcctgaagacaagaactttttatgaattgattttggtagattcaaactcagtatctatcaaacatttcaaagatccaaaagaccaaaccttaaacacccactcaaccatccaaatactaaaagttcttcaaccaagacactttggttcggacttgaacaaaggaaagagattttcagttccatttgatccggtaggttatacctattgggattacgttgatgcttggactaaggtgttttggcaccaaaatacccgcttcaagcattcatggctgatatatttcaagaccaacacaatttacaattttcccaattggtttttgcaatggtgggacttctttggaccaatcccagagatattcccagaaacggtccaacaaggattttcccaatttaagaaacaatacaattcgcaggaatcacgaattccagcagatcttaaatacttttcaagctttgcactgtcatggatattctcatggcaatatcgttacagcaagactgaaaagacaaaccaatatccatcactacaaagacacgcatttgtaaaatggtggacacaatttgactcatccaaagcggatccagaacaagtaaaactatggttccaatcccatccagaagtcctcaaagcagctgatccagagacttctgtgtttttgaaccaaaagtctcatctggcagcatttttagcaggatcgacatcaaaggagg

SEQ ID NO: 11863 - DNA, 1087 bp, Glycine max
  Gm_smallRNAprecursor_4696
tgagccatccactcaggaatctcccaaaccggcaaccgccaaacaaacatcggccgactatgcatggccaattgaaacccttcaggcccttcaagacatgggtctgaccaaatttccaaaaataatcaaaaaatcttgggcagacattgcctcagaatctgatgatgaatctgaatcaaatttacaaacaatgatccaaaatgcgtcaatgaccaaaacagccaccaatactaaaggaaaactacctttagccaaagctcaaacaccacctaccaaacaaactaacaattatatttataaaaataaattgttaactattttgtagatggaacctgaattttgggacaaaaatcccttcaaggcgacggccaaggctttcccaccaggatttcactacaaaccaaccaccatcctgaagacaagaactttttatgaattgattttggtagattcaaactcagtatctatcaaacatttcaaagatccaaaagaccaaaccttaaacacccactcaaccatccaaatactaaaagttcttcaaccaagacactttggttcggacttgaacaaaggaaagagattttcagttccatttgatccggtaggttatacctattgggattacgttgatgcttggactaaggtgttttggcaccaaaatacccgcttcaagcattcatggctgatatatttcaagaccaacacaatttacaattttcccaattggtttttgcaatggtgggacttctttggaccaatcccagagatattcccagaaacggtccaacaaggattttcccaatttaagaaacaatacaattcgcaggaatcacgaattccagcagatcttaaatacttttcaagctttgcactgtcatggatattctcatggcaatatcgttacagcaagactgaaaagacaaaccaatatccatcactacaaagacacgcatttgtaaaatggtggacacaatttgactcatccaaagcggatccagaacaagtaaaactatggttccaatcccatccagaagtcctcaaagcagctgatccagagacttctgtgtttttgaaccaaaagtctcat

SEQ ID NO: 11864 - DNA, 1124 bp, Glycine max
  Gm_smallRNAprecursor_4697
tgagccatccactcaggaatctcccaaaccggcaaccgccaaacaaacatcggccgactatgcatggccaattgaaacccttcaggcccttcaagacatgggtctgaccaaatttccaaaaataatcaaaaaatcttgggcagacattgcctcagaatctgatgatgaatctgaatcaaatttacaaacaatgatccaaaatgcgtcaatgaccaaaacagccaccaatactaaaggaaaactacctttagccaaagctcaaacaccacctaccaaacaaactaacaattatatttataaaaataaattgttaactattttgtagatggaacctgaattttgggacaaaaatcccttcaaggcgacggccaaggctttcccaccaggatttcactacaaaccaaccaccatcctgaagacaagaactttttatgaattgattttggtagattcaaactcagtatctatcaaacatttcaaagatccaaaagaccaaaccttaaacacccactcaaccatccaaatactaaaagttcttcaaccaagacactttggttcggacttgaacaaaggaaagagattttcagttccatttgatccggtaggttatacctattgggattacgttgatgcttggactaaggtgttttggcaccaaaatacccgcttcaagcattcatggctgatatatttcaagaccaacacaatttacaattttcccaattggtttttgcaatggtgggacttctttggaccaatcccagagatattcccagaaacggtccaacaaggattttcccaatttaagaaacaatacaattcgcaggaatcacgaattccagcagatcttaaatacttttcaagctttgcactgtcatggatattctcatggcaatatcgttacagcaagactgaaaagacaaaccaatatccatcactacaaagacacgcatttgtaaaatggtggacacaatttgactcatccaaagcggatccagaacaagtaaaactatggttccaatcccatccagaagtcctcaaagcagctgatccagagacttctgtgtttttgaaccaaaagtctcatctggcagcatttttagcaggatcgacatcaaaggagg

SEQ ID NO: 11865 - DNA, 1247 bp, Glycine max
  Gm_smallRNAprecursor_4698
cccttcaagacatgggtctgaccaaatttccaaaaataatcaaaaaatcttgggcagacattgcctcagaatctgatgatgaatctgaatcaaatttacaaacaatgatccaaaatgcgtcaatgaccaaaacagccaccaatactaaaggaaaactacctttagccaaagctcaaacaccacctaccaaacaaactaacaattatatttataaaaataaattgttaactattttgtagatggaacctgaattttgggacaaaaatcccttcaaggcgacggccaaggctttcccaccaggatttcactacaaaccaaccaccatcctgaagacaagaactttttatgaattgattttggtagattcaaactcagtatctatcaaacatttcaaagatccaaaagaccaaaccttaaacacccactcaaccatccaaatactaaaagttcttcaaccaagacactttggttcggacttgaacaaaggaaagagattttcagttccatttgatccggtaggttatacctattgggattacgttgatgcttggactaaggtgttttggcaccaaaatacccgcttcaagcattcatggctgatatatttcaagaccaacacaatttacaattttcccaattggtttttgcaatggtgggacttctttggaccaatcccagagatattcccagaaacggtccaacaaggattttcccaatttaagaaacaatacaattcgcaggaatcacgaattccagcagatcttaaatacttttcaagctttgcactgtcatggatattctcatggcaatatcgttacagcaagactgaaaagacaaaccaatatccatcactacaaagacacgcatttgtaaaatggtggacacaatttgactcatccaaagcggatccagaacaagtaaaactatggttccaatcccatccagaagtcctcaaagcagctgatccagagacttctgtgtttttgaaccaaaagtctcatctggcagcatttttagcaggatcgacatcaaaggaggtcttagctaaaaatctgaaggaagttctacaaatgttacaacaggaagaagaagcttcatcctcaaagaaggaagaaacaagttctgctgaagaagacgaagaagatcccttttaccaaaacgaagatgattgttttggtatctgtttagattaaatttaatttcggtcacaaaaccgtctgtttgtaattgatgtgtaattaatgctg

SEQ ID NO: 11866 - DNA, 1248 bp, Glycine max
  Gm_smallRNAprecursor_4699
cccttcaagacatgggtctgaccaaatttccaaaaataatcaaaaaatcttgggcagacattgcctcagaatctgatgatgaatctgaatcaaatttacaaacaatgatccaaaatgcgtcaatgaccaaaacagccaccaatactaaaggaaaactacctttagccaaagctcaaacaccacctaccaaacaaactaacaattatatttataaaaataaattgttaactattttgtagatggaacctgaattttgggacaaaaatcccttcaaggcgacggccaaggctttcccaccaggatttcactacaaaccaaccaccatcctgaagacaagaactttttatgaattgattttggtagattcaaactcagtatctatcaaacatttcaaagatccaaaagaccaaaccttaaacacccactcaaccatccaaatactaaaagttcttcaaccaagacactttggttcggacttgaacaaaggaaagagattttcagttccatttgatccggtaggttatacctattgggattacgttgatgcttggactaaggtgttttggcaccaaaatacccgcttcaagcattcatggctgatatatttcaagaccaacacaatttacaattttcccaattggtttttgcaatggtgggacttctttggaccaatcccagagatattcccagaaacggtccaacaaggattttcccaatttaagaaacaatacaattcgcaggaatcacgaattccagcagatcttaaatacttttcaagctttgcactgtcatggatattctcatggcaatatcgttacagcaagactgaaaagacaaaccaatatccatcactacaaagacacgcatttgtaaaatggtggacacaatttgactcatccaaagcggatccagaacaagtaaaactatggttccaatcccatccagaagtcctcaaagcagctgatccagagacttctgtgtttttgaaccaaaagtctcatctggcagcatttttagcaggatcgacatcaaaggaggtcttagctaaaaatctgaaggaagttctacaaatgttacaacaggaagaagaagcttcatcctcaaagaaggaagaaacaagttctgctgaagaagacgaagaagatcccttttaccaaaacgaagatgattgttttggtatctgtttagattaaatttaatttcggtcacaaaaccgtctgtttgtaattgatgtgtaattaatgctgg

SEQ ID NO: 11867 - DNA, 1146 bp, Glycine max
  Gm_smallRNAprecursor_4700
acaatgatccaaaatgcgtcaatgaccaaaacagccaccaatactaaaggaaaactacctttagccaaagctcaaacaccacctaccaaacaaactaacaattatatttataaaaataaattgttaactattttgtagatggaacctgaattttgggacaaaaatcccttcaaggcgacggccaaggctttcccaccaggatttcactacaaaccaaccaccatcctgaagacaagaactttttatgaattgattttggtagattcaaactcagtatctatcaaacatttcaaagatccaaaagaccaaaccttaaacacccactcaaccatccaaatactaaaagttcttcaaccaagacactttggttcggacttgaacaaaggaaagagattttcagttccatttgatccggtaggttatacctattgggattacgttgatgcttggactaaggtgttttggcaccaaaatacccgcttcaagcattcatggctgatatatttcaagaccaacacaatttacaattttcccaattggtttttgcaatggtgggacttctttggaccaatcccagagatattcccagaaacggtccaacaaggattttcccaatttaagaaacaatacaattcgcaggaatcacgaattccagcagatcttaaatacttttcaagctttgcactgtcatggatattctcatggcaatatcgttacagcaagactgaaaagacaaaccaatatccatcactacaaagacacgcatttgtaaaatggtggacacaatttgactcatccaaagcggatccagaacaagtaaaactatggttccaatcccatccagaagtcctcaaagcagctgatccagagacttctgtgtttttgaaccaaaagtctcatctggcagcatttttagcaggatcgacatcaaaggaggtcttagctaaaaatctgaaggaagttctacaaatgttacaacaggaagaagaagcttcatcctcaaagaaggaagaaacaagttctgctgaagaagacgaagaagatcccttttaccaaaacgaagatgattgttttggtatctgtttagattaaatttaatttcggtcacaaaaccgtctgtttgtaattgatgtgtaattaatgctg

SEQ ID NO: 11868 - DNA, 1146 bp, Glycine max; identical to SEQ ID NO: 11867
  Gm_smallRNAprecursor_4701

SEQ ID NO: 11869 - DNA, 1147 bp, Glycine max
  Gm_smallRNAprecursor_4702
acaatgatccaaaatgcgtcaatgaccaaaacagccaccaatactaaaggaaaactacctttagccaaagctcaaacaccacctaccaaacaaactaacaattatatttataaaaataaattgttaactattttgtagatggaacctgaattttgggacaaaaatcccttcaaggcgacggccaaggctttcccaccaggatttcactacaaaccaaccaccatcctgaagacaagaactttttatgaattgattttggtagattcaaactcagtatctatcaaacatttcaaagatccaaaagaccaaaccttaaacacccactcaaccatccaaatactaaaagttcttcaaccaagacactttggttcggacttgaacaaaggaaagagattttcagttccatttgatccggtaggttatacctattgggattacgttgatgcttggactaaggtgttttggcaccaaaatacccgcttcaagcattcatggctgatatatttcaagaccaacacaatttacaattttcccaattggtttttgcaatggtgggacttctttggaccaatcccagagatattcccagaaacggtccaacaaggattttcccaatttaagaaacaatacaattcgcaggaatcacgaattccagcagatcttaaatacttttcaagctttgcactgtcatggatattctcatggcaatatcgttacagcaagactgaaaagacaaaccaatatccatcactacaaagacacgcatttgtaaaatggtggacacaatttgactcatccaaagcggatccagaacaagtaaaactatggttccaatcccatccagaagtcctcaaagcagctgatccagagacttctgtgtttttgaaccaaaagtctcatctggcagcatttttagcaggatcgacatcaaaggaggtcttagctaaaaatctgaaggaagttctacaaatgttacaacaggaagaagaagcttcatcctcaaagaaggaagaaacaagttctgctgaagaagacgaagaagatcccttttaccaaaacgaagatgattgttttggtatctgtttagattaaatttaatttcggtcacaaaaccgtctgtttgtaattgatgtgtaattaatgctgg

SEQ ID NO: 11870 - DNA, 1158 bp, Glycine max
  Gm_smallRNAprecursor_4703
caagacactttggttcggacttgaacaaaggaaagagattttcagttccatttgatccggtaggttatacctattgggattacgttgatgcttggactaaggtgttttggcaccaaaatacccgcttcaagcattcatggctgatatatttcaagaccaacacaatttacaattttcccaattggtttttgcaatggtgggacttctttggaccaatcccagagatattcccagaaacggtccaacaaggattttcccaatttaagaaacaatacaattcgcaggaatcacgaattccagcagatcttaaatacttttcaagctttgcactgtcatggatattctcatggcaatatcgttacagcaagactgaaaagacaaaccaatatccatcactacaaagacacgcatttgtaaaatggtggacacaatttgactcatccaaagcggatccagaacaagtaaaactatggttccaatcccatccagaagtcctcaaagcagctgatccagagacttctgtgtttttgaaccaaaagtctcatctggcagcatttttagcaggatcgacatcaaaggaggtcttagctaaaaatctgaaggaagttctacaaatgttacaacaggaagaagaagcttcatcctcaaagaaggaagaaacaagttctgctgaagaagacgaagaagatcccttttaccaaaacgaagatgattgttttggtatctgtttagattaaatttaatttcggtcacaaaaccgtctgtttgtaattgatgtgtaattaatgctggacaatactacctgtcctgtagccattaaagtcccggtcaaaactacttgtcttgtaacaaacagtcaaatagtcccggtcaaaactaccggcaactaccggtcttagatttttggctatataaggagtcctcaagcatgttgtgaggcaccctttcatttagccatttttcaggtttcggaagagaggtgctctgaaacaagattttgtaagcgcttctttctagattcaataaatttctatttttcatctttctctcttctcccttcaccgatcctgtgcggctctgccgccgcttcggtttctttgtttatgaaaacctgggatttgtaagccggtctccggtgtgcccttgatatctgttttc

SEQ ID NO: 11871 - DNA, 1172 bp, Glycine max
  Gm_smallRNAprecursor_4704
caagacactttggttcggacttgaacaaaggaaagagattttcagttccatttgatccggtaggttatacctattgggattacgttgatgcttggactaaggtgttttggcaccaaaatacccgcttcaagcattcatggctgatatatttcaagaccaacacaatttacaattttcccaattggtttttgcaatggtgggacttctttggaccaatcccagagatattcccagaaacggtccaacaaggattttcccaatttaagaaacaatacaattcgcaggaatcacgaattccagcagatcttaaatacttttcaagctttgcactgtcatggatattctcatggcaatatcgttacagcaagactgaaaagacaaaccaatatccatcactacaaagacacgcatttgtaaaatggtggacacaatttgactcatccaaagcggatccagaacaagtaaaactatggttccaatcccatccagaagtcctcaaagcagctgatccagagacttctgtgtttttgaaccaaaagtctcatctggcagcatttttagcaggatcgacatcaaaggaggtcttagctaaaaatctgaaggaagttctacaaatgttacaacaggaagaagaagcttcatcctcaaagaaggaagaaacaagttctgctgaagaagacgaagaagatcccttttaccaaaacgaagatgattgttttggtatctgtttagattaaatttaatttcggtcacaaaaccgtctgtttgtaattgatgtgtaattaatgctggacaatactacctgtcctgtagccattaaagtcccggtcaaaactacttgtcttgtaacaaacagtcaaatagtcccggtcaaaactaccggcaactaccggtcttagatttttggctatataaggagtcctcaagcatgttgtgaggcaccctttcatttagccatttttcaggtttcggaagagaggtgctctgaaacaagattttgtaagcgcttctttctagattcaataaatttctatttttcatctttctctcttctcccttcaccgatcctgtgcggctctgccgccgcttcggtttctttgtttatgaaaacctgggatttgtaagccggtctccggtgtgcccttgatatctgttttcaagtttatatttta

SEQ ID NO: 11872 - DNA, 1046 bp, Glycine max
  Gm_smallRNAprecursor_4705
tcaagaccaacacaatttacaattttcccaattggtttttgcaatggtgggacttctttggaccaatcccagagatattcccagaaacggtccaacaaggattttcccaatttaagaaacaatacaattcgcaggaatcacgaattccagcagatcttaaatacttttcaagctttgcactgtcatggatattctcatggcaatatcgttacagcaagactgaaaagacaaaccaatatccatcactacaaagacacgcatttgtaaaatggtggacacaatttgactcatccaaagcggatccagaacaagtaaaactatggttccaatcccatccagaagtcctcaaagcagctgatccagagacttctgtgtttttgaaccaaaagtctcatctggcagcatttttagcaggatcgacatcaaaggaggtcttagctaaaaatctgaaggaagttctacaaatgttacaacaggaagaagaagcttcatcctcaaagaaggaagaaacaagttctgctgaagaagacgaagaagatcccttttaccaaaacgaagatgattgttttggtatctgtttagattaaatttaatttcggtcacaaaaccgtctgtttgtaattgatgtgtaattaatgctggacaatactacctgtcctgtagccattaaagtcccggtcaaaactacttgtcttgtaacaaacagtcaaatagtcccggtcaaaactaccggcaactaccggtcttagatttttggctatataaggagtcctcaagcatgttgtgaggcaccctttcatttagccatttttcaggtttcggaagagaggtgctctgaaacaagattttgtaagcgcttctttctagattcaataaatttctatttttcatctttctctcttctcccttcaccgatcctgtgcggctctgccgccgcttcggtttctttgtttatgaaaacctgggatttgtaagccggtctccggtgtgcccttgatatctgttttcaagtttatattttagattcatcaatcatacatcaatca

SEQ ID NO: 11873 - DNA, 1213 bp, Glycine max
  Gm_smallRNAprecursor_4706
caacacaatttacaattttcccaattggtttttgcaatggtgggacttctttggaccaatcccagagatattcccagaaacggtccaacaaggattttcccaatttaagaaacaatacaattcgcaggaatcacgaattccagcagatcttaaatacttttcaagctttgcactgtcatggatattctcatggcaatatcgttacagcaagactgaaaagacaaaccaatatccatcactacaaagacacgcatttgtaaaatggtggacacaatttgactcatccaaagcggatccagaacaagtaaaactatggttccaatcccatccagaagtcctcaaagcagctgatccagagacttctgtgtttttgaaccaaaagtctcatctggcagcatttttagcaggatcgacatcaaaggaggtcttagctaaaaatctgaaggaagttctacaaatgttacaacaggaagaagaagcttcatcctcaaagaaggaagaaacaagttctgctgaagaagacgaagaagatcccttttaccaaaacgaagatgattgttttggtatctgtttagattaaatttaatttcggtcacaaaaccgtctgtttgtaattgatgtgtaattaatgctggacaatactacctgtcctgtagccattaaagtcccggtcaaaactacttgtcttgtaacaaacagtcaaatagtcccggtcaaaactaccggcaactaccggtcttagatttttggctatataaggagtcctcaagcatgttgtgaggcaccctttcatttagccatttttcaggtttcggaagagaggtgctctgaaacaagattttgtaagcgcttctttctagattcaataaatttctatttttcatctttctctcttctcccttcaccgatcctgtgcggctctgccgccgcttcggtttctttgtttatgaaaacctgggatttgtaagccggtctccggtgtgcccttgatatctgttttcaagtttatattttagattcatcaatcatacatcaatcatactgcattcttacttcctatatatatatatatatatatatatatatatatatattatgtgtgtgtgtataagtagataattcaaatgataattcttaaatataaatgtttataaaactattaatgatttttcaaatatgatttggtattgtgtaaactaaattgttattagga

SEQ ID NO: 11874 - DNA, 1036 bp, Glycine max
  Gm_smallRNAprecursor_4707
tttggatactaattaaatgttaactacaattagtgtacacacacataaaatatatataagtagaacttttatttaaatcacgtaccttaacaacaatccacctagcagcagccttggatttcggttgtggagtatcatcaagtcctttcaaagcactagtgttgaatataaggaacattaaaatattgatgttgttgagttatgccaatgaaaatgtattgaaaacaatactgacctgttaattattcccttaaggtagttgtctggcctgttatgcaaagaacaaaaccaaacaactaggttttccttaggtagaatgacgaccatttaccagtgtccactgcagtagagacgaatatgggttattgtagtagtatagattatttaaattcaattattgtgtttgacttacctattcagataggctccaaggtaaacatctcgttttgaactctgtatccaactcttgatataactttcggattcaaattgtgattgcccagatctctgaatggactgtggctcgaggaatccatacacatcagaattccccgctcgcacacttgtctcagtcagatggctgtgttgttaagtcaaagttaattatgtatgaatttaaaacaattactttggtaattaatagtaatctaaaatgacttacagaatccacaactgtataacagatatgctgagacattgaccaccatgtgcaatttcagagagatcttcgtgctttatatacaatgggaagttttgattaaacaccccgaatatggtagcatcccacataacctggagcagcttcaaaaacatttgtgggatggtcaatgtcatcaggtacaggggatcatcgacctcttcatccgggctttctggaggttttgctggagacacagctgcctattgataaaacatagttaattagcaagttttgattacaatatacaaattaattgaaaaaaataaacatataatcagagtaaaatacctgttctgataaacgcttcacaagatgtgttggccaagtaaggaaagt

SEQ ID NO: 11875 - DNA, 1036 bp, Glycine max
  Gm_smallRNAprecursor_4708
tttggatattaattaaacgttaactacaattagtgtacacgcacataaaatatatataagtagaacttttatttaaatcacgtaccttaacaacaatccacctagcagcagccttggatttcggttgtggagtatcatcaagtactttcaaagcactagtgttgaatataaggaacattaaaatattgatgttgttgagttatgccaatgaaaatgtattgaaaacaatactgacctgttaattattcccttaaggtagttgtctggcctgttatgcaaagaacaaaactagacaactaggttttccttaggtagaatgacgaccatttgcccgtgtccactgcagtagagacgaatatagtttattgtagtagtatagattatttaaattcaattattgtgtttgacttacctattcagataggctccaaggtaaacatctcgttttgaactctatatccaactcttgatgtaactttcggattcaaattgtgattgtccagatctctgaatggactgtggctcgaggaatccatacacatcagaattccccgctcgcacacttgtctcagtcagatggctgtgttgttaagtcaaagttaattatgtatgaatttaaaacaattactttggtaattaatagtaatctaaaatgacttacagaatccacaactgtataacagatatgctgagacattgaccaccatgtgcaatttcagagagatcttcgtgctttatatacaacgggaagttttgattaaacaccccgaatatggtagcatcccacataacttggagcagcttcaaaaacagttgtgggatggtcaatgtcatcaggtacaggggatcatcgacctcttcatccgggctttctggaggttttgctggagacacagctgcctattgataaaacatagttaaggggggagttttgattacagtgaaggaagggaattgaaaaaaaataaacatataatcagagtaaaatacctgttctgataaacgcttcacaagatgtgttggccaagcaaggaaa

SEQ ID NO: 11876 - DNA, 1039 bp, Glycine max
  Gm_smallRNAprecursor_4709
ggaatggattcatggagttggggctgtgccatctaccctccaccagaaactcattatctggagggaggatgggattgttgaaaatatagaggcagatcaaagcttctataagtcagaggttgataatgttactgcacgaacctttgacaaaaagttggctaacatagcaccttgtggtgacaaggaggctgttgtcgaatcaagtgacaatgttatccactctgtcaaactccatcctacctatgggtttatatgggagagggaggaaattgatgctgttccctctgaagatggagtcattccaccaactgggtggaatatatatgaagattaatatgactgaggccactgcatgggccagaattacggcttatatggccgaaaatagactaaatacgacctttgaggctgaatctcaacaaaatatggcagttgaagccaagatcgaagaacatgaaaacaaagaaacaaaggatcgaagacttgattgtatttatgatgatgagccgctgggttttgagaaaaatcccataagtgaggtgccaaagatgcaggctcaagatcctttggaggaaatcgacattggagatggctcgataaaaaggccaacctatatcagtgccaatatcacctcaagtctaaaagaaaaactggtgcttcttcttagagaatttaaagactgttttgcttgggattaccacgaaatgcctgggttaagcagagaaatggtcgaaatgaaattaccgattaaggagggaaaaagaccagtaaaacaactaccaagaagattcgcaccagaaatcatgtccaaaattaaggaagagatcgaaaggctgctgaggtgtaaattcatcagatctgccagatatgtcgaatggttagcaaatatagtccctgtcattaaaaagaatggaactcttagagtatgcatagattttagggatttaaataatgctacacctaaagatgaatatgctatgccagtagcggaaatgttggtagattcggcagctggcttcgaatttttaagcatgttaga

SEQ ID NO: 11877 - DNA, 1076 bp, Glycine max
  Gm_smallRNAprecursor_4710
ctttggggatgtgaacaaatgccctacacccgaacaccttgagatgattgtatgaaactttcttgcccgtccaaacatcctctggaatagccccttctagaggaattgattgtgtaaggttgacaatgtcaaccacgaccattatagtttctccccaaaatgatttagttaatttagcatgagaaagcacgcgtcaaactctttcttcaattgttcggttcattatcttagctagcccattcaactgtggtgtcttgggtggagtcttctctagcctaatgccatatttcttgcaataggcttcaaagggaactttatactcacctccattgtcagatcgtatgttcttgatctttcttccagtctcacgctccactagagcatggaattctttgaaggcgtcaagcacttgatcctttgattttaacaggtgtaaccacaccttccttgaatggtcattaatgaagtgacaaagtacaatgcaccaccaatggatctctcggacattgaacacacatcggtgtgtacaaggtcaagaatgttctttctccttgtgggcgaagaagatcttttgaaaacaactctgtgttgttttccagttaaacagtgagcacaaggatcaagcggcttacctttcacattagggatgagatgttttcgagctagcatgtgaagacccttctcactgatatgcccaagtcatttatgccatacttccatatcatcagtggttatgtttacctcttatttgcagagcttagcttgcatcacatataatgatcataccttctttcctcgagccatgactagacttcctttggtgagcttccactttccttcaccaaagtagttcatcagaccagcattgtctagcttcccagcggagataagattgaggcgcatagtcgggacatgcctcacatcttttagaataagcttgcgtccggtgcttgttgtcagggtgatgtttcctatcccgacgatcttgctcatatcttgatttcccatttgcaccgtaccaaagtcaccgctttggtaagatgagaagaaacttccatgtggagtaacatggaagg

SEQ ID NO: 11878 - DNA, 1157 bp, Glycine max
  Gm_smallRNAprecursor_4711
ccctctagtataagagcctgaggggaagtagaaatagtgtccgtaagggcatatgttaactgaacttatggatctgaaccatgtacagtagttttaatttaaacagtatatgtttgaacattattttctggaagcacagcagtctgatattttagttgaatgatactgtagcagtaagactaaggtgtattgttcaaataaaatattgagacataatatactggtggctataggagtagtgttcaaactatattgtccataaaaaaaaactctttttcattagttcagatccaagaagttctataacatatagcctgatggaaatatttctatggaaccaaatgaaggcaaagatattagagaatgttataatcatgtctagactattgtgctctttttcccgtatctcttttcgatcaaattcctcctcatcatcttcttcaagaaattccaatttattaagtgatcaagataactagacccaagaggtcgcccccaaacacaatctcttcgatgaggaagtccgattcgaagatatcaatcaaaacatggatgactggaacattccagaaatcccttaggatcaactatacgttcctgaaacaattaaggacaaacacaactttgattacataatcaaaacagtagaaaacaatattcctctaggacaagatataggggaagaatttcatttactttcaaaaaattcaatttatgaacatagtcgtaagtataaatatctacacattggttgtgtacaagtagccatcaagcccttaattgacatggacatagatgcaacagttttaatgtatctaagagatatttggcataataaatttgaagactccttaattggaatagtcgaaactagcctaggacaaggtccagtatattttaattgttatccaaacgagacagtgagtctgatggacataaacattcttgactctctataattaaatatccactttcatggccttgacatgaaagaaggatcaatcccagcggctttgatctataggatccaatacaaggtcatgaatacttgtgcatctagagtcctattgcgaccacaaaagggagaaacaaccttatttatcactgatattgcaaaagccaacatttctttaaaaagaataataaaatgggatgaa

SEQ ID NO: 11879 - DNA, 1218 bp, Glycine max
  Gm_smallRNAprecursor_4712
atttgcttaacagattaaattctgtaaagatattttcaaaatttgatatgaaatctggattttggcaaatccaagaatcagataggtacaaaacaacgtttattgtacctttcgggcaatatgaatggaatgtgatgccattcggactaaagaatgccccttcagaatttcaaaaaattatgaatgatatttttaatccctgttcaaaatttgtcattgtctacatagatgatgttttaatcttttcccaaaacattgaccaacatttcaaacatctccagactttcatccatatcatcaaacataatggtttggcagtctccaaatcaaaaataaatcttttccaaactcgaattcgattccttggtcacaatatatatcaaggtacactcattccaatagaaaggtcaatagagtttgctgacaaatttcccaaccaaatcttagacaaaaccgagttacaaagatttctaggttgtctaaattatgtaggaaaatttgtcccctatttaaacaatattgtcaagccattgcatgataggctgaagaaaaatccgcctccttggtctgacctccatacacaaacagttaaagaaatcaaactcaaagtccaatccataaaatgtctgtatcttcccattccacaggcatttaaaattgtcgaaactaatgcatcatatataggttatggtggcatcctgaaacaaagagtccatggccaagatcatgtcattgcatatacatcaaaacactggaatccagcacaattaaaatattcaactgttaaaaaggaagttttaacaattgttttgtgcatttccaaatttcaatcggatttattaaaccaaaagtttttaatcagggttgattgtaaatcagccaaagatattttacaaaaagatgttaaaaaccttgcctcaaaacaaatttttgcaagatggcaagcaattctaagtgtctttgattttgacagaatatatcaagggcacctcaaattcattacctgactaccttacctgtgaatttttacagaaaagtggtaatgcctcctaaggcatcaggaatctccctaaggggaggacgaagtacaggcaaaggatccagactggctcttccagagccaaccactaagaaatcatcaacctcttatgggtcaccaacccaggctggatcatctacccagaaaacatatttagaagggtcatcgacccagattac

SEQ ID NO: 11880 - DNA, 1248 bp, Glycine max
  Gm_smallRNAprecursor_4713
cccttcaagacatgggtctaaccaaatttccaaaaataatcaaaaaatcttgggcagacattgcctcagaatctgatgatgattctgaatcgaatttacaaacaatgatccaaaatgcatcaatgaccaaaacatctaccaatcctaaaggaaaattacctttagccaaagcacaaacaccacctaccaaacaaactaacaattatatttataaaaataaatttttaactattttgcagatggaacctgaattttgggacaagaatcccttcaaggcgacggctaaggctttcccaccaggatttcactacaaaccaaccaccatcctgaagacaagaactttttatgaattgattttggtagattcaaattcagtatctatcaaacatttcaaagacccaaaagaccaaacattaaacgcccactgcataatccaaatactaaaagttcttcaacctagacactttggttcggacttgaacagaggaaagagattttcagttccatttgatccggtaggttatacctattgggattatgttgatgcttggactaaggtgttttggcaccaaaatacccatttcaagcattcatggctgatatatttcaagaccaatacaatttacaattttcccaattggtttttacaatggtgggacttctttggacaaattccagagatattcccataaacagtccaacaaggatttgcccaatttgagagacaatacaattcgcaggaatcacaaattccaacagatcttaaatacttctcaagctttgcactgtcatggatcttctcatggcaatatcgttacagcaagactgaaaagacaaaccaatatccatcactacaaagacacacatttgtaaaatggtggacacaatttgactcatccaaagcagatccagaacaagtaaaactctagttccaatcccaaccataattcctcaaagcagctgatccaaaacttctgtgtttttgaaccaaaagtctcatctgacaacatttttagcaggatcgaaatcaaaggagatcctaactaaaaatctaaaggaagtttagcaaatgttacagcaggaagaagaaggatcatccttaaagaaggaagagacaagttctgctgaagaagaagaagaagaagaccccttttaccaaaacgaagatgattgttttggtatctgtttagattaaatttatattcggtcacaaaaccgtttgtttgtaattaatgtgtaattaatttt

SEQ ID NO: 11881 - DNA, 1141 bp, Glycine max
  Gm_smallRNAprecursor_4714
tgcttccagaaaatattgttcaaacatatactgtttaaattaaaactactgtacatggttcagatccataagttcagttaacatatgcccttacggacactattcctacttccccatcaggctctgctaccagaggtcagcagaataggatcaaacggacaggtaggaagtaagaatgaagtatgataaatggaaatgaaaatataaacttgtaaaatagatatcaagggcacaccggagaccggcttacaaatcccaggttttcataaacaaagaaaccgaagcggcggtatagccgcataggatcagtggtgggagagagaaaagagatggaaaatagaaatttattgaaacttgaaagaagcgcttacaaaagttttctttcagagcacctctctttcagaaacctgaaaaatggccaaatgaaagggtgcatcacaacatagttgaggactccttatatagccaaaaatctgagaccggtagttgtcggtagttttgaccgggactatttgactgtttgttacaagacaagtagttttgaccgagactttaatggctacaggacaggtagtattgtccaaaattaattacacattaattacaaatagacggttttgtgaccgaaattaaatttaatctaaacagataccaaaacaatcatcttcggtatctgtttaccaaaacaatcatcttcggtatctgtttaccaaaacaatcatcttcggtatctgtctaccaaaacaatcatcttcggtatcaatttaccaaagatgattgttttggtaaacagataccgaagatgattgttttggtaaacagatacagaagatgattgttttggtaaacagataccgaagatgattgttttggtatctgtttagattaaatttaatttcggtcacaaaaccgtctgtttgtaattaatgtgtaattaattttggacaatactacctgtcctgtagccattaaagtcccggtcaaaactacttgtcttgtaacaaacagttaaatagtcccggtcaaaactaccggcaactaccggtctcagatttttggctatataaggagtcctcaactatgttgtgagacaccctttcatttggccatttttcaggtttctgaagagaggtgctctgaa

SEQ ID NO: 11882 - DNA, 1150 bp, Glycine max
  Gm_smallRNAprecursor_4715
tgcttccagaaaatattgttcaaacatatactgtttaaattaaaactactgtacatggttcagatccataagttcagttaacatatgcccttacggacactattcctacttccccatcaggctctgctaccagaggtcagcagaataggatcaaacggacaggtaggaagtaagaatgaagtatgataaatggaaatgaaaatataaacttgtaaaatagatatcaagggcacaccggagaccggcttacaaatcccaggttttcataaacaaagaaaccgaagcggcggtatagccgcataggatcagtggtgggagagagaaaagagatggaaaatagaaatttattgaaacttgaaagaagcgcttacaaaagttttctttcagagcacctctctttcagaaacctgaaaaatggccaaatgaaagggtgcatcacaacatagttgaggactccttatatagccaaaaatctgagaccggtagttgtcggtagttttgaccgggactatttgactgtttgttacaagacaagtagttttgaccgagactttaatggctacaggacaggtagtattgtccaaaattaattacacattaattacaaatagacggttttgtgaccgaaattaaatttaatctaaacagataccaaaacaatcatcttcggtatctgtttaccaaaacaatcatcttcggtatctgtttaccaaaacaatcatcttcggtatctgtctaccaaaacaatcatcttcggtatcaatttaccaaagatgattgttttggtaaacagataccgaagatgattgttttggtaaacagatacagaagatgattgttttggtaaacagataccgaagatgattgttttggtatctgtttagattaaatttaatttcggtcacaaaaccgtctgtttgtaattaatgtgtaattaattttggacaatactacctgtcctgtagccattaaagtcccggtcaaaactacttgtcttgtaacaaacagttaaatagtcccggtcaaaactaccggcaactaccggtctcagatttttggctatataaggagtcctcaactatgttgtgagacaccctttcatttggccatttttcaggtttctgaagagaggtgctctgaaagaaaactt

SEQ ID NO: 11883 - DNA, 1179 bp, Glycine max
  Gm_smallRNAprecursor_4716
tgcttccagaaaatattgttcaaacatatactgtttaaattaaaactactgtacatggttcagatccataagttcagttaacatatgcccttacggacactattcctacttccccatcaggctctgctaccagaggtcagcagaataggatcaaacggacaggtaggaagtaagaatgaagtatgataaatggaaatgaaaatataaacttgtaaaatagatatcaagggcacaccggagaccggcttacaaatcccaggttttcataaacaaagaaaccgaagcggcggtatagccgcataggatcagtggtgggagagagaaaagagatggaaaatagaaatttattgaaacttgaaagaagcgcttacaaaagttttctttcagagcacctctctttcagaaacctgaaaaatggccaaatgaaagggtgcatcacaacatagttgaggactccttatatagccaaaaatctgagaccggtagttgtcggtagttttgaccgggactatttgactgtttgttacaagacaagtagttttgaccgagactttaatggctacaggacaggtagtattgtccaaaattaattacacattaattacaaatagacggttttgtgaccgaaattaaatttaatctaaacagataccaaaacaatcatcttcggtatctgtttaccaaaacaatcatcttcggtatctgtttaccaaaacaatcatcttcggtatctgtctaccaaaacaatcatcttcggtatcaatttaccaaagatgattgttttggtaaacagataccgaagatgattgttttggtaaacagatacagaagatgattgttttggtaaacagataccgaagatgattgttttggtatctgtttagattaaatttaatttcggtcacaaaaccgtctgtttgtaattaatgtgtaattaattttggacaatactacctgtcctgtagccattaaagtcccggtcaaaactacttgtcttgtaacaaacagttaaatagtcccggtcaaaactaccggcaactaccggtctcagatttttggctatataaggagtcctcaactatgttgtgagacaccctttcatttggccatttttcaggtttctgaagagaggtgctctgaaagaaaacttttgtaagcgcttctttcaagtttcaataa

SEQ ID NO: 11884 - DNA, 1208 bp, Glycine max
  Gm_smallRNAprecursor_4717
tgcttccagaaaatattgttcaaacatatactgtttaaattaaaactactgtacatggttcagatccataagttcagttaacatatgcccttacggacactattcctacttccccatcaggctctgctaccagaggtcagcagaataggatcaaacggacaggtaggaagtaagaatgaagtatgataaatggaaatgaaaatataaacttgtaaaatagatatcaagggcacaccggagaccggcttacaaatcccaggttttcataaacaaagaaaccgaagcggcggtatagccgcataggatcagtggtgggagagagaaaagagatggaaaatagaaatttattgaaacttgaaagaagcgcttacaaaagttttctttcagagcacctctctttcagaaacctgaaaaatggccaaatgaaagggtgcatcacaacatagttgaggactccttatatagccaaaaatctgagaccggtagttgtcggtagttttgaccgggactatttgactgtttgttacaagacaagtagttttgaccgagactttaatggctacaggacaggtagtattgtccaaaattaattacacattaattacaaatagacggttttgtgaccgaaattaaatttaatctaaacagataccaaaacaatcatcttcggtatctgtttaccaaaacaatcatcttcggtatctgtttaccaaaacaatcatcttcggtatctgtctaccaaaacaatcatcttcggtatcaatttaccaaagatgattgttttggtaaacagataccgaagatgattgttttggtaaacagatacagaagatgattgttttggtaaacagataccgaagatgattgttttggtatctgtttagattaaatttaatttcggtcacaaaaccgtctgtttgtaattaatgtgtaattaattttggacaatactacctgtcctgtagccattaaagtcccggtcaaaactacttgtcttgtaacaaacagttaaatagtcccggtcaaaactaccggcaactaccggtctcagatttttggctatataaggagtcctcaactatgttgtgagacaccctttcatttggccatttttcaggtttctgaagagaggtgctctgaaagaaaacttttgtaagcgcttctttcaagtttcaataaatttctattttccgtctcttttctctctc

SEQ ID NO: 11885 - DNA, 1237 bp, Glycine max
  Gm_smallRNAprecursor_4718
tgcttccagaaaatattgttcaaacatatactgtttaaattaaaactactgtacatggttcagatccataagttcagttaacatatgcccttacggacactattcctacttccccatcaggctctgctaccagaggtcagcagaataggatcaaacggacaggtaggaagtaagaatgaagtatgataaatggaaatgaaaatataaacttgtaaaatagatatcaagggcacaccggagaccggcttacaaatcccaggttttcataaacaaagaaaccgaagcggcggtatagccgcataggatcagtggtgggagagagaaaagagatggaaaatagaaatttattgaaacttgaaagaagcgcttacaaaagttttctttcagagcacctctctttcagaaacctgaaaaatggccaaatgaaagggtgcatcacaacatagttgaggactccttatatagccaaaaatctgagaccggtagttgtcggtagttttgaccgggactatttgactgtttgttacaagacaagtagttttgaccgagactttaatggctacaggacaggtagtattgtccaaaattaattacacattaattacaaatagacggttttgtgaccgaaattaaatttaatctaaacagataccaaaacaatcatcttcggtatctgtttaccaaaacaatcatcttcggtatctgtttaccaaaacaatcatcttcggtatctgtctaccaaaacaatcatcttcggtatcaatttaccaaagatgattgttttggtaaacagataccgaagatgattgttttggtaaacagatacagaagatgattgttttggtaaacagataccgaagatgattgttttggtatctgtttagattaaatttaatttcggtcacaaaaccgtctgtttgtaattaatgtgtaattaattttggacaatactacctgtcctgtagccattaaagtcccggtcaaaactacttgtcttgtaacaaacagttaaatagtcccggtcaaaactaccggcaactaccggtctcagatttttggctatataaggagtcctcaactatgttgtgagacaccctttcatttggccatttttcaggtttctgaagagaggtgctctgaaagaaaacttttgtaagcgcttctttcaagtttcaataaatttctattttccgtctcttttctctctcccaccaccgatcctgtgcggttgtgccgc

SEQ ID NO: 11886 - DNA, 1215 bp, Glycine max
  Gm_smallRNAprecursor_4719
aataggatcaaacggacaggtaggaagtaagaatgaagtatgataaatggaaatgaaaatataaacttgtaaaatagatatcaagggcacaccggagaccggcttacaaatcccaggttttcataaacaaagaaaccgaagcggcggtatagccgcataggatcagtggtgggagagagaaaagagatggaaaatagaaatttattgaaacttgaaagaagcgcttacaaaagttttctttcagagcacctctctttcagaaacctgaaaaatggccaaatgaaagggtgcatcacaacatagttgaggactccttatatagccaaaaatctgagaccggtagttgtcggtagttttgaccgggactatttgactgtttgttacaagacaagtagttttgaccgagactttaatggctacaggacaggtagtattgtccaaaattaattacacattaattacaaatagacggttttgtgaccgaaattaaatttaatctaaacagataccaaaacaatcatcttcggtatctgtttaccaaaacaatcatcttcggtatctgtttaccaaaacaatcatcttcggtatctgtctaccaaaacaatcatcttcggtatcaatttaccaaagatgattgttttggtaaacagataccgaagatgattgttttggtaaacagatacagaagatgattgttttggtaaacagataccgaagatgattgttttggtatctgtttagattaaatttaatttcggtcacaaaaccgtctgtttgtaattaatgtgtaattaattttggacaatactacctgtcctgtagccattaaagtcccggtcaaaactacttgtcttgtaacaaacagttaaatagtcccggtcaaaactaccggcaactaccggtctcagatttttggctatataaggagtcctcaactatgttgtgagacaccctttcatttggccatttttcaggtttctgaagagaggtgctctgaaagaaaacttttgtaagcgcttctttcaagtttcaataaatttctattttccgtctcttttctctctcccaccaccgatcctgtgcggttgtgccgccgtttcggtttctttgtttatgaaaacctgggatttgtaagccggtctccggtgtgcccttgatatctgttttacaagtttatattttcatttccatttatcatactgcattcttacttcc

SEQ ID NO: 11887 - DNA, 1214 bp, Glycine max
  Gm_smallRNAprecursor_4720
ataggatcaaacggacaggtaggaagtaagaatgaagtatgataaatggaaatgaaaatataaacttgtaaaatagatatcaagggcacaccggagaccggcttacaaatcccaggttttcataaacaaagaaaccgaagcggcggtatagccgcataggatcagtggtgggagagagaaaagagatggaaaatagaaatttattgaaacttgaaagaagcgcttacaaaagttttctttcagagcacctctctttcagaaacctgaaaaatggccaaatgaaagggtgcatcacaacatagttgaggactccttatatagccaaaaatctgagaccggtagttgtcggtagttttgaccgggactatttgactgtttgttacaagacaagtagttttgaccgagactttaatggctacaggacaggtagtattgtccaaaattaattacacattaattacaaatagacggttttgtgaccgaaattaaatttaatctaaacagataccaaaacaatcatcttcggtatctgtttaccaaaacaatcatcttcggtatctgtttaccaaaacaatcatcttcggtatctgtctaccaaaacaatcatcttcggtatcaatttaccaaagatgattgttttggtaaacagataccgaagatgattgttttggtaaacagatacagaagatgattgttttggtaaacagataccgaagatgattgttttggtatctgtttagattaaatttaatttcggtcacaaaaccgtctgtttgtaattaatgtgtaattaattttggacaatactacctgtcctgtagccattaaagtcccggtcaaaactacttgtcttgtaacaaacagttaaatagtcccggtcaaaactaccggcaactaccggtctcagatttttggctatataaggagtcctcaactatgttgtgagacaccctttcatttggccatttttcaggtttctgaagagaggtgctctgaaagaaaacttttgtaagcgcttctttcaagtttcaataaatttctattttccgtctcttttctctctcccaccaccgatcctgtgcggttgtgccgccgtttcggtttctttgtttatgaaaacctgggatttgtaagccggtctccggtgtgcccttgatatctgttttacaagtttatattttcatttccatttatcatactgcattcttacttcc

SEQ ID NO: 11888 - DNA, 1148 bp, Glycine max
  Gm_smallRNAprecursor_4721
ggatcaaacggacaggtaggaagtaagaatgaagtatgataaatggaaatgaaaatataaacttgtaaaatagatatcaagggcacaccggagaccggcttacaaatcccaggttttcataaacaaagaaaccgaagcggcggtatagccgcataggatcagtggtgggagagagaaaagagatggaaaatagaaatttattgaaacttgaaagaagcgcttacaaaagttttctttcagagcacctctctttcagaaacctgaaaaatggccaaatgaaagggtgcatcacaacatagttgaggactccttatatagccaaaaatctgagaccggtagttgtcggtagttttgaccgggactatttgactgtttgttacaagacaagtagttttgaccgagactttaatggctacaggacaggtagtattgtccaaaattaattacacattaattacaaatagacggttttgtgaccgaaattaaatttaatctaaacagataccaaaacaatcatcttcggtatctgtttaccaaaacaatcatcttcggtatctgtttaccaaaacaatcatcttcggtatctgtctaccaaaacaatcatcttcggtatcaatttaccaaagatgattgttttggtaaacagataccgaagatgattgttttggtaaacagatacagaagatgattgttttggtaaacagataccgaagatgattgttttggtatctgtttagattaaatttaatttcggtcacaaaaccgtctgtttgtaattaatgtgtaattaattttggacaatactacctgtcctgtagccattaaagtcccggtcaaaactacttgtcttgtaacaaacagttaaatagtcccggtcaaaactaccggcaactaccggtctcagatttttggctatataaggagtcctcaactatgttgtgagacaccctttcatttggccatttttcaggtttctgaagagaggtgctctgaaagaaaacttttgtaagcgcttctttcaagtttcaataaatttctattttccgtctcttttctctctcccaccaccgatcctgtgcggttgtgccgccgtttcggtttctttgtttatgaaaacctgggatttgtaagccggtctccggtgtgcc

SEQ ID NO: 11889 - DNA, 1149 bp, Glycine max
  Gm_smallRNAprecursor_4722
ggatcaaacggacaggtaggaagtaagaatgaagtatgataaatggaaatgaaaatataaacttgtaaaatagatatcaagggcacaccggagaccggcttacaaatcccaggttttcataaacaaagaaaccgaagcggcggtatagccgcataggatcagtggtgggagagagaaaagagatggaaaatagaaatttattgaaacttgaaagaagcgcttacaaaagttttctttcagagcacctctctttcagaaacctgaaaaatggccaaatgaaagggtgcatcacaacatagttgaggactccttatatagccaaaaatctgagaccggtagttgtcggtagttttgaccgggactatttgactgtttgttacaagacaagtagttttgaccgagactttaatggctacaggacaggtagtattgtccaaaattaattacacattaattacaaatagacggttttgtgaccgaaattaaatttaatctaaacagataccaaaacaatcatcttcggtatctgtttaccaaaacaatcatcttcggtatctgtttaccaaaacaatcatcttcggtatctgtctaccaaaacaatcatcttcggtatcaatttaccaaagatgattgttttggtaaacagataccgaagatgattgttttggtaaacagatacagaagatgattgttttggtaaacagataccgaagatgattgttttggtatctgtttagattaaatttaatttcggtcacaaaaccgtctgtttgtaattaatgtgtaattaattttggacaatactacctgtcctgtagccattaaagtcccggtcaaaactacttgtcttgtaacaaacagttaaatagtcccggtcaaaactaccggcaactaccggtctcagatttttggctatataaggagtcctcaactatgttgtgagacaccctttcatttggccatttttcaggtttctgaagagaggtgctctgaaagaaaacttttgtaagcgcttctttcaagtttcaataaatttctattttccgtctcttttctctctcccaccaccgatcctgtgcggttgtgccgccgtttcggtttctttgtttatgaaaacctgggatttgtaagccggtctccggtgtgccc

SEQ ID NO: 11890 - DNA, 1206 bp, Glycine max
  Gm_smallRNAprecursor_4723
ggatcaaacggacaggtaggaagtaagaatgaagtatgataaatggaaatgaaaatataaacttgtaaaatagatatcaagggcacaccggagaccggcttacaaatcccaggttttcataaacaaagaaaccgaagcggcggtatagccgcataggatcagtggtgggagagagaaaagagatggaaaatagaaatttattgaaacttgaaagaagcgcttacaaaagttttctttcagagcacctctctttcagaaacctgaaaaatggccaaatgaaagggtgcatcacaacatagttgaggactccttatatagccaaaaatctgagaccggtagttgtcggtagttttgaccgggactatttgactgtttgttacaagacaagtagttttgaccgagactttaatggctacaggacaggtagtattgtccaaaattaattacacattaattacaaatagacggttttgtgaccgaaattaaatttaatctaaacagataccaaaacaatcatcttcggtatctgtttaccaaaacaatcatcttcggtatctgtttaccaaaacaatcatcttcggtatctgtctaccaaaacaatcatcttcggtatcaatttaccaaagatgattgttttggtaaacagataccgaagatgattgttttggtaaacagatacagaagatgattgttttggtaaacagataccgaagatgattgttttggtatctgtttagattaaatttaatttcggtcacaaaaccgtctgtttgtaattaatgtgtaattaattttggacaatactacctgtcctgtagccattaaagtcccggtcaaaactacttgtcttgtaacaaacagttaaatagtcccggtcaaaactaccggcaactaccggtctcagatttttggctatataaggagtcctcaactatgttgtgagacaccctttcatttggccatttttcaggtttctgaagagaggtgctctgaaagaaaacttttgtaagcgcttctttcaagtttcaataaatttctattttccgtctcttttctctctcccaccaccgatcctgtgcggttgtgccgccgtttcggtttctttgtttatgaaaacctgggatttgtaagccggtctccggtgtgcccttgatatctgttttacaagtttatattttcatttccatttatcatactgcattctta

SEQ ID NO: 11891 - DNA, 1207 bp, Glycine max
  Gm_smallRNAprecursor_4724
ggatcaaacggacaggtaggaagtaagaatgaagtatgataaatggaaatgaaaatataaacttgtaaaatagatatcaagggcacaccggagaccggcttacaaatcccaggttttcataaacaaagaaaccgaagcggcggtatagccgcataggatcagtggtgggagagagaaaagagatggaaaatagaaatttattgaaacttgaaagaagcgcttacaaaagttttctttcagagcacctctctttcagaaacctgaaaaatggccaaatgaaagggtgcatcacaacatagttgaggactccttatatagccaaaaatctgagaccggtagttgtcggtagttttgaccgggactatttgactgtttgttacaagacaagtagttttgaccgagactttaatggctacaggacaggtagtattgtccaaaattaattacacattaattacaaatagacggttttgtgaccgaaattaaatttaatctaaacagataccaaaacaatcatcttcggtatctgtttaccaaaacaatcatcttcggtatctgtttaccaaaacaatcatcttcggtatctgtctaccaaaacaatcatcttcggtatcaatttaccaaagatgattgttttggtaaacagataccgaagatgattgttttggtaaacagatacagaagatgattgttttggtaaacagataccgaagatgattgttttggtatctgtttagattaaatttaatttcggtcacaaaaccgtctgtttgtaattaatgtgtaattaattttggacaatactacctgtcctgtagccattaaagtcccggtcaaaactacttgtcttgtaacaaacagttaaatagtcccggtcaaaactaccggcaactaccggtctcagatttttggctatataaggagtcctcaactatgttgtgagacaccctttcatttggccatttttcaggtttctgaagagaggtgctctgaaagaaaacttttgtaagcgcttctttcaagtttcaataaatttctattttccgtctcttttctctctcccaccaccgatcctgtgcggttgtgccgccgtttcggtttctttgtttatgaaaacctgggatttgtaagccggtctccggtgtgcccttgatatctgttttacaagtttatattttcatttccatttatcatactgcattcttac

SEQ ID NO: 11892 - DNA, 1146 bp, Glycine max
  Gm_smallRNAprecursor_4725
atcaaacggacaggtaggaagtaagaatgaagtatgataaatggaaatgaaaatataaacttgtaaaatagatatcaagggcacaccggagaccggcttacaaatcccaggttttcataaacaaagaaaccgaagcggcggtatagccgcataggatcagtggtgggagagagaaaagagatggaaaatagaaatttattgaaacttgaaagaagcgcttacaaaagttttctttcagagcacctctctttcagaaacctgaaaaatggccaaatgaaagggtgcatcacaacatagttgaggactccttatatagccaaaaatctgagaccggtagttgtcggtagttttgaccgggactatttgactgtttgttacaagacaagtagttttgaccgagactttaatggctacaggacaggtagtattgtccaaaattaattacacattaattacaaatagacggttttgtgaccgaaattaaatttaatctaaacagataccaaaacaatcatcttcggtatctgtttaccaaaacaatcatcttcggtatctgtttaccaaaacaatcatcttcggtatctgtctaccaaaacaatcatcttcggtatcaatttaccaaagatgattgttttggtaaacagataccgaagatgattgttttggtaaacagatacagaagatgattgttttggtaaacagataccgaagatgattgttttggtatctgtttagattaaatttaatttcggtcacaaaaccgtctgtttgtaattaatgtgtaattaattttggacaatactacctgtcctgtagccattaaagtcccggtcaaaactacttgtcttgtaacaaacagttaaatagtcccggtcaaaactaccggcaactaccggtctcagatttttggctatataaggagtcctcaactatgttgtgagacaccctttcatttggccatttttcaggtttctgaagagaggtgctctgaaagaaaacttttgtaagcgcttctttcaagtttcaataaatttctattttccgtctcttttctctctcccaccaccgatcctgtgcggttgtgccgccgtttcggtttctttgtttatgaaaacctgggatttgtaagccggtctccggtgtgcc

SEQ ID NO: 11893 - DNA, 1204 bp, Glycine max
  Gm_smallRNAprecursor_4726
atcaaacggacaggtaggaagtaagaatgaagtatgataaatggaaatgaaaatataaacttgtaaaatagatatcaagggcacaccggagaccggcttacaaatcccaggttttcataaacaaagaaaccgaagcggcggtatagccgcataggatcagtggtgggagagagaaaagagatggaaaatagaaatttattgaaacttgaaagaagcgcttacaaaagttttctttcagagcacctctctttcagaaacctgaaaaatggccaaatgaaagggtgcatcacaacatagttgaggactccttatatagccaaaaatctgagaccggtagttgtcggtagttttgaccgggactatttgactgtttgttacaagacaagtagttttgaccgagactttaatggctacaggacaggtagtattgtccaaaattaattacacattaattacaaatagacggttttgtgaccgaaattaaatttaatctaaacagataccaaaacaatcatcttcggtatctgtttaccaaaacaatcatcttcggtatctgtttaccaaaacaatcatcttcggtatctgtctaccaaaacaatcatcttcggtatcaatttaccaaagatgattgttttggtaaacagataccgaagatgattgttttggtaaacagatacagaagatgattgttttggtaaacagataccgaagatgattgttttggtatctgtttagattaaatttaatttcggtcacaaaaccgtctgtttgtaattaatgtgtaattaattttggacaatactacctgtcctgtagccattaaagtcccggtcaaaactacttgtcttgtaacaaacagttaaatagtcccggtcaaaactaccggcaactaccggtctcagatttttggctatataaggagtcctcaactatgttgtgagacaccctttcatttggccatttttcaggtttctgaagagaggtgctctgaaagaaaacttttgtaagcgcttctttcaagtttcaataaatttctattttccgtctcttttctctctcccaccaccgatcctgtgcggttgtgccgccgtttcggtttctttgtttatgaaaacctgggatttgtaagccggtctccggtgtgcccttgatatctgttttacaagtttatattttcatttccatttatcatactgcattctta

SEQ ID NO: 11894 - DNA, 1134 bp, Glycine max
  Gm_smallRNAprecursor_4727
cggacaggtaggaagtaagaatgaagtatgataaatggaaatgaaaatataaacttgtaaaatagatatcaagggcacaccggagaccggcttacaaatcccaggttttcataaacaaagaaaccgaagcggcggtatagccgcataggatcagtggtgggagagagaaaagagatggaaaatagaaatttattgaaacttgaaagaagcgcttacaaaagttttctttcagagcacctctctttcagaaacctgaaaaatggccaaatgaaagggtgcatcacaacatagttgaggactccttatatagccaaaaatctgagaccggtagttgtcggtagttttgaccgggactatttgactgtttgttacaagacaagtagttttgaccgagactttaatggctacaggacaggtagtattgtccaaaattaattacacattaattacaaatagacggttttgtgaccgaaattaaatttaatctaaacagataccaaaacaatcatcttcggtatctgtttaccaaaacaatcatcttcggtatctgtttaccaaaacaatcatcttcggtatctgtctaccaaaacaatcatcttcggtatcaatttaccaaagatgattgttttggtaaacagataccgaagatgattgttttggtaaacagatacagaagatgattgttttggtaaacagataccgaagatgattgttttggtatctgtttagattaaatttaatttcggtcacaaaaccgtctgtttgtaattaatgtgtaattaattttggacaatactacctgtcctgtagccattaaagtcccggtcaaaactacttgtcttgtaacaaacagttaaatagtcccggtcaaaactaccggcaactaccggtctcagatttttggctatataaggagtcctcaactatgttgtgagacaccctttcatttggccatttttcaggtttctgaagagaggtgctctgaaagaaaacttttgtaagcgcttctttcaagtttcaataaatttctattttccgtctcttttctctctcccaccaccgatcctgtgcggttgtgccgccgtttcggtttctttgtttatgaaaacctgggatttgtaagccggtctccgg

SEQ ID NO: 11895 - DNA, 1192 bp, Glycine max
  Gm_smallRNAprecursor_4728
cggacaggtaggaagtaagaatgaagtatgataaatggaaatgaaaatataaacttgtaaaatagatatcaagggcacaccggagaccggcttacaaatcccaggttttcataaacaaagaaaccgaagcggcggtatagccgcataggatcagtggtgggagagagaaaagagatggaaaatagaaatttattgaaacttgaaagaagcgcttacaaaagttttctttcagagcacctctctttcagaaacctgaaaaatggccaaatgaaagggtgcatcacaacatagttgaggactccttatatagccaaaaatctgagaccggtagttgtcggtagttttgaccgggactatttgactgtttgttacaagacaagtagttttgaccgagactttaatggctacaggacaggtagtattgtccaaaattaattacacattaattacaaatagacggttttgtgaccgaaattaaatttaatctaaacagataccaaaacaatcatcttcggtatctgtttaccaaaacaatcatcttcggtatctgtttaccaaaacaatcatcttcggtatctgtctaccaaaacaatcatcttcggtatcaatttaccaaagatgattgttttggtaaacagataccgaagatgattgttttggtaaacagatacagaagatgattgttttggtaaacagataccgaagatgattgttttggtatctgtttagattaaatttaatttcggtcacaaaaccgtctgtttgtaattaatgtgtaattaattttggacaatactacctgtcctgtagccattaaagtcccggtcaaaactacttgtcttgtaacaaacagttaaatagtcccggtcaaaactaccggcaactaccggtctcagatttttggctatataaggagtcctcaactatgttgtgagacaccctttcatttggccatttttcaggtttctgaagagaggtgctctgaaagaaaacttttgtaagcgcttctttcaagtttcaataaatttctattttccgtctcttttctctctcccaccaccgatcctgtgcggttgtgccgccgtttcggtttctttgtttatgaaaacctgggatttgtaagccggtctccggtgtgcccttgatatctgttttacaagtttatattttcatttccatttatcatactgca

SEQ ID NO: 11896 - DNA, 1117 bp, Glycine max
  Gm_smallRNAprecursor_4729
aagtatgataaatggaaatgaaaatataaacttgtaaaatagatatcaagggcacaccggagaccggcttacaaatcccaggttttcataaacaaagaaaccgaagcggcggtatagccgcataggatcagtggtgggagagagaaaagagatggaaaatagaaatttattgaaacttgaaagaagcgcttacaaaagttttctttcagagcacctctctttcagaaacctgaaaaatggccaaatgaaagggtgcatcacaacatagttgaggactccttatatagccaaaaatctgagaccggtagttgtcggtagttttgaccgggactatttgactgtttgttacaagacaagtagttttgaccgagactttaatggctacaggacaggtagtattgtccaaaattaattacacattaattacaaatagacggttttgtgaccgaaattaaatttaatctaaacagataccaaaacaatcatcttcggtatctgtttaccaaaacaatcatcttcggtatctgtttaccaaaacaatcatcttcggtatctgtctaccaaaacaatcatcttcggtatcaatttaccaaagatgattgttttggtaaacagataccgaagatgattgttttggtaaacagatacagaagatgattgttttggtaaacagataccgaagatgattgttttggtatctgtttagattaaatttaatttcggtcacaaaaccgtctgtttgtaattaatgtgtaattaattttggacaatactacctgtcctgtagccattaaagtcccggtcaaaactacttgtcttgtaacaaacagttaaatagtcccggtcaaaactaccggcaactaccggtctcagatttttggctatataaggagtcctcaactatgttgtgagacaccctttcatttggccatttttcaggtttctgaagagaggtgctctgaaagaaaacttttgtaagcgcttctttcaagtttcaataaatttctattttccgtctcttttctctctcccaccaccgatcctgtgcggttgtgccgccgtttcggtttctttgtttatgaaaacctgggatttgtaagccggtctccggtgtgcc

SEQ ID NO: 11897 - DNA, 1175 bp, Glycine max
  Gm_smallRNAprecursor_4730
aagtatgataaatggaaatgaaaatataaacttgtaaaatagatatcaagggcacaccggagaccggcttacaaatcccaggttttcataaacaaagaaaccgaagcggcggtatagccgcataggatcagtggtgggagagagaaaagagatggaaaatagaaatttattgaaacttgaaagaagcgcttacaaaagttttctttcagagcacctctctttcagaaacctgaaaaatggccaaatgaaagggtgcatcacaacatagttgaggactccttatatagccaaaaatctgagaccggtagttgtcggtagttttgaccgggactatttgactgtttgttacaagacaagtagttttgaccgagactttaatggctacaggacaggtagtattgtccaaaattaattacacattaattacaaatagacggttttgtgaccgaaattaaatttaatctaaacagataccaaaacaatcatcttcggtatctgtttaccaaaacaatcatcttcggtatctgtttaccaaaacaatcatcttcggtatctgtctaccaaaacaatcatcttcggtatcaatttaccaaagatgattgttttggtaaacagataccgaagatgattgttttggtaaacagatacagaagatgattgttttggtaaacagataccgaagatgattgttttggtatctgtttagattaaatttaatttcggtcacaaaaccgtctgtttgtaattaatgtgtaattaattttggacaatactacctgtcctgtagccattaaagtcccggtcaaaactacttgtcttgtaacaaacagttaaatagtcccggtcaaaactaccggcaactaccggtctcagatttttggctatataaggagtcctcaactatgttgtgagacaccctttcatttggccatttttcaggtttctgaagagaggtgctctgaaagaaaacttttgtaagcgcttctttcaagtttcaataaatttctattttccgtctcttttctctctcccaccaccgatcctgtgcggttgtgccgccgtttcggtttctttgtttatgaaaacctgggatttgtaagccggtctccggtgtgcccttgatatctgttttacaagtttatattttcatttccatttatcatactgcattctta

SEQ ID NO: 11898 - DNA, 1105 bp, Glycine max
  Gm_smallRNAprecursor_4731
gataaatggaaatgaaaatataaacttgtaaaatagatatcaagggcacaccggagaccggcttacaaatcccaggttttcataaacaaagaaaccgaagcggcggtatagccgcataggatcagtggtgggagagagaaaagagatggaaaatagaaatttattgaaacttgaaagaagcgcttacaaaagttttctttcagagcacctctctttcagaaacctgaaaaatggccaaatgaaagggtgcatcacaacatagttgaggactccttatatagccaaaaatctgagaccggtagttgtcggtagttttgaccgggactatttgactgtttgttacaagacaagtagttttgaccgagactttaatggctacaggacaggtagtattgtccaaaattaattacacattaattacaaatagacggttttgtgaccgaaattaaatttaatctaaacagataccaaaacaatcatcttcggtatctgtttaccaaaacaatcatcttcggtatctgtttaccaaaacaatcatcttcggtatctgtctaccaaaacaatcatcttcggtatcaatttaccaaagatgattgttttggtaaacagataccgaagatgattgttttggtaaacagatacagaagatgattgttttggtaaacagataccgaagatgattgttttggtatctgtttagattaaatttaatttcggtcacaaaaccgtctgtttgtaattaatgtgtaattaattttggacaatactacctgtcctgtagccattaaagtcccggtcaaaactacttgtcttgtaacaaacagttaaatagtcccggtcaaaactaccggcaactaccggtctcagatttttggctatataaggagtcctcaactatgttgtgagacaccctttcatttggccatttttcaggtttctgaagagaggtgctctgaaagaaaacttttgtaagcgcttctttcaagtttcaataaatttctattttccgtctcttttctctctcccaccaccgatcctgtgcggttgtgccgccgtttcggtttctttgtttatgaaaacctgggatttgtaagccggtctccgg

SEQ ID NO: 11899 - DNA, 1163 bp, Glycine max
  Gm_smallRNAprecursor_4732
gataaatggaaatgaaaatataaacttgtaaaatagatatcaagggcacaccggagaccggcttacaaatcccaggttttcataaacaaagaaaccgaagcggcggtatagccgcataggatcagtggtgggagagagaaaagagatggaaaatagaaatttattgaaacttgaaagaagcgcttacaaaagttttctttcagagcacctctctttcagaaacctgaaaaatggccaaatgaaagggtgcatcacaacatagttgaggactccttatatagccaaaaatctgagaccggtagttgtcggtagttttgaccgggactatttgactgtttgttacaagacaagtagttttgaccgagactttaatggctacaggacaggtagtattgtccaaaattaattacacattaattacaaatagacggttttgtgaccgaaattaaatttaatctaaacagataccaaaacaatcatcttcggtatctgtttaccaaaacaatcatcttcggtatctgtttaccaaaacaatcatcttcggtatctgtctaccaaaacaatcatcttcggtatcaatttaccaaagatgattgttttggtaaacagataccgaagatgattgttttggtaaacagatacagaagatgattgttttggtaaacagataccgaagatgattgttttggtatctgtttagattaaatttaatttcggtcacaaaaccgtctgtttgtaattaatgtgtaattaattttggacaatactacctgtcctgtagccattaaagtcccggtcaaaactacttgtcttgtaacaaacagttaaatagtcccggtcaaaactaccggcaactaccggtctcagatttttggctatataaggagtcctcaactatgttgtgagacaccctttcatttggccatttttcaggtttctgaagagaggtgctctgaaagaaaacttttgtaagcgcttctttcaagtttcaataaatttctattttccgtctcttttctctctcccaccaccgatcctgtgcggttgtgccgccgtttcggtttctttgtttatgaaaacctgggatttgtaagccggtctccggtgtgcccttgatatctgttttacaagtttatattttcatttccatttatcatactgca

SEQ ID NO: 11900 - DNA, 1088 bp, Glycine max
  Gm_smallRNAprecursor_4733
acttgtaaaatagatatcaagggcacaccggagaccggcttacaaatcccaggttttcataaacaaagaaaccgaagcggcggtatagccgcataggatcagtggtgggagagagaaaagagatggaaaatagaaatttattgaaacttgaaagaagcgcttacaaaagttttctttcagagcacctctctttcagaaacctgaaaaatggccaaatgaaagggtgcatcacaacatagttgaggactccttatatagccaaaaatctgagaccggtagttgtcggtagttttgaccgggactatttgactgtttgttacaagacaagtagttttgaccgagactttaatggctacaggacaggtagtattgtccaaaattaattacacattaattacaaatagacggttttgtgaccgaaattaaatttaatctaaacagataccaaaacaatcatcttcggtatctgtttaccaaaacaatcatcttcggtatctgtttaccaaaacaatcatcttcggtatctgtctaccaaaacaatcatcttcggtatcaatttaccaaagatgattgttttggtaaacagataccgaagatgattgttttggtaaacagatacagaagatgattgttttggtaaacagataccgaagatgattgttttggtatctgtttagattaaatttaatttcggtcacaaaaccgtctgtttgtaattaatgtgtaattaattttggacaatactacctgtcctgtagccattaaagtcccggtcaaaactacttgtcttgtaacaaacagttaaatagtcccggtcaaaactaccggcaactaccggtctcagatttttggctatataaggagtcctcaactatgttgtgagacaccctttcatttggccatttttcaggtttctgaagagaggtgctctgaaagaaaacttttgtaagcgcttctttcaagtttcaataaatttctattttccgtctcttttctctctcccaccaccgatcctgtgcggttgtgccgccgtttcggtttctttgtttatgaaaacctgggatttgtaagccggtctccggtgtgcc

SEQ ID NO: 11901 - DNA, 1146 bp, Glycine max
  Gm_smallRNAprecursor_4734
acttgtaaaatagatatcaagggcacaccggagaccggcttacaaatcccaggttttcataaacaaagaaaccgaagcggcggtatagccgcataggatcagtggtgggagagagaaaagagatggaaaatagaaatttattgaaacttgaaagaagcgcttacaaaagttttctttcagagcacctctctttcagaaacctgaaaaatggccaaatgaaagggtgcatcacaacatagttgaggactccttatatagccaaaaatctgagaccggtagttgtcggtagttttgaccgggactatttgactgtttgttacaagacaagtagttttgaccgagactttaatggctacaggacaggtagtattgtccaaaattaattacacattaattacaaatagacggttttgtgaccgaaattaaatttaatctaaacagataccaaaacaatcatcttcggtatctgtttaccaaaacaatcatcttcggtatctgtttaccaaaacaatcatcttcggtatctgtctaccaaaacaatcatcttcggtatcaatttaccaaagatgattgttttggtaaacagataccgaagatgattgttttggtaaacagatacagaagatgattgttttggtaaacagataccgaagatgattgttttggtatctgtttagattaaatttaatttcggtcacaaaaccgtctgtttgtaattaatgtgtaattaattttggacaatactacctgtcctgtagccattaaagtcccggtcaaaactacttgtcttgtaacaaacagttaaatagtcccggtcaaaactaccggcaactaccggtctcagatttttggctatataaggagtcctcaactatgttgtgagacaccctttcatttggccatttttcaggtttctgaagagaggtgctctgaaagaaaacttttgtaagcgcttctttcaagtttcaataaatttctattttccgtctcttttctctctcccaccaccgatcctgtgcggttgtgccgccgtttcggtttctttgtttatgaaaacctgggatttgtaagccggtctccggtgtgcccttgatatctgttttacaagtttatattttcatttccatttatcatactgcattctta

SEQ ID NO: 11902 - DNA, 1076 bp, Glycine max
  Gm_smallRNAprecursor_4735
aaaatagatatcaagggcacaccggagaccggcttacaaatcccaggttttcataaacaaagaaaccgaagcggcggtatagccgcataggatcagtggtgggagagagaaaagagatggaaaatagaaatttattgaaacttgaaagaagcgcttacaaaagttttctttcagagcacctctctttcagaaacctgaaaaatggccaaatgaaagggtgcatcacaacatagttgaggactccttatatagccaaaaatctgagaccggtagttgtcggtagttttgaccgggactatttgactgtttgttacaagacaagtagttttgaccgagactttaatggctacaggacaggtagtattgtccaaaattaattacacattaattacaaatagacggttttgtgaccgaaattaaatttaatctaaacagataccaaaacaatcatcttcggtatctgtttaccaaaacaatcatcttcggtatctgtttaccaaaacaatcatcttcggtatctgtctaccaaaacaatcatcttcggtatcaatttaccaaagatgattgttttggtaaacagataccgaagatgattgttttggtaaacagatacagaagatgattgttttggtaaacagataccgaagatgattgttttggtatctgtttagattaaatttaatttcggtcacaaaaccgtctgtttgtaattaatgtgtaattaattttggacaatactacctgtcctgtagccattaaagtcccggtcaaaactacttgtcttgtaacaaacagttaaatagtcccggtcaaaactaccggcaactaccggtctcagatttttggctatataaggagtcctcaactatgttgtgagacaccctttcatttggccatttttcaggtttctgaagagaggtgctctgaaagaaaacttttgtaagcgcttctttcaagtttcaataaatttctattttccgtctcttttctctctcccaccaccgatcctgtgcggttgtgccgccgtttcggtttctttgtttatgaaaacctgggatttgtaagccggtctccgg

SEQ ID NO: 11903 - DNA, 1134 bp, Glycine max
  Gm_smallRNAprecursor_4736
aaaatagatatcaagggcacaccggagaccggcttacaaatcccaggttttcataaacaaagaaaccgaagcggcggtatagccgcataggatcagtggtgggagagagaaaagagatggaaaatagaaatttattgaaacttgaaagaagcgcttacaaaagttttctttcagagcacctctctttcagaaacctgaaaaatggccaaatgaaagggtgcatcacaacatagttgaggactccttatatagccaaaaatctgagaccggtagttgtcggtagttttgaccgggactatttgactgtttgttacaagacaagtagttttgaccgagactttaatggctacaggacaggtagtattgtccaaaattaattacacattaattacaaatagacggttttgtgaccgaaattaaatttaatctaaacagataccaaaacaatcatcttcggtatctgtttaccaaaacaatcatcttcggtatctgtttaccaaaacaatcatcttcggtatctgtctaccaaaacaatcatcttcggtatcaatttaccaaagatgattgttttggtaaacagataccgaagatgattgttttggtaaacagatacagaagatgattgttttggtaaacagataccgaagatgattgttttggtatctgtttagattaaatttaatttcggtcacaaaaccgtctgtttgtaattaatgtgtaattaattttggacaatactacctgtcctgtagccattaaagtcccggtcaaaactacttgtcttgtaacaaacagttaaatagtcccggtcaaaactaccggcaactaccggtctcagatttttggctatataaggagtcctcaactatgttgtgagacaccctttcatttggccatttttcaggtttctgaagagaggtgctctgaaagaaaacttttgtaagcgcttctttcaagtttcaataaatttctattttccgtctcttttctctctcccaccaccgatcctgtgcggttgtgccgccgtttcggtttctttgtttatgaaaacctgggatttgtaagccggtctccggtgtgcccttgatatctgttttacaagtttatattttcatttccatttatcatactgca

SEQ ID NO: 11904 - DNA, 1059 bp, Glycine max
  Gm_smallRNAprecursor_4737
ggagaccggcttacaaatcccaggttttcataaacaaagaaaccgaagcggcggtatagccgcataggatcagtggtgggagagagaaaagagatggaaaatagaaatttattgaaacttgaaagaagcgcttacaaaagttttctttcagagcacctctctttcagaaacctgaaaaatggccaaatgaaagggtgcatcacaacatagttgaggactccttatatagccaaaaatctgagaccggtagttgtcggtagttttgaccgggactatttgactgtttgttacaagacaagtagttttgaccgagactttaatggctacaggacaggtagtattgtccaaaattaattacacattaattacaaatagacggttttgtgaccgaaattaaatttaatctaaacagataccaaaacaatcatcttcggtatctgtttaccaaaacaatcatcttcggtatctgtttaccaaaacaatcatcttcggtatctgtctaccaaaacaatcatcttcggtatcaatttaccaaagatgattgttttggtaaacagataccgaagatgattgttttggtaaacagatacagaagatgattgttttggtaaacagataccgaagatgattgttttggtatctgtttagattaaatttaatttcggtcacaaaaccgtctgtttgtaattaatgtgtaattaattttggacaatactacctgtcctgtagccattaaagtcccggtcaaaactacttgtcttgtaacaaacagttaaatagtcccggtcaaaactaccggcaactaccggtctcagatttttggctatataaggagtcctcaactatgttgtgagacaccctttcatttggccatttttcaggtttctgaagagaggtgctctgaaagaaaacttttgtaagcgcttctttcaagtttcaataaatttctattttccgtctcttttctctctcccaccaccgatcctgtgcggttgtgccgccgtttcggtttctttgtttatgaaaacctgggatttgtaagccggtctccggtgtgcc

SEQ ID NO: 11905 - DNA, 1117 bp, Glycine max
  Gm_smallRNAprecursor_4738
ggagaccggcttacaaatcccaggttttcataaacaaagaaaccgaagcggcggtatagccgcataggatcagtggtgggagagagaaaagagatggaaaatagaaatttattgaaacttgaaagaagcgcttacaaaagttttctttcagagcacctctctttcagaaacctgaaaaatggccaaatgaaagggtgcatcacaacatagttgaggactccttatatagccaaaaatctgagaccggtagttgtcggtagttttgaccgggactatttgactgtttgttacaagacaagtagttttgaccgagactttaatggctacaggacaggtagtattgtccaaaattaattacacattaattacaaatagacggttttgtgaccgaaattaaatttaatctaaacagataccaaaacaatcatcttcggtatctgtttaccaaaacaatcatcttcggtatctgtttaccaaaacaatcatcttcggtatctgtctaccaaaacaatcatcttcggtatcaatttaccaaagatgattgttttggtaaacagataccgaagatgattgttttggtaaacagatacagaagatgattgttttggtaaacagataccgaagatgattgttttggtatctgtttagattaaatttaatttcggtcacaaaaccgtctgtttgtaattaatgtgtaattaattttggacaatactacctgtcctgtagccattaaagtcccggtcaaaactacttgtcttgtaacaaacagttaaatagtcccggtcaaaactaccggcaactaccggtctcagatttttggctatataaggagtcctcaactatgttgtgagacaccctttcatttggccatttttcaggtttctgaagagaggtgctctgaaagaaaacttttgtaagcgcttctttcaagtttcaataaatttctattttccgtctcttttctctctcccaccaccgatcctgtgcggttgtgccgccgtttcggtttctttgtttatgaaaacctgggatttgtaagccggtctccggtgtgcccttgatatctgttttacaagtttatattttcatttccatttatcatactgcattctta

SEQ ID NO: 11906 - DNA, 1234 bp, Glycine max
  Gm_smallRNAprecursor_4739
ggtatagccgcataggatcagtggtgggagagagaaaagagatggaaaatagaaatttattgaaacttgaaagaagcgcttacaaaagttttctttcagagcacctctctttcagaaacctgaaaaatggccaaatgaaagggtgcatcacaacatagttgaggactccttatatagccaaaaatctgagaccggtagttgtcggtagttttgaccgggactatttgactgtttgttacaagacaagtagttttgaccgagactttaatggctacaggacaggtagtattgtccaaaattaattacacattaattacaaatagacggttttgtgaccgaaattaaatttaatctaaacagataccaaaacaatcatcttcggtatctgtttaccaaaacaatcatcttcggtatctgtttaccaaaacaatcatcttcggtatctgtctaccaaaacaatcatcttcggtatcaatttaccaaagatgattgttttggtaaacagataccgaagatgattgttttggtaaacagatacagaagatgattgttttggtaaacagataccgaagatgattgttttggtatctgtttagattaaatttaatttcggtcacaaaaccgtctgtttgtaattaatgtgtaattaattttggacaatactacctgtcctgtagccattaaagtcccggtcaaaactacttgtcttgtaacaaacagttaaatagtcccggtcaaaactaccggcaactaccggtctcagatttttggctatataaggagtcctcaactatgttgtgagacaccctttcatttggccatttttcaggtttctgaagagaggtgctctgaaagaaaacttttgtaagcgcttctttcaagtttcaataaatttctattttccgtctcttttctctctcccaccaccgatcctgtgcggttgtgccgccgtttcggtttctttgtttatgaaaacctgggatttgtaagccggtctccggtgtgcccttgatatctgttttacaagtttatattttcatttccatttatcatactgcattcttacttcctacctgtccgtttgatcctattccactgacctctagtattagagcctgatggggaagtaggaatagtgtccgtaagggcatatgttaactgaacttatggatctgaaccatgtacaatagttttaatttaaacagtatatgtttgaacagtattttctggaagc

SEQ ID NO: 11907 - DNA, 1176 bp, Glycine max
  Gm_smallRNAprecursor_4740
attgaaacttgaaagaagcgcttacaaaagttttctttcagagcacctctctttcagaaacctgaaaaatggccaaatgaaagggtgcatcacaacatagttgaggactccttatatagccaaaaatctgagaccggtagttgtcggtagttttgaccgggactatttgactgtttgttacaagacaagtagttttgaccgagactttaatggctacaggacaggtagtattgtccaaaattaattacacattaattacaaatagacggttttgtgaccgaaattaaatttaatctaaacagataccaaaacaatcatcttcggtatctgtttaccaaaacaatcatcttcggtatctgtttaccaaaacaatcatcttcggtatctgtctaccaaaacaatcatcttcggtatcaatttaccaaagatgattgttttggtaaacagataccgaagatgattgttttggtaaacagatacagaagatgattgttttggtaaacagataccgaagatgattgttttggtatctgtttagattaaatttaatttcggtcacaaaaccgtctgtttgtaattaatgtgtaattaattttggacaatactacctgtcctgtagccattaaagtcccggtcaaaactacttgtcttgtaacaaacagttaaatagtcccggtcaaaactaccggcaactaccggtctcagatttttggctatataaggagtcctcaactatgttgtgagacaccctttcatttggccatttttcaggtttctgaagagaggtgctctgaaagaaaacttttgtaagcgcttctttcaagtttcaataaatttctattttccgtctcttttctctctcccaccaccgatcctgtgcggttgtgccgccgtttcggtttctttgtttatgaaaacctgggatttgtaagccggtctccggtgtgcccttgatatctgttttacaagtttatattttcatttccatttatcatactgcattcttacttcctacctgtccgtttgatcctattccactgacctctagtattagagcctgatggggaagtaggaatagtgtccgtaagggcatatgttaactgaacttatggatctgaaccatgtacaatagttttaatttaaacagtatatgtttgaacagtattttctggaagc

SEQ ID NO: 11908 - DNA, 1079 bp, Glycine max
  Gm_smallRNAprecursor_4741
attaatgtgtaattaattttggacaatactacctgtcctgtagccattaaagtcccggtcaaaactacttgtcttgtaacaaacagttaaatagtcccggtcaaaactaccggcaactaccggtctcagatttttggctatataaggagtcctcaactatgttgtgagacaccctttcatttggccatttttcaggtttctgaagagaggtgctctgaaagaaaacttttgtaagcgcttctttcaagtttcaataaatttctattttccgtctcttttctctctcccaccaccgatcctgtgcggttgtgccgccgtttcggtttctttgtttatgaaaacctgggatttgtaagccggtctccggtgtgcccttgatatctgttttacaagtttatattttcatttccatttatcatactgcattcttacttcctacctgtccgtttgatcctattccactgacctctagtattagagcctgatggggaagtaggaatagtgtccgtaagggcatatgttaactgaacttatggatctgaaccatgtacaatagttttaatttaaacagtatatgtttgaacagtattttctggaagcagaacagtctgatattttagttgaatgatactgtagcagtaagccctgtggttgagaaagggcagtaagactaaggtgtattgttcaaataaaatattgagacataatatactggaggctataggagtagtgttcaaactatattgtccataaaaaaaaataaaaaaaatttgttcagatccaagaagttttgtaacatatagccttatgaaaacatttctatggaaccaaatgaaggcaaagatattagagaatgttataatcatgtctagactattgtgctctttttcccgtatcactttttgatcaaattcttcttcatcatcttcctcaagaaattccaatttattaagtgatcaagataaccagacccaagaggtcgcccccaaacacaatctcttcgatgaggaagtccgattcgaagatatcaatcaaaacatggatgactggaacattccagaaatccctcaggatcaaca

SEQ ID NO: 11909 - DNA, 1080 bp, Glycine max
  Gm_smallRNAprecursor_4742
attaatgtgtaattaattttggacaatactacctgtcctgtagccattaaagtcccggtcaaaactacttgtcttgtaacaaacagttaaatagtcccggtcaaaactaccggcaactaccggtctcagatttttggctatataaggagtcctcaactatgttgtgagacaccctttcatttggccatttttcaggtttctgaagagaggtgctctgaaagaaaacttttgtaagcgcttctttcaagtttcaataaatttctattttccgtctcttttctctctcccaccaccgatcctgtgcggttgtgccgccgtttcggtttctttgtttatgaaaacctgggatttgtaagccggtctccggtgtgcccttgatatctgttttacaagtttatattttcatttccatttatcatactgcattcttacttcctacctgtccgtttgatcctattccactgacctctagtattagagcctgatggggaagtaggaatagtgtccgtaagggcatatgttaactgaacttatggatctgaaccatgtacaatagttttaatttaaacagtatatgtttgaacagtattttctggaagcagaacagtctgatattttagttgaatgatactgtagcagtaagccctgtggttgagaaagggcagtaagactaaggtgtattgttcaaataaaatattgagacataatatactggaggctataggagtagtgttcaaactatattgtccataaaaaaaaataaaaaaaatttgttcagatccaagaagttttgtaacatatagccttatgaaaacatttctatggaaccaaatgaaggcaaagatattagagaatgttataatcatgtctagactattgtgctctttttcccgtatcactttttgatcaaattcttcttcatcatcttcctcaagaaattccaatttattaagtgatcaagataaccagacccaagaggtcgcccccaaacacaatctcttcgatgaggaagtccgattcgaagatatcaatcaaaacatggatgactggaacattccagaaatccctcaggatcaacaa

SEQ ID NO: 11910 - DNA, 1157 bp, Glycine max
  Gm_smallRNAprecursor_4743
aagtaggaatagtgtccgtaagggcatatgttaactgaacttatggatctgaaccatgtacaatagttttaatttaaacagtatatgtttgaacagtattttctggaagcagaacagtctgatattttagttgaatgatactgtagcagtaagccctgtggttgagaaagggcagtaagactaaggtgtattgttcaaataaaatattgagacataatatactggaggctataggagtagtgttcaaactatattgtccataaaaaaaaataaaaaaaatttgttcagatccaagaagttttgtaacatatagccttatgaaaacatttctatggaaccaaatgaaggcaaagatattagagaatgttataatcatgtctagactattgtgctctttttcccgtatcactttttgatcaaattcttcttcatcatcttcctcaagaaattccaatttattaagtgatcaagataaccagacccaagaggtcgcccccaaacacaatctcttcgatgaggaagtccgattcgaagatatcaatcaaaacatggatgactggaacattccagaaatccctcaggatcaacaatacgttcctgaaacaattaaggacaaacacaactttgattacataatcaaaacagtagaaaacaatattcctctaggacaagatataggggaagaatttcatttactttcaaaaatttcaatttatgaacatagccgtgagtataaatatctacacatcggctgtatacaagtagccatcaagcctttaattgacatgggcatagatgtaacagttttggcataaatttatctgtctctgatactagaggttggcggaaaaggatcaaacggacaggtaggaagtaagaatgcagtatgataaatggaaatgaaaatataaacttgtaaaacagatatcaagggcagaccgaagaccggcttacaaatcccaggttttcataaacaaagaaaccgaagcggtggcagagtcgcataggatcggtggagggagagagaaaagagatggaaaatagaaatttattgaaacttgaaagaagcacttacaaaagttttctttcagagcacctctcttcagaaacctaaaaaatggccaaatgaaagggtgcctcacaacatagttgaggac

SEQ ID NO: 11911 - DNA, 1085 bp, Glycine max
  Gm_smallRNAprecursor_4744
gaaaaggatcaaacggacaggtaggaagtaagaatgcagtatgataaatggaaatgaaaatataaacttgtaaaacagatatcaagggcagaccgaagaccggcttacaaatcccaggttttcataaacaaagaaaccgaagcggtggcagagtcgcataggatcggtggagggagagagaaaagagatggaaaatagaaatttattgaaacttgaaagaagcacttacaaaagttttctttcagagcacctctcttcagaaacctaaaaaatggccaaatgaaagggtgcctcacaacatagttgaggactccttatatagccaaaattctgagaccggtagttgccggtagttttgaccggaactatttgactatttgttacaagacaagtagttttgaccggaactttaatggctataggacaggtagtattgtccaaaattaattacacattagttacaatcagacggttttgtgatcgaaaataaatttaatctaaacagataccaaaacaatcatcttcgttttggtaaaaggggtcttcttcttcttcagcagcagaacttgtctcttccttctttgaggatgatccttcttcttcctgctataacatttgcagaacttcctttagatttttagttaggatctcctttgatttcgatcttgctaaaaatgctgccagatgagacttttggttcaaaaacacagaagtttctggattagctgctttgaggaattctggatgggattggaactagagttttacttgttctggatctgctttggatgagtcaaattgtgtccaccattttacaaatgcgtgtctttgtagtgatggatattggtttgtcttttcagtcttgctgtaacgatgttgtcatgagaagatccatgacagtggaaagcttgagaagtatttaagattttctggaattcgtgattcctgcgaattgtattgtttctcaaattgggcaaatccttgttggactgtttctgggaatatctctggaatttgtccaaagaagtcccaccattgtaaaaaccaattgggaaaattgtaaattgtattggtcttgaaatata

SEQ ID NO: 11912 - DNA, 1085 bp, Glycine max; identical to SEQ ID NO: 11911
  Gm_smallRNAprecursor_4745

SEQ ID NO: 11913 - DNA, 1084 bp, Glycine max
  Gm_smallRNAprecursor_4746
aaaaggatcaaacggacaggtaggaagtaagaatgcagtatgataaatggaaatgaaaatataaacttgtaaaacagatatcaagggcagaccgaagaccggcttacaaatcccaggttttcataaacaaagaaaccgaagcggtggcagagtcgcataggatcggtggagggagagagaaaagagatggaaaatagaaatttattgaaacttgaaagaagcacttacaaaagttttctttcagagcacctctcttcagaaacctaaaaaatggccaaatgaaagggtgcctcacaacatagttgaggactccttatatagccaaaattctgagaccggtagttgccggtagttttgaccggaactatttgactatttgttacaagacaagtagttttgaccggaactttaatggctataggacaggtagtattgtccaaaattaattacacattagttacaatcagacggttttgtgatcgaaaataaatttaatctaaacagataccaaaacaatcatcttcgttttggtaaaaggggtcttcttcttcttcagcagcagaacttgtctcttccttctttgaggatgatccttcttcttcctgctataacatttgcagaacttcctttagatttttagttaggatctcctttgatttcgatcttgctaaaaatgctgccagatgagacttttggttcaaaaacacagaagtttctggattagctgctttgaggaattctggatgggattggaactagagttttacttgttctggatctgctttggatgagtcaaattgtgtccaccattttacaaatgcgtgtctttgtagtgatggatattggtttgtcttttcagtcttgctgtaacgatgttgtcatgagaagatccatgacagtggaaagcttgagaagtatttaagattttctggaattcgtgattcctgcgaattgtattgtttctcaaattgggcaaatccttgttggactgtttctgggaatatctctggaatttgtccaaagaagtcccaccattgtaaaaaccaattgggaaaattgtaaattgtattggtcttgaaatata

SEQ ID NO: 11914 - DNA, 1084 bp, Glycine max; identical to SEQ ID NO: 11913
  Gm_smallRNAprecursor_4747

SEQ ID NO: 11915 - DNA, 1078 bp, Glycine max
  Gm_smallRNAprecursor_4748
cttacaaaagttttctttcagagcacctctcttcagaaacctaaaaaatggccaaatgaaagggtgcctcacaacatagttgaggactccttatatagccaaaattctgagaccggtagttgccggtagttttgaccggaactatttgactatttgttacaagacaagtagttttgaccggaactttaatggctataggacaggtagtattgtccaaaattaattacacattagttacaatcagacggttttgtgatcgaaaataaatttaatctaaacagataccaaaacaatcatcttcgttttggtaaaaggggtcttcttcttcttcagcagcagaacttgtctcttccttctttgaggatgatccttcttcttcctgctataacatttgcagaacttcctttagatttttagttaggatctcctttgatttcgatcttgctaaaaatgctgccagatgagacttttggttcaaaaacacagaagtttctggattagctgctttgaggaattctggatgggattggaactagagttttacttgttctggatctgctttggatgagtcaaattgtgtccaccattttacaaatgcgtgtctttgtagtgatggatattggtttgtcttttcagtcttgctgtaacgatgttgtcatgagaagatccatgacagtggaaagcttgagaagtatttaagattttctggaattcgtgattcctgcgaattgtattgtttctcaaattgggcaaatccttgttggactgtttctgggaatatctctggaatttgtccaaagaagtcccaccattgtaaaaaccaattgggaaaattgtaaattgtattggtcttgaaatatatcagccatgaatgcttgaagcgggtattttggtgccaaaacaccttagtccaagcatcaacataatcccaataggtataacctaccggatcaaatggaattgaaaatctctttcctttgttcaagtccgaaccaaagtgtcttggttcaagaacttttagtatttggattatggagtgggtgtttaatgtttggtcttttgggtctttgaaatgttt

SEQ ID NO: 11916 - DNA, 1077 bp, Glycine max
  Gm_smallRNAprecursor_4749
ttacaaaagttttctttcagagcacctctcttcagaaacctaaaaaatggccaaatgaaagggtgcctcacaacatagttgaggactccttatatagccaaaattctgagaccggtagttgccggtagttttgaccggaactatttgactatttgttacaagacaagtagttttgaccggaactttaatggctataggacaggtagtattgtccaaaattaattacacattagttacaatcagacggttttgtgatcgaaaataaatttaatctaaacagataccaaaacaatcatcttcgttttggtaaaaggggtcttcttcttcttcagcagcagaacttgtctcttccttctttgaggatgatccttcttcttcctgctataacatttgcagaacttcctttagatttttagttaggatctcctttgatttcgatcttgctaaaaatgctgccagatgagacttttggttcaaaaacacagaagtttctggattagctgctttgaggaattctggatgggattggaactagagttttacttgttctggatctgctttggatgagtcaaattgtgtccaccattttacaaatgcgtgtctttgtagtgatggatattggtttgtcttttcagtcttgctgtaacgatgttgtcatgagaagatccatgacagtggaaagcttgagaagtatttaagattttctggaattcgtgattcctgcgaattgtattgtttctcaaattgggcaaatccttgttggactgtttctgggaatatctctggaatttgtccaaagaagtcccaccattgtaaaaaccaattgggaaaattgtaaattgtattggtcttgaaatatatcagccatgaatgcttgaagcgggtattttggtgccaaaacaccttagtccaagcatcaacataatcccaataggtataacctaccggatcaaatggaattgaaaatctctttcctttgttcaagtccgaaccaaagtgtcttggttcaagaacttttagtatttggattatggagtgggtgtttaatgtttggtcttttgggtctttgaaatgttt

SEQ ID NO: 11917 - DNA, 1100 bp, Glycine max
  Gm_smallRNAprecursor_4750
gcagaacttgtctcttccttctttgaggatgatccttcttcttcctgctataacatttgcagaacttcctttagatttttagttaggatctcctttgatttcgatcttgctaaaaatgctgccagatgagacttttggttcaaaaacacagaagtttctggattagctgctttgaggaattctggatgggattggaactagagttttacttgttctggatctgctttggatgagtcaaattgtgtccaccattttacaaatgcgtgtctttgtagtgatggatattggtttgtcttttcagtcttgctgtaacgatgttgtcatgagaagatccatgacagtggaaagcttgagaagtatttaagattttctggaattcgtgattcctgcgaattgtattgtttctcaaattgggcaaatccttgttggactgtttctgggaatatctctggaatttgtccaaagaagtcccaccattgtaaaaaccaattgggaaaattgtaaattgtattggtcttgaaatatatcagccatgaatgcttgaagcgggtattttggtgccaaaacaccttagtccaagcatcaacataatcccaataggtataacctaccggatcaaatggaattgaaaatctctttcctttgttcaagtccgaaccaaagtgtcttggttcaagaacttttagtatttggattatggagtgggtgtttaatgtttggtcttttgggtctttgaaatgtttgatagatactgaatttgaatctaccaaaatcaattcataaaaagttcttgtcttcaggatggtggttggtttgtagtgaaatcctggtgggaaagccttggtcgtcgccttgaaggaattcttgtcccaaaattcaggttccatctgcaaaatagttaaaaatttatttttataaatataattgttagtttgtttggtaggtggtgtttgttctttggctaaaggtaattttcctttaggattggtagatgttttggtcattgatgcattttggatcattgtttgtaaattcgattcagaatcatcatcagattttgaggcaatgtctgcccaagattttttgattatttttggaaa

SEQ ID NO: 11918 - DNA, 1098 bp, Glycine max
  Gm_smallRNAprecursor_4751
agaacttgtctcttccttctttgaggatgatccttcttcttcctgctataacatttgcagaacttcctttagatttttagttaggatctcctttgatttcgatcttgctaaaaatgctgccagatgagacttttggttcaaaaacacagaagtttctggattagctgctttgaggaattctggatgggattggaactagagttttacttgttctggatctgctttggatgagtcaaattgtgtccaccattttacaaatgcgtgtctttgtagtgatggatattggtttgtcttttcagtcttgctgtaacgatgttgtcatgagaagatccatgacagtggaaagcttgagaagtatttaagattttctggaattcgtgattcctgcgaattgtattgtttctcaaattgggcaaatccttgttggactgtttctgggaatatctctggaatttgtccaaagaagtcccaccattgtaaaaaccaattgggaaaattgtaaattgtattggtcttgaaatatatcagccatgaatgcttgaagcgggtattttggtgccaaaacaccttagtccaagcatcaacataatcccaataggtataacctaccggatcaaatggaattgaaaatctctttcctttgttcaagtccgaaccaaagtgtcttggttcaagaacttttagtatttggattatggagtgggtgtttaatgtttggtcttttgggtctttgaaatgtttgatagatactgaatttgaatctaccaaaatcaattcataaaaagttcttgtcttcaggatggtggttggtttgtagtgaaatcctggtgggaaagccttggtcgtcgccttgaaggaattcttgtcccaaaattcaggttccatctgcaaaatagttaaaaatttatttttataaatataattgttagtttgtttggtaggtggtgtttgttctttggctaaaggtaattttcctttaggattggtagatgttttggtcattgatgcattttggatcattgtttgtaaattcgattcagaatcatcatcagattttgaggcaatgtctgcccaagattttttgattatttttggaaa

SEQ ID NO: 11919 - DNA, 1104 bp, Glycine max
  Gm_smallRNAprecursor_4752
acacagaagtttctggattagctgctttgaggaattctggatgggattggaactagagttttacttgttctggatctgctttggatgagtcaaattgtgtccaccattttacaaatgcgtgtctttgtagtgatggatattggtttgtcttttcagtcttgctgtaacgatgttgtcatgagaagatccatgacagtggaaagcttgagaagtatttaagattttctggaattcgtgattcctgcgaattgtattgtttctcaaattgggcaaatccttgttggactgtttctgggaatatctctggaatttgtccaaagaagtcccaccattgtaaaaaccaattgggaaaattgtaaattgtattggtcttgaaatatatcagccatgaatgcttgaagcgggtattttggtgccaaaacaccttagtccaagcatcaacataatcccaataggtataacctaccggatcaaatggaattgaaaatctctttcctttgttcaagtccgaaccaaagtgtcttggttcaagaacttttagtatttggattatggagtgggtgtttaatgtttggtcttttgggtctttgaaatgtttgatagatactgaatttgaatctaccaaaatcaattcataaaaagttcttgtcttcaggatggtggttggtttgtagtgaaatcctggtgggaaagccttggtcgtcgccttgaaggaattcttgtcccaaaattcaggttccatctgcaaaatagttaaaaatttatttttataaatataattgttagtttgtttggtaggtggtgtttgttctttggctaaaggtaattttcctttaggattggtagatgttttggtcattgatgcattttggatcattgtttgtaaattcgattcagaatcatcatcagattttgaggcaatgtctgcccaagattttttgattatttttggaaatttggttagacccatgtcttgaagggcctgaagggtttcaattggccatgcatagtcggccgatgtttgcttggcgtttgccggtttgagagattcctgagtggatggctcaggtttgattgaggtaatctaggtcgatgacccttcta

SEQ ID NO: 11920 - DNA, 1189 bp, Glycine max
  Gm_smallRNAprecursor_4753
acacagaagtttctggattagctgctttgaggaattctggatgggattggaactagagttttacttgttctggatctgctttggatgagtcaaattgtgtccaccattttacaaatgcgtgtctttgtagtgatggatattggtttgtcttttcagtcttgctgtaacgatgttgtcatgagaagatccatgacagtggaaagcttgagaagtatttaagattttctggaattcgtgattcctgcgaattgtattgtttctcaaattgggcaaatccttgttggactgtttctgggaatatctctggaatttgtccaaagaagtcccaccattgtaaaaaccaattgggaaaattgtaaattgtattggtcttgaaatatatcagccatgaatgcttgaagcgggtattttggtgccaaaacaccttagtccaagcatcaacataatcccaataggtataacctaccggatcaaatggaattgaaaatctctttcctttgttcaagtccgaaccaaagtgtcttggttcaagaacttttagtatttggattatggagtgggtgtttaatgtttggtcttttgggtctttgaaatgtttgatagatactgaatttgaatctaccaaaatcaattcataaaaagttcttgtcttcaggatggtggttggtttgtagtgaaatcctggtgggaaagccttggtcgtcgccttgaaggaattcttgtcccaaaattcaggttccatctgcaaaatagttaaaaatttatttttataaatataattgttagtttgtttggtaggtggtgtttgttctttggctaaaggtaattttcctttaggattggtagatgttttggtcattgatgcattttggatcattgtttgtaaattcgattcagaatcatcatcagattttgaggcaatgtctgcccaagattttttgattatttttggaaatttggttagacccatgtcttgaagggcctgaagggtttcaattggccatgcatagtcggccgatgtttgcttggcgtttgccggtttgagagattcctgagtggatggctcaggtttgattgaggtaatctaggtcgatgacccttctaaattggttttctggatagatgacccagcctgggttggtgacccataagaggttgatgatttcttagtggttggctctggaagtgc

SEQ ID NO: 11921 - DNA, 1113 bp, Glycine max
  Gm_smallRNAprecursor_4754
ggaaatttggttagacccatgtcttgaagggcctgaagggtttcaattggccatgcatagtcggccgatgtttgcttggcgtttgccggtttgagagattcctgagtggatggctcaggtttgattgaggtaatctaggtcgatgacccttctaaattggttttctggatagatgacccagcctgggttggtgacccataagaggttgatgatttcttagtggttggctctggaagtgccagtctggatcctttgcctgtacttcgtcctccccttagggagattcctaatgccttaggaggcattaccacttttctgtaagaattcacgggtaaggtagtcaggtaatgaatttgaggtgcccttgatatattctatgtcaaaatcaaagacacttagaattgcttgccgtcttgcaaaaatttgttttgaggcaaggtttttaacatctttttgtaaaatatctttggctgatttacaatcaaccctgattaaaaacttttggtttaataaatccgattgaaatttggaaatgcacaaaacaattgctaaaacttcatttttcacagttgaatattttaattgtgcaggattccagtgttttgatgtatatgcaatgacatgatcttggccatggactctttgtttgaggatgccaccataaccaatgtatgatgcatcagtttcgataattttaaatacatgtggaatgggaagatacagacattttatggattggacttttagtttgatttctttaactgtttgtgtatggaggtcagaccaaggaggcagatttttcttcagcctatcatgcaatggcttgacaatattgtttaaataggggaaaaattctcctacataatttagacaacctagaaatctttgtaactgggttttgtctaagatttggttgggaaatttgccagcaaactctattgacctttctattggaatgattgtaccttgatatatattgtgaccaaggaatcgaattcgagtttggaaaagatttatttttgatttggagactgccaaaccattatgtttgatgatatggatgaaagtctagagatgtttgaaatgttggtcaatgttttgggaaaagattaa

SEQ ID NO: 11922 - DNA, 1113 bp, Glycine max; identical to SEQ ID NO: 11921
  Gm_smallRNAprecursor_4755

SEQ ID NO: 11923 - DNA, 1114 bp, Glycine max
  Gm_smallRNAprecursor_4756
ggaaatttggttagacccatgtcttgaagggcctgaagggtttcaattggccatgcatagtcggccgatgtttgcttggcgtttgccggtttgagagattcctgagtggatggctcaggtttgattgaggtaatctaggtcgatgacccttctaaattggttttctggatagatgacccagcctgggttggtgacccataagaggttgatgatttcttagtggttggctctggaagtgccagtctggatcctttgcctgtacttcgtcctccccttagggagattcctaatgccttaggaggcattaccacttttctgtaagaattcacgggtaaggtagtcaggtaatgaatttgaggtgcccttgatatattctatgtcaaaatcaaagacacttagaattgcttgccgtcttgcaaaaatttgttttgaggcaaggtttttaacatctttttgtaaaatatctttggctgatttacaatcaaccctgattaaaaacttttggtttaataaatccgattgaaatttggaaatgcacaaaacaattgctaaaacttcatttttcacagttgaatattttaattgtgcaggattccagtgttttgatgtatatgcaatgacatgatcttggccatggactctttgtttgaggatgccaccataaccaatgtatgatgcatcagtttcgataattttaaatacatgtggaatgggaagatacagacattttatggattggacttttagtttgatttctttaactgtttgtgtatggaggtcagaccaaggaggcagatttttcttcagcctatcatgcaatggcttgacaatattgtttaaataggggaaaaattctcctacataatttagacaacctagaaatctttgtaactgggttttgtctaagatttggttgggaaatttgccagcaaactctattgacctttctattggaatgattgtaccttgatatatattgtgaccaaggaatcgaattcgagtttggaaaagatttatttttgatttggagactgccaaaccattatgtttgatgatatggatgaaagtctagagatgtttgaaatgttggtcaatgttttgggaaaagattaaa

SEQ ID NO: 11924 - DNA, 1153 bp, Glycine max
  Gm_smallRNAprecursor_4757
ggaggcattaccacttttctgtaagaattcacgggtaaggtagtcaggtaatgaatttgaggtgcccttgatatattctatgtcaaaatcaaagacacttagaattgcttgccgtcttgcaaaaatttgttttgaggcaaggtttttaacatctttttgtaaaatatctttggctgatttacaatcaaccctgattaaaaacttttggtttaataaatccgattgaaatttggaaatgcacaaaacaattgctaaaacttcatttttcacagttgaatattttaattgtgcaggattccagtgttttgatgtatatgcaatgacatgatcttggccatggactctttgtttgaggatgccaccataaccaatgtatgatgcatcagtttcgataattttaaatacatgtggaatgggaagatacagacattttatggattggacttttagtttgatttctttaactgtttgtgtatggaggtcagaccaaggaggcagatttttcttcagcctatcatgcaatggcttgacaatattgtttaaataggggaaaaattctcctacataatttagacaacctagaaatctttgtaactgggttttgtctaagatttggttgggaaatttgccagcaaactctattgacctttctattggaatgattgtaccttgatatatattgtgaccaaggaatcgaattcgagtttggaaaagatttatttttgatttggagactgccaaaccattatgtttgatgatatggatgaaagtctagagatgtttgaaatgttggtcaatgttttgggaaaagattaaaacatcatctatgtagacaatgacaaattttgaacagggattaaaaatatcattcataattttttgaaattctgaaggggcattcttcagtccgaatggcatcacattccattcatattgcccgaaaggtacagtaaatgttgttttgtacctatctgattcttggatttgccaaaatccagatttcatatcaaattttgaaaatatctttgcagaatttaatctgttaagcaaatcttttttgtttggaataggatacctaatccattgtaatgcttgatttactggtttgtaatttatgactaagcggggtgttccacgctcaatctcagattgt

SEQ ID NO: 11925 - DNA, 1168 bp, Glycine max
  Gm_smallRNAprecursor_4758
ggaggcattaccacttttctgtaagaattcacgggtaaggtagtcaggtaatgaatttgaggtgcccttgatatattctatgtcaaaatcaaagacacttagaattgcttgccgtcttgcaaaaatttgttttgaggcaaggtttttaacatctttttgtaaaatatctttggctgatttacaatcaaccctgattaaaaacttttggtttaataaatccgattgaaatttggaaatgcacaaaacaattgctaaaacttcatttttcacagttgaatattttaattgtgcaggattccagtgttttgatgtatatgcaatgacatgatcttggccatggactctttgtttgaggatgccaccataaccaatgtatgatgcatcagtttcgataattttaaatacatgtggaatgggaagatacagacattttatggattggacttttagtttgatttctttaactgtttgtgtatggaggtcagaccaaggaggcagatttttcttcagcctatcatgcaatggcttgacaatattgtttaaataggggaaaaattctcctacataatttagacaacctagaaatctttgtaactgggttttgtctaagatttggttgggaaatttgccagcaaactctattgacctttctattggaatgattgtaccttgatatatattgtgaccaaggaatcgaattcgagtttggaaaagatttatttttgatttggagactgccaaaccattatgtttgatgatatggatgaaagtctagagatgtttgaaatgttggtcaatgttttgggaaaagattaaaacatcatctatgtagacaatgacaaattttgaacagggattaaaaatatcattcataattttttgaaattctgaaggggcattcttcagtccgaatggcatcacattccattcatattgcccgaaaggtacagtaaatgttgttttgtacctatctgattcttggatttgccaaaatccagatttcatatcaaattttgaaaatatctttgcagaatttaatctgttaagcaaatcttttttgtttggaataggatacctaatccattgtaatgcttgatttactggtttgtaatttatgactaagcggggtgttccacgctcaatctcagattgtttgttgacataaaaa

SEQ ID NO: 11926 - DNA, 1031 bp, Glycine max
  Gm_smallRNAprecursor_4759
ctttttgtaaaatatctttggctgatttacaatcaaccctgattaaaaacttttggtttaataaatccgattgaaatttggaaatgcacaaaacaattgctaaaacttcatttttcacagttgaatattttaattgtgcaggattccagtgttttgatgtatatgcaatgacatgatcttggccatggactctttgtttgaggatgccaccataaccaatgtatgatgcatcagtttcgataattttaaatacatgtggaatgggaagatacagacattttatggattggacttttagtttgatttctttaactgtttgtgtatggaggtcagaccaaggaggcagatttttcttcagcctatcatgcaatggcttgacaatattgtttaaataggggaaaaattctcctacataatttagacaacctagaaatctttgtaactgggttttgtctaagatttggttgggaaatttgccagcaaactctattgacctttctattggaatgattgtaccttgatatatattgtgaccaaggaatcgaattcgagtttggaaaagatttatttttgatttggagactgccaaaccattatgtttgatgatatggatgaaagtctagagatgtttgaaatgttggtcaatgttttgggaaaagattaaaacatcatctatgtagacaatgacaaattttgaacagggattaaaaatatcattcataattttttgaaattctgaaggggcattcttcagtccgaatggcatcacattccattcatattgcccgaaaggtacagtaaatgttgttttgtacctatctgattcttggatttgccaaaatccagatttcatatcaaattttgaaaatatctttgcagaatttaatctgttaagcaaatcttttttgtttggaataggatacctaatccattgtaatgcttgatttactggtttgtaatttatgactaagcggggtgttccacgctcaatctcagattgtttgttgacataaaaagccgcacaagaccat

SEQ ID NO: 11927 - DNA, 1127 bp, Glycine max
  Gm_smallRNAprecursor_4760
aataggggaaaaattctcctacataatttagacaacctagaaatctttgtaactgggttttgtctaagatttggttgggaaatttgccagcaaactctattgacctttctattggaatgattgtaccttgatatatattgtgaccaaggaatcgaattcgagtttggaaaagatttatttttgatttggagactgccaaaccattatgtttgatgatatggatgaaagtctagagatgtttgaaatgttggtcaatgttttgggaaaagattaaaacatcatctatgtagacaatgacaaattttgaacagggattaaaaatatcattcataattttttgaaattctgaaggggcattcttcagtccgaatggcatcacattccattcatattgcccgaaaggtacagtaaatgttgttttgtacctatctgattcttggatttgccaaaatccagatttcatatcaaattttgaaaatatctttgcagaatttaatctgttaagcaaatcttttttgtttggaataggatacctaatccattgtaatgcttgatttactggtttgtaatttatgactaagcggggtgttccacgctcaatctcagattgtttgttgacataaaaagccgcacaagaccatgggcttttgcttttccggattaggcctttatcaaggaaatccttgatttccttttggaagtattgaagaagttcttcgttcatttggattggtctggcttttgtggaaatttgtttttccctaaagtctttctcataagggagatcaacaatatgtttctttctgtcccaaaatgcatgtggcaaatcagaacagacagttgattcgatatgatttaataaagattgaattttttcttttacttcgggttttcctagttgtatctgaatattattaaaagatacttcttcttttaagaagttaatttgattaatcttattttctataagatttatatttctggagattggtttagtagaaaaatttaatttttcttcctaaataatttgtggttattccttcattagatatttgaatgggaaacaaggctctaatgaagggggttcctaggattacttcgttcttaaggttttttaccagaagaaa

SEQ ID NO: 11928 - DNA, 1154 bp, Glycine max
  Gm_smallRNAprecursor_4761
cattgatagtgcttttggtactttgctatgttatgcatattcatgcatttcccaacatttgattctaaatttcaatgacctttgatgattgctaggcgaccaagttatggaaagatatgaagtttcttctatattagtcaattaagcatttaaaaataggcattcttgaaatgttttggacttttgattttacttgtataacccatttgtttgtacttaactcttctgcttcaatgttcttaaacaaccaatgcagtttcgatgcatttcccaccctttgttatgtcatgcatattcatgcatttcccaccctatatattgctttacttttcttcttaaacaaccaatgcagaaaaaaaaacactttaactctttgattcaatgttcttgtgttgcatatatatatatatatatatatatatataaacctgggatttgtaagccggtctccggtgtgcccttgatatctgttttacaagtttatattttcctttcatttatcatactgcattcttacttcctatctgtctgtttgatcttattccgctgatctctggtatcagagcctgatggggaagtaggaatagtgtctgtaagggacatatgttaactgaacttatggatctgaaccatgtacagtaattttaatttaaacagtatgtgtttgaacagtattttctggaagcatagcagtctgatattttacttgaatgatactgtagtagtgagtcccgtggttgagaaagggcagtaagactaaggtgtattgttcaaataaaatattgagacataatatactggtggctataggagtagtgctcaaactatattgtctgtaaaaaaaatctttttcatttattcagatccaagaagttctgtaccatatagccttatgaaaatatttctatggaaccaaatgaaggcaaagatattaaataatattataatcatgtctagactattgcgatctttttcccgtatctcttttcgatcaaactcctcctcatcatcttcttcaagaaactccaatttattaaatgatcaagataaccagacccaagaggtcgcccccaaacacaatctcttcgatgaggaagtcttattcgaagatatcaatcaaaacatggatgactgaaacattccagaaatccctc

SEQ ID NO: 11929 - DNA, 1157 bp, Glycine max
  Gm_smallRNAprecursor_4762
aagtaggaatagtgtctgtaagggacatatgttaactgaacttatggatctgaaccatgtacagtaattttaatttaaacagtatgtgtttgaacagtattttctggaagcatagcagtctgatattttacttgaatgatactgtagtagtgagtcccgtggttgagaaagggcagtaagactaaggtgtattgttcaaataaaatattgagacataatatactggtggctataggagtagtgctcaaactatattgtctgtaaaaaaaatctttttcatttattcagatccaagaagttctgtaccatatagccttatgaaaatatttctatggaaccaaatgaaggcaaagatattaaataatattataatcatgtctagactattgcgatctttttcccgtatctcttttcgatcaaactcctcctcatcatcttcttcaagaaactccaatttattaaatgatcaagataaccagacccaagaggtcgcccccaaacacaatctcttcgatgaggaagtcttattcgaagatatcaatcaaaacatggatgactgaaacattccagaaatccctcaggatcaactatacgttcctgaaacaattaaggacaaacacaactttgattacataatcaaaacagtagaaaacaatattcctctaggacaagatataggggaagaatttcatttactttcaaaaaattcaatttatgaacatagccgtaagtataaatatctacacatcggttgtgtacaagtagccatcaagcccttaattgacatgggcatagatgcagcagttttaatgtgtctaagagatattaggcataataaatttgaagactccctaattggaacagtcgaaaccagccttggacaaggtccaatatattttaattgttatccaaacaaaacagtgagtctgatggacagaaacattcttgactctctgttcttaaacatccactttcatggccttgacatgaaagaaggatcaatcccagcagccttaatttataggatccagtacaaggtcatgaatacttgtgcatctagagtcctgttaaaacctcaaaaaggagaaacaactttgtttatcactgatatgacaaaggctaacgtttctttcccgagaaaaataaaatgggatgaa

SEQ ID NO: 11930 - DNA, 1232 bp, Glycine max
  Gm_smallRNAprecursor_4763
caattgtggaaaacaaggccacattagcaaatattgtagactaaaaaagaagttaagaaaccttaacctagaacccgcaattgaagagcaaataaacaatttgcttatagaaacctcagaggaagaaacatgatgaccaactatcatcaacaaatgatgatgatgggcaaatcaatactctaacgagagaacaagatctcttgtttgaagcaatcaattccatacctgaccccaggaaaagaaggtttttctggaaaaactcaagaaaacattagaggtaaaacctagacaaaaaagatttgcttaacagattaaattctgcaaagatattttcaaaatttgatatgaaatctggattttggcaaatccaaatccaagaatcagataggtacaaaacagcgtttactattcctttcgggcaatatgaatggaatgtgatgccattcggactaaagaataccccttcagaatttcaaaaaattgtgaatgatatttttaatccctattcaaaatttgtcattgtctacatagatgatgttttaatcttttcccaaaacattgaccaacatttcaaacatctccagaccttcatccatatcagcaaacagaatggtttggtagtctccaaatcaaaaatcaatcttttccaaactcgaattcgattccttggtcacaatatatatcaaggtacaatcattccaataaaaaggtcaatagagtttgctagcaaatttcccaaccaaatcttagacaaaacccagttacaaagatttctaggttgtcgaaattacgtaggagaatttgtctcctatttaaacaatattgtcaagccattgcatgataggctggagaaaaatccgcctccttggtctgacctccatacacaaacagttaaagaaatcaaagtcaaagtccaatccataaaatgtctgtatcttcctattccacaggcatttaaaattgtcgaaactgatgcttcagacatagagtccatggccaagatcatgtcattgcatatacatcaaaacattggaatcctgcacaattaaaatattcaactgttaaaaaggaagttttagcaattgttttgtgcatttccaaattttaatcggatttattaaaccaaaattttttaatcagggttgattgtaaatcagccaaagatattttactaaaagatgttaaaaaccttgcctcaaaacaaatttttgcaagatggcaagcaattctaa

SEQ ID NO: 11931 - DNA, 1115 bp, Glycine max
  Gm_smallRNAprecursor_4764
aggtacaatcattccaataaaaaggtcaatagagtttgctagcaaatttcccaaccaaatcttagacaaaacccagttacaaagatttctaggttgtcgaaattacgtaggagaatttgtctcctatttaaacaatattgtcaagccattgcatgataggctggagaaaaatccgcctccttggtctgacctccatacacaaacagttaaagaaatcaaagtcaaagtccaatccataaaatgtctgtatcttcctattccacaggcatttaaaattgtcgaaactgatgcttcagacatagagtccatggccaagatcatgtcattgcatatacatcaaaacattggaatcctgcacaattaaaatattcaactgttaaaaaggaagttttagcaattgttttgtgcatttccaaattttaatcggatttattaaaccaaaattttttaatcagggttgattgtaaatcagccaaagatattttactaaaagatgttaaaaaccttgcctcaaaacaaatttttgcaagatggcaagcaattctaagtgtctttgattttgacataaaatacatcaagggcacctcaaattcattacctgactaccttacccgtgaattcttacagaaaagtggtaatgcttcctaaggcatcgggaatctccctaaggggaggaagaagtacaggcaaaggagccagactggctcttccagagccaaccattaagaaatcatcaacctcttctgggtcaccaacccaggctgggtcaccaacccaggctgggtcatctacccagaaaaccaatttagaaggatcatcaacccagattgcctcaatcaaacctgagccatccactcaggaatctcccaaaccggcaaccaccaaacaaacatcggccgactatgcatagccaattgaaacccttcaggcccttcaagacatgggtctaaccaaatttccaaaaataatcaaaaaatcttgggcagacattgcctcaaaatctgatgatgaatctgaatcaaatttacaaacaatgatcccaaatgcatcaatgaccaaaacggctaccaatcctaaagggaaactacctttagccaaagctcaaacaccaccta

SEQ ID NO: 11932 - DNA, 1248 bp, Glycine max
  Gm_smallRNAprecursor_4765
cccttcaagacatgggtctaaccaaatttccaaaaataatcaaaaaatcttgggcagacattgcctcaaaatctgatgatgaatctgaatcaaatttacaaacaatgatcccaaatgcatcaatgaccaaaacggctaccaatcctaaagggaaactacctttagccaaagctcaaacaccacctaccaaacaaactaacaattatatttataaaaataaatttacaactgttttgcagatggaacctgaattttgggacaaaaatcccttcaaggcgacggccaaggctttcccaccaggatttcactacaaaccaaccaccatcctgaagacaagaactttttatgaattgattttggtagattctaactcagtatctatcaaacatttcaaagacccaaaagaccaaacattaaacacccactcgacaatccaaatactaaaagttcttcaaccaagacactttgattcggacttgaacaaaggaaagagattttcagttccatttgatccggtaggttatacctattgggattatgttgatgcttggactaaggtgttttggcaccaaaatacccgcttcaagcattcatggctgatatatttcaagaccaatacaatttacaattttcccaattggcttttgcaatgatgggacttctttggaccaatcccagtgatattcccagaaacagtccaacaaggatttgctcaatttgagagacaatacaattcgcaggaatcacgaattccaacagatcttaaatacttttcaagctttgcactgtcatggaccttctcatggcaatatcgttacagcaagacagaaaagacaagccaatatccatgactacaaagatatgcatttgtaaaatggtggacacaatttgactcatccaaagcggatccagaacaagtaaaaatctggttccaatcccatccagaattcctcaaagcagctgatccagaaacttctgtgtttttgaaccaaaagtctcatctggtagcatttttagcaggatcgaaatcaaaggaggtcttagctaaaaatctaaaggaagttctgcaaatgttatagcaggaagaagaaggttcatcctcaaagaagaaagaaacaagttctgctgaagaagaagaagaagaccccttttaccaaaacgaagatgattgttttggtatctgtttagattaaatttaatttcggtcacagaaccgtctgtttgtaattaatgtgtaattaatgctgg

SEQ ID NO: 11933 - DNA, 1045 bp, Glycine max
  Gm_smallRNAprecursor_4766
tccaaaaataatcaaaaaatcttgggcagacattgcctcaaaatctgatgatgaatctgaatcaaatttacaaacaatgatcccaaatgcatcaatgaccaaaacggctaccaatcctaaagggaaactacctttagccaaagctcaaacaccacctaccaaacaaactaacaattatatttataaaaataaatttacaactgttttgcagatggaacctgaattttgggacaaaaatcccttcaaggcgacggccaaggctttcccaccaggatttcactacaaaccaaccaccatcctgaagacaagaactttttatgaattgattttggtagattctaactcagtatctatcaaacatttcaaagacccaaaagaccaaacattaaacacccactcgacaatccaaatactaaaagttcttcaaccaagacactttgattcggacttgaacaaaggaaagagattttcagttccatttgatccggtaggttatacctattgggattatgttgatgcttggactaaggtgttttggcaccaaaatacccgcttcaagcattcatggctgatatatttcaagaccaatacaatttacaattttcccaattggcttttgcaatgatgggacttctttggaccaatcccagtgatattcccagaaacagtccaacaaggatttgctcaatttgagagacaatacaattcgcaggaatcacgaattccaacagatcttaaatacttttcaagctttgcactgtcatggaccttctcatggcaatatcgttacagcaagacagaaaagacaagccaatatccatgactacaaagatatgcatttgtaaaatggtggacacaatttgactcatccaaagcggatccagaacaagtaaaaatctggttccaatcccatccagaattcctcaaagcagctgatccagaaacttctgtgtttttgaaccaaaagtctcatctggtagcatttttagcaggatcgaaatcaaaggaggtcttagctaaaaatctaaaggaagttctgcaaatg

SEQ ID NO: 11934 - DNA, 1163 bp, Glycine max
  Gm_smallRNAprecursor_4767
aaaaataatcaaaaaatcttgggcagacattgcctcaaaatctgatgatgaatctgaatcaaatttacaaacaatgatcccaaatgcatcaatgaccaaaacggctaccaatcctaaagggaaactacctttagccaaagctcaaacaccacctaccaaacaaactaacaattatatttataaaaataaatttacaactgttttgcagatggaacctgaattttgggacaaaaatcccttcaaggcgacggccaaggctttcccaccaggatttcactacaaaccaaccaccatcctgaagacaagaactttttatgaattgattttggtagattctaactcagtatctatcaaacatttcaaagacccaaaagaccaaacattaaacacccactcgacaatccaaatactaaaagttcttcaaccaagacactttgattcggacttgaacaaaggaaagagattttcagttccatttgatccggtaggttatacctattgggattatgttgatgcttggactaaggtgttttggcaccaaaatacccgcttcaagcattcatggctgatatatttcaagaccaatacaatttacaattttcccaattggcttttgcaatgatgggacttctttggaccaatcccagtgatattcccagaaacagtccaacaaggatttgctcaatttgagagacaatacaattcgcaggaatcacgaattccaacagatcttaaatacttttcaagctttgcactgtcatggaccttctcatggcaatatcgttacagcaagacagaaaagacaagccaatatccatgactacaaagatatgcatttgtaaaatggtggacacaatttgactcatccaaagcggatccagaacaagtaaaaatctggttccaatcccatccagaattcctcaaagcagctgatccagaaacttctgtgtttttgaaccaaaagtctcatctggtagcatttttagcaggatcgaaatcaaaggaggtcttagctaaaaatctaaaggaagttctgcaaatgttatagcaggaagaagaaggttcatcctcaaagaagaaagaaacaagttctgctgaagaagaagaagaagaccccttttaccaaaacgaagatgattgttttggtatctgtttagattaaa

SEQ ID NO: 11935 - DNA, 1058 bp, Glycine max
  Gm_smallRNAprecursor_4768
aaactaacaattatatttataaaaataaatttacaactgttttgcagatggaacctgaattttgggacaaaaatcccttcaaggcgacggccaaggctttcccaccaggatttcactacaaaccaaccaccatcctgaagacaagaactttttatgaattgattttggtagattctaactcagtatctatcaaacatttcaaagacccaaaagaccaaacattaaacacccactcgacaatccaaatactaaaagttcttcaaccaagacactttgattcggacttgaacaaaggaaagagattttcagttccatttgatccggtaggttatacctattgggattatgttgatgcttggactaaggtgttttggcaccaaaatacccgcttcaagcattcatggctgatatatttcaagaccaatacaatttacaattttcccaattggcttttgcaatgatgggacttctttggaccaatcccagtgatattcccagaaacagtccaacaaggatttgctcaatttgagagacaatacaattcgcaggaatcacgaattccaacagatcttaaatacttttcaagctttgcactgtcatggaccttctcatggcaatatcgttacagcaagacagaaaagacaagccaatatccatgactacaaagatatgcatttgtaaaatggtggacacaatttgactcatccaaagcggatccagaacaagtaaaaatctggttccaatcccatccagaattcctcaaagcagctgatccagaaacttctgtgtttttgaaccaaaagtctcatctggtagcatttttagcaggatcgaaatcaaaggaggtcttagctaaaaatctaaaggaagttctgcaaatgttatagcaggaagaagaaggttcatcctcaaagaagaaagaaacaagttctgctgaagaagaagaagaagaccccttttaccaaaacgaagatgattgttttggtatctgtttagattaaatttaatttcggtcacagaaccgtctgtttgtaattaatgtgtaattaatgctggac

SEQ ID NO: 11936 - DNA, 1060 bp, Glycine max
  Gm_smallRNAprecursor_4769
aattatatttataaaaataaatttacaactgttttgcagatggaacctgaattttgggacaaaaatcccttcaaggcgacggccaaggctttcccaccaggatttcactacaaaccaaccaccatcctgaagacaagaactttttatgaattgattttggtagattctaactcagtatctatcaaacatttcaaagacccaaaagaccaaacattaaacacccactcgacaatccaaatactaaaagttcttcaaccaagacactttgattcggacttgaacaaaggaaagagattttcagttccatttgatccggtaggttatacctattgggattatgttgatgcttggactaaggtgttttggcaccaaaatacccgcttcaagcattcatggctgatatatttcaagaccaatacaatttacaattttcccaattggcttttgcaatgatgggacttctttggaccaatcccagtgatattcccagaaacagtccaacaaggatttgctcaatttgagagacaatacaattcgcaggaatcacgaattccaacagatcttaaatacttttcaagctttgcactgtcatggaccttctcatggcaatatcgttacagcaagacagaaaagacaagccaatatccatgactacaaagatatgcatttgtaaaatggtggacacaatttgactcatccaaagcggatccagaacaagtaaaaatctggttccaatcccatccagaattcctcaaagcagctgatccagaaacttctgtgtttttgaaccaaaagtctcatctggtagcatttttagcaggatcgaaatcaaaggaggtcttagctaaaaatctaaaggaagttctgcaaatgttatagcaggaagaagaaggttcatcctcaaagaagaaagaaacaagttctgctgaagaagaagaagaagaccccttttaccaaaacgaagatgattgttttggtatctgtttagattaaatttaatttcggtcacagaaccgtctgtttgtaattaatgtgtaattaatgctggacaatactacct

SEQ ID NO: 11937 - DNA, 1184 bp, Glycine max
  Gm_smallRNAprecursor_4770
acctgaattttgggacaaaaatcccttcaaggcgacggccaaggctttcccaccaggatttcactacaaaccaaccaccatcctgaagacaagaactttttatgaattgattttggtagattctaactcagtatctatcaaacatttcaaagacccaaaagaccaaacattaaacacccactcgacaatccaaatactaaaagttcttcaaccaagacactttgattcggacttgaacaaaggaaagagattttcagttccatttgatccggtaggttatacctattgggattatgttgatgcttggactaaggtgttttggcaccaaaatacccgcttcaagcattcatggctgatatatttcaagaccaatacaatttacaattttcccaattggcttttgcaatgatgggacttctttggaccaatcccagtgatattcccagaaacagtccaacaaggatttgctcaatttgagagacaatacaattcgcaggaatcacgaattccaacagatcttaaatacttttcaagctttgcactgtcatggaccttctcatggcaatatcgttacagcaagacagaaaagacaagccaatatccatgactacaaagatatgcatttgtaaaatggtggacacaatttgactcatccaaagcggatccagaacaagtaaaaatctggttccaatcccatccagaattcctcaaagcagctgatccagaaacttctgtgtttttgaaccaaaagtctcatctggtagcatttttagcaggatcgaaatcaaaggaggtcttagctaaaaatctaaaggaagttctgcaaatgttatagcaggaagaagaaggttcatcctcaaagaagaaagaaacaagttctgctgaagaagaagaagaagaccccttttaccaaaacgaagatgattgttttggtatctgtttagattaaatttaatttcggtcacagaaccgtctgtttgtaattaatgtgtaattaatgctggacaatactacctgtcctgtagccattaaagtcctggtcaaaactacttgtcttgtaacaaacagtcaaatagtctcggtcaaaactaccggcaactaccggtcttagatttttggctatataaggagtcctcaagtatgctgtgagacaccctttcatttggccatttttcaggtttctg

SEQ ID NO: 11938 - DNA, 1189 bp, Glycine max
  Gm_smallRNAprecursor_4771
gacaatccaaatactaaaagttcttcaaccaagacactttgattcggacttgaacaaaggaaagagattttcagttccatttgatccggtaggttatacctattgggattatgttgatgcttggactaaggtgttttggcaccaaaatacccgcttcaagcattcatggctgatatatttcaagaccaatacaatttacaattttcccaattggcttttgcaatgatgggacttctttggaccaatcccagtgatattcccagaaacagtccaacaaggatttgctcaatttgagagacaatacaattcgcaggaatcacgaattccaacagatcttaaatacttttcaagctttgcactgtcatggaccttctcatggcaatatcgttacagcaagacagaaaagacaagccaatatccatgactacaaagatatgcatttgtaaaatggtggacacaatttgactcatccaaagcggatccagaacaagtaaaaatctggttccaatcccatccagaattcctcaaagcagctgatccagaaacttctgtgtttttgaaccaaaagtctcatctggtagcatttttagcaggatcgaaatcaaaggaggtcttagctaaaaatctaaaggaagttctgcaaatgttatagcaggaagaagaaggttcatcctcaaagaagaaagaaacaagttctgctgaagaagaagaagaagaccccttttaccaaaacgaagatgattgttttggtatctgtttagattaaatttaatttcggtcacagaaccgtctgtttgtaattaatgtgtaattaatgctggacaatactacctgtcctgtagccattaaagtcctggtcaaaactacttgtcttgtaacaaacagtcaaatagtctcggtcaaaactaccggcaactaccggtcttagatttttggctatataaggagtcctcaagtatgctgtgagacaccctttcatttggccatttttcaggtttctgaagagaggtgctctgaaacaagatttttgtaagtgtagatgcaattggctttgatgttttgatgatgatcataatgatgtgttgcaattgatgcaaatgggcttttcaagattaaaattcaagacaatacttcaagattacaagtcacaacatcaagatgatcactagaatattaggaagggaattcc

SEQ ID NO: 11939 - DNA, 1168 bp, Glycine max
  Gm_smallRNAprecursor_4772
accaatacaatttacaattttcccaattggcttttgcaatgatgggacttctttggaccaatcccagtgatattcccagaaacagtccaacaaggatttgctcaatttgagagacaatacaattcgcaggaatcacgaattccaacagatcttaaatacttttcaagctttgcactgtcatggaccttctcatggcaatatcgttacagcaagacagaaaagacaagccaatatccatgactacaaagatatgcatttgtaaaatggtggacacaatttgactcatccaaagcggatccagaacaagtaaaaatctggttccaatcccatccagaattcctcaaagcagctgatccagaaacttctgtgtttttgaaccaaaagtctcatctggtagcatttttagcaggatcgaaatcaaaggaggtcttagctaaaaatctaaaggaagttctgcaaatgttatagcaggaagaagaaggttcatcctcaaagaagaaagaaacaagttctgctgaagaagaagaagaagaccccttttaccaaaacgaagatgattgttttggtatctgtttagattaaatttaatttcggtcacagaaccgtctgtttgtaattaatgtgtaattaatgctggacaatactacctgtcctgtagccattaaagtcctggtcaaaactacttgtcttgtaacaaacagtcaaatagtctcggtcaaaactaccggcaactaccggtcttagatttttggctatataaggagtcctcaagtatgctgtgagacaccctttcatttggccatttttcaggtttctgaagagaggtgctctgaaacaagatttttgtaagtgtagatgcaattggctttgatgttttgatgatgatcataatgatgtgttgcaattgatgcaaatgggcttttcaagattaaaattcaagacaatacttcaagattacaagtcacaacatcaagatgatcactagaatattaggaagggaattcctaattgaattagcaaaggtttggccaagtgatttaaaataaaaagtgtttctcaaaggttttactctctggtaatcgattaccagaggatgtaatcgattaccagtggccaaatacgttttataacagctataaaaatttgaattcaaaattttaaaagctgt

SEQ ID NO: 11940 - DNA, 1213 bp, Glycine max
  Gm_smallRNAprecursor_4773
caatacaatttacaattttcccaattggcttttgcaatgatgggacttctttggaccaatcccagtgatattcccagaaacagtccaacaaggatttgctcaatttgagagacaatacaattcgcaggaatcacgaattccaacagatcttaaatacttttcaagctttgcactgtcatggaccttctcatggcaatatcgttacagcaagacagaaaagacaagccaatatccatgactacaaagatatgcatttgtaaaatggtggacacaatttgactcatccaaagcggatccagaacaagtaaaaatctggttccaatcccatccagaattcctcaaagcagctgatccagaaacttctgtgtttttgaaccaaaagtctcatctggtagcatttttagcaggatcgaaatcaaaggaggtcttagctaaaaatctaaaggaagttctgcaaatgttatagcaggaagaagaaggttcatcctcaaagaagaaagaaacaagttctgctgaagaagaagaagaagaccccttttaccaaaacgaagatgattgttttggtatctgtttagattaaatttaatttcggtcacagaaccgtctgtttgtaattaatgtgtaattaatgctggacaatactacctgtcctgtagccattaaagtcctggtcaaaactacttgtcttgtaacaaacagtcaaatagtctcggtcaaaactaccggcaactaccggtcttagatttttggctatataaggagtcctcaagtatgctgtgagacaccctttcatttggccatttttcaggtttctgaagagaggtgctctgaaacaagatttttgtaagtgtagatgcaattggctttgatgttttgatgatgatcataatgatgtgttgcaattgatgcaaatgggcttttcaagattaaaattcaagacaatacttcaagattacaagtcacaacatcaagatgatcactagaatattaggaagggaattcctaattgaattagcaaaggtttggccaagtgatttaaaataaaaagtgtttctcaaaggttttactctctggtaatcgattaccagaggatgtaatcgattaccagtggccaaatacgttttataacagctataaaaatttgaattcaaaattttaaaagctgtaatcgattacacaattttggtaatcgattaccagcagttagtaaacg

SEQ ID NO: 11941 - DNA, 1040 bp, Glycine max
  Gm_smallRNAprecursor_4774
attcgcaggaatcacgaattccaacagatcttaaatacttttcaagctttgcactgtcatggaccttctcatggcaatatcgttacagcaagacagaaaagacaagccaatatccatgactacaaagatatgcatttgtaaaatggtggacacaatttgactcatccaaagcggatccagaacaagtaaaaatctggttccaatcccatccagaattcctcaaagcagctgatccagaaacttctgtgtttttgaaccaaaagtctcatctggtagcatttttagcaggatcgaaatcaaaggaggtcttagctaaaaatctaaaggaagttctgcaaatgttatagcaggaagaagaaggttcatcctcaaagaagaaagaaacaagttctgctgaagaagaagaagaagaccccttttaccaaaacgaagatgattgttttggtatctgtttagattaaatttaatttcggtcacagaaccgtctgtttgtaattaatgtgtaattaatgctggacaatactacctgtcctgtagccattaaagtcctggtcaaaactacttgtcttgtaacaaacagtcaaatagtctcggtcaaaactaccggcaactaccggtcttagatttttggctatataaggagtcctcaagtatgctgtgagacaccctttcatttggccatttttcaggtttctgaagagaggtgctctgaaacaagatttttgtaagtgtagatgcaattggctttgatgttttgatgatgatcataatgatgtgttgcaattgatgcaaatgggcttttcaagattaaaattcaagacaatacttcaagattacaagtcacaacatcaagatgatcactagaatattaggaagggaattcctaattgaattagcaaaggtttggccaagtgatttaaaataaaaagtgtttctcaaaggttttactctctggtaatcgattaccagaggatgtaatcgattaccagtggccaaatacgttttataacagctataaaaatttgaattcaaaattttaa

SEQ ID NO: 11942 - DNA, 1079 bp, Glycine max
  Gm_smallRNAprecursor_4775
taaggaaattcctagaaccttctcttcttctggaagtttctccataatttttctttcctccattttctttgttttgggactaaaatttaaactttgactggaaggcattttcatttgtatattttttatgcctatacagtctttgctcatatgcttcaagagagcccaccagttctgtctctgatagagtggacagatctttggtttcctcaatcgttgtcacgattgggtcaaacttttggggcatagtaattagaattttctcaacaattttcttgtcaagaatatcttccccaaaagttctcatttgattaactatttctttaactttagaatagtaatctttaactgtctcagactccttcatcttcaatagttcaaaatctcttcttagagattgaagtttaacggcacgtaccttaacacttccttgaaagtcctcctgcaatgtgttccacgcttctttggcagtcttagttcccataattcttgggaaaattggatcagtcaccgcttgttgcaaggtgaacaacgcctttgaatttttctgtttatttttcttcaactcttttacttgagatgcattaagagctgaagtatccgcggaaatggtgaaaccttcttctattatgtcccataaatcttgagatgaaaaatatgtttccattttaacacgccagaaatcataattttcaccattgaagatagggacaaaaatagttgacgattgagtagtgttatccatagcttagaaaaaatattattagagtgggttaatagtacaaaggaaatttttgaagtagttgggaaaattttggaatggtaggtaggtaatataactacgcccaatgtatgaccgaacgtagctctgatgccactgttggtagttgattagatgatagttgatagttgatagttttagagaattgttttagaaagaaggctatgtcattgatttcttggattatcaattacaacataccaattgcctatttataggctcaagtcaccaacctctcaatggtggtgaatgtttctacattactttaggtttttctagattttcatgatagattagt

SEQ ID NO: 11943 - DNA, 1061 bp, Glycine max
  Gm_smallRNAprecursor_4776
ttaagttgagagctagtgttgagagacttgatatattgtggtacatggaagatactactcatcatcagaggacctatcgccatgactcatatattatgtttcttgttatggttgatgttgggttaaatgggccaagtgggagaatgttggaagcgcccacgttcacgttacgcgcccacgttcacattccaagtaattcagagtgagtaagggtttggaagaacaaaactgtctttcaggttcgtgtgtgtgccgcttcgcgttcaatttgcaatggctggaggtacgctcgtaattttttttaatttttgctgcttgatctgaatatgtcatttaattgatttgtatgtttaaatcagtatatatatatataccgggactatttgacagtttgttacaagacaagtagttttgaccgggactttaatggctacaggacaggtagtattgtccatcattaattacaaacagacggttttgtgaccgaaattaaatttaatctaaacagataccaaaacaatcatcttcgttttggttaaagggatcttcttcttcttcttcagcagaacttgtttcttccttctttgaggatgaagcttcttcttcctgctgtaacatttgcagaacttccttcagatttttagctaagacctcctttgatgtcgatcctgctaaaaatgctaccagatgagacttttggttcaaaaacacagaggtctctggatcagctgccttgagaatatatatatatatatatatatatatatatatatatatatatatataatactaaaaatctaaaatagtatcaatgcgacaatttgccaattgaaaatcaatcgcatgtgattaccttgaaatgtgtgacaatagtgtgtgcctaacctgtaatgactcagtctcaccttgttgggatttattttaaaaagttatttttatcataaaaagttacgcgtcatattccttatgatttgtttggtcacaataagaaaatgcgtgaaaaaatagaaaagaacagaaagacagaataaaataattttatatgtatttggttgaaaaca

SEQ ID NO: 11944 - DNA, 1063 bp, Glycine max
  Gm_smallRNAprecursor_4777
ttaagttgagagctagtgttgagagacttgatatattgtggtacatggaagatactactcatcatcagaggacctatcgccatgactcatatattatgtttcttgttatggttgatgttgggttaaatgggccaagtgggagaatgttggaagcgcccacgttcacgttacgcgcccacgttcacattccaagtaattcagagtgagtaagggtttggaagaacaaaactgtctttcaggttcgtgtgtgtgccgcttcgcgttcaatttgcaatggctggaggtacgctcgtaattttttttaatttttgctgcttgatctgaatatgtcatttaattgatttgtatgtttaaatcagtatatatatatataccgggactatttgacagtttgttacaagacaagtagttttgaccgggactttaatggctacaggacaggtagtattgtccatcattaattacaaacagacggttttgtgaccgaaattaaatttaatctaaacagataccaaaacaatcatcttcgttttggttaaagggatcttcttcttcttcttcagcagaacttgtttcttccttctttgaggatgaagcttcttcttcctgctgtaacatttgcagaacttccttcagatttttagctaagacctcctttgatgtcgatcctgctaaaaatgctaccagatgagacttttggttcaaaaacacagaggtctctggatcagctgccttgagaatatatatatatatatatatatatatatatatatatatatatatataatactaaaaatctaaaatagtatcaatgcgacaatttgccaattgaaaatcaatcgcatgtgattaccttgaaatgtgtgacaatagtgtgtgcctaacctgtaatgactcagtctcaccttgttgggatttattttaaaaagttatttttatcataaaaagttacgcgtcatattccttatgatttgtttggtcacaataagaaaatgcgtgaaaaaatagaaaagaacagaaagacagaataaaataattttatatgtatttggttgaaaacaaa

SEQ ID NO: 11945 - DNA, 1063 bp, Glycine max; identical to SEQ ID NO: 11944
  Gm_smallRNAprecursor_4778

SEQ ID NO: 11946 - DNA, 1064 bp, Glycine max
  Gm_smallRNAprecursor_4779
ttaagttgagagctagtgttgagagacttgatatattgtggtacatggaagatactactcatcatcagaggacctatcgccatgactcatatattatgtttcttgttatggttgatgttgggttaaatgggccaagtgggagaatgttggaagcgcccacgttcacgttacgcgcccacgttcacattccaagtaattcagagtgagtaagggtttggaagaacaaaactgtctttcaggttcgtgtgtgtgccgcttcgcgttcaatttgcaatggctggaggtacgctcgtaattttttttaatttttgctgcttgatctgaatatgtcatttaattgatttgtatgtttaaatcagtatatatatatataccgggactatttgacagtttgttacaagacaagtagttttgaccgggactttaatggctacaggacaggtagtattgtccatcattaattacaaacagacggttttgtgaccgaaattaaatttaatctaaacagataccaaaacaatcatcttcgttttggttaaagggatcttcttcttcttcttcagcagaacttgtttcttccttctttgaggatgaagcttcttcttcctgctgtaacatttgcagaacttccttcagatttttagctaagacctcctttgatgtcgatcctgctaaaaatgctaccagatgagacttttggttcaaaaacacagaggtctctggatcagctgccttgagaatatatatatatatatatatatatatatatatatatatatatatataatactaaaaatctaaaatagtatcaatgcgacaatttgccaattgaaaatcaatcgcatgtgattaccttgaaatgtgtgacaatagtgtgtgcctaacctgtaatgactcagtctcaccttgttgggatttattttaaaaagttatttttatcataaaaagttacgcgtcatattccttatgatttgtttggtcacaataagaaaatgcgtgaaaaaatagaaaagaacagaaagacagaataaaataattttatatgtatttggttgaaaacaaaa

SEQ ID NO: 11947 - DNA, 1057 bp, Glycine max
  Gm_smallRNAprecursor_4780
agttgagagctagtgttgagagacttgatatattgtggtacatggaagatactactcatcatcagaggacctatcgccatgactcatatattatgtttcttgttatggttgatgttgggttaaatgggccaagtgggagaatgttggaagcgcccacgttcacgttacgcgcccacgttcacattccaagtaattcagagtgagtaagggtttggaagaacaaaactgtctttcaggttcgtgtgtgtgccgcttcgcgttcaatttgcaatggctggaggtacgctcgtaattttttttaatttttgctgcttgatctgaatatgtcatttaattgatttgtatgtttaaatcagtatatatatatataccgggactatttgacagtttgttacaagacaagtagttttgaccgggactttaatggctacaggacaggtagtattgtccatcattaattacaaacagacggttttgtgaccgaaattaaatttaatctaaacagataccaaaacaatcatcttcgttttggttaaagggatcttcttcttcttcttcagcagaacttgtttcttccttctttgaggatgaagcttcttcttcctgctgtaacatttgcagaacttccttcagatttttagctaagacctcctttgatgtcgatcctgctaaaaatgctaccagatgagacttttggttcaaaaacacagaggtctctggatcagctgccttgagaatatatatatatatatatatatatatatatatatatatatatatataatactaaaaatctaaaatagtatcaatgcgacaatttgccaattgaaaatcaatcgcatgtgattaccttgaaatgtgtgacaatagtgtgtgcctaacctgtaatgactcagtctcaccttgttgggatttattttaaaaagttatttttatcataaaaagttacgcgtcatattccttatgatttgtttggtcacaataagaaaatgcgtgaaaaaatagaaaagaacagaaagacagaataaaataattttatatgtatttggttgaaaac

SEQ ID NO: 11948 - DNA, 1058 bp, Glycine max
  Gm_smallRNAprecursor_4781
agttgagagctagtgttgagagacttgatatattgtggtacatggaagatactactcatcatcagaggacctatcgccatgactcatatattatgtttcttgttatggttgatgttgggttaaatgggccaagtgggagaatgttggaagcgcccacgttcacgttacgcgcccacgttcacattccaagtaattcagagtgagtaagggtttggaagaacaaaactgtctttcaggttcgtgtgtgtgccgcttcgcgttcaatttgcaatggctggaggtacgctcgtaattttttttaatttttgctgcttgatctgaatatgtcatttaattgatttgtatgtttaaatcagtatatatatatataccgggactatttgacagtttgttacaagacaagtagttttgaccgggactttaatggctacaggacaggtagtattgtccatcattaattacaaacagacggttttgtgaccgaaattaaatttaatctaaacagataccaaaacaatcatcttcgttttggttaaagggatcttcttcttcttcttcagcagaacttgtttcttccttctttgaggatgaagcttcttcttcctgctgtaacatttgcagaacttccttcagatttttagctaagacctcctttgatgtcgatcctgctaaaaatgctaccagatgagacttttggttcaaaaacacagaggtctctggatcagctgccttgagaatatatatatatatatatatatatatatatatatatatatatatataatactaaaaatctaaaatagtatcaatgcgacaatttgccaattgaaaatcaatcgcatgtgattaccttgaaatgtgtgacaatagtgtgtgcctaacctgtaatgactcagtctcaccttgttgggatttattttaaaaagttatttttatcataaaaagttacgcgtcatattccttatgatttgtttggtcacaataagaaaatgcgtgaaaaaatagaaaagaacagaaagacagaataaaataattttatatgtatttggttgaaaaca

SEQ ID NO: 11949 - DNA, 1083 bp, Glycine max
  Gm_smallRNAprecursor_4782
agttgagagctagtgttgagagacttgatatattgtggtacatggaagatactactcatcatcagaggacctatcgccatgactcatatattatgtttcttgttatggttgatgttgggttaaatgggccaagtgggagaatgttggaagcgcccacgttcacgttacgcgcccacgttcacattccaagtaattcagagtgagtaagggtttggaagaacaaaactgtctttcaggttcgtgtgtgtgccgcttcgcgttcaatttgcaatggctggaggtacgctcgtaattttttttaatttttgctgcttgatctgaatatgtcatttaattgatttgtatgtttaaatcagtatatatatatataccgggactatttgacagtttgttacaagacaagtagttttgaccgggactttaatggctacaggacaggtagtattgtccatcattaattacaaacagacggttttgtgaccgaaattaaatttaatctaaacagataccaaaacaatcatcttcgttttggttaaagggatcttcttcttcttcttcagcagaacttgtttcttccttctttgaggatgaagcttcttcttcctgctgtaacatttgcagaacttccttcagatttttagctaagacctcctttgatgtcgatcctgctaaaaatgctaccagatgagacttttggttcaaaaacacagaggtctctggatcagctgccttgagaatatatatatatatatatatatatatatatatatatatatatatataatactaaaaatctaaaatagtatcaatgcgacaatttgccaattgaaaatcaatcgcatgtgattaccttgaaatgtgtgacaatagtgtgtgcctaacctgtaatgactcagtctcaccttgttgggatttattttaaaaagttatttttatcataaaaagttacgcgtcatattccttatgatttgtttggtcacaataagaaaatgcgtgaaaaaatagaaaagaacagaaagacagaataaaataattttatatgtatttggttgaaaacaaaaaataaagaaatctcaataattt

SEQ ID NO: 11950 - DNA, 1056 bp, Glycine max
  Gm_smallRNAprecursor_4783
gttgagagctagtgttgagagacttgatatattgtggtacatggaagatactactcatcatcagaggacctatcgccatgactcatatattatgtttcttgttatggttgatgttgggttaaatgggccaagtgggagaatgttggaagcgcccacgttcacgttacgcgcccacgttcacattccaagtaattcagagtgagtaagggtttggaagaacaaaactgtctttcaggttcgtgtgtgtgccgcttcgcgttcaatttgcaatggctggaggtacgctcgtaattttttttaatttttgctgcttgatctgaatatgtcatttaattgatttgtatgtttaaatcagtatatatatatataccgggactatttgacagtttgttacaagacaagtagttttgaccgggactttaatggctacaggacaggtagtattgtccatcattaattacaaacagacggttttgtgaccgaaattaaatttaatctaaacagataccaaaacaatcatcttcgttttggttaaagggatcttcttcttcttcttcagcagaacttgtttcttccttctttgaggatgaagcttcttcttcctgctgtaacatttgcagaacttccttcagatttttagctaagacctcctttgatgtcgatcctgctaaaaatgctaccagatgagacttttggttcaaaaacacagaggtctctggatcagctgccttgagaatatatatatatatatatatatatatatatatatatatatatatataatactaaaaatctaaaatagtatcaatgcgacaatttgccaattgaaaatcaatcgcatgtgattaccttgaaatgtgtgacaatagtgtgtgcctaacctgtaatgactcagtctcaccttgttgggatttattttaaaaagttatttttatcataaaaagttacgcgtcatattccttatgatttgtttggtcacaataagaaaatgcgtgaaaaaatagaaaagaacagaaagacagaataaaataattttatatgtatttggttgaaaac

SEQ ID NO: 11951 - DNA, 1056 bp, Glycine max; identical to SEQ ID NO: 11950
  Gm_smallRNAprecursor_4784

SEQ ID NO: 11952 - DNA, 1057 bp, Glycine max
  Gm_smallRNAprecursor_4785
gttgagagctagtgttgagagacttgatatattgtggtacatggaagatactactcatcatcagaggacctatcgccatgactcatatattatgtttcttgttatggttgatgttgggttaaatgggccaagtgggagaatgttggaagcgcccacgttcacgttacgcgcccacgttcacattccaagtaattcagagtgagtaagggtttggaagaacaaaactgtctttcaggttcgtgtgtgtgccgcttcgcgttcaatttgcaatggctggaggtacgctcgtaattttttttaatttttgctgcttgatctgaatatgtcatttaattgatttgtatgtttaaatcagtatatatatatataccgggactatttgacagtttgttacaagacaagtagttttgaccgggactttaatggctacaggacaggtagtattgtccatcattaattacaaacagacggttttgtgaccgaaattaaatttaatctaaacagataccaaaacaatcatcttcgttttggttaaagggatcttcttcttcttcttcagcagaacttgtttcttccttctttgaggatgaagcttcttcttcctgctgtaacatttgcagaacttccttcagatttttagctaagacctcctttgatgtcgatcctgctaaaaatgctaccagatgagacttttggttcaaaaacacagaggtctctggatcagctgccttgagaatatatatatatatatatatatatatatatatatatatatatatataatactaaaaatctaaaatagtatcaatgcgacaatttgccaattgaaaatcaatcgcatgtgattaccttgaaatgtgtgacaatagtgtgtgcctaacctgtaatgactcagtctcaccttgttgggatttattttaaaaagttatttttatcataaaaagttacgcgtcatattccttatgatttgtttggtcacaataagaaaatgcgtgaaaaaatagaaaagaacagaaagacagaataaaataattttatatgtatttggttgaaaaca

SEQ ID NO: 11953 - DNA, 1059 bp, Glycine max
  Gm_smallRNAprecursor_4786
gttgagagctagtgttgagagacttgatatattgtggtacatggaagatactactcatcatcagaggacctatcgccatgactcatatattatgtttcttgttatggttgatgttgggttaaatgggccaagtgggagaatgttggaagcgcccacgttcacgttacgcgcccacgttcacattccaagtaattcagagtgagtaagggtttggaagaacaaaactgtctttcaggttcgtgtgtgtgccgcttcgcgttcaatttgcaatggctggaggtacgctcgtaattttttttaatttttgctgcttgatctgaatatgtcatttaattgatttgtatgtttaaatcagtatatatatatataccgggactatttgacagtttgttacaagacaagtagttttgaccgggactttaatggctacaggacaggtagtattgtccatcattaattacaaacagacggttttgtgaccgaaattaaatttaatctaaacagataccaaaacaatcatcttcgttttggttaaagggatcttcttcttcttcttcagcagaacttgtttcttccttctttgaggatgaagcttcttcttcctgctgtaacatttgcagaacttccttcagatttttagctaagacctcctttgatgtcgatcctgctaaaaatgctaccagatgagacttttggttcaaaaacacagaggtctctggatcagctgccttgagaatatatatatatatatatatatatatatatatatatatatatatataatactaaaaatctaaaatagtatcaatgcgacaatttgccaattgaaaatcaatcgcatgtgattaccttgaaatgtgtgacaatagtgtgtgcctaacctgtaatgactcagtctcaccttgttgggatttattttaaaaagttatttttatcataaaaagttacgcgtcatattccttatgatttgtttggtcacaataagaaaatgcgtgaaaaaatagaaaagaacagaaagacagaataaaataattttatatgtatttggttgaaaacaaa

SEQ ID NO: 11954 - DNA, 1059 bp, Glycine max; identical to SEQ ID NO: 11953
  Gm_smallRNAprecursor_4787

SEQ ID NO: 11955 - DNA, 1082 bp, Glycine max
  Gm_smallRNAprecursor_4788
gttgagagctagtgttgagagacttgatatattgtggtacatggaagatactactcatcatcagaggacctatcgccatgactcatatattatgtttcttgttatggttgatgttgggttaaatgggccaagtgggagaatgttggaagcgcccacgttcacgttacgcgcccacgttcacattccaagtaattcagagtgagtaagggtttggaagaacaaaactgtctttcaggttcgtgtgtgtgccgcttcgcgttcaatttgcaatggctggaggtacgctcgtaattttttttaatttttgctgcttgatctgaatatgtcatttaattgatttgtatgtttaaatcagtatatatatatataccgggactatttgacagtttgttacaagacaagtagttttgaccgggactttaatggctacaggacaggtagtattgtccatcattaattacaaacagacggttttgtgaccgaaattaaatttaatctaaacagataccaaaacaatcatcttcgttttggttaaagggatcttcttcttcttcttcagcagaacttgtttcttccttctttgaggatgaagcttcttcttcctgctgtaacatttgcagaacttccttcagatttttagctaagacctcctttgatgtcgatcctgctaaaaatgctaccagatgagacttttggttcaaaaacacagaggtctctggatcagctgccttgagaatatatatatatatatatatatatatatatatatatatatatatataatactaaaaatctaaaatagtatcaatgcgacaatttgccaattgaaaatcaatcgcatgtgattaccttgaaatgtgtgacaatagtgtgtgcctaacctgtaatgactcagtctcaccttgttgggatttattttaaaaagttatttttatcataaaaagttacgcgtcatattccttatgatttgtttggtcacaataagaaaatgcgtgaaaaaatagaaaagaacagaaagacagaataaaataattttatatgtatttggttgaaaacaaaaaataaagaaatctcaataattt

SEQ ID NO: 11956 - DNA, 1055 bp, Glycine max
  Gm_smallRNAprecursor_4789
ttgagagctagtgttgagagacttgatatattgtggtacatggaagatactactcatcatcagaggacctatcgccatgactcatatattatgtttcttgttatggttgatgttgggttaaatgggccaagtgggagaatgttggaagcgcccacgttcacgttacgcgcccacgttcacattccaagtaattcagagtgagtaagggtttggaagaacaaaactgtctttcaggttcgtgtgtgtgccgcttcgcgttcaatttgcaatggctggaggtacgctcgtaattttttttaatttttgctgcttgatctgaatatgtcatttaattgatttgtatgtttaaatcagtatatatatatataccgggactatttgacagtttgttacaagacaagtagttttgaccgggactttaatggctacaggacaggtagtattgtccatcattaattacaaacagacggttttgtgaccgaaattaaatttaatctaaacagataccaaaacaatcatcttcgttttggttaaagggatcttcttcttcttcttcagcagaacttgtttcttccttctttgaggatgaagcttcttcttcctgctgtaacatttgcagaacttccttcagatttttagctaagacctcctttgatgtcgatcctgctaaaaatgctaccagatgagacttttggttcaaaaacacagaggtctctggatcagctgccttgagaatatatatatatatatatatatatatatatatatatatatatatataatactaaaaatctaaaatagtatcaatgcgacaatttgccaattgaaaatcaatcgcatgtgattaccttgaaatgtgtgacaatagtgtgtgcctaacctgtaatgactcagtctcaccttgttgggatttattttaaaaagttatttttatcataaaaagttacgcgtcatattccttatgatttgtttggtcacaataagaaaatgcgtgaaaaaatagaaaagaacagaaagacagaataaaataattttatatgtatttggttgaaaac

SEQ ID NO: 11957 - DNA, 1058 bp, Glycine max
  Gm_smallRNAprecursor_4790
ttgagagctagtgttgagagacttgatatattgtggtacatggaagatactactcatcatcagaggacctatcgccatgactcatatattatgtttcttgttatggttgatgttgggttaaatgggccaagtgggagaatgttggaagcgcccacgttcacgttacgcgcccacgttcacattccaagtaattcagagtgagtaagggtttggaagaacaaaactgtctttcaggttcgtgtgtgtgccgcttcgcgttcaatttgcaatggctggaggtacgctcgtaattttttttaatttttgctgcttgatctgaatatgtcatttaattgatttgtatgtttaaatcagtatatatatatataccgggactatttgacagtttgttacaagacaagtagttttgaccgggactttaatggctacaggacaggtagtattgtccatcattaattacaaacagacggttttgtgaccgaaattaaatttaatctaaacagataccaaaacaatcatcttcgttttggttaaagggatcttcttcttcttcttcagcagaacttgtttcttccttctttgaggatgaagcttcttcttcctgctgtaacatttgcagaacttccttcagatttttagctaagacctcctttgatgtcgatcctgctaaaaatgctaccagatgagacttttggttcaaaaacacagaggtctctggatcagctgccttgagaatatatatatatatatatatatatatatatatatatatatatatataatactaaaaatctaaaatagtatcaatgcgacaatttgccaattgaaaatcaatcgcatgtgattaccttgaaatgtgtgacaatagtgtgtgcctaacctgtaatgactcagtctcaccttgttgggatttattttaaaaagttatttttatcataaaaagttacgcgtcatattccttatgatttgtttggtcacaataagaaaatgcgtgaaaaaatagaaaagaacagaaagacagaataaaataattttatatgtatttggttgaaaacaaa

SEQ ID NO: 11958 - DNA, 1058 bp, Glycine max; identical to SEQ ID NO: 11957
  Gm_smallRNAprecursor_4791

SEQ ID NO: 11959 - DNA, 1081 bp, Glycine max
  Gm_smallRNAprecursor_4792
ttgagagctagtgttgagagacttgatatattgtggtacatggaagatactactcatcatcagaggacctatcgccatgactcatatattatgtttcttgttatggttgatgttgggttaaatgggccaagtgggagaatgttggaagcgcccacgttcacgttacgcgcccacgttcacattccaagtaattcagagtgagtaagggtttggaagaacaaaactgtctttcaggttcgtgtgtgtgccgcttcgcgttcaatttgcaatggctggaggtacgctcgtaattttttttaatttttgctgcttgatctgaatatgtcatttaattgatttgtatgtttaaatcagtatatatatatataccgggactatttgacagtttgttacaagacaagtagttttgaccgggactttaatggctacaggacaggtagtattgtccatcattaattacaaacagacggttttgtgaccgaaattaaatttaatctaaacagataccaaaacaatcatcttcgttttggttaaagggatcttcttcttcttcttcagcagaacttgtttcttccttctttgaggatgaagcttcttcttcctgctgtaacatttgcagaacttccttcagatttttagctaagacctcctttgatgtcgatcctgctaaaaatgctaccagatgagacttttggttcaaaaacacagaggtctctggatcagctgccttgagaatatatatatatatatatatatatatatatatatatatatatatataatactaaaaatctaaaatagtatcaatgcgacaatttgccaattgaaaatcaatcgcatgtgattaccttgaaatgtgtgacaatagtgtgtgcctaacctgtaatgactcagtctcaccttgttgggatttattttaaaaagttatttttatcataaaaagttacgcgtcatattccttatgatttgtttggtcacaataagaaaatgcgtgaaaaaatagaaaagaacagaaagacagaataaaataattttatatgtatttggttgaaaacaaaaaataaagaaatctcaataattt

SEQ ID NO: 11960 - DNA, 1034 bp, Glycine max
  Gm_smallRNAprecursor_4793
accaatgtagccgtctttgcattttgtgggtcaacaaacatctttgtctttcgcctataccagaccatgtagtccgagttaaagctcaataggccttcttgtcggggataagcatcgaccctaaatgcatggcgattatttcactgatgaatcattggggcgaacaattgcccccaattttcgtcatgtttcccttttaatgttatgccatgaatgtttaagggttgtgaaggagactctggaattggttgttgcatcccaaattgtctcaatactctgtctggttggtgctactcaataacttggaaacaaattagtggcaccaccgcgtaccacgcgagacttccgactaaacaaacgggaggaaacagtgatataacggttgatgggtacggctcccacacaaactgcatataacaacatagttgtgaacattttagtaaaataacacataattttttattttacaaatacaatagcatgttcttacctcatgacgtttcataatatccaacttgcgacaaaaactctcacatcatcattgccgatatgttggtttccacgtcgcaaccacctacaaagattaaaatttaatatatgctaaaaccatttattttattgaaatgaaagacgctgttaaaaatgagtaacctgtgccccaatggtgtattttctacttgggaaggagtcctctttggagccaaggttggacatcgttcccatgcccacatttgtagtaagatgcacatacctccgattgatttagttttataatcagtggcattgcacatctctctgtatagaaaaccaagtacggcagctccccatgcatatctgccacattcttcaaagtcacataaaaattgaaggtaccttagcgaaactttgttactgcttttgtcaacgaacaagacacctccaatgaatctcggtatccatgcacgggcaaaccttcgtacttgttcttcgtcgttgtcgttatttatttgtgcaaaatggtgagccagccaacttaatttaatcacactaccttt

SEQ ID NO: 11961 - DNA, 1165 bp, Glycine max
  Gm_smallRNAprecursor_4794
tagctaaatctcccatcactagcatagtgatactcctgtctcattgtccaatgccacactttgatggcctgtatctcttttcttcgtatgttctagtgcttcagcttcagaatgcataaaacagtcaaaatttccgagtgatcaccaaaggcttctacatcagcatttatactctccaccctctttggtttatgcttctgtgatttctttcgtgcctcctcgttacaaatctcagctttattcgaggttgcactagaacgatcaccaccaatctgtgcttcttcctcgtctatcaggtcaatatctttcctttcaacttttgttttgtaaattacagtgtagttttcaaaagcaaaggtgaaacgaaagatattgagctggtagaggaggaataggcacggattggtgctgatccttctagtgggacctccaataaatctgagaattataaggaggaagcatggaagaaaacacagaagcataaaccaaagagggtggagagtgtcaacgctgatgcagaagcctttggtgatgactggaaaattttgattgctctatgcattgtgaagctgaagcagtagaacatacgaacaaaagagatacaggccatcaaaatgtggcattggacaataagacaggagattcaactatgctgaagatgggagattcagctaaagttgtgatcaaacaagacatgaagggaagaaggcataaatatgggtttaacaacaatgaacgtgagaaggcacagaagaaaagggtggtggatgatgaaactgccgacaaacatcagctggatgaagtcctatgaagatcctcctcattctcaaagaagggaacgagcaacaatttgaaggttgtatattcaggaactaaagaattcaaaatagctagtaataagagggatttgtttttgggattttctgagcaccaagagcggctacgcgagaagtttgcacttgaggagggaaggatatttgcagctaatgaacaattttcttaactatttgtccttaagattttactgtttctttttgctaatatgtaaatataaacggtataagggtatggcgcaatatatcggtctatatttacttctaagattgttatgggtgaaaatgaccatgtccctatggcataaccttatattatttatatttacata

SEQ ID NO: 11962 - DNA, 1137 bp, Glycine max
  Gm_smallRNAprecursor_4795
acgtttctgaggggttagctcctccacttcataagcaccattcgaataaatctgaattattttaaacggtccttcccaatttggggaccatttgcccaaggctcgatccttactatccatgggcaggataaccttccaaactaaatctccaatattaaaagttttttacttcactttcttattataagctttagcaactctttctttttgtttagtcaaaacttctaatgctcttaatctctcctcatctaaatcaaccaattcatctgacatcattttccaataatggtcgattggaatgtccatttgtttttgtaccctggctgattgcaaatgtatttcgaccggaagtacagcatcatgcccataagtcaatcgaaatggggtagtattagttgattccttaggagaatttctacatgcccatagaacttgatctaacgttttattccaatttcttggcttttgggcaatgtgttttttaatcaagttaattacaatcttattggctgcttcgacctgaccatttgcttgcgcgtaatatggtgttgaggttaataatcgaaagccagtttctttggcaaattcttgcatttttcgtccagtaaaaactgaaccttgatcagtggtaattgtttcaggaataccatacctataaataatatgattttgaatgaaactaattactgcttcctgatcaacatttggcaaagggactgcttcgatccattttgtaaagtaatcgataccaactataatataacgctggttcttagaagaagcaggcttgatttcaccaattaggtccaaagcccatcctctgaaaggccaaggtttgattatggagtgtaactcactagcaggtagatgctgtatccctgcatgcttttggcattcctgacagcctttagcaaattctatgcagtcttttaacatcgaaggccaatacaaaccttgtcgaaataaaagccatttcattttatggcctgcttgatgtgatccacaagccccactgtgaacatgggaaactgccaagtacgcttctgattcacttagacatttcaacaatactccttttgcagtctttttaaacagatcatttcccacaatcacgtaatttaaagccctatatttgac

SEQ ID NO: 11963 - DNA, 1083 bp, Glycine max
  Gm_smallRNAprecursor_4796
caaagggactgcttcgatccattttgtaaagtaatcgataccaactataatataacgctggttcttagaagaagcaggcttgatttcaccaattaggtccaaagcccatcctctgaaaggccaaggtttgattatggagtgtaactcactagcaggtagatgctgtatccctgcatgcttttggcattcctgacagcctttagcaaattctatgcagtcttttaacatcgaaggccaatacaaaccttgtcgaaataaaagccatttcattttatggcctgcttgatgtgatccacaagccccactgtgaacatgggaaactgccaagtacgcttctgattcacttagacatttcaacaatactccttttgcagtctttttaaacagatcatttcccacaatcacgtaatttaaagccctatatttgacctttcgagccacattacctattggattttccaaatattcaacaatggactttctccaatcattatctaacatattgtcaatggccaaaatttgaatttttccttggagatcatccatgctttcatcttcattattttgtggtgtacttgcccccacaagttttggcattggcaacttagtgcttaatggctctggtaataccagtttatcttttatttcgatcaactgagttaacttttccttcgacattttgtaccccgaagctatttgggctaaatcatttgcttcttggttttcttgtcgaggtatatgctcaatgttaatgtaatcaaaatgattcagaagagaactcgccataacaaaatattttgctaagtgttcattaacacatttgtattcttgtgttaattgcctcaacactaattctgaatcaccccttatgttaacatttcttgcccccaggctaattaaaatttcaaggcctgtaattagagcttcatactcagcctcattattagaacaaagccctttgattttatatttgaatttagttggaactttattgggggatattattaaaattccaattccagttccatgtttgtgtttcgaaccatcgaaatacaaaatccaaggctctgtatcgacatagtc

SEQ ID NO: 11964 - DNA, 1176 bp, Glycine max
  Gm_smallRNAprecursor_4797
tgccacaatttgacccttaacagatttcaaaggcttgtacgttaaagaatattctgttaatgctaaagcccattttccaattctactgtgtaaaataggttttgacaacatgtgcttaataatatcataatgagaatacacataaacatcaacaggctttatatattgcttaagttttgcacaagagaaatacaaacaaagacaaagtttttctatggcagtatatctagtttctgcatcatttagtacacgactaagataataaattgcatgttctatgccatcatcatcttcctgagccaacatgctaccaatggtcttgtcagacgcagcaatatacaacttcatagtcttgtttcgactaggaggcattaacacaggaggcttgatcagatattctttaatttcatcgaaagccttttgatgctcttcaccccatttgaatggttcatctttcttgagtcgaagtaatggcgaaaaaatttgagctttgccacttagattcgaaatgaatcgcctcaagaagttgatttttcctagcaaagactgaagctgttttttggtcgaaggaggcttcgtctcaagaatagcctttgtcttgttttgatttatctcaatgccttttttatgcaccacaaaaccaaggaaatctcctgcacgcacacaaaaagcacactttaatggattcatttttaatccatgtttcctcattcgttcgaaagattgcctaaggtaatccaaatggctatcttcttaagaggatttgatgattatatcatcaatataaacttgcataaatgtgtcaataaaatcatgaaacatggaattcatggccctttgataagtggccccagcatttttcaacccaaagggcataaccacccattcataagtgcctaaagcaccagggcattgaaatgctgtttttgacacatcactttcagcaataaatatttggttataaccagaataaccatctaacatgcttaaaaactcgaagccagctgctgaatctaccaacatttccgctactggcatagcatattcatctttaggtgtagcattatttaaatccctaaaatctatgcatactctaagagttccattctttttaatgacagggactatatttgctaaccattcgacatacctggcagatctgatgaatttacacct

SEQ ID NO: 11965 - DNA, 1039 bp, Glycine max
  Gm_smallRNAprecursor_4798
atttctggtgcgaatcttcttggtagttgttttactggtctttttccctccttaataggtaatttcatttcgaccatttctctgcttaacccaggcatttcgtggtaatcccaagcaaaacagtctttaaattctctaagaagaggcaccagcttttcttttagacttgaggtgatattggcactgatataggttggcctttttatcgagccatctccaatgtcgatctcctccaaaggatcttgagcctgcatctttggcgcctcgcttatgggatttttctcaaaacccagtggctcatcatcataaatgcaatccagtcttcgatcctttgtttctttgttttcatgatcttcgatcttggcttcaactgccatattttgttggaattcagcctcaaaggccgtatttagtctattttcggccatataagccgtaattctggcccatgcagtggcctcagtcatattaatcttcacatatattccacccagttggtggaatgactccatcttcagagggaacagcatcaatttcctccctctcccatataaacccataggtaggatggagtttgacagagtggataacattgtcacttgactcgaaaacagcctccttgtcaccacaaggtgctatgttagccaaatttttgtcaaaggtttgtggagtaacattatcgacctctgacttatagaagctttgatctgcctctatattttcaacaatcccatcttccctccagataatgagtttctggtggagagtagatggcacagccccaactccatggatccattcccttcctaatagcaagttaaaattagccttggactgtattaccaggaatagagttggtcgaactatactgcctacaacaacatctacttgaatggctcccaaagaatagccagttttgccctcataattagagagcacaatgttgtgagcagatagatcagtgtcatgtttcccgatcttgtagagcatagatcgaggcattaagttgacagccgctcctccatctatgagcactttg

SEQ ID NO: 11966 - DNA, 1039 bp, Glycine max
  Gm_smallRNAprecursor_4799
ggagtggattcatggagttggggctgtgccatctaccctccaccagaaactcattatctggagggaggatgggattgttgaaaatatagaggcagatcaaagcttctataagtcagaggttgataatgttactgcacaaacctttgacaaaaagttggctaacatagcaccttgtggtgacaaggaggctgttgtcgaatcaagtgacaatgttatccactctgtcaaactccatcctacctatgggtttatatgggagagggaggaaattgatgttgttccctctgaagatggagtcattccaccaactgggtggaatatatatgaagattaatatgactgaggccactgcatgggccagaattacggcttatatggccgaaaatagactaaatacggcctttgaggctgaatctcaacaaaatatggcagttgaagccaagatcgaagatcatgaaaacaaagaaacaaaggatcgaagactggattgcatttatgacgatgagccgctgggttttgagaaaaatcccataagtgaggtgccaaagatgcaggctcaagatcctttggaagaggtcgacattggagatggctcgataaaaaggccaacctatatcagtgccaatatcacttcaagtttaaaagaaaagctggtacctcttcttagagaatttaaagactgttttgcttgggattaccacgaaatgcctgggttaagcagagaaatggtcgaaatgaaattacctattaaggagggaaaaagaccagtaaaacaactaccaagaagattcgcaccagaaatcatgtccaagattaaggaagagatcgaaaggctgctaaggtgtaaattcatcagggctgccaggtatgtcgaatggttagcaaatatagtccctgtcattaaaaagaatggaactcttagagtatgcatagattttagggatttaaataatgctacacctaaagatgaatatgctatgccagtagcagaaatgttggtagattcagcagctggcttcgaatttctaagcatgttaga

SEQ ID NO: 11967 - DNA, 1052 bp, Glycine max
  Gm_smallRNAprecursor_4800
actgaagagtttatttcggcatcagatgaggacgaagcaccaggaatcttttcacttgaggtgttggcttgacttgtgttcagcaggagtcgaagggctgcagcagggtcttcgtcttgcatttgaatgaatgtatcttctgcgatccctatgctagcggaaagcttagatgttgaagacgccgggtaaatgtccgaacctccagcttcagcctcttttatggcctcttcatcggaaaagttttcttcggatgaatttttctgactcgatccatgaggactgatggatccaatgcctttaccttcaccctgttcctcaacattcactgcatccgtctcaggagcgggagatgttcgagcatgtgagggtatttcttctacagaaacattttgttgtacctgatttgaattatcatggaaaaaggttaacaaatagtttcgtataagctatgatttaaaacacattaagaggatgatacctcgacggcaggttgttcttgtggtgagtccggttgatcgacagggttgcccatctcggcaatagaaggagtagcctctacttcagtgccgtcaatatcggtcgaaggtggttggacgtcaacaggttgattgtcaccttgttcttttgaaggcttggtctttttctttttcttcttgattggctcaccaccctcaacagccacagaaggttcaggctcgatttgtttcactttctttttcttcttaggcatttgagcctgagaattgcatgtctctgtttgttcagcagacttggtcgaagtcgaaggtaattttctttttcttatgagtggtctttcctcttcttcctgcattacgagggtaaagaattgtcagaatatagacttgaaaaagagttataatattgacattagaaataaaacttgcatctttctcttcgtctaattcgacgaccgcatgcttcgagcgttttgaagtagtggtagtttcagtgctatcatctttcttttgactctgaaaaataaagaaatatgaggcaagacgttaagagtaaaagataagttcagaagagtt

SEQ ID NO: 11968 - DNA, 1157 bp, Glycine max
  Gm_smallRNAprecursor_4801
tttttttttccaaaatgggcagattgttgagcacttgttgttagaaacagacccagacttagatatttggggggaaggggggcatgttacaaatatatatacaaaatttcttatgaaacattcaaaatgttaattacattagtagtttgtataatattaatagataatataattaaaataaaagacaaactatatactcttttaagattacaaatgccataaacaactttcattaacttataagaagcattggtatatgtgtatacacattaataataacttttagaaaacctaactctcacaagaaccctcacaagactccccaagcagagagaaacctagggcaaaataactttatgggattctttttacaaacttattttcaaaagggatccctttttaaacatatttctcaaggggtctgttttgtaaaaaaaaaaagtcacgtgatatcgccattctcatcaatgtaacctcactgttcatgtcaaccaaaaaaatcacgtgtgccaagtgtgtttcaccatcaccactggtgaaacacactgtttacgtgacatgcatatcgtcaacttcaattgcgtaacaccgctgcaacaacactgttcatgcagaaaaaacattcgcgtgccatgtgggtttcggtaatggtagtggcgaaacacactgtccatgtcacataggttccgctagcagtattggcgaaaacctatgggtccatcactgtacttctcagaggttgcaggttccaatggtgccttttattcttgcttatattttgtgaaagaaattaaagataactctactatttaaagtgcattttattttgtctaagataaaattttaattgttcatttcataaaataattgtgtaaaggcggaataatataccgtgacaaaatataagcaagaatatattattatattatttaagaacctataattaaacatttgattatttatttaaacacactcataattaaggtggaaaacaattaatagaactagtagatttttaatggttaaacacaccatggatgcgtgattttttaaaactcatttgacagaaatgaagttaatttgttatagctcatctacagaatacttttactatcattttcccaacctgaagaatatatagtttatgaatcccgtct

SEQ ID NO: 11969 - DNA, 1069 bp, Glycine max
  Gm_smallRNAprecursor_4802
tttaatttccgcttttactttctgttaagtttctcttctactcctcattctcttaataacatagtaaaagccttagaagagtaaattttttaattagtaaaggtttaggaataattaattcaaccccccccccttcttaattattttgaggccactcgatccaacattttggagtgctctggacttaaaactttttgctacaacaatagaatttctaagtttcctaatctctttgttctgatgagctcaacccctctatggtggctcactctgaccaacatgtagctttctctcactactagaaaaaggagattctacgacggtcaaataggggatgaacgtcgttgaatgtgacatcgtcaaaacttaaaaatatcaacgacaggtcccaaaataccgtctttgaaagtgagaaactttcaaagacgatgcttaccttagcaacgtctttgaaagtaggcattctaagacgttgttgaggtaagcaccgtctttgaatgcctactttcaaagacgttgctgaggtaagcaccgtctttgaaagtacgcattctaagagggtgcttacctcaacaacgtctttgaaagtagacattctaagacgttgctgatgtacgcaccgtctttgaattaaatattatttttaattatttatactttttccggttgatatcccatcagaaaaatataaataattaatgtgggagtgatatagaatgggaagataatgtgggagcgagaaagagtaaaaaatgcatggtatgatagagatgataaattctaatatgaagcagtgaagtgaacaacaacccatattgatccatcgatcccacaaaatacataagccataagttaatataccatatccacaaggaagaacaagaagacaaattaaaacaaacatagaaaaccaaaaatacaaaatcatagtcaaaaatggattttgtaaataacttgaagcataaatgccccttttgcacactctatccagaccagggttgaaaaaataaaaaagatccaaactttggcataaaatgggtgtcttacaggagtatactgattataggct

SEQ ID NO: 11970 - DNA, 1079 bp, Glycine max
  Gm_smallRNAprecursor_4803
taaggaaattcctagaaccttctcttcttttggaagtttctccataatttttctttcctccattttctttgttttggggctgaaatttaaactttgactggaaggcattttcaattgtatcttctttatgcctatacagtctttgctcatatgcttcaagagagcccacaagttctgtctctgatagagtggacagatctttggtttcctcaatcgttgtcacgattgggttaaacttttggggcatagtaattagaattttctcaacaattttcttgtcaagaatatgttccccaaaatctctcatttgattaactatttctttaactttagaatagtaatctttaactgtctcaaactccttcatcttcaatagttcaaaatctcttcttagagattgaagtttaacggcacgtaccttaacacttccttgaaactcctcctgcaatgtgttccatgcttctttggcagtcttagctcccataattcttgtgaaaattggatcagtcaccgcttgttgcaaggtgaacaacgcctttgaatttttctgtttatttttcttcaactctttttcttgagatgcattaagagctgaagtatcctcgggaatggtgaagccttcttctactatgtcccataaatcttgagatgaaaaatatgtttccattttaacacgccagaaatcataattttcaccattgaagataggaacagaaatagttgacgattgagtagtgttatccatagcttagaaaaaatattattagagtgggttaatagtacagaaaatttttgaagtagttgggaggattttggaatggtaggtaggtaatataactatgcccaatgtatgaccgaacgtagctctgatgccactgttgttagttggttagatgatagttgatagttgatagttttagagaattgttttagaaagaaggctatgtcattgatttcttggatttatccattacaacataccaattgtctatttataggctcaagtcaccaacctctcaatggtggtgaatgtttctacattactttaggtctttctagagttttcatgatagattagt

SEQ ID NO: 11971 - DNA, 1036 bp, Glycine max
  Gm_smallRNAprecursor_4804
tttggatattaattaaacgttaactacaattagtgtacacacacataaaatatatataagtagaacttttatttaaatcacgtaccttaacaacaatccacctagcagcagccttggatttaggttgtggaatatcatcaagtcctttcaaagcactagtgttgaatatgaggaacattaaaatattgatgttgttgagttatgccaatgaaaatgtattgaaaacaatactgacatgttaattattcccttaaggtagttgtctggcctgttatgtaaagaacaaaaccagacaactaggttttccttaggcagaatgacgaccatttgccagtgtctgctgcagtagagacgaatatgggttattgtagtagtatagattatttaaattcaattgttgtgtttgacttacccattcaggtaggctccaaggtaaacatctcgtttagaactctgtatccaactcttgatgtaactttcggattcaaattgtgattgcccagatctctgaatggactgtggctcgaggaatccatacacatcagaattccccgctcacacacttgtctcagtcagatggttgtgttgttaagccaaagttaattatgtatgaatttaaaacaattactttggtaattaacaataatctaaaatgacttatagaatccacaactgtataacagatatgctgagacattgacaaccatgtgcaatttcagagagatcttcgtgctttatatacaacggaaagttttgattaaacaccccgaatatggtagcatcccacataacctggagaggcatcaaaaacagttgtgggatggtcaatgtcatcaggtacaggggatcatcaacctcttcatccgggcgttctggaggttttgttggagacatagctgcctgttgatcaaacatagttaatttgcaagttttgattacagtgaacaaattaattgaaaaaaataaacatataatcagagtaaaatacatgttatgataaacgcttcacaagatgtgttggccaagcaaggaaggt

SEQ ID NO: 11972 - DNA, 1213 bp, Glycine max
  Gm_smallRNAprecursor_4805
taccggaactgttacaaaacttttaaaaattacattacttaaaagaaattgacaaattagttacaataattcatgattactacaactaattaatcgtcatctaatgatataccgaaacagtcatcttcattctggtagaatggatcatcttcttggtcatcattagtctctgatgattcagcttccttcttggaaggttcttcttccacttcctgttgaagtagttggagaacttctttgagattcttagcaagactctctttagattttgagcttgctaagaatgctgccagttgcgacttctgattcaggaacagagatgtctctgggtcagcaggtttaaggaactcaggattgctctggaaccagttcttgacttgatctggagctgcctttgaagtatcgaattgtgaccaccattttacaaaggcgtgtctctgtaacggtggatattgcttgctgttttcagtttttccgtatctgtattgccatgaaaaaatccatgacaaggcaaaactggaaaagtattttaaatctgctagaatacgtgattccttgctattatagagcttgttgaattgttggaatccctgttggacttcttctgggaatatctgtggaattggtccgaagtagttccaccattggaggaaccaatttggaaaattatacacagtattatttttgaagtaaattagccatgaatgcttgaatttactattttgatgccagaacacattggtccaggcgtcgatgtaatcccaataattatatcctgcggggtcaaatggagcagaaaattttttgggttggtttaggtttgagccataatgtcgtggctgcataacctttaggatttggattgtggaatgagtatttagatttggatctttggggtctttgaagtgtttaatagatactgagttcgtatctattagaatgaattcatagaatttgcgggttttgtttgtggctattggcctgtaatggaatcctggggggaatactttggcggttgccttgaagggattcttgtccctgtattctggttccatttgtaaaacattgaaaaacttgttttttgaaatataactgttgctgggttgtgatgttgattcttgttgagtcaacgattggcttggtctttggttgcagacaattttggtctgtttggccttttggatttgtttttgtagttctgtttcaaaatcat

SEQ ID NO: 11973 - DNA, 1031 bp, Glycine max
  Gm_smallRNAprecursor_4806
ctttctgtaaaatgtctttggctgatttgcagtcaacccttactaaaattttttgatttaataaatcagattgaaatttggaaatgcataaaacaattgctaaaacttcttttttaacagttgaatactttaattgtgcaggattccaatgttttgaagtatatgcgatgacatgttcttgaccatgtatttgttgtttgaggataccaccgtcaccgatgtctgatgcatcagtttcgacaactttgaatgcctgtggaatgggaagatacagacattttatggattggactttgactttgatttctttaactgtttgggtatggaggtcagaccaaggaggcggatttttctttagcctatcatgcaatggtttgacaatattatttaagtaggggacaaattctcctacgtaatttagacaacctagaaatctttgtaactgggttttgtccaagatttggttgggaaatttgctagcaaactctattgacctttcgattggaatgattgtaccttgataaatattgtgaccaaggaatcgaattcgagtttggaaaagattgatttttgatttggagactgccaaaccattttgtttaatgatatggatgaaggtttggagatgtttgaaatgttggtcaatgttttgggaaaagattaaaacatcatctatgtagacaatgacaaattttgaataaggattaaaaatatcattcataattttttgaaattctgaaggggcattcttcagttcgaatggcatcacattccattcatattgcccgaaaggtacagtaaacgctgttttgtacctgtctgattcttggatttggatttgccaaaatccagatttcatatcaaattttgaaaatatctttgcagaatttaatctgttaagcaaatcctttttgtttggaataggatatctaatccattgtaatgcttgatttagtggtttgtaatttatgactaagcggggtgttccacgctcaatctcagattgtttgttgacataaaaagtcgcacaa

SEQ ID NO: 11974 - DNA, 1159 bp, Glycine max
  Gm_smallRNAprecursor_4807
acccatctttcgggaagagttacttcatcccattttatttttctcgggagagaaacgttagcctttgtcatatcggtgataaacaaggttgtttctcctttttgaggttttaacaggactctagatgcacaagtattcatgaccttgtactggatcctataaattaaggctgctgggattgatccttctttcatgtcaaggccatgaaagtggatgtttaagaacagagagtcaagaatgtttctgtccatcagactcactgttttgtttggataacagttaaaatatattggaccttgtcctaggctggtttcgactgttccaattagggagtcttcaaattgattatgcctaatgtctcttagacacattaaaactgctgcatctatgcccatatcaattaagggcttgatggctacttgtacacaaccgatgtgtagatatttatacttacggctatgttcataaattgaattttttgaaagtaaatgaaattcttcccctatatcttgtcctagaggaatattgttttctactgttttgattatgtaatcaaagttgtgtttgtcttttattgtttcaggaacgtatagttgatcttgagggatttctagaatgttccagtcatccatgttttgattgatatcttcgaatcagacttcctcatcgaagagattgtgttttggggcgacctcttgggtctggttatcttgatcatttaataaattggagtttcttgaagaagatgatgaggaggagtttgagcgaaaagagatacgggaaaaagatcgtaatagtctagacatgattataatattctctaatatcttcgccctcatttggttccatagaaatatctccgtaagtaaatatgtcacaaaatttttctggatctgaattatttttaagaaaaagtcttttttttttaaaaaaaaaaaaaacagtttgaacggcaatcctatagccaccagtgtattatgtcttgatattttggttaaacagtacaccttagccttaccgccctttatccaacacgggtcttactgctacagtactattcaactaaaatattagactgctgtacttccagcaagtactgttcaaacacttactgtacaaggaatgttgtccgtaaggacatatgttaacaaattttatg

SEQ ID NO: 11975 - DNA, 1199 bp, Glycine max
  Gm_smallRNAprecursor_4808
ttcaaacaaccaaaaaaatatcattcatcacaatacatatatatatatatatatatatatatatatataaatatcagactgctgtgcttccagaaaatactgttcaaacacatactgtttaaattaaaattactgtacatgcttcagatccataagtttagttaacatatgcccttacggacactattcctacttctccatcaggctctgataccagaggtcagcggagtaggatcaaacggacagataggaagtaagaatgcagtatgattaatgaaatgaaaatataaacttgaaaacagatatcaaggtcacaccggagaccggcttacaaaacccaggttttcataaacaaagaaaccgaagcgacggcagagccgcacaggattggtggagggagaagagagaaggatgaaaaatagaaatttattggatctagaaagaagcgcttacaaaaatcttgtttcagagcacctctcttccgaaacctgaaaaaatggctaaatgaaagggtgcctcacaacatacttgaggactccttatatagccaaaaatctaagaccggtagttgccggtagttttgaccgggactatttgactgtttgttacaagacaagtagttttgaccgggactttaatggctacaggacaggtagtattgtccatcattaattacacattaattacaaacaaacggttttgtgaccgaaattaaatttaatctaaacagataccaaaacaatcatcttcgttttggtaaaagggatcttcttcgtcttcttcggcagaacttgtttcttccttctttgaggatgaagcttcttcttcttgttgtaacatttgtagaacttccttcagatttttagctaagacctcctttgatgtcgatcctgctaaaaatgctgccagatgagacttttggttcaaaaacacagaagtctctggatcagccgctttgaggaattctggatgggatttgaaccatagttttacttgttctggatccgctttggatgagtcaaattgtgtccaccattttacaaatgcgtgtctttgtagtgatggatattgatttgtcttttcagtcttgctgtaacgatattgccatgagaatatccatgacagtgcaaagcttgaaaagtatttaagatctgctggaattcgtcattcctgcgaattgtattgtttcttaaattggg

SEQ ID NO: 11976 - DNA, 1141 bp, Glycine max
  Gm_smallRNAprecursor_4809
tgtgcttccagaaaatactgttcaaacacatactgtttaaattaaaattactgtacatgcttcagatccataagtttagttaacatatgcccttacggacactattcctacttctccatcaggctctgataccagaggtcagcggagtaggatcaaacggacagataggaagtaagaatgcagtatgattaatgaaatgaaaatataaacttgaaaacagatatcaaggtcacaccggagaccggcttacaaaacccaggttttcataaacaaagaaaccgaagcgacggcagagccgcacaggattggtggagggagaagagagaaggatgaaaaatagaaatttattggatctagaaagaagcgcttacaaaaatcttgtttcagagcacctctcttccgaaacctgaaaaaatggctaaatgaaagggtgcctcacaacatacttgaggactccttatatagccaaaaatctaagaccggtagttgccggtagttttgaccgggactatttgactgtttgttacaagacaagtagttttgaccgggactttaatggctacaggacaggtagtattgtccatcattaattacacattaattacaaacaaacggttttgtgaccgaaattaaatttaatctaaacagataccaaaacaatcatcttcgttttggtaaaagggatcttcttcgtcttcttcggcagaacttgtttcttccttctttgaggatgaagcttcttcttcttgttgtaacatttgtagaacttccttcagatttttagctaagacctcctttgatgtcgatcctgctaaaaatgctgccagatgagacttttggttcaaaaacacagaagtctctggatcagccgctttgaggaattctggatgggatttgaaccatagttttacttgttctggatccgctttggatgagtcaaattgtgtccaccattttacaaatgcgtgtctttgtagtgatggatattgatttgtcttttcagtcttgctgtaacgatattgccatgagaatatccatgacagtgcaaagcttgaaaagtatttaagatctgctggaattcgtcattcctgcgaattgtattgtttcttaaattgggaaaatccttgttggaccgtttctg

SEQ ID NO: 11977 - DNA, 1154 bp, Glycine max
  Gm_smallRNAprecursor_4810
tgtgcttccagaaaatactgttcaaacacatactgtttaaattaaaattactgtacatgcttcagatccataagtttagttaacatatgcccttacggacactattcctacttctccatcaggctctgataccagaggtcagcggagtaggatcaaacggacagataggaagtaagaatgcagtatgattaatgaaatgaaaatataaacttgaaaacagatatcaaggtcacaccggagaccggcttacaaaacccaggttttcataaacaaagaaaccgaagcgacggcagagccgcacaggattggtggagggagaagagagaaggatgaaaaatagaaatttattggatctagaaagaagcgcttacaaaaatcttgtttcagagcacctctcttccgaaacctgaaaaaatggctaaatgaaagggtgcctcacaacatacttgaggactccttatatagccaaaaatctaagaccggtagttgccggtagttttgaccgggactatttgactgtttgttacaagacaagtagttttgaccgggactttaatggctacaggacaggtagtattgtccatcattaattacacattaattacaaacaaacggttttgtgaccgaaattaaatttaatctaaacagataccaaaacaatcatcttcgttttggtaaaagggatcttcttcgtcttcttcggcagaacttgtttcttccttctttgaggatgaagcttcttcttcttgttgtaacatttgtagaacttccttcagatttttagctaagacctcctttgatgtcgatcctgctaaaaatgctgccagatgagacttttggttcaaaaacacagaagtctctggatcagccgctttgaggaattctggatgggatttgaaccatagttttacttgttctggatccgctttggatgagtcaaattgtgtccaccattttacaaatgcgtgtctttgtagtgatggatattgatttgtcttttcagtcttgctgtaacgatattgccatgagaatatccatgacagtgcaaagcttgaaaagtatttaagatctgctggaattcgtcattcctgcgaattgtattgtttcttaaattgggaaaatccttgttggaccgtttctgggaatatctctgg

SEQ ID NO: 11978 - DNA, 1063 bp, Glycine max
  Gm_smallRNAprecursor_4811
agcggagtaggatcaaacggacagataggaagtaagaatgcagtatgattaatgaaatgaaaatataaacttgaaaacagatatcaaggtcacaccggagaccggcttacaaaacccaggttttcataaacaaagaaaccgaagcgacggcagagccgcacaggattggtggagggagaagagagaaggatgaaaaatagaaatttattggatctagaaagaagcgcttacaaaaatcttgtttcagagcacctctcttccgaaacctgaaaaaatggctaaatgaaagggtgcctcacaacatacttgaggactccttatatagccaaaaatctaagaccggtagttgccggtagttttgaccgggactatttgactgtttgttacaagacaagtagttttgaccgggactttaatggctacaggacaggtagtattgtccatcattaattacacattaattacaaacaaacggttttgtgaccgaaattaaatttaatctaaacagataccaaaacaatcatcttcgttttggtaaaagggatcttcttcgtcttcttcggcagaacttgtttcttccttctttgaggatgaagcttcttcttcttgttgtaacatttgtagaacttccttcagatttttagctaagacctcctttgatgtcgatcctgctaaaaatgctgccagatgagacttttggttcaaaaacacagaagtctctggatcagccgctttgaggaattctggatgggatttgaaccatagttttacttgttctggatccgctttggatgagtcaaattgtgtccaccattttacaaatgcgtgtctttgtagtgatggatattgatttgtcttttcagtcttgctgtaacgatattgccatgagaatatccatgacagtgcaaagcttgaaaagtatttaagatctgctggaattcgtcattcctgcgaattgtattgtttcttaaattgggaaaatccttgttggaccgtttctgggaatatctctgggatgggtccaaagaagtcccaccattgcaaaaaccaattgggaaaattg

SEQ ID NO: 11979 - DNA, 1063 bp, Glycine max; identical to SEQ ID NO: 11978
  Gm_smallRNAprecursor_4812

SEQ ID NO: 11980 - DNA, 1064 bp, Glycine max
  Gm_smallRNAprecursor_4813
agcggagtaggatcaaacggacagataggaagtaagaatgcagtatgattaatgaaatgaaaatataaacttgaaaacagatatcaaggtcacaccggagaccggcttacaaaacccaggttttcataaacaaagaaaccgaagcgacggcagagccgcacaggattggtggagggagaagagagaaggatgaaaaatagaaatttattggatctagaaagaagcgcttacaaaaatcttgtttcagagcacctctcttccgaaacctgaaaaaatggctaaatgaaagggtgcctcacaacatacttgaggactccttatatagccaaaaatctaagaccggtagttgccggtagttttgaccgggactatttgactgtttgttacaagacaagtagttttgaccgggactttaatggctacaggacaggtagtattgtccatcattaattacacattaattacaaacaaacggttttgtgaccgaaattaaatttaatctaaacagataccaaaacaatcatcttcgttttggtaaaagggatcttcttcgtcttcttcggcagaacttgtttcttccttctttgaggatgaagcttcttcttcttgttgtaacatttgtagaacttccttcagatttttagctaagacctcctttgatgtcgatcctgctaaaaatgctgccagatgagacttttggttcaaaaacacagaagtctctggatcagccgctttgaggaattctggatgggatttgaaccatagttttacttgttctggatccgctttggatgagtcaaattgtgtccaccattttacaaatgcgtgtctttgtagtgatggatattgatttgtcttttcagtcttgctgtaacgatattgccatgagaatatccatgacagtgcaaagcttgaaaagtatttaagatctgctggaattcgtcattcctgcgaattgtattgtttcttaaattgggaaaatccttgttggaccgtttctgggaatatctctgggatgggtccaaagaagtcccaccattgcaaaaaccaattgggaaaattgt

SEQ ID NO: 11981 - DNA, 1209 bp, Glycine max
  Gm_smallRNAprecursor_4814
agcggagtaggatcaaacggacagataggaagtaagaatgcagtatgattaatgaaatgaaaatataaacttgaaaacagatatcaaggtcacaccggagaccggcttacaaaacccaggttttcataaacaaagaaaccgaagcgacggcagagccgcacaggattggtggagggagaagagagaaggatgaaaaatagaaatttattggatctagaaagaagcgcttacaaaaatcttgtttcagagcacctctcttccgaaacctgaaaaaatggctaaatgaaagggtgcctcacaacatacttgaggactccttatatagccaaaaatctaagaccggtagttgccggtagttttgaccgggactatttgactgtttgttacaagacaagtagttttgaccgggactttaatggctacaggacaggtagtattgtccatcattaattacacattaattacaaacaaacggttttgtgaccgaaattaaatttaatctaaacagataccaaaacaatcatcttcgttttggtaaaagggatcttcttcgtcttcttcggcagaacttgtttcttccttctttgaggatgaagcttcttcttcttgttgtaacatttgtagaacttccttcagatttttagctaagacctcctttgatgtcgatcctgctaaaaatgctgccagatgagacttttggttcaaaaacacagaagtctctggatcagccgctttgaggaattctggatgggatttgaaccatagttttacttgttctggatccgctttggatgagtcaaattgtgtccaccattttacaaatgcgtgtctttgtagtgatggatattgatttgtcttttcagtcttgctgtaacgatattgccatgagaatatccatgacagtgcaaagcttgaaaagtatttaagatctgctggaattcgtcattcctgcgaattgtattgtttcttaaattgggaaaatccttgttggaccgtttctgggaatatctctgggatgggtccaaagaagtcccaccattgcaaaaaccaattgggaaaattgtaaattgtgttggtcttgaaatatatcagccatgaatgcttgaagcgggtattttggtgccaaaacaccttagtccaagcatcaacgtaatcccaataggtataacctaccggatcaaatggaactgagaatctctttcctttgtt

SEQ ID NO: 11982 - DNA, 1083 bp, Glycine max
  Gm_smallRNAprecursor_4815
ggagtaggatcaaacggacagataggaagtaagaatgcagtatgattaatgaaatgaaaatataaacttgaaaacagatatcaaggtcacaccggagaccggcttacaaaacccaggttttcataaacaaagaaaccgaagcgacggcagagccgcacaggattggtggagggagaagagagaaggatgaaaaatagaaatttattggatctagaaagaagcgcttacaaaaatcttgtttcagagcacctctcttccgaaacctgaaaaaatggctaaatgaaagggtgcctcacaacatacttgaggactccttatatagccaaaaatctaagaccggtagttgccggtagttttgaccgggactatttgactgtttgttacaagacaagtagttttgaccgggactttaatggctacaggacaggtagtattgtccatcattaattacacattaattacaaacaaacggttttgtgaccgaaattaaatttaatctaaacagataccaaaacaatcatcttcgttttggtaaaagggatcttcttcgtcttcttcggcagaacttgtttcttccttctttgaggatgaagcttcttcttcttgttgtaacatttgtagaacttccttcagatttttagctaagacctcctttgatgtcgatcctgctaaaaatgctgccagatgagacttttggttcaaaaacacagaagtctctggatcagccgctttgaggaattctggatgggatttgaaccatagttttacttgttctggatccgctttggatgagtcaaattgtgtccaccattttacaaatgcgtgtctttgtagtgatggatattgatttgtcttttcagtcttgctgtaacgatattgccatgagaatatccatgacagtgcaaagcttgaaaagtatttaagatctgctggaattcgtcattcctgcgaattgtattgtttcttaaattgggaaaatccttgttggaccgtttctgggaatatctctgggatgggtccaaagaagtcccaccattgcaaaaaccaattgggaaaattgtaaattgtgttggtcttgaaata

SEQ ID NO: 11983 - DNA, 1059 bp, Glycine max
  Gm_smallRNAprecursor_4816
gagtaggatcaaacggacagataggaagtaagaatgcagtatgattaatgaaatgaaaatataaacttgaaaacagatatcaaggtcacaccggagaccggcttacaaaacccaggttttcataaacaaagaaaccgaagcgacggcagagccgcacaggattggtggagggagaagagagaaggatgaaaaatagaaatttattggatctagaaagaagcgcttacaaaaatcttgtttcagagcacctctcttccgaaacctgaaaaaatggctaaatgaaagggtgcctcacaacatacttgaggactccttatatagccaaaaatctaagaccggtagttgccggtagttttgaccgggactatttgactgtttgttacaagacaagtagttttgaccgggactttaatggctacaggacaggtagtattgtccatcattaattacacattaattacaaacaaacggttttgtgaccgaaattaaatttaatctaaacagataccaaaacaatcatcttcgttttggtaaaagggatcttcttcgtcttcttcggcagaacttgtttcttccttctttgaggatgaagcttcttcttcttgttgtaacatttgtagaacttccttcagatttttagctaagacctcctttgatgtcgatcctgctaaaaatgctgccagatgagacttttggttcaaaaacacagaagtctctggatcagccgctttgaggaattctggatgggatttgaaccatagttttacttgttctggatccgctttggatgagtcaaattgtgtccaccattttacaaatgcgtgtctttgtagtgatggatattgatttgtcttttcagtcttgctgtaacgatattgccatgagaatatccatgacagtgcaaagcttgaaaagtatttaagatctgctggaattcgtcattcctgcgaattgtattgtttcttaaattgggaaaatccttgttggaccgtttctgggaatatctctgggatgggtccaaagaagtcccaccattgcaaaaaccaattgggaaaattg

SEQ ID NO: 11984 - DNA, 1059 bp, Glycine max; identical to SEQ ID NO: 11983
  Gm_smallRNAprecursor_4817

SEQ ID NO: 11985 - DNA, 1082 bp, Glycine max
  Gm_smallRNAprecursor_4818
gagtaggatcaaacggacagataggaagtaagaatgcagtatgattaatgaaatgaaaatataaacttgaaaacagatatcaaggtcacaccggagaccggcttacaaaacccaggttttcataaacaaagaaaccgaagcgacggcagagccgcacaggattggtggagggagaagagagaaggatgaaaaatagaaatttattggatctagaaagaagcgcttacaaaaatcttgtttcagagcacctctcttccgaaacctgaaaaaatggctaaatgaaagggtgcctcacaacatacttgaggactccttatatagccaaaaatctaagaccggtagttgccggtagttttgaccgggactatttgactgtttgttacaagacaagtagttttgaccgggactttaatggctacaggacaggtagtattgtccatcattaattacacattaattacaaacaaacggttttgtgaccgaaattaaatttaatctaaacagataccaaaacaatcatcttcgttttggtaaaagggatcttcttcgtcttcttcggcagaacttgtttcttccttctttgaggatgaagcttcttcttcttgttgtaacatttgtagaacttccttcagatttttagctaagacctcctttgatgtcgatcctgctaaaaatgctgccagatgagacttttggttcaaaaacacagaagtctctggatcagccgctttgaggaattctggatgggatttgaaccatagttttacttgttctggatccgctttggatgagtcaaattgtgtccaccattttacaaatgcgtgtctttgtagtgatggatattgatttgtcttttcagtcttgctgtaacgatattgccatgagaatatccatgacagtgcaaagcttgaaaagtatttaagatctgctggaattcgtcattcctgcgaattgtattgtttcttaaattgggaaaatccttgttggaccgtttctgggaatatctctgggatgggtccaaagaagtcccaccattgcaaaaaccaattgggaaaattgtaaattgtgttggtcttgaaata

SEQ ID NO: 11986 - DNA, 1058 bp, Glycine max
  Gm_smallRNAprecursor_4819
agtaggatcaaacggacagataggaagtaagaatgcagtatgattaatgaaatgaaaatataaacttgaaaacagatatcaaggtcacaccggagaccggcttacaaaacccaggttttcataaacaaagaaaccgaagcgacggcagagccgcacaggattggtggagggagaagagagaaggatgaaaaatagaaatttattggatctagaaagaagcgcttacaaaaatcttgtttcagagcacctctcttccgaaacctgaaaaaatggctaaatgaaagggtgcctcacaacatacttgaggactccttatatagccaaaaatctaagaccggtagttgccggtagttttgaccgggactatttgactgtttgttacaagacaagtagttttgaccgggactttaatggctacaggacaggtagtattgtccatcattaattacacattaattacaaacaaacggttttgtgaccgaaattaaatttaatctaaacagataccaaaacaatcatcttcgttttggtaaaagggatcttcttcgtcttcttcggcagaacttgtttcttccttctttgaggatgaagcttcttcttcttgttgtaacatttgtagaacttccttcagatttttagctaagacctcctttgatgtcgatcctgctaaaaatgctgccagatgagacttttggttcaaaaacacagaagtctctggatcagccgctttgaggaattctggatgggatttgaaccatagttttacttgttctggatccgctttggatgagtcaaattgtgtccaccattttacaaatgcgtgtctttgtagtgatggatattgatttgtcttttcagtcttgctgtaacgatattgccatgagaatatccatgacagtgcaaagcttgaaaagtatttaagatctgctggaattcgtcattcctgcgaattgtattgtttcttaaattgggaaaatccttgttggaccgtttctgggaatatctctgggatgggtccaaagaagtcccaccattgcaaaaaccaattgggaaaattg

SEQ ID NO: 11987 - DNA, 1058 bp, Glycine max; identical to SEQ ID NO: 11986
  Gm_smallRNAprecursor_4820

SEQ ID NO: 11988 - DNA, 1081 bp, Glycine max
  Gm_smallRNAprecursor_4821
agtaggatcaaacggacagataggaagtaagaatgcagtatgattaatgaaatgaaaatataaacttgaaaacagatatcaaggtcacaccggagaccggcttacaaaacccaggttttcataaacaaagaaaccgaagcgacggcagagccgcacaggattggtggagggagaagagagaaggatgaaaaatagaaatttattggatctagaaagaagcgcttacaaaaatcttgtttcagagcacctctcttccgaaacctgaaaaaatggctaaatgaaagggtgcctcacaacatacttgaggactccttatatagccaaaaatctaagaccggtagttgccggtagttttgaccgggactatttgactgtttgttacaagacaagtagttttgaccgggactttaatggctacaggacaggtagtattgtccatcattaattacacattaattacaaacaaacggttttgtgaccgaaattaaatttaatctaaacagataccaaaacaatcatcttcgttttggtaaaagggatcttcttcgtcttcttcggcagaacttgtttcttccttctttgaggatgaagcttcttcttcttgttgtaacatttgtagaacttccttcagatttttagctaagacctcctttgatgtcgatcctgctaaaaatgctgccagatgagacttttggttcaaaaacacagaagtctctggatcagccgctttgaggaattctggatgggatttgaaccatagttttacttgttctggatccgctttggatgagtcaaattgtgtccaccattttacaaatgcgtgtctttgtagtgatggatattgatttgtcttttcagtcttgctgtaacgatattgccatgagaatatccatgacagtgcaaagcttgaaaagtatttaagatctgctggaattcgtcattcctgcgaattgtattgtttcttaaattgggaaaatccttgttggaccgtttctgggaatatctctgggatgggtccaaagaagtcccaccattgcaaaaaccaattgggaaaattgtaaattgtgttggtcttgaaata

SEQ ID NO: 11989 - DNA, 1188 bp, Glycine max
  Gm_smallRNAprecursor_4822
caaacggacagataggaagtaagaatgcagtatgattaatgaaatgaaaatataaacttgaaaacagatatcaaggtcacaccggagaccggcttacaaaacccaggttttcataaacaaagaaaccgaagcgacggcagagccgcacaggattggtggagggagaagagagaaggatgaaaaatagaaatttattggatctagaaagaagcgcttacaaaaatcttgtttcagagcacctctcttccgaaacctgaaaaaatggctaaatgaaagggtgcctcacaacatacttgaggactccttatatagccaaaaatctaagaccggtagttgccggtagttttgaccgggactatttgactgtttgttacaagacaagtagttttgaccgggactttaatggctacaggacaggtagtattgtccatcattaattacacattaattacaaacaaacggttttgtgaccgaaattaaatttaatctaaacagataccaaaacaatcatcttcgttttggtaaaagggatcttcttcgtcttcttcggcagaacttgtttcttccttctttgaggatgaagcttcttcttcttgttgtaacatttgtagaacttccttcagatttttagctaagacctcctttgatgtcgatcctgctaaaaatgctgccagatgagacttttggttcaaaaacacagaagtctctggatcagccgctttgaggaattctggatgggatttgaaccatagttttacttgttctggatccgctttggatgagtcaaattgtgtccaccattttacaaatgcgtgtctttgtagtgatggatattgatttgtcttttcagtcttgctgtaacgatattgccatgagaatatccatgacagtgcaaagcttgaaaagtatttaagatctgctggaattcgtcattcctgcgaattgtattgtttcttaaattgggaaaatccttgttggaccgtttctgggaatatctctgggatgggtccaaagaagtcccaccattgcaaaaaccaattgggaaaattgtaaattgtgttggtcttgaaatatatcagccatgaatgcttgaagcgggtattttggtgccaaaacaccttagtccaagcatcaacgtaatcccaataggtataacctaccggatcaaatggaactgagaatctcttt

SEQ ID NO: 11990 - DNA, 1032 bp, Glycine max
  Gm_smallRNAprecursor_4823
gaagagagaaggatgaaaaatagaaatttattggatctagaaagaagcgcttacaaaaatcttgtttcagagcacctctcttccgaaacctgaaaaaatggctaaatgaaagggtgcctcacaacatacttgaggactccttatatagccaaaaatctaagaccggtagttgccggtagttttgaccgggactatttgactgtttgttacaagacaagtagttttgaccgggactttaatggctacaggacaggtagtattgtccatcattaattacacattaattacaaacaaacggttttgtgaccgaaattaaatttaatctaaacagataccaaaacaatcatcttcgttttggtaaaagggatcttcttcgtcttcttcggcagaacttgtttcttccttctttgaggatgaagcttcttcttcttgttgtaacatttgtagaacttccttcagatttttagctaagacctcctttgatgtcgatcctgctaaaaatgctgccagatgagacttttggttcaaaaacacagaagtctctggatcagccgctttgaggaattctggatgggatttgaaccatagttttacttgttctggatccgctttggatgagtcaaattgtgtccaccattttacaaatgcgtgtctttgtagtgatggatattgatttgtcttttcagtcttgctgtaacgatattgccatgagaatatccatgacagtgcaaagcttgaaaagtatttaagatctgctggaattcgtcattcctgcgaattgtattgtttcttaaattgggaaaatccttgttggaccgtttctgggaatatctctgggatgggtccaaagaagtcccaccattgcaaaaaccaattgggaaaattgtaaattgtgttggtcttgaaatatatcagccatgaatgcttgaagcgggtattttggtgccaaaacaccttagtccaagcatcaacgtaatcccaataggtataacctaccggatcaaatggaactgagaatctctttcctttgtt

SEQ ID NO: 11991 - DNA, 1058 bp, Glycine max
  Gm_smallRNAprecursor_4824
aaatttattggatctagaaagaagcgcttacaaaaatcttgtttcagagcacctctcttccgaaacctgaaaaaatggctaaatgaaagggtgcctcacaacatacttgaggactccttatatagccaaaaatctaagaccggtagttgccggtagttttgaccgggactatttgactgtttgttacaagacaagtagttttgaccgggactttaatggctacaggacaggtagtattgtccatcattaattacacattaattacaaacaaacggttttgtgaccgaaattaaatttaatctaaacagataccaaaacaatcatcttcgttttggtaaaagggatcttcttcgtcttcttcggcagaacttgtttcttccttctttgaggatgaagcttcttcttcttgttgtaacatttgtagaacttccttcagatttttagctaagacctcctttgatgtcgatcctgctaaaaatgctgccagatgagacttttggttcaaaaacacagaagtctctggatcagccgctttgaggaattctggatgggatttgaaccatagttttacttgttctggatccgctttggatgagtcaaattgtgtccaccattttacaaatgcgtgtctttgtagtgatggatattgatttgtcttttcagtcttgctgtaacgatattgccatgagaatatccatgacagtgcaaagcttgaaaagtatttaagatctgctggaattcgtcattcctgcgaattgtattgtttcttaaattgggaaaatccttgttggaccgtttctgggaatatctctgggatgggtccaaagaagtcccaccattgcaaaaaccaattgggaaaattgtaaattgtgttggtcttgaaatatatcagccatgaatgcttgaagcgggtattttggtgccaaaacaccttagtccaagcatcaacgtaatcccaataggtataacctaccggatcaaatggaactgagaatctctttcctttgttcaagtccgaaccaaagtgtcttggttgaagaacttttagtatttggatg

SEQ ID NO: 11992 - DNA, 1131 bp, Glycine max
  Gm_smallRNAprecursor_4825
acaagtagttttgaccgggactttaatggctacaggacaggtagtattgtccatcattaattacacattaattacaaacaaacggttttgtgaccgaaattaaatttaatctaaacagataccaaaacaatcatcttcgttttggtaaaagggatcttcttcgtcttcttcggcagaacttgtttcttccttctttgaggatgaagcttcttcttcttgttgtaacatttgtagaacttccttcagatttttagctaagacctcctttgatgtcgatcctgctaaaaatgctgccagatgagacttttggttcaaaaacacagaagtctctggatcagccgctttgaggaattctggatgggatttgaaccatagttttacttgttctggatccgctttggatgagtcaaattgtgtccaccattttacaaatgcgtgtctttgtagtgatggatattgatttgtcttttcagtcttgctgtaacgatattgccatgagaatatccatgacagtgcaaagcttgaaaagtatttaagatctgctggaattcgtcattcctgcgaattgtattgtttcttaaattgggaaaatccttgttggaccgtttctgggaatatctctgggatgggtccaaagaagtcccaccattgcaaaaaccaattgggaaaattgtaaattgtgttggtcttgaaatatatcagccatgaatgcttgaagcgggtattttggtgccaaaacaccttagtccaagcatcaacgtaatcccaataggtataacctaccggatcaaatggaactgagaatctctttcctttgttcaagtccgaaccaaagtgtcttggttgaagaacttttagtatttggatggttgagtgggtgtttaaggtttggtcttttgggtctttgaagtgtttgatagatactgagtttgaatctaccaaaatcaattcataaaaagttcttgtcttcaggatggtggttggtttgtagtgaaatcctggtgggaaagccttggccgtcgccttgaagggatttttgtcccaaaattcaggttccatctgcaaaacagttaacaatttatttttataaatataattgttagtttgtttggtaggtggtgtttgggcttt

SEQ ID NO: 11993 - DNA, 1146 bp, Glycine max
  Gm_smallRNAprecursor_4826
gctacaggacaggtagtattgtccatcattaattacacattaattacaaacaaacggttttgtgaccgaaattaaatttaatctaaacagataccaaaacaatcatcttcgttttggtaaaagggatcttcttcgtcttcttcggcagaacttgtttcttccttctttgaggatgaagcttcttcttcttgttgtaacatttgtagaacttccttcagatttttagctaagacctcctttgatgtcgatcctgctaaaaatgctgccagatgagacttttggttcaaaaacacagaagtctctggatcagccgctttgaggaattctggatgggatttgaaccatagttttacttgttctggatccgctttggatgagtcaaattgtgtccaccattttacaaatgcgtgtctttgtagtgatggatattgatttgtcttttcagtcttgctgtaacgatattgccatgagaatatccatgacagtgcaaagcttgaaaagtatttaagatctgctggaattcgtcattcctgcgaattgtattgtttcttaaattgggaaaatccttgttggaccgtttctgggaatatctctgggatgggtccaaagaagtcccaccattgcaaaaaccaattgggaaaattgtaaattgtgttggtcttgaaatatatcagccatgaatgcttgaagcgggtattttggtgccaaaacaccttagtccaagcatcaacgtaatcccaataggtataacctaccggatcaaatggaactgagaatctctttcctttgttcaagtccgaaccaaagtgtcttggttgaagaacttttagtatttggatggttgagtgggtgtttaaggtttggtcttttgggtctttgaagtgtttgatagatactgagtttgaatctaccaaaatcaattcataaaaagttcttgtcttcaggatggtggttggtttgtagtgaaatcctggtgggaaagccttggccgtcgccttgaagggatttttgtcccaaaattcaggttccatctgcaaaacagttaacaatttatttttataaatataattgttagtttgtttggtaggtggtgtttgggctttggctaaaggtagttttcctttagtattggtggctgttttggtc

SEQ ID NO: 11994 - DNA, 1080 bp, Glycine max
  Gm_smallRNAprecursor_4827
ttcggcagaacttgtttcttccttctttgaggatgaagcttcttcttcttgttgtaacatttgtagaacttccttcagatttttagctaagacctcctttgatgtcgatcctgctaaaaatgctgccagatgagacttttggttcaaaaacacagaagtctctggatcagccgctttgaggaattctggatgggatttgaaccatagttttacttgttctggatccgctttggatgagtcaaattgtgtccaccattttacaaatgcgtgtctttgtagtgatggatattgatttgtcttttcagtcttgctgtaacgatattgccatgagaatatccatgacagtgcaaagcttgaaaagtatttaagatctgctggaattcgtcattcctgcgaattgtattgtttcttaaattgggaaaatccttgttggaccgtttctgggaatatctctgggatgggtccaaagaagtcccaccattgcaaaaaccaattgggaaaattgtaaattgtgttggtcttgaaatatatcagccatgaatgcttgaagcgggtattttggtgccaaaacaccttagtccaagcatcaacgtaatcccaataggtataacctaccggatcaaatggaactgagaatctctttcctttgttcaagtccgaaccaaagtgtcttggttgaagaacttttagtatttggatggttgagtgggtgtttaaggtttggtcttttgggtctttgaagtgtttgatagatactgagtttgaatctaccaaaatcaattcataaaaagttcttgtcttcaggatggtggttggtttgtagtgaaatcctggtgggaaagccttggccgtcgccttgaagggatttttgtcccaaaattcaggttccatctgcaaaacagttaacaatttatttttataaatataattgttagtttgtttggtaggtggtgtttgggctttggctaaaggtagttttcctttagtattggtggctgttttggtcattgacgcattttggatcattgtttgtaaatttgattcagattcatcatcagattctgaggcaatgtctgccca

SEQ ID NO: 11995 - DNA, 1104 bp, Glycine max
  Gm_smallRNAprecursor_4828
ttcggcagaacttgtttcttccttctttgaggatgaagcttcttcttcttgttgtaacatttgtagaacttccttcagatttttagctaagacctcctttgatgtcgatcctgctaaaaatgctgccagatgagacttttggttcaaaaacacagaagtctctggatcagccgctttgaggaattctggatgggatttgaaccatagttttacttgttctggatccgctttggatgagtcaaattgtgtccaccattttacaaatgcgtgtctttgtagtgatggatattgatttgtcttttcagtcttgctgtaacgatattgccatgagaatatccatgacagtgcaaagcttgaaaagtatttaagatctgctggaattcgtcattcctgcgaattgtattgtttcttaaattgggaaaatccttgttggaccgtttctgggaatatctctgggatgggtccaaagaagtcccaccattgcaaaaaccaattgggaaaattgtaaattgtgttggtcttgaaatatatcagccatgaatgcttgaagcgggtattttggtgccaaaacaccttagtccaagcatcaacgtaatcccaataggtataacctaccggatcaaatggaactgagaatctctttcctttgttcaagtccgaaccaaagtgtcttggttgaagaacttttagtatttggatggttgagtgggtgtttaaggtttggtcttttgggtctttgaagtgtttgatagatactgagtttgaatctaccaaaatcaattcataaaaagttcttgtcttcaggatggtggttggtttgtagtgaaatcctggtgggaaagccttggccgtcgccttgaagggatttttgtcccaaaattcaggttccatctgcaaaacagttaacaatttatttttataaatataattgttagtttgtttggtaggtggtgtttgggctttggctaaaggtagttttcctttagtattggtggctgttttggtcattgacgcattttggatcattgtttgtaaatttgattcagattcatcatcagattctgaggcaatgtctgcccaagattttttgattatttttggaaa

SEQ ID NO: 11996 - DNA, 1107 bp, Glycine max
  Gm_smallRNAprecursor_4829
gtagaacttccttcagatttttagctaagacctcctttgatgtcgatcctgctaaaaatgctgccagatgagacttttggttcaaaaacacagaagtctctggatcagccgctttgaggaattctggatgggatttgaaccatagttttacttgttctggatccgctttggatgagtcaaattgtgtccaccattttacaaatgcgtgtctttgtagtgatggatattgatttgtcttttcagtcttgctgtaacgatattgccatgagaatatccatgacagtgcaaagcttgaaaagtatttaagatctgctggaattcgtcattcctgcgaattgtattgtttcttaaattgggaaaatccttgttggaccgtttctgggaatatctctgggatgggtccaaagaagtcccaccattgcaaaaaccaattgggaaaattgtaaattgtgttggtcttgaaatatatcagccatgaatgcttgaagcgggtattttggtgccaaaacaccttagtccaagcatcaacgtaatcccaataggtataacctaccggatcaaatggaactgagaatctctttcctttgttcaagtccgaaccaaagtgtcttggttgaagaacttttagtatttggatggttgagtgggtgtttaaggtttggtcttttgggtctttgaagtgtttgatagatactgagtttgaatctaccaaaatcaattcataaaaagttcttgtcttcaggatggtggttggtttgtagtgaaatcctggtgggaaagccttggccgtcgccttgaagggatttttgtcccaaaattcaggttccatctgcaaaacagttaacaatttatttttataaatataattgttagtttgtttggtaggtggtgtttgggctttggctaaaggtagttttcctttagtattggtggctgttttggtcattgacgcattttggatcattgtttgtaaatttgattcagattcatcatcagattctgaggcaatgtctgcccaagattttttgattatttttggaaatttggtcagacccatgtcttgaagggcctgaagggtttcaattggccaagcatagtcggccgatg

SEQ ID NO: 11997 - DNA, 1107 bp, Glycine max; identical to SEQ ID NO: 11996
  Gm_smallRNAprecursor_4830

SEQ ID NO: 11998 - DNA, 1108 bp, Glycine max
  Gm_smallRNAprecursor_4831
gtagaacttccttcagatttttagctaagacctcctttgatgtcgatcctgctaaaaatgctgccagatgagacttttggttcaaaaacacagaagtctctggatcagccgctttgaggaattctggatgggatttgaaccatagttttacttgttctggatccgctttggatgagtcaaattgtgtccaccattttacaaatgcgtgtctttgtagtgatggatattgatttgtcttttcagtcttgctgtaacgatattgccatgagaatatccatgacagtgcaaagcttgaaaagtatttaagatctgctggaattcgtcattcctgcgaattgtattgtttcttaaattgggaaaatccttgttggaccgtttctgggaatatctctgggatgggtccaaagaagtcccaccattgcaaaaaccaattgggaaaattgtaaattgtgttggtcttgaaatatatcagccatgaatgcttgaagcgggtattttggtgccaaaacaccttagtccaagcatcaacgtaatcccaataggtataacctaccggatcaaatggaactgagaatctctttcctttgttcaagtccgaaccaaagtgtcttggttgaagaacttttagtatttggatggttgagtgggtgtttaaggtttggtcttttgggtctttgaagtgtttgatagatactgagtttgaatctaccaaaatcaattcataaaaagttcttgtcttcaggatggtggttggtttgtagtgaaatcctggtgggaaagccttggccgtcgccttgaagggatttttgtcccaaaattcaggttccatctgcaaaacagttaacaatttatttttataaatataattgttagtttgtttggtaggtggtgtttgggctttggctaaaggtagttttcctttagtattggtggctgttttggtcattgacgcattttggatcattgtttgtaaatttgattcagattcatcatcagattctgaggcaatgtctgcccaagattttttgattatttttggaaatttggtcagacccatgtcttgaagggcctgaagggtttcaattggccaagcatagtcggccgatgt

SEQ ID NO: 11999 - DNA, 1101 bp, Glycine max
  Gm_smallRNAprecursor_4832
gaacttccttcagatttttagctaagacctcctttgatgtcgatcctgctaaaaatgctgccagatgagacttttggttcaaaaacacagaagtctctggatcagccgctttgaggaattctggatgggatttgaaccatagttttacttgttctggatccgctttggatgagtcaaattgtgtccaccattttacaaatgcgtgtctttgtagtgatggatattgatttgtcttttcagtcttgctgtaacgatattgccatgagaatatccatgacagtgcaaagcttgaaaagtatttaagatctgctggaattcgtcattcctgcgaattgtattgtttcttaaattgggaaaatccttgttggaccgtttctgggaatatctctgggatgggtccaaagaagtcccaccattgcaaaaaccaattgggaaaattgtaaattgtgttggtcttgaaatatatcagccatgaatgcttgaagcgggtattttggtgccaaaacaccttagtccaagcatcaacgtaatcccaataggtataacctaccggatcaaatggaactgagaatctctttcctttgttcaagtccgaaccaaagtgtcttggttgaagaacttttagtatttggatggttgagtgggtgtttaaggtttggtcttttgggtctttgaagtgtttgatagatactgagtttgaatctaccaaaatcaattcataaaaagttcttgtcttcaggatggtggttggtttgtagtgaaatcctggtgggaaagccttggccgtcgccttgaagggatttttgtcccaaaattcaggttccatctgcaaaacagttaacaatttatttttataaatataattgttagtttgtttggtaggtggtgtttgggctttggctaaaggtagttttcctttagtattggtggctgttttggtcattgacgcattttggatcattgtttgtaaatttgattcagattcatcatcagattctgaggcaatgtctgcccaagattttttgattatttttggaaatttggtcagacccatgtcttgaagggcctgaagggtttcaattggccaagcatagtcggccg

SEQ ID NO: 12000 - DNA, 1134 bp, Glycine max
  Gm_smallRNAprecursor_4833
acttccttcagatttttagctaagacctcctttgatgtcgatcctgctaaaaatgctgccagatgagacttttggttcaaaaacacagaagtctctggatcagccgctttgaggaattctggatgggatttgaaccatagttttacttgttctggatccgctttggatgagtcaaattgtgtccaccattttacaaatgcgtgtctttgtagtgatggatattgatttgtcttttcagtcttgctgtaacgatattgccatgagaatatccatgacagtgcaaagcttgaaaagtatttaagatctgctggaattcgtcattcctgcgaattgtattgtttcttaaattgggaaaatccttgttggaccgtttctgggaatatctctgggatgggtccaaagaagtcccaccattgcaaaaaccaattgggaaaattgtaaattgtgttggtcttgaaatatatcagccatgaatgcttgaagcgggtattttggtgccaaaacaccttagtccaagcatcaacgtaatcccaataggtataacctaccggatcaaatggaactgagaatctctttcctttgttcaagtccgaaccaaagtgtcttggttgaagaacttttagtatttggatggttgagtgggtgtttaaggtttggtcttttgggtctttgaagtgtttgatagatactgagtttgaatctaccaaaatcaattcataaaaagttcttgtcttcaggatggtggttggtttgtagtgaaatcctggtgggaaagccttggccgtcgccttgaagggatttttgtcccaaaattcaggttccatctgcaaaacagttaacaatttatttttataaatataattgttagtttgtttggtaggtggtgtttgggctttggctaaaggtagttttcctttagtattggtggctgttttggtcattgacgcattttggatcattgtttgtaaatttgattcagattcatcatcagattctgaggcaatgtctgcccaagattttttgattatttttggaaatttggtcagacccatgtcttgaagggcctgaagggtttcaattggccaagcatagtcggccgatgtttgtttggcggttgccggtttgggagattcc

SEQ ID NO: 12001 - DNA, 1090 bp, Glycine max
  Gm_smallRNAprecursor_4834
gtcgatcctgctaaaaatgctgccagatgagacttttggttcaaaaacacagaagtctctggatcagccgctttgaggaattctggatgggatttgaaccatagttttacttgttctggatccgctttggatgagtcaaattgtgtccaccattttacaaatgcgtgtctttgtagtgatggatattgatttgtcttttcagtcttgctgtaacgatattgccatgagaatatccatgacagtgcaaagcttgaaaagtatttaagatctgctggaattcgtcattcctgcgaattgtattgtttcttaaattgggaaaatccttgttggaccgtttctgggaatatctctgggatgggtccaaagaagtcccaccattgcaaaaaccaattgggaaaattgtaaattgtgttggtcttgaaatatatcagccatgaatgcttgaagcgggtattttggtgccaaaacaccttagtccaagcatcaacgtaatcccaataggtataacctaccggatcaaatggaactgagaatctctttcctttgttcaagtccgaaccaaagtgtcttggttgaagaacttttagtatttggatggttgagtgggtgtttaaggtttggtcttttgggtctttgaagtgtttgatagatactgagtttgaatctaccaaaatcaattcataaaaagttcttgtcttcaggatggtggttggtttgtagtgaaatcctggtgggaaagccttggccgtcgccttgaagggatttttgtcccaaaattcaggttccatctgcaaaacagttaacaatttatttttataaatataattgttagtttgtttggtaggtggtgtttgggctttggctaaaggtagttttcctttagtattggtggctgttttggtcattgacgcattttggatcattgtttgtaaatttgattcagattcatcatcagattctgaggcaatgtctgcccaagattttttgattatttttggaaatttggtcagacccatgtcttgaagggcctgaagggtttcaattggccaagcatagtcggccgatgtttgtttggcggttgccggtttgg

SEQ ID NO: 12002 - DNA, 1087 bp, Glycine max
  Gm_smallRNAprecursor_4835
gatcctgctaaaaatgctgccagatgagacttttggttcaaaaacacagaagtctctggatcagccgctttgaggaattctggatgggatttgaaccatagttttacttgttctggatccgctttggatgagtcaaattgtgtccaccattttacaaatgcgtgtctttgtagtgatggatattgatttgtcttttcagtcttgctgtaacgatattgccatgagaatatccatgacagtgcaaagcttgaaaagtatttaagatctgctggaattcgtcattcctgcgaattgtattgtttcttaaattgggaaaatccttgttggaccgtttctgggaatatctctgggatgggtccaaagaagtcccaccattgcaaaaaccaattgggaaaattgtaaattgtgttggtcttgaaatatatcagccatgaatgcttgaagcgggtattttggtgccaaaacaccttagtccaagcatcaacgtaatcccaataggtataacctaccggatcaaatggaactgagaatctctttcctttgttcaagtccgaaccaaagtgtcttggttgaagaacttttagtatttggatggttgagtgggtgtttaaggtttggtcttttgggtctttgaagtgtttgatagatactgagtttgaatctaccaaaatcaattcataaaaagttcttgtcttcaggatggtggttggtttgtagtgaaatcctggtgggaaagccttggccgtcgccttgaagggatttttgtcccaaaattcaggttccatctgcaaaacagttaacaatttatttttataaatataattgttagtttgtttggtaggtggtgtttgggctttggctaaaggtagttttcctttagtattggtggctgttttggtcattgacgcattttggatcattgtttgtaaatttgattcagattcatcatcagattctgaggcaatgtctgcccaagattttttgattatttttggaaatttggtcagacccatgtcttgaagggcctgaagggtttcaattggccaagcatagtcggccgatgtttgtttggcggttgccggtttgg

SEQ ID NO: 12003 - DNA, 1189 bp, Glycine max
  Gm_smallRNAprecursor_4836
acacagaagtctctggatcagccgctttgaggaattctggatgggatttgaaccatagttttacttgttctggatccgctttggatgagtcaaattgtgtccaccattttacaaatgcgtgtctttgtagtgatggatattgatttgtcttttcagtcttgctgtaacgatattgccatgagaatatccatgacagtgcaaagcttgaaaagtatttaagatctgctggaattcgtcattcctgcgaattgtattgtttcttaaattgggaaaatccttgttggaccgtttctgggaatatctctgggatgggtccaaagaagtcccaccattgcaaaaaccaattgggaaaattgtaaattgtgttggtcttgaaatatatcagccatgaatgcttgaagcgggtattttggtgccaaaacaccttagtccaagcatcaacgtaatcccaataggtataacctaccggatcaaatggaactgagaatctctttcctttgttcaagtccgaaccaaagtgtcttggttgaagaacttttagtatttggatggttgagtgggtgtttaaggtttggtcttttgggtctttgaagtgtttgatagatactgagtttgaatctaccaaaatcaattcataaaaagttcttgtcttcaggatggtggttggtttgtagtgaaatcctggtgggaaagccttggccgtcgccttgaagggatttttgtcccaaaattcaggttccatctgcaaaacagttaacaatttatttttataaatataattgttagtttgtttggtaggtggtgtttgggctttggctaaaggtagttttcctttagtattggtggctgttttggtcattgacgcattttggatcattgtttgtaaatttgattcagattcatcatcagattctgaggcaatgtctgcccaagattttttgattatttttggaaatttggtcagacccatgtcttgaagggcctgaagggtttcaattggccaagcatagtcggccgatgtttgtttggcggttgccggtttgggagattcctgagtggatggctcaggtttgattgaggcaatctgggttgatgacccttctaagttggttttctgggtagatgacccagcctgggttggtgacccagaagaggtagatgatttcttcatggttggttctggaagagc

SEQ ID NO: 12004 - DNA, 1224 bp, Glycine max
  Gm_smallRNAprecursor_4837
cgctttgaggaattctggatgggatttgaaccatagttttacttgttctggatccgctttggatgagtcaaattgtgtccaccattttacaaatgcgtgtctttgtagtgatggatattgatttgtcttttcagtcttgctgtaacgatattgccatgagaatatccatgacagtgcaaagcttgaaaagtatttaagatctgctggaattcgtcattcctgcgaattgtattgtttcttaaattgggaaaatccttgttggaccgtttctgggaatatctctgggatgggtccaaagaagtcccaccattgcaaaaaccaattgggaaaattgtaaattgtgttggtcttgaaatatatcagccatgaatgcttgaagcgggtattttggtgccaaaacaccttagtccaagcatcaacgtaatcccaataggtataacctaccggatcaaatggaactgagaatctctttcctttgttcaagtccgaaccaaagtgtcttggttgaagaacttttagtatttggatggttgagtgggtgtttaaggtttggtcttttgggtctttgaagtgtttgatagatactgagtttgaatctaccaaaatcaattcataaaaagttcttgtcttcaggatggtggttggtttgtagtgaaatcctggtgggaaagccttggccgtcgccttgaagggatttttgtcccaaaattcaggttccatctgcaaaacagttaacaatttatttttataaatataattgttagtttgtttggtaggtggtgtttgggctttggctaaaggtagttttcctttagtattggtggctgttttggtcattgacgcattttggatcattgtttgtaaatttgattcagattcatcatcagattctgaggcaatgtctgcccaagattttttgattatttttggaaatttggtcagacccatgtcttgaagggcctgaagggtttcaattggccaagcatagtcggccgatgtttgtttggcggttgccggtttgggagattcctgagtggatggctcaggtttgattgaggcaatctgggttgatgacccttctaagttggttttctgggtagatgacccagcctgggttggtgacccagaagaggtagatgatttcttcatggttggttctggaagagccagcctggctcctttgcctgtactccttcctccccgtagggagattcccgatgcctt

SEQ ID NO: 12005 - DNA, 1222 bp, Glycine max
  Gm_smallRNAprecursor_4838
ctttgaggaattctggatgggatttgaaccatagttttacttgttctggatccgctttggatgagtcaaattgtgtccaccattttacaaatgcgtgtctttgtagtgatggatattgatttgtcttttcagtcttgctgtaacgatattgccatgagaatatccatgacagtgcaaagcttgaaaagtatttaagatctgctggaattcgtcattcctgcgaattgtattgtttcttaaattgggaaaatccttgttggaccgtttctgggaatatctctgggatgggtccaaagaagtcccaccattgcaaaaaccaattgggaaaattgtaaattgtgttggtcttgaaatatatcagccatgaatgcttgaagcgggtattttggtgccaaaacaccttagtccaagcatcaacgtaatcccaataggtataacctaccggatcaaatggaactgagaatctctttcctttgttcaagtccgaaccaaagtgtcttggttgaagaacttttagtatttggatggttgagtgggtgtttaaggtttggtcttttgggtctttgaagtgtttgatagatactgagtttgaatctaccaaaatcaattcataaaaagttcttgtcttcaggatggtggttggtttgtagtgaaatcctggtgggaaagccttggccgtcgccttgaagggatttttgtcccaaaattcaggttccatctgcaaaacagttaacaatttatttttataaatataattgttagtttgtttggtaggtggtgtttgggctttggctaaaggtagttttcctttagtattggtggctgttttggtcattgacgcattttggatcattgtttgtaaatttgattcagattcatcatcagattctgaggcaatgtctgcccaagattttttgattatttttggaaatttggtcagacccatgtcttgaagggcctgaagggtttcaattggccaagcatagtcggccgatgtttgtttggcggttgccggtttgggagattcctgagtggatggctcaggtttgattgaggcaatctgggttgatgacccttctaagttggttttctgggtagatgacccagcctgggttggtgacccagaagaggtagatgatttcttcatggttggttctggaagagccagcctggctcctttgcctgtactccttcctccccgtagggagattcccgatgcctt

SEQ ID NO: 12006 - DNA, 1193 bp, Glycine max
  Gm_smallRNAprecursor_4839
accatagttttacttgttctggatccgctttggatgagtcaaattgtgtccaccattttacaaatgcgtgtctttgtagtgatggatattgatttgtcttttcagtcttgctgtaacgatattgccatgagaatatccatgacagtgcaaagcttgaaaagtatttaagatctgctggaattcgtcattcctgcgaattgtattgtttcttaaattgggaaaatccttgttggaccgtttctgggaatatctctgggatgggtccaaagaagtcccaccattgcaaaaaccaattgggaaaattgtaaattgtgttggtcttgaaatatatcagccatgaatgcttgaagcgggtattttggtgccaaaacaccttagtccaagcatcaacgtaatcccaataggtataacctaccggatcaaatggaactgagaatctctttcctttgttcaagtccgaaccaaagtgtcttggttgaagaacttttagtatttggatggttgagtgggtgtttaaggtttggtcttttgggtctttgaagtgtttgatagatactgagtttgaatctaccaaaatcaattcataaaaagttcttgtcttcaggatggtggttggtttgtagtgaaatcctggtgggaaagccttggccgtcgccttgaagggatttttgtcccaaaattcaggttccatctgcaaaacagttaacaatttatttttataaatataattgttagtttgtttggtaggtggtgtttgggctttggctaaaggtagttttcctttagtattggtggctgttttggtcattgacgcattttggatcattgtttgtaaatttgattcagattcatcatcagattctgaggcaatgtctgcccaagattttttgattatttttggaaatttggtcagacccatgtcttgaagggcctgaagggtttcaattggccaagcatagtcggccgatgtttgtttggcggttgccggtttgggagattcctgagtggatggctcaggtttgattgaggcaatctgggttgatgacccttctaagttggttttctgggtagatgacccagcctgggttggtgacccagaagaggtagatgatttcttcatggttggttctggaagagccagcctggctcctttgcctgtactccttcctccccgtagggagattcccgatgcc

SEQ ID NO: 12007 - DNA, 1195 bp, Glycine max
  Gm_smallRNAprecursor_4840
accatagttttacttgttctggatccgctttggatgagtcaaattgtgtccaccattttacaaatgcgtgtctttgtagtgatggatattgatttgtcttttcagtcttgctgtaacgatattgccatgagaatatccatgacagtgcaaagcttgaaaagtatttaagatctgctggaattcgtcattcctgcgaattgtattgtttcttaaattgggaaaatccttgttggaccgtttctgggaatatctctgggatgggtccaaagaagtcccaccattgcaaaaaccaattgggaaaattgtaaattgtgttggtcttgaaatatatcagccatgaatgcttgaagcgggtattttggtgccaaaacaccttagtccaagcatcaacgtaatcccaataggtataacctaccggatcaaatggaactgagaatctctttcctttgttcaagtccgaaccaaagtgtcttggttgaagaacttttagtatttggatggttgagtgggtgtttaaggtttggtcttttgggtctttgaagtgtttgatagatactgagtttgaatctaccaaaatcaattcataaaaagttcttgtcttcaggatggtggttggtttgtagtgaaatcctggtgggaaagccttggccgtcgccttgaagggatttttgtcccaaaattcaggttccatctgcaaaacagttaacaatttatttttataaatataattgttagtttgtttggtaggtggtgtttgggctttggctaaaggtagttttcctttagtattggtggctgttttggtcattgacgcattttggatcattgtttgtaaatttgattcagattcatcatcagattctgaggcaatgtctgcccaagattttttgattatttttggaaatttggtcagacccatgtcttgaagggcctgaagggtttcaattggccaagcatagtcggccgatgtttgtttggcggttgccggtttgggagattcctgagtggatggctcaggtttgattgaggcaatctgggttgatgacccttctaagttggttttctgggtagatgacccagcctgggttggtgacccagaagaggtagatgatttcttcatggttggttctggaagagccagcctggctcctttgcctgtactccttcctccccgtagggagattcccgatgcctt

SEQ ID NO: 12008 - DNA, 1058 bp, Glycine max
  Gm_smallRNAprecursor_4841
tacttgttctggatccgctttggatgagtcaaattgtgtccaccattttacaaatgcgtgtctttgtagtgatggatattgatttgtcttttcagtcttgctgtaacgatattgccatgagaatatccatgacagtgcaaagcttgaaaagtatttaagatctgctggaattcgtcattcctgcgaattgtattgtttcttaaattgggaaaatccttgttggaccgtttctgggaatatctctgggatgggtccaaagaagtcccaccattgcaaaaaccaattgggaaaattgtaaattgtgttggtcttgaaatatatcagccatgaatgcttgaagcgggtattttggtgccaaaacaccttagtccaagcatcaacgtaatcccaataggtataacctaccggatcaaatggaactgagaatctctttcctttgttcaagtccgaaccaaagtgtcttggttgaagaacttttagtatttggatggttgagtgggtgtttaaggtttggtcttttgggtctttgaagtgtttgatagatactgagtttgaatctaccaaaatcaattcataaaaagttcttgtcttcaggatggtggttggtttgtagtgaaatcctggtgggaaagccttggccgtcgccttgaagggatttttgtcccaaaattcaggttccatctgcaaaacagttaacaatttatttttataaatataattgttagtttgtttggtaggtggtgtttgggctttggctaaaggtagttttcctttagtattggtggctgttttggtcattgacgcattttggatcattgtttgtaaatttgattcagattcatcatcagattctgaggcaatgtctgcccaagattttttgattatttttggaaatttggtcagacccatgtcttgaagggcctgaagggtttcaattggccaagcatagtcggccgatgtttgtttggcggttgccggtttgggagattcctgagtggatggctcaggtttgattgaggcaatctgggttgatgacccttctaagttggttttctggg

SEQ ID NO: 12009 - DNA, 1176 bp, Glycine max
  Gm_smallRNAprecursor_4842
tacttgttctggatccgctttggatgagtcaaattgtgtccaccattttacaaatgcgtgtctttgtagtgatggatattgatttgtcttttcagtcttgctgtaacgatattgccatgagaatatccatgacagtgcaaagcttgaaaagtatttaagatctgctggaattcgtcattcctgcgaattgtattgtttcttaaattgggaaaatccttgttggaccgtttctgggaatatctctgggatgggtccaaagaagtcccaccattgcaaaaaccaattgggaaaattgtaaattgtgttggtcttgaaatatatcagccatgaatgcttgaagcgggtattttggtgccaaaacaccttagtccaagcatcaacgtaatcccaataggtataacctaccggatcaaatggaactgagaatctctttcctttgttcaagtccgaaccaaagtgtcttggttgaagaacttttagtatttggatggttgagtgggtgtttaaggtttggtcttttgggtctttgaagtgtttgatagatactgagtttgaatctaccaaaatcaattcataaaaagttcttgtcttcaggatggtggttggtttgtagtgaaatcctggtgggaaagccttggccgtcgccttgaagggatttttgtcccaaaattcaggttccatctgcaaaacagttaacaatttatttttataaatataattgttagtttgtttggtaggtggtgtttgggctttggctaaaggtagttttcctttagtattggtggctgttttggtcattgacgcattttggatcattgtttgtaaatttgattcagattcatcatcagattctgaggcaatgtctgcccaagattttttgattatttttggaaatttggtcagacccatgtcttgaagggcctgaagggtttcaattggccaagcatagtcggccgatgtttgtttggcggttgccggtttgggagattcctgagtggatggctcaggtttgattgaggcaatctgggttgatgacccttctaagttggttttctgggtagatgacccagcctgggttggtgacccagaagaggtagatgatttcttcatggttggttctggaagagccagcctggctcctttgcctgtactccttcctccccgtagggagattcc

SEQ ID NO: 12010 - DNA, 1183 bp, Glycine max
  Gm_smallRNAprecursor_4843
tacttgttctggatccgctttggatgagtcaaattgtgtccaccattttacaaatgcgtgtctttgtagtgatggatattgatttgtcttttcagtcttgctgtaacgatattgccatgagaatatccatgacagtgcaaagcttgaaaagtatttaagatctgctggaattcgtcattcctgcgaattgtattgtttcttaaattgggaaaatccttgttggaccgtttctgggaatatctctgggatgggtccaaagaagtcccaccattgcaaaaaccaattgggaaaattgtaaattgtgttggtcttgaaatatatcagccatgaatgcttgaagcgggtattttggtgccaaaacaccttagtccaagcatcaacgtaatcccaataggtataacctaccggatcaaatggaactgagaatctctttcctttgttcaagtccgaaccaaagtgtcttggttgaagaacttttagtatttggatggttgagtgggtgtttaaggtttggtcttttgggtctttgaagtgtttgatagatactgagtttgaatctaccaaaatcaattcataaaaagttcttgtcttcaggatggtggttggtttgtagtgaaatcctggtgggaaagccttggccgtcgccttgaagggatttttgtcccaaaattcaggttccatctgcaaaacagttaacaatttatttttataaatataattgttagtttgtttggtaggtggtgtttgggctttggctaaaggtagttttcctttagtattggtggctgttttggtcattgacgcattttggatcattgtttgtaaatttgattcagattcatcatcagattctgaggcaatgtctgcccaagattttttgattatttttggaaatttggtcagacccatgtcttgaagggcctgaagggtttcaattggccaagcatagtcggccgatgtttgtttggcggttgccggtttgggagattcctgagtggatggctcaggtttgattgaggcaatctgggttgatgacccttctaagttggttttctgggtagatgacccagcctgggttggtgacccagaagaggtagatgatttcttcatggttggttctggaagagccagcctggctcctttgcctgtactccttcctccccgtagggagattcccgatgcc

SEQ ID NO: 12011 - DNA, 1098 bp, Glycine max
  Gm_smallRNAprecursor_4844
gtgtctttgtagtgatggatattgatttgtcttttcagtcttgctgtaacgatattgccatgagaatatccatgacagtgcaaagcttgaaaagtatttaagatctgctggaattcgtcattcctgcgaattgtattgtttcttaaattgggaaaatccttgttggaccgtttctgggaatatctctgggatgggtccaaagaagtcccaccattgcaaaaaccaattgggaaaattgtaaattgtgttggtcttgaaatatatcagccatgaatgcttgaagcgggtattttggtgccaaaacaccttagtccaagcatcaacgtaatcccaataggtataacctaccggatcaaatggaactgagaatctctttcctttgttcaagtccgaaccaaagtgtcttggttgaagaacttttagtatttggatggttgagtgggtgtttaaggtttggtcttttgggtctttgaagtgtttgatagatactgagtttgaatctaccaaaatcaattcataaaaagttcttgtcttcaggatggtggttggtttgtagtgaaatcctggtgggaaagccttggccgtcgccttgaagggatttttgtcccaaaattcaggttccatctgcaaaacagttaacaatttatttttataaatataattgttagtttgtttggtaggtggtgtttgggctttggctaaaggtagttttcctttagtattggtggctgttttggtcattgacgcattttggatcattgtttgtaaatttgattcagattcatcatcagattctgaggcaatgtctgcccaagattttttgattatttttggaaatttggtcagacccatgtcttgaagggcctgaagggtttcaattggccaagcatagtcggccgatgtttgtttggcggttgccggtttgggagattcctgagtggatggctcaggtttgattgaggcaatctgggttgatgacccttctaagttggttttctgggtagatgacccagcctgggttggtgacccagaagaggtagatgatttcttcatggttggttctggaagagccagcctggctcctttgcctgtactcct

SEQ ID NO: 12012 - DNA, 1098 bp, Glycine max
  Gm_smallRNAprecursor_4845
ttgatttgtcttttcagtcttgctgtaacgatattgccatgagaatatccatgacagtgcaaagcttgaaaagtatttaagatctgctggaattcgtcattcctgcgaattgtattgtttcttaaattgggaaaatccttgttggaccgtttctgggaatatctctgggatgggtccaaagaagtcccaccattgcaaaaaccaattgggaaaattgtaaattgtgttggtcttgaaatatatcagccatgaatgcttgaagcgggtattttggtgccaaaacaccttagtccaagcatcaacgtaatcccaataggtataacctaccggatcaaatggaactgagaatctctttcctttgttcaagtccgaaccaaagtgtcttggttgaagaacttttagtatttggatggttgagtgggtgtttaaggtttggtcttttgggtctttgaagtgtttgatagatactgagtttgaatctaccaaaatcaattcataaaaagttcttgtcttcaggatggtggttggtttgtagtgaaatcctggtgggaaagccttggccgtcgccttgaagggatttttgtcccaaaattcaggttccatctgcaaaacagttaacaatttatttttataaatataattgttagtttgtttggtaggtggtgtttgggctttggctaaaggtagttttcctttagtattggtggctgttttggtcattgacgcattttggatcattgtttgtaaatttgattcagattcatcatcagattctgaggcaatgtctgcccaagattttttgattatttttggaaatttggtcagacccatgtcttgaagggcctgaagggtttcaattggccaagcatagtcggccgatgtttgtttggcggttgccggtttgggagattcctgagtggatggctcaggtttgattgaggcaatctgggttgatgacccttctaagttggttttctgggtagatgacccagcctgggttggtgacccagaagaggtagatgatttcttcatggttggttctggaagagccagcctggctcctttgcctgtactccttcctccccgtagggagattcc

SEQ ID NO: 12013 - DNA, 1090 bp, Glycine max
  Gm_smallRNAprecursor_4846
gcgaattgtattgtttcttaaattgggaaaatccttgttggaccgtttctgggaatatctctgggatgggtccaaagaagtcccaccattgcaaaaaccaattgggaaaattgtaaattgtgttggtcttgaaatatatcagccatgaatgcttgaagcgggtattttggtgccaaaacaccttagtccaagcatcaacgtaatcccaataggtataacctaccggatcaaatggaactgagaatctctttcctttgttcaagtccgaaccaaagtgtcttggttgaagaacttttagtatttggatggttgagtgggtgtttaaggtttggtcttttgggtctttgaagtgtttgatagatactgagtttgaatctaccaaaatcaattcataaaaagttcttgtcttcaggatggtggttggtttgtagtgaaatcctggtgggaaagccttggccgtcgccttgaagggatttttgtcccaaaattcaggttccatctgcaaaacagttaacaatttatttttataaatataattgttagtttgtttggtaggtggtgtttgggctttggctaaaggtagttttcctttagtattggtggctgttttggtcattgacgcattttggatcattgtttgtaaatttgattcagattcatcatcagattctgaggcaatgtctgcccaagattttttgattatttttggaaatttggtcagacccatgtcttgaagggcctgaagggtttcaattggccaagcatagtcggccgatgtttgtttggcggttgccggtttgggagattcctgagtggatggctcaggtttgattgaggcaatctgggttgatgacccttctaagttggttttctgggtagatgacccagcctgggttggtgacccagaagaggtagatgatttcttcatggttggttctggaagagccagcctggctcctttgcctgtactccttcctccccgtagggagattcccgatgccttaggaggcattaccacttttctgtaagaattcacgggtaaggtagtcaggtagtgaatttgaggtgcccttgatgtattctatgtcaa

SEQ ID NO: 12014 - DNA, 1247 bp, Glycine max
  Gm_smallRNAprecursor_4847
agatgatttcttcatggttggttctggaagagccagcctggctcctttgcctgtactccttcctccccgtagggagattcccgatgccttaggaggcattaccacttttctgtaagaattcacgggtaaggtagtcaggtagtgaatttgaggtgcccttgatgtattctatgtcaaaatcaaagacacttaaaattgcttgccatcgtgcaaaaatttgttttgaggcaaggtttttaacatctttttgtaaaatatctttggctgatttacaatcaaccctgattaaaaaattttggtttaataaatctgattggaatttggaaatgcacaaaacaattgctaaaacttcttttttaacagttgaatattttaattgcgcaggattccaatgttttgatgtatatgcaatgacatgatcttggccatggactctttgtttgaggatgccaccataacctatgtctgaagcatcagtttcgacaattttaaatgcctgtggaataggaagatacagacatttaatggattggactttgactttgatttctttaaccgtttgtgtatggaggtcagtccaaggaggcggatttttcttcagcctatcatgtaatggcttgacaatattatttaaataggggacaaattctcctacgtaatttagacaacctagaaatctttgtaactgggttttgtctaagatttggttggggaatttgctagcaaactctattgacctttcgattggaatgattgtaccttgatatatattgtgaccaaggaattgaattcgagtttagaaaaaaatgatttttgatttggagactattttgatttggagactgccaaaccattttgtttgatgatatgtatgaaggtttggagatgtttgaaatgttggtcaatgttttgggaaaagattaaaacatcatctatgtagacaatgacaaattttgaatagggattaaaaatatcgttcataattttttgaaattctgaaggggcattcttcagtccgaatggcatcacgttccattcatattgcccgaaaggtacagtaaacgttgttttgtacctatctgattcttggatctggatttgccaaaatccagatttcatatcaaattttgagaatatctttgcagaatttaatctgttaagaaaatcttttttttttggaataggatatctaatccattgtaatgcttgatttaatggtttgtaatttatgactaagcggagtgttc

SEQ ID NO: 12015 - DNA, 1246 bp, Glycine max
  Gm_smallRNAprecursor_4848
gatgatttcttcatggttggttctggaagagccagcctggctcctttgcctgtactccttcctccccgtagggagattcccgatgccttaggaggcattaccacttttctgtaagaattcacgggtaaggtagtcaggtagtgaatttgaggtgcccttgatgtattctatgtcaaaatcaaagacacttaaaattgcttgccatcgtgcaaaaatttgttttgaggcaaggtttttaacatctttttgtaaaatatctttggctgatttacaatcaaccctgattaaaaaattttggtttaataaatctgattggaatttggaaatgcacaaaacaattgctaaaacttcttttttaacagttgaatattttaattgcgcaggattccaatgttttgatgtatatgcaatgacatgatcttggccatggactctttgtttgaggatgccaccataacctatgtctgaagcatcagtttcgacaattttaaatgcctgtggaataggaagatacagacatttaatggattggactttgactttgatttctttaaccgtttgtgtatggaggtcagtccaaggaggcggatttttcttcagcctatcatgtaatggcttgacaatattatttaaataggggacaaattctcctacgtaatttagacaacctagaaatctttgtaactgggttttgtctaagatttggttggggaatttgctagcaaactctattgacctttcgattggaatgattgtaccttgatatatattgtgaccaaggaattgaattcgagtttagaaaaaaatgatttttgatttggagactattttgatttggagactgccaaaccattttgtttgatgatatgtatgaaggtttggagatgtttgaaatgttggtcaatgttttgggaaaagattaaaacatcatctatgtagacaatgacaaattttgaatagggattaaaaatatcgttcataattttttgaaattctgaaggggcattcttcagtccgaatggcatcacgttccattcatattgcccgaaaggtacagtaaacgttgttttgtacctatctgattcttggatctggatttgccaaaatccagatttcatatcaaattttgagaatatctttgcagaatttaatctgttaagaaaatcttttttttttggaataggatatctaatccattgtaatgcttgatttaatggtttgtaatttatgactaagcggagtgttc

SEQ ID NO: 12016 - DNA, 1051 bp, Glycine max
  Gm_smallRNAprecursor_4849
actatttttttcattatttaatttatttgagatatttttggttgaatatttgttttaaaatctaaattttgtataataatatatttattttagaaaaaattttaaatattaaatttaattattttactaaatataattagtttgtttatgtcattagatttaattaaaaatgataaaactaaaacttttaataatttatttataaatgaatattatactgcattatcaataaaatatttaaacaatgacatttggctaaagaaaaatttaagatcaggatatattaggacaattgtttctgctatgaccatgttgccggcaaagtccaaattttttctacttgctcgttcattttcgtcttcgtccatcgcagtaggaatgcgatttgaaacgggacgaccatttgcagtcttcgttctccttggatcaggaccccactgatctccttcatattcttgccacattgattcatgtggcagtaaaccaaaggagttgtcgtagatgtgcaaaatgtgttgtaaagtgaataacatcggcacataggtcatgggatcaacattgacagatttacaggcagccatgacgtgagaacatggtaaatgtttagcctgatattcaccacaataacacttttgggattgtaacattactctaaatcttccaggtggtctgggtgtttcaagtggggattgagtctctattataatataagtgtgattgtgtctgtcgaattcatttacaatgtgtgtattagattcttgttgaccgctattcattgcatcgaagacgacttcagaatactatgagccggagttgatcattgcctgagtttgtcgacctctattagcaaagagttgtgcattcttgaaatacgtctcctcaaccaacgatgacaccgacaaatgtcttgtgtttttgaacatggaattaacagactccaacaaattggttgtcatatgttctcaacgtttcccctcatcgaagcattgtacccatttttgtttgggtaattgatcaagtcattcagctgcacttggcttattcgcacaat

SEQ ID NO: 12017 - DNA, 1167 bp, Glycine max
  Gm_smallRNAprecursor_4850
tgttttaaaatctaaattttgtataataatatatttattttagaaaaaattttaaatattaaatttaattattttactaaatataattagtttgtttatgtcattagatttaattaaaaatgataaaactaaaacttttaataatttatttataaatgaatattatactgcattatcaataaaatatttaaacaatgacatttggctaaagaaaaatttaagatcaggatatattaggacaattgtttctgctatgaccatgttgccggcaaagtccaaattttttctacttgctcgttcattttcgtcttcgtccatcgcagtaggaatgcgatttgaaacgggacgaccatttgcagtcttcgttctccttggatcaggaccccactgatctccttcatattcttgccacattgattcatgtggcagtaaaccaaaggagttgtcgtagatgtgcaaaatgtgttgtaaagtgaataacatcggcacataggtcatgggatcaacattgacagatttacaggcagccatgacgtgagaacatggtaaatgtttagcctgatattcaccacaataacacttttgggattgtaacattactctaaatcttccaggtggtctgggtgtttcaagtggggattgagtctctattataatataagtgtgattgtgtctgtcgaattcatttacaatgtgtgtattagattcttgttgaccgctattcattgcatcgaagacgacttcagaatactatgagccggagttgatcattgcctgagtttgtcgacctctattagcaaagagttgtgcattcttgaaatacgtctcctcaaccaacgatgacaccgacaaatgtcttgtgtttttgaacatggaattaacagactccaacaaattggttgtcatatgttctcaacgtttcccctcatcgaagcattgtacccatttttgtttgggtaattgatcaagtcattcagctgcacttggcttattcgcacaatatccccaagatgtcgccagtgcatcttctccgtgtatgcgtaacttgtaaattttcaatcaatgtattatgttataaaatttgattgaaagaaaattataacgaataaataaaatagattctcaccagccaacatgagtggtttctttaaatgtttgcagtttgag

SEQ ID NO: 12018 - DNA, 1040 bp, Glycine max
  Gm_smallRNAprecursor_4851
ttattcgcacaatatccccaagatgtcgccagtgcatcttctccgtgtatgcgtaacttgtaaattttcaatcaatgtattatgttataaaatttgattgaaagaaaattataacgaataaataaaatagattctcaccagccaacatgagtggtttctttaaatgtttgcagtttgagttactgcgaagaaagttttgtgcaatgtagcgcatgcaaaagaaatgggatgtgtcctggacccataagttacttggattgttgtaggaatttataattgagggatgtcggtctgaaataagagaaatgttaatttgcggagtaacatgtcttcttaaattctttagaaaaaaccccaagctgaagttgtctccccttctacaatggcaaaggcaattgggaagatatggttagctccatcttgtgcgatagctatcaatagtgtgccagtatacttcccgtaaagccacgtaccatctacttgtactatgggtttgtcatatgcaaaaccattaatgcatggactaaatgaccaaaagacacgtttaaacaatcttttgcccccttatacagggattttgtttgagcagcaccacagtcccgggaacacaagattacaaagctccgaaaagttttggcagtttggcatatgattcttcccagtttccatgaatcatctccaacgctctttgctttgctaaccatgtcttcttgtaggatggggtataatccatgaacgttttgatctctgcaatccacatcttgatggagacggttgggtttgttttgacaattagttagatgatctgtgctatgacatgttggttgagttggcgatgagcttgtctgagcatcggcacgagacaagtgtgatgatctctgatactcttgataatccatttgttatgcctctttgaattgcatgcgcccaagctccatgtacaaccattttcatgtaacttgcagacgaagtttagccttccctggtcagagtaaattgttccgcaatcaaaatgattttcgatgttgtattctttgatt

SEQ ID NO: 12019 - DNA, 1199 bp, Glycine max
  Gm_smallRNAprecursor_4852
ttttatatgctttattgttattaagacaaaggacaaatactgcaccctagttgtttttatttaacccagaattttattctacaaagcaaagtatttttcttaaatagaacattttatatgaaaagttttgaagtcagacacaaatcatactaagacatgaagtgattatatactaagaccctaattcttactccgctgacctctggtatcagagccagaggtcaacggagtaggatcacacggacaaataggaagtaagaatgcagtatgattgatgaaatgaaaatataaacttgaaaacagatataaagggcacaccggagaccggcttacaaaccccaggttttcataaacaaagaaaccgaagcggcggcagagccgcacaggatcggtgaagggagaagagagaaggatgaaaaatagaaatttattgaatctagaaagaagcgcttacaaaaatcttgtttcagagcacctctcttccgaaacctgaaaaatggctaaatgaaagggtgcctcacaacatgcttgaggactccttatatagccaaaaatctaagaccggtagttgccggtagttttgaccgagactatttgactatttgttacaagacaagtagttttgaccgggactttaatggctacaggacaggtagtattgtccagcattaattacacattaattacaaacagacggttttgtgaccgaaattaaatttaatctaaacagataccaaaacaatcatcttcgttttggtaaaagggatcttcttcgtcttcttcagcagaacttgtttcttccttctttgaggatgaagcttcttcttcctgttgtaacatttgtagaacttccttcagatttttagctaagacctcctttgatgtcgatcctgctaaaaatgctgccagatgagacttttggttcaaaaacacagaagtctctggatcagctgctttgaggaattctagatgggattggaaccatagttttacttgttctgcatccgctttggatgagtcaaattgtgtccaccattttacaaatgcgtgtctttgtagtgatggatattggtttgtctttttagtcttgctgtaacgatattgccatgagaatatccatgacagtgcaaagcttgaaaagtatttaagatctgctggaattcgtgattcctgcgaattgtattgtttcttaaattggg

SEQ ID NO: 12020 - DNA, 1061 bp, Glycine max
  Gm_smallRNAprecursor_4853
caacggagtaggatcacacggacaaataggaagtaagaatgcagtatgattgatgaaatgaaaatataaacttgaaaacagatataaagggcacaccggagaccggcttacaaaccccaggttttcataaacaaagaaaccgaagcggcggcagagccgcacaggatcggtgaagggagaagagagaaggatgaaaaatagaaatttattgaatctagaaagaagcgcttacaaaaatcttgtttcagagcacctctcttccgaaacctgaaaaatggctaaatgaaagggtgcctcacaacatgcttgaggactccttatatagccaaaaatctaagaccggtagttgccggtagttttgaccgagactatttgactatttgttacaagacaagtagttttgaccgggactttaatggctacaggacaggtagtattgtccagcattaattacacattaattacaaacagacggttttgtgaccgaaattaaatttaatctaaacagataccaaaacaatcatcttcgttttggtaaaagggatcttcttcgtcttcttcagcagaacttgtttcttccttctttgaggatgaagcttcttcttcctgttgtaacatttgtagaacttccttcagatttttagctaagacctcctttgatgtcgatcctgctaaaaatgctgccagatgagacttttggttcaaaaacacagaagtctctggatcagctgctttgaggaattctagatgggattggaaccatagttttacttgttctgcatccgctttggatgagtcaaattgtgtccaccattttacaaatgcgtgtctttgtagtgatggatattggtttgtctttttagtcttgctgtaacgatattgccatgagaatatccatgacagtgcaaagcttgaaaagtatttaagatctgctggaattcgtgattcctgcgaattgtattgtttcttaaattgggaaaatccttgttggaccgtttctgggaatatctctgggattggtccaaagaagtcccaccattgcaaaaaccaattgggaaaat

SEQ ID NO: 12021 - DNA, 1063 bp, Glycine max
  Gm_smallRNAprecursor_4854
caacggagtaggatcacacggacaaataggaagtaagaatgcagtatgattgatgaaatgaaaatataaacttgaaaacagatataaagggcacaccggagaccggcttacaaaccccaggttttcataaacaaagaaaccgaagcggcggcagagccgcacaggatcggtgaagggagaagagagaaggatgaaaaatagaaatttattgaatctagaaagaagcgcttacaaaaatcttgtttcagagcacctctcttccgaaacctgaaaaatggctaaatgaaagggtgcctcacaacatgcttgaggactccttatatagccaaaaatctaagaccggtagttgccggtagttttgaccgagactatttgactatttgttacaagacaagtagttttgaccgggactttaatggctacaggacaggtagtattgtccagcattaattacacattaattacaaacagacggttttgtgaccgaaattaaatttaatctaaacagataccaaaacaatcatcttcgttttggtaaaagggatcttcttcgtcttcttcagcagaacttgtttcttccttctttgaggatgaagcttcttcttcctgttgtaacatttgtagaacttccttcagatttttagctaagacctcctttgatgtcgatcctgctaaaaatgctgccagatgagacttttggttcaaaaacacagaagtctctggatcagctgctttgaggaattctagatgggattggaaccatagttttacttgttctgcatccgctttggatgagtcaaattgtgtccaccattttacaaatgcgtgtctttgtagtgatggatattggtttgtctttttagtcttgctgtaacgatattgccatgagaatatccatgacagtgcaaagcttgaaaagtatttaagatctgctggaattcgtgattcctgcgaattgtattgtttcttaaattgggaaaatccttgttggaccgtttctgggaatatctctgggattggtccaaagaagtcccaccattgcaaaaaccaattgggaaaattg

SEQ ID NO: 12022 - DNA, 1063 bp, Glycine max; identical to SEQ ID NO: 12021
  Gm_smallRNAprecursor_4855

SEQ ID NO: 12023 - DNA, 1064 bp, Glycine max
  Gm_smallRNAprecursor_4856
caacggagtaggatcacacggacaaataggaagtaagaatgcagtatgattgatgaaatgaaaatataaacttgaaaacagatataaagggcacaccggagaccggcttacaaaccccaggttttcataaacaaagaaaccgaagcggcggcagagccgcacaggatcggtgaagggagaagagagaaggatgaaaaatagaaatttattgaatctagaaagaagcgcttacaaaaatcttgtttcagagcacctctcttccgaaacctgaaaaatggctaaatgaaagggtgcctcacaacatgcttgaggactccttatatagccaaaaatctaagaccggtagttgccggtagttttgaccgagactatttgactatttgttacaagacaagtagttttgaccgggactttaatggctacaggacaggtagtattgtccagcattaattacacattaattacaaacagacggttttgtgaccgaaattaaatttaatctaaacagataccaaaacaatcatcttcgttttggtaaaagggatcttcttcgtcttcttcagcagaacttgtttcttccttctttgaggatgaagcttcttcttcctgttgtaacatttgtagaacttccttcagatttttagctaagacctcctttgatgtcgatcctgctaaaaatgctgccagatgagacttttggttcaaaaacacagaagtctctggatcagctgctttgaggaattctagatgggattggaaccatagttttacttgttctgcatccgctttggatgagtcaaattgtgtccaccattttacaaatgcgtgtctttgtagtgatggatattggtttgtctttttagtcttgctgtaacgatattgccatgagaatatccatgacagtgcaaagcttgaaaagtatttaagatctgctggaattcgtgattcctgcgaattgtattgtttcttaaattgggaaaatccttgttggaccgtttctgggaatatctctgggattggtccaaagaagtcccaccattgcaaaaaccaattgggaaaattgt

SEQ ID NO: 12024 - DNA, 1209 bp, Glycine max
  Gm_smallRNAprecursor_4857
caacggagtaggatcacacggacaaataggaagtaagaatgcagtatgattgatgaaatgaaaatataaacttgaaaacagatataaagggcacaccggagaccggcttacaaaccccaggttttcataaacaaagaaaccgaagcggcggcagagccgcacaggatcggtgaagggagaagagagaaggatgaaaaatagaaatttattgaatctagaaagaagcgcttacaaaaatcttgtttcagagcacctctcttccgaaacctgaaaaatggctaaatgaaagggtgcctcacaacatgcttgaggactccttatatagccaaaaatctaagaccggtagttgccggtagttttgaccgagactatttgactatttgttacaagacaagtagttttgaccgggactttaatggctacaggacaggtagtattgtccagcattaattacacattaattacaaacagacggttttgtgaccgaaattaaatttaatctaaacagataccaaaacaatcatcttcgttttggtaaaagggatcttcttcgtcttcttcagcagaacttgtttcttccttctttgaggatgaagcttcttcttcctgttgtaacatttgtagaacttccttcagatttttagctaagacctcctttgatgtcgatcctgctaaaaatgctgccagatgagacttttggttcaaaaacacagaagtctctggatcagctgctttgaggaattctagatgggattggaaccatagttttacttgttctgcatccgctttggatgagtcaaattgtgtccaccattttacaaatgcgtgtctttgtagtgatggatattggtttgtctttttagtcttgctgtaacgatattgccatgagaatatccatgacagtgcaaagcttgaaaagtatttaagatctgctggaattcgtgattcctgcgaattgtattgtttcttaaattgggaaaatccttgttggaccgtttctgggaatatctctgggattggtccaaagaagtcccaccattgcaaaaaccaattgggaaaattgtaaattgtgttggtcttgaaatatatcagccatgaatgtttgaagcgggtattttggtgccaaaacaccttagtcatcaacgtaatcccaataggtataacctactggatcaaatggaactgaaaatctctttcctttgttcaagt

SEQ ID NO: 12025 - DNA, 1057 bp, Glycine max
  Gm_smallRNAprecursor_4858
cggagtaggatcacacggacaaataggaagtaagaatgcagtatgattgatgaaatgaaaatataaacttgaaaacagatataaagggcacaccggagaccggcttacaaaccccaggttttcataaacaaagaaaccgaagcggcggcagagccgcacaggatcggtgaagggagaagagagaaggatgaaaaatagaaatttattgaatctagaaagaagcgcttacaaaaatcttgtttcagagcacctctcttccgaaacctgaaaaatggctaaatgaaagggtgcctcacaacatgcttgaggactccttatatagccaaaaatctaagaccggtagttgccggtagttttgaccgagactatttgactatttgttacaagacaagtagttttgaccgggactttaatggctacaggacaggtagtattgtccagcattaattacacattaattacaaacagacggttttgtgaccgaaattaaatttaatctaaacagataccaaaacaatcatcttcgttttggtaaaagggatcttcttcgtcttcttcagcagaacttgtttcttccttctttgaggatgaagcttcttcttcctgttgtaacatttgtagaacttccttcagatttttagctaagacctcctttgatgtcgatcctgctaaaaatgctgccagatgagacttttggttcaaaaacacagaagtctctggatcagctgctttgaggaattctagatgggattggaaccatagttttacttgttctgcatccgctttggatgagtcaaattgtgtccaccattttacaaatgcgtgtctttgtagtgatggatattggtttgtctttttagtcttgctgtaacgatattgccatgagaatatccatgacagtgcaaagcttgaaaagtatttaagatctgctggaattcgtgattcctgcgaattgtattgtttcttaaattgggaaaatccttgttggaccgtttctgggaatatctctgggattggtccaaagaagtcccaccattgcaaaaaccaattgggaaaa

SEQ ID NO: 12026 - DNA, 1058 bp, Glycine max
  Gm_smallRNAprecursor_4859
cggagtaggatcacacggacaaataggaagtaagaatgcagtatgattgatgaaatgaaaatataaacttgaaaacagatataaagggcacaccggagaccggcttacaaaccccaggttttcataaacaaagaaaccgaagcggcggcagagccgcacaggatcggtgaagggagaagagagaaggatgaaaaatagaaatttattgaatctagaaagaagcgcttacaaaaatcttgtttcagagcacctctcttccgaaacctgaaaaatggctaaatgaaagggtgcctcacaacatgcttgaggactccttatatagccaaaaatctaagaccggtagttgccggtagttttgaccgagactatttgactatttgttacaagacaagtagttttgaccgggactttaatggctacaggacaggtagtattgtccagcattaattacacattaattacaaacagacggttttgtgaccgaaattaaatttaatctaaacagataccaaaacaatcatcttcgttttggtaaaagggatcttcttcgtcttcttcagcagaacttgtttcttccttctttgaggatgaagcttcttcttcctgttgtaacatttgtagaacttccttcagatttttagctaagacctcctttgatgtcgatcctgctaaaaatgctgccagatgagacttttggttcaaaaacacagaagtctctggatcagctgctttgaggaattctagatgggattggaaccatagttttacttgttctgcatccgctttggatgagtcaaattgtgtccaccattttacaaatgcgtgtctttgtagtgatggatattggtttgtctttttagtcttgctgtaacgatattgccatgagaatatccatgacagtgcaaagcttgaaaagtatttaagatctgctggaattcgtgattcctgcgaattgtattgtttcttaaattgggaaaatccttgttggaccgtttctgggaatatctctgggattggtccaaagaagtcccaccattgcaaaaaccaattgggaaaat

SEQ ID NO: 12027 - DNA, 1083 bp, Glycine max
  Gm_smallRNAprecursor_4860
cggagtaggatcacacggacaaataggaagtaagaatgcagtatgattgatgaaatgaaaatataaacttgaaaacagatataaagggcacaccggagaccggcttacaaaccccaggttttcataaacaaagaaaccgaagcggcggcagagccgcacaggatcggtgaagggagaagagagaaggatgaaaaatagaaatttattgaatctagaaagaagcgcttacaaaaatcttgtttcagagcacctctcttccgaaacctgaaaaatggctaaatgaaagggtgcctcacaacatgcttgaggactccttatatagccaaaaatctaagaccggtagttgccggtagttttgaccgagactatttgactatttgttacaagacaagtagttttgaccgggactttaatggctacaggacaggtagtattgtccagcattaattacacattaattacaaacagacggttttgtgaccgaaattaaatttaatctaaacagataccaaaacaatcatcttcgttttggtaaaagggatcttcttcgtcttcttcagcagaacttgtttcttccttctttgaggatgaagcttcttcttcctgttgtaacatttgtagaacttccttcagatttttagctaagacctcctttgatgtcgatcctgctaaaaatgctgccagatgagacttttggttcaaaaacacagaagtctctggatcagctgctttgaggaattctagatgggattggaaccatagttttacttgttctgcatccgctttggatgagtcaaattgtgtccaccattttacaaatgcgtgtctttgtagtgatggatattggtttgtctttttagtcttgctgtaacgatattgccatgagaatatccatgacagtgcaaagcttgaaaagtatttaagatctgctggaattcgtgattcctgcgaattgtattgtttcttaaattgggaaaatccttgttggaccgtttctgggaatatctctgggattggtccaaagaagtcccaccattgcaaaaaccaattgggaaaattgtaaattgtgttggtcttgaaata

SEQ ID NO: 12028 - DNA, 1056 bp, Glycine max
  Gm_smallRNAprecursor_4861
ggagtaggatcacacggacaaataggaagtaagaatgcagtatgattgatgaaatgaaaatataaacttgaaaacagatataaagggcacaccggagaccggcttacaaaccccaggttttcataaacaaagaaaccgaagcggcggcagagccgcacaggatcggtgaagggagaagagagaaggatgaaaaatagaaatttattgaatctagaaagaagcgcttacaaaaatcttgtttcagagcacctctcttccgaaacctgaaaaatggctaaatgaaagggtgcctcacaacatgcttgaggactccttatatagccaaaaatctaagaccggtagttgccggtagttttgaccgagactatttgactatttgttacaagacaagtagttttgaccgggactttaatggctacaggacaggtagtattgtccagcattaattacacattaattacaaacagacggttttgtgaccgaaattaaatttaatctaaacagataccaaaacaatcatcttcgttttggtaaaagggatcttcttcgtcttcttcagcagaacttgtttcttccttctttgaggatgaagcttcttcttcctgttgtaacatttgtagaacttccttcagatttttagctaagacctcctttgatgtcgatcctgctaaaaatgctgccagatgagacttttggttcaaaaacacagaagtctctggatcagctgctttgaggaattctagatgggattggaaccatagttttacttgttctgcatccgctttggatgagtcaaattgtgtccaccattttacaaatgcgtgtctttgtagtgatggatattggtttgtctttttagtcttgctgtaacgatattgccatgagaatatccatgacagtgcaaagcttgaaaagtatttaagatctgctggaattcgtgattcctgcgaattgtattgtttcttaaattgggaaaatccttgttggaccgtttctgggaatatctctgggattggtccaaagaagtcccaccattgcaaaaaccaattgggaaaa

SEQ ID NO: 12029 - DNA, 1056 bp, Glycine max; identical to SEQ ID NO: 12028
  Gm_smallRNAprecursor_4862

SEQ ID NO: 12030 - DNA, 1057 bp, Glycine max
  Gm_smallRNAprecursor_4863
ggagtaggatcacacggacaaataggaagtaagaatgcagtatgattgatgaaatgaaaatataaacttgaaaacagatataaagggcacaccggagaccggcttacaaaccccaggttttcataaacaaagaaaccgaagcggcggcagagccgcacaggatcggtgaagggagaagagagaaggatgaaaaatagaaatttattgaatctagaaagaagcgcttacaaaaatcttgtttcagagcacctctcttccgaaacctgaaaaatggctaaatgaaagggtgcctcacaacatgcttgaggactccttatatagccaaaaatctaagaccggtagttgccggtagttttgaccgagactatttgactatttgttacaagacaagtagttttgaccgggactttaatggctacaggacaggtagtattgtccagcattaattacacattaattacaaacagacggttttgtgaccgaaattaaatttaatctaaacagataccaaaacaatcatcttcgttttggtaaaagggatcttcttcgtcttcttcagcagaacttgtttcttccttctttgaggatgaagcttcttcttcctgttgtaacatttgtagaacttccttcagatttttagctaagacctcctttgatgtcgatcctgctaaaaatgctgccagatgagacttttggttcaaaaacacagaagtctctggatcagctgctttgaggaattctagatgggattggaaccatagttttacttgttctgcatccgctttggatgagtcaaattgtgtccaccattttacaaatgcgtgtctttgtagtgatggatattggtttgtctttttagtcttgctgtaacgatattgccatgagaatatccatgacagtgcaaagcttgaaaagtatttaagatctgctggaattcgtgattcctgcgaattgtattgtttcttaaattgggaaaatccttgttggaccgtttctgggaatatctctgggattggtccaaagaagtcccaccattgcaaaaaccaattgggaaaat

SEQ ID NO: 12031 - DNA, 1059 bp, Glycine max
  Gm_smallRNAprecursor_4864
ggagtaggatcacacggacaaataggaagtaagaatgcagtatgattgatgaaatgaaaatataaacttgaaaacagatataaagggcacaccggagaccggcttacaaaccccaggttttcataaacaaagaaaccgaagcggcggcagagccgcacaggatcggtgaagggagaagagagaaggatgaaaaatagaaatttattgaatctagaaagaagcgcttacaaaaatcttgtttcagagcacctctcttccgaaacctgaaaaatggctaaatgaaagggtgcctcacaacatgcttgaggactccttatatagccaaaaatctaagaccggtagttgccggtagttttgaccgagactatttgactatttgttacaagacaagtagttttgaccgggactttaatggctacaggacaggtagtattgtccagcattaattacacattaattacaaacagacggttttgtgaccgaaattaaatttaatctaaacagataccaaaacaatcatcttcgttttggtaaaagggatcttcttcgtcttcttcagcagaacttgtttcttccttctttgaggatgaagcttcttcttcctgttgtaacatttgtagaacttccttcagatttttagctaagacctcctttgatgtcgatcctgctaaaaatgctgccagatgagacttttggttcaaaaacacagaagtctctggatcagctgctttgaggaattctagatgggattggaaccatagttttacttgttctgcatccgctttggatgagtcaaattgtgtccaccattttacaaatgcgtgtctttgtagtgatggatattggtttgtctttttagtcttgctgtaacgatattgccatgagaatatccatgacagtgcaaagcttgaaaagtatttaagatctgctggaattcgtgattcctgcgaattgtattgtttcttaaattgggaaaatccttgttggaccgtttctgggaatatctctgggattggtccaaagaagtcccaccattgcaaaaaccaattgggaaaattg

SEQ ID NO: 12032 - DNA, 1059 bp, Glycine max; identical to SEQ ID NO: 12031
  Gm_smallRNAprecursor_4865

SEQ ID NO: 12033 - DNA, 1082 bp, Glycine max
  Gm_smallRNAprecursor_4866
ggagtaggatcacacggacaaataggaagtaagaatgcagtatgattgatgaaatgaaaatataaacttgaaaacagatataaagggcacaccggagaccggcttacaaaccccaggttttcataaacaaagaaaccgaagcggcggcagagccgcacaggatcggtgaagggagaagagagaaggatgaaaaatagaaatttattgaatctagaaagaagcgcttacaaaaatcttgtttcagagcacctctcttccgaaacctgaaaaatggctaaatgaaagggtgcctcacaacatgcttgaggactccttatatagccaaaaatctaagaccggtagttgccggtagttttgaccgagactatttgactatttgttacaagacaagtagttttgaccgggactttaatggctacaggacaggtagtattgtccagcattaattacacattaattacaaacagacggttttgtgaccgaaattaaatttaatctaaacagataccaaaacaatcatcttcgttttggtaaaagggatcttcttcgtcttcttcagcagaacttgtttcttccttctttgaggatgaagcttcttcttcctgttgtaacatttgtagaacttccttcagatttttagctaagacctcctttgatgtcgatcctgctaaaaatgctgccagatgagacttttggttcaaaaacacagaagtctctggatcagctgctttgaggaattctagatgggattggaaccatagttttacttgttctgcatccgctttggatgagtcaaattgtgtccaccattttacaaatgcgtgtctttgtagtgatggatattggtttgtctttttagtcttgctgtaacgatattgccatgagaatatccatgacagtgcaaagcttgaaaagtatttaagatctgctggaattcgtgattcctgcgaattgtattgtttcttaaattgggaaaatccttgttggaccgtttctgggaatatctctgggattggtccaaagaagtcccaccattgcaaaaaccaattgggaaaattgtaaattgtgttggtcttgaaata

SEQ ID NO: 12034 - DNA, 1055 bp, Glycine max
  Gm_smallRNAprecursor_4867
gagtaggatcacacggacaaataggaagtaagaatgcagtatgattgatgaaatgaaaatataaacttgaaaacagatataaagggcacaccggagaccggcttacaaaccccaggttttcataaacaaagaaaccgaagcggcggcagagccgcacaggatcggtgaagggagaagagagaaggatgaaaaatagaaatttattgaatctagaaagaagcgcttacaaaaatcttgtttcagagcacctctcttccgaaacctgaaaaatggctaaatgaaagggtgcctcacaacatgcttgaggactccttatatagccaaaaatctaagaccggtagttgccggtagttttgaccgagactatttgactatttgttacaagacaagtagttttgaccgggactttaatggctacaggacaggtagtattgtccagcattaattacacattaattacaaacagacggttttgtgaccgaaattaaatttaatctaaacagataccaaaacaatcatcttcgttttggtaaaagggatcttcttcgtcttcttcagcagaacttgtttcttccttctttgaggatgaagcttcttcttcctgttgtaacatttgtagaacttccttcagatttttagctaagacctcctttgatgtcgatcctgctaaaaatgctgccagatgagacttttggttcaaaaacacagaagtctctggatcagctgctttgaggaattctagatgggattggaaccatagttttacttgttctgcatccgctttggatgagtcaaattgtgtccaccattttacaaatgcgtgtctttgtagtgatggatattggtttgtctttttagtcttgctgtaacgatattgccatgagaatatccatgacagtgcaaagcttgaaaagtatttaagatctgctggaattcgtgattcctgcgaattgtattgtttcttaaattgggaaaatccttgttggaccgtttctgggaatatctctgggattggtccaaagaagtcccaccattgcaaaaaccaattgggaaaa

SEQ ID NO: 12035 - DNA, 1058 bp, Glycine max
  Gm_smallRNAprecursor_4868
gagtaggatcacacggacaaataggaagtaagaatgcagtatgattgatgaaatgaaaatataaacttgaaaacagatataaagggcacaccggagaccggcttacaaaccccaggttttcataaacaaagaaaccgaagcggcggcagagccgcacaggatcggtgaagggagaagagagaaggatgaaaaatagaaatttattgaatctagaaagaagcgcttacaaaaatcttgtttcagagcacctctcttccgaaacctgaaaaatggctaaatgaaagggtgcctcacaacatgcttgaggactccttatatagccaaaaatctaagaccggtagttgccggtagttttgaccgagactatttgactatttgttacaagacaagtagttttgaccgggactttaatggctacaggacaggtagtattgtccagcattaattacacattaattacaaacagacggttttgtgaccgaaattaaatttaatctaaacagataccaaaacaatcatcttcgttttggtaaaagggatcttcttcgtcttcttcagcagaacttgtttcttccttctttgaggatgaagcttcttcttcctgttgtaacatttgtagaacttccttcagatttttagctaagacctcctttgatgtcgatcctgctaaaaatgctgccagatgagacttttggttcaaaaacacagaagtctctggatcagctgctttgaggaattctagatgggattggaaccatagttttacttgttctgcatccgctttggatgagtcaaattgtgtccaccattttacaaatgcgtgtctttgtagtgatggatattggtttgtctttttagtcttgctgtaacgatattgccatgagaatatccatgacagtgcaaagcttgaaaagtatttaagatctgctggaattcgtgattcctgcgaattgtattgtttcttaaattgggaaaatccttgttggaccgtttctgggaatatctctgggattggtccaaagaagtcccaccattgcaaaaaccaattgggaaaattg

SEQ ID NO: 12036 - DNA, 1058 bp, Glycine max; identical to SEQ ID NO: 12035
  Gm_smallRNAprecursor_4869

SEQ ID NO: 12037 - DNA, 1081 bp, Glycine max
  Gm_smallRNAprecursor_4870
gagtaggatcacacggacaaataggaagtaagaatgcagtatgattgatgaaatgaaaatataaacttgaaaacagatataaagggcacaccggagaccggcttacaaaccccaggttttcataaacaaagaaaccgaagcggcggcagagccgcacaggatcggtgaagggagaagagagaaggatgaaaaatagaaatttattgaatctagaaagaagcgcttacaaaaatcttgtttcagagcacctctcttccgaaacctgaaaaatggctaaatgaaagggtgcctcacaacatgcttgaggactccttatatagccaaaaatctaagaccggtagttgccggtagttttgaccgagactatttgactatttgttacaagacaagtagttttgaccgggactttaatggctacaggacaggtagtattgtccagcattaattacacattaattacaaacagacggttttgtgaccgaaattaaatttaatctaaacagataccaaaacaatcatcttcgttttggtaaaagggatcttcttcgtcttcttcagcagaacttgtttcttccttctttgaggatgaagcttcttcttcctgttgtaacatttgtagaacttccttcagatttttagctaagacctcctttgatgtcgatcctgctaaaaatgctgccagatgagacttttggttcaaaaacacagaagtctctggatcagctgctttgaggaattctagatgggattggaaccatagttttacttgttctgcatccgctttggatgagtcaaattgtgtccaccattttacaaatgcgtgtctttgtagtgatggatattggtttgtctttttagtcttgctgtaacgatattgccatgagaatatccatgacagtgcaaagcttgaaaagtatttaagatctgctggaattcgtgattcctgcgaattgtattgtttcttaaattgggaaaatccttgttggaccgtttctgggaatatctctgggattggtccaaagaagtcccaccattgcaaaaaccaattgggaaaattgtaaattgtgttggtcttgaaata

SEQ ID NO: 12038 - DNA, 1188 bp, Glycine max
  Gm_smallRNAprecursor_4871
tcacacggacaaataggaagtaagaatgcagtatgattgatgaaatgaaaatataaacttgaaaacagatataaagggcacaccggagaccggcttacaaaccccaggttttcataaacaaagaaaccgaagcggcggcagagccgcacaggatcggtgaagggagaagagagaaggatgaaaaatagaaatttattgaatctagaaagaagcgcttacaaaaatcttgtttcagagcacctctcttccgaaacctgaaaaatggctaaatgaaagggtgcctcacaacatgcttgaggactccttatatagccaaaaatctaagaccggtagttgccggtagttttgaccgagactatttgactatttgttacaagacaagtagttttgaccgggactttaatggctacaggacaggtagtattgtccagcattaattacacattaattacaaacagacggttttgtgaccgaaattaaatttaatctaaacagataccaaaacaatcatcttcgttttggtaaaagggatcttcttcgtcttcttcagcagaacttgtttcttccttctttgaggatgaagcttcttcttcctgttgtaacatttgtagaacttccttcagatttttagctaagacctcctttgatgtcgatcctgctaaaaatgctgccagatgagacttttggttcaaaaacacagaagtctctggatcagctgctttgaggaattctagatgggattggaaccatagttttacttgttctgcatccgctttggatgagtcaaattgtgtccaccattttacaaatgcgtgtctttgtagtgatggatattggtttgtctttttagtcttgctgtaacgatattgccatgagaatatccatgacagtgcaaagcttgaaaagtatttaagatctgctggaattcgtgattcctgcgaattgtattgtttcttaaattgggaaaatccttgttggaccgtttctgggaatatctctgggattggtccaaagaagtcccaccattgcaaaaaccaattgggaaaattgtaaattgtgttggtcttgaaatatatcagccatgaatgtttgaagcgggtattttggtgccaaaacaccttagtcatcaacgtaatcccaataggtataacctactggatcaaatggaactgaaaatctctttccttt

SEQ ID NO: 12039 - DNA, 1142 bp, Glycine max
  Gm_smallRNAprecursor_4872
gaaaatataaacttgaaaacagatataaagggcacaccggagaccggcttacaaaccccaggttttcataaacaaagaaaccgaagcggcggcagagccgcacaggatcggtgaagggagaagagagaaggatgaaaaatagaaatttattgaatctagaaagaagcgcttacaaaaatcttgtttcagagcacctctcttccgaaacctgaaaaatggctaaatgaaagggtgcctcacaacatgcttgaggactccttatatagccaaaaatctaagaccggtagttgccggtagttttgaccgagactatttgactatttgttacaagacaagtagttttgaccgggactttaatggctacaggacaggtagtattgtccagcattaattacacattaattacaaacagacggttttgtgaccgaaattaaatttaatctaaacagataccaaaacaatcatcttcgttttggtaaaagggatcttcttcgtcttcttcagcagaacttgtttcttccttctttgaggatgaagcttcttcttcctgttgtaacatttgtagaacttccttcagatttttagctaagacctcctttgatgtcgatcctgctaaaaatgctgccagatgagacttttggttcaaaaacacagaagtctctggatcagctgctttgaggaattctagatgggattggaaccatagttttacttgttctgcatccgctttggatgagtcaaattgtgtccaccattttacaaatgcgtgtctttgtagtgatggatattggtttgtctttttagtcttgctgtaacgatattgccatgagaatatccatgacagtgcaaagcttgaaaagtatttaagatctgctggaattcgtgattcctgcgaattgtattgtttcttaaattgggaaaatccttgttggaccgtttctgggaatatctctgggattggtccaaagaagtcccaccattgcaaaaaccaattgggaaaattgtaaattgtgttggtcttgaaatatatcagccatgaatgtttgaagcgggtattttggtgccaaaacaccttagtcatcaacgtaatcccaataggtataacctactggatcaaatggaactgaaaatctctttccttt

SEQ ID NO: 12040 - DNA, 1141 bp, Glycine max
  Gm_smallRNAprecursor_4873
aaaatataaacttgaaaacagatataaagggcacaccggagaccggcttacaaaccccaggttttcataaacaaagaaaccgaagcggcggcagagccgcacaggatcggtgaagggagaagagagaaggatgaaaaatagaaatttattgaatctagaaagaagcgcttacaaaaatcttgtttcagagcacctctcttccgaaacctgaaaaatggctaaatgaaagggtgcctcacaacatgcttgaggactccttatatagccaaaaatctaagaccggtagttgccggtagttttgaccgagactatttgactatttgttacaagacaagtagttttgaccgggactttaatggctacaggacaggtagtattgtccagcattaattacacattaattacaaacagacggttttgtgaccgaaattaaatttaatctaaacagataccaaaacaatcatcttcgttttggtaaaagggatcttcttcgtcttcttcagcagaacttgtttcttccttctttgaggatgaagcttcttcttcctgttgtaacatttgtagaacttccttcagatttttagctaagacctcctttgatgtcgatcctgctaaaaatgctgccagatgagacttttggttcaaaaacacagaagtctctggatcagctgctttgaggaattctagatgggattggaaccatagttttacttgttctgcatccgctttggatgagtcaaattgtgtccaccattttacaaatgcgtgtctttgtagtgatggatattggtttgtctttttagtcttgctgtaacgatattgccatgagaatatccatgacagtgcaaagcttgaaaagtatttaagatctgctggaattcgtgattcctgcgaattgtattgtttcttaaattgggaaaatccttgttggaccgtttctgggaatatctctgggattggtccaaagaagtcccaccattgcaaaaaccaattgggaaaattgtaaattgtgttggtcttgaaatatatcagccatgaatgtttgaagcgggtattttggtgccaaaacaccttagtcatcaacgtaatcccaataggtataacctactggatcaaatggaactgaaaatctctttccttt

SEQ ID NO: 12041 - DNA, 1054 bp, Glycine max
  Gm_smallRNAprecursor_4874
gatcggtgaagggagaagagagaaggatgaaaaatagaaatttattgaatctagaaagaagcgcttacaaaaatcttgtttcagagcacctctcttccgaaacctgaaaaatggctaaatgaaagggtgcctcacaacatgcttgaggactccttatatagccaaaaatctaagaccggtagttgccggtagttttgaccgagactatttgactatttgttacaagacaagtagttttgaccgggactttaatggctacaggacaggtagtattgtccagcattaattacacattaattacaaacagacggttttgtgaccgaaattaaatttaatctaaacagataccaaaacaatcatcttcgttttggtaaaagggatcttcttcgtcttcttcagcagaacttgtttcttccttctttgaggatgaagcttcttcttcctgttgtaacatttgtagaacttccttcagatttttagctaagacctcctttgatgtcgatcctgctaaaaatgctgccagatgagacttttggttcaaaaacacagaagtctctggatcagctgctttgaggaattctagatgggattggaaccatagttttacttgttctgcatccgctttggatgagtcaaattgtgtccaccattttacaaatgcgtgtctttgtagtgatggatattggtttgtctttttagtcttgctgtaacgatattgccatgagaatatccatgacagtgcaaagcttgaaaagtatttaagatctgctggaattcgtgattcctgcgaattgtattgtttcttaaattgggaaaatccttgttggaccgtttctgggaatatctctgggattggtccaaagaagtcccaccattgcaaaaaccaattgggaaaattgtaaattgtgttggtcttgaaatatatcagccatgaatgtttgaagcgggtattttggtgccaaaacaccttagtcatcaacgtaatcccaataggtataacctactggatcaaatggaactgaaaatctctttcctttgttcaagtccgaaccaa

SEQ ID NO: 12042 - DNA, 1055 bp, Glycine max
  Gm_smallRNAprecursor_4875
gatcggtgaagggagaagagagaaggatgaaaaatagaaatttattgaatctagaaagaagcgcttacaaaaatcttgtttcagagcacctctcttccgaaacctgaaaaatggctaaatgaaagggtgcctcacaacatgcttgaggactccttatatagccaaaaatctaagaccggtagttgccggtagttttgaccgagactatttgactatttgttacaagacaagtagttttgaccgggactttaatggctacaggacaggtagtattgtccagcattaattacacattaattacaaacagacggttttgtgaccgaaattaaatttaatctaaacagataccaaaacaatcatcttcgttttggtaaaagggatcttcttcgtcttcttcagcagaacttgtttcttccttctttgaggatgaagcttcttcttcctgttgtaacatttgtagaacttccttcagatttttagctaagacctcctttgatgtcgatcctgctaaaaatgctgccagatgagacttttggttcaaaaacacagaagtctctggatcagctgctttgaggaattctagatgggattggaaccatagttttacttgttctgcatccgctttggatgagtcaaattgtgtccaccattttacaaatgcgtgtctttgtagtgatggatattggtttgtctttttagtcttgctgtaacgatattgccatgagaatatccatgacagtgcaaagcttgaaaagtatttaagatctgctggaattcgtgattcctgcgaattgtattgtttcttaaattgggaaaatccttgttggaccgtttctgggaatatctctgggattggtccaaagaagtcccaccattgcaaaaaccaattgggaaaattgtaaattgtgttggtcttgaaatatatcagccatgaatgtttgaagcgggtattttggtgccaaaacaccttagtcatcaacgtaatcccaataggtataacctactggatcaaatggaactgaaaatctctttcctttgttcaagtccgaaccaaa

SEQ ID NO: 12043 - DNA, 1053 bp, Glycine max
  Gm_smallRNAprecursor_4876
atcggtgaagggagaagagagaaggatgaaaaatagaaatttattgaatctagaaagaagcgcttacaaaaatcttgtttcagagcacctctcttccgaaacctgaaaaatggctaaatgaaagggtgcctcacaacatgcttgaggactccttatatagccaaaaatctaagaccggtagttgccggtagttttgaccgagactatttgactatttgttacaagacaagtagttttgaccgggactttaatggctacaggacaggtagtattgtccagcattaattacacattaattacaaacagacggttttgtgaccgaaattaaatttaatctaaacagataccaaaacaatcatcttcgttttggtaaaagggatcttcttcgtcttcttcagcagaacttgtttcttccttctttgaggatgaagcttcttcttcctgttgtaacatttgtagaacttccttcagatttttagctaagacctcctttgatgtcgatcctgctaaaaatgctgccagatgagacttttggttcaaaaacacagaagtctctggatcagctgctttgaggaattctagatgggattggaaccatagttttacttgttctgcatccgctttggatgagtcaaattgtgtccaccattttacaaatgcgtgtctttgtagtgatggatattggtttgtctttttagtcttgctgtaacgatattgccatgagaatatccatgacagtgcaaagcttgaaaagtatttaagatctgctggaattcgtgattcctgcgaattgtattgtttcttaaattgggaaaatccttgttggaccgtttctgggaatatctctgggattggtccaaagaagtcccaccattgcaaaaaccaattgggaaaattgtaaattgtgttggtcttgaaatatatcagccatgaatgtttgaagcgggtattttggtgccaaaacaccttagtcatcaacgtaatcccaataggtataacctactggatcaaatggaactgaaaatctctttcctttgttcaagtccgaaccaa

SEQ ID NO: 12044 - DNA, 1042 bp, Glycine max
  Gm_smallRNAprecursor_4877
aagggagaagagagaaggatgaaaaatagaaatttattgaatctagaaagaagcgcttacaaaaatcttgtttcagagcacctctcttccgaaacctgaaaaatggctaaatgaaagggtgcctcacaacatgcttgaggactccttatatagccaaaaatctaagaccggtagttgccggtagttttgaccgagactatttgactatttgttacaagacaagtagttttgaccgggactttaatggctacaggacaggtagtattgtccagcattaattacacattaattacaaacagacggttttgtgaccgaaattaaatttaatctaaacagataccaaaacaatcatcttcgttttggtaaaagggatcttcttcgtcttcttcagcagaacttgtttcttccttctttgaggatgaagcttcttcttcctgttgtaacatttgtagaacttccttcagatttttagctaagacctcctttgatgtcgatcctgctaaaaatgctgccagatgagacttttggttcaaaaacacagaagtctctggatcagctgctttgaggaattctagatgggattggaaccatagttttacttgttctgcatccgctttggatgagtcaaattgtgtccaccattttacaaatgcgtgtctttgtagtgatggatattggtttgtctttttagtcttgctgtaacgatattgccatgagaatatccatgacagtgcaaagcttgaaaagtatttaagatctgctggaattcgtgattcctgcgaattgtattgtttcttaaattgggaaaatccttgttggaccgtttctgggaatatctctgggattggtccaaagaagtcccaccattgcaaaaaccaattgggaaaattgtaaattgtgttggtcttgaaatatatcagccatgaatgtttgaagcgggtattttggtgccaaaacaccttagtcatcaacgtaatcccaataggtataacctactggatcaaatggaactgaaaatctctttcctttgttcaagtccgaa

SEQ ID NO: 12045 - DNA, 1032 bp, Glycine max
  Gm_smallRNAprecursor_4878
agaagagagaaggatgaaaaatagaaatttattgaatctagaaagaagcgcttacaaaaatcttgtttcagagcacctctcttccgaaacctgaaaaatggctaaatgaaagggtgcctcacaacatgcttgaggactccttatatagccaaaaatctaagaccggtagttgccggtagttttgaccgagactatttgactatttgttacaagacaagtagttttgaccgggactttaatggctacaggacaggtagtattgtccagcattaattacacattaattacaaacagacggttttgtgaccgaaattaaatttaatctaaacagataccaaaacaatcatcttcgttttggtaaaagggatcttcttcgtcttcttcagcagaacttgtttcttccttctttgaggatgaagcttcttcttcctgttgtaacatttgtagaacttccttcagatttttagctaagacctcctttgatgtcgatcctgctaaaaatgctgccagatgagacttttggttcaaaaacacagaagtctctggatcagctgctttgaggaattctagatgggattggaaccatagttttacttgttctgcatccgctttggatgagtcaaattgtgtccaccattttacaaatgcgtgtctttgtagtgatggatattggtttgtctttttagtcttgctgtaacgatattgccatgagaatatccatgacagtgcaaagcttgaaaagtatttaagatctgctggaattcgtgattcctgcgaattgtattgtttcttaaattgggaaaatccttgttggaccgtttctgggaatatctctgggattggtccaaagaagtcccaccattgcaaaaaccaattgggaaaattgtaaattgtgttggtcttgaaatatatcagccatgaatgtttgaagcgggtattttggtgccaaaacaccttagtcatcaacgtaatcccaataggtataacctactggatcaaatggaactgaaaatctctttcctttgttcaagt

SEQ ID NO: 12046 - DNA, 1058 bp, Glycine max
  Gm_smallRNAprecursor_4879
gaaatttattgaatctagaaagaagcgcttacaaaaatcttgtttcagagcacctctcttccgaaacctgaaaaatggctaaatgaaagggtgcctcacaacatgcttgaggactccttatatagccaaaaatctaagaccggtagttgccggtagttttgaccgagactatttgactatttgttacaagacaagtagttttgaccgggactttaatggctacaggacaggtagtattgtccagcattaattacacattaattacaaacagacggttttgtgaccgaaattaaatttaatctaaacagataccaaaacaatcatcttcgttttggtaaaagggatcttcttcgtcttcttcagcagaacttgtttcttccttctttgaggatgaagcttcttcttcctgttgtaacatttgtagaacttccttcagatttttagctaagacctcctttgatgtcgatcctgctaaaaatgctgccagatgagacttttggttcaaaaacacagaagtctctggatcagctgctttgaggaattctagatgggattggaaccatagttttacttgttctgcatccgctttggatgagtcaaattgtgtccaccattttacaaatgcgtgtctttgtagtgatggatattggtttgtctttttagtcttgctgtaacgatattgccatgagaatatccatgacagtgcaaagcttgaaaagtatttaagatctgctggaattcgtgattcctgcgaattgtattgtttcttaaattgggaaaatccttgttggaccgtttctgggaatatctctgggattggtccaaagaagtcccaccattgcaaaaaccaattgggaaaattgtaaattgtgttggtcttgaaatatatcagccatgaatgtttgaagcgggtattttggtgccaaaacaccttagtcatcaacgtaatcccaataggtataacctactggatcaaatggaactgaaaatctctttcctttgttcaagtccgaaccaaagtgtcttggttgaagaacttttagtatttggatggttga

SEQ ID NO: 12047 - DNA, 1173 bp, Glycine max
  Gm_smallRNAprecursor_4880
aaagaagcgcttacaaaaatcttgtttcagagcacctctcttccgaaacctgaaaaatggctaaatgaaagggtgcctcacaacatgcttgaggactccttatatagccaaaaatctaagaccggtagttgccggtagttttgaccgagactatttgactatttgttacaagacaagtagttttgaccgggactttaatggctacaggacaggtagtattgtccagcattaattacacattaattacaaacagacggttttgtgaccgaaattaaatttaatctaaacagataccaaaacaatcatcttcgttttggtaaaagggatcttcttcgtcttcttcagcagaacttgtttcttccttctttgaggatgaagcttcttcttcctgttgtaacatttgtagaacttccttcagatttttagctaagacctcctttgatgtcgatcctgctaaaaatgctgccagatgagacttttggttcaaaaacacagaagtctctggatcagctgctttgaggaattctagatgggattggaaccatagttttacttgttctgcatccgctttggatgagtcaaattgtgtccaccattttacaaatgcgtgtctttgtagtgatggatattggtttgtctttttagtcttgctgtaacgatattgccatgagaatatccatgacagtgcaaagcttgaaaagtatttaagatctgctggaattcgtgattcctgcgaattgtattgtttcttaaattgggaaaatccttgttggaccgtttctgggaatatctctgggattggtccaaagaagtcccaccattgcaaaaaccaattgggaaaattgtaaattgtgttggtcttgaaatatatcagccatgaatgtttgaagcgggtattttggtgccaaaacaccttagtcatcaacgtaatcccaataggtataacctactggatcaaatggaactgaaaatctctttcctttgttcaagtccgaaccaaagtgtcttggttgaagaacttttagtatttggatggttgagtgggtgtttaaggtttggtcttttggatctttgaaatgtttgatagatactgagtttgaatctaccaaaatcaattcataaaaagttcttgtcttcaggatagtggttggtttgtagtgaaatcctggtggg

SEQ ID NO: 12048 - DNA, 1131 bp, Glycine max
  Gm_smallRNAprecursor_4881
acaagtagttttgaccgggactttaatggctacaggacaggtagtattgtccagcattaattacacattaattacaaacagacggttttgtgaccgaaattaaatttaatctaaacagataccaaaacaatcatcttcgttttggtaaaagggatcttcttcgtcttcttcagcagaacttgtttcttccttctttgaggatgaagcttcttcttcctgttgtaacatttgtagaacttccttcagatttttagctaagacctcctttgatgtcgatcctgctaaaaatgctgccagatgagacttttggttcaaaaacacagaagtctctggatcagctgctttgaggaattctagatgggattggaaccatagttttacttgttctgcatccgctttggatgagtcaaattgtgtccaccattttacaaatgcgtgtctttgtagtgatggatattggtttgtctttttagtcttgctgtaacgatattgccatgagaatatccatgacagtgcaaagcttgaaaagtatttaagatctgctggaattcgtgattcctgcgaattgtattgtttcttaaattgggaaaatccttgttggaccgtttctgggaatatctctgggattggtccaaagaagtcccaccattgcaaaaaccaattgggaaaattgtaaattgtgttggtcttgaaatatatcagccatgaatgtttgaagcgggtattttggtgccaaaacaccttagtcatcaacgtaatcccaataggtataacctactggatcaaatggaactgaaaatctctttcctttgttcaagtccgaaccaaagtgtcttggttgaagaacttttagtatttggatggttgagtgggtgtttaaggtttggtcttttggatctttgaaatgtttgatagatactgagtttgaatctaccaaaatcaattcataaaaagttcttgtcttcaggatagtggttggtttgtagtgaaatcctggtgggaaagccttggccgtcgccttgaagggatttttgtcccaaaattcaggttccatatgcaaaacagttaacaatttatttttataaatataattgttagtttgtttggtaggtggtgtttgagctttggcta

SEQ ID NO: 12049 - DNA, 1146 bp, Glycine max
  Gm_smallRNAprecursor_4882
gctacaggacaggtagtattgtccagcattaattacacattaattacaaacagacggttttgtgaccgaaattaaatttaatctaaacagataccaaaacaatcatcttcgttttggtaaaagggatcttcttcgtcttcttcagcagaacttgtttcttccttctttgaggatgaagcttcttcttcctgttgtaacatttgtagaacttccttcagatttttagctaagacctcctttgatgtcgatcctgctaaaaatgctgccagatgagacttttggttcaaaaacacagaagtctctggatcagctgctttgaggaattctagatgggattggaaccatagttttacttgttctgcatccgctttggatgagtcaaattgtgtccaccattttacaaatgcgtgtctttgtagtgatggatattggtttgtctttttagtcttgctgtaacgatattgccatgagaatatccatgacagtgcaaagcttgaaaagtatttaagatctgctggaattcgtgattcctgcgaattgtattgtttcttaaattgggaaaatccttgttggaccgtttctgggaatatctctgggattggtccaaagaagtcccaccattgcaaaaaccaattgggaaaattgtaaattgtgttggtcttgaaatatatcagccatgaatgtttgaagcgggtattttggtgccaaaacaccttagtcatcaacgtaatcccaataggtataacctactggatcaaatggaactgaaaatctctttcctttgttcaagtccgaaccaaagtgtcttggttgaagaacttttagtatttggatggttgagtgggtgtttaaggtttggtcttttggatctttgaaatgtttgatagatactgagtttgaatctaccaaaatcaattcataaaaagttcttgtcttcaggatagtggttggtttgtagtgaaatcctggtgggaaagccttggccgtcgccttgaagggatttttgtcccaaaattcaggttccatatgcaaaacagttaacaatttatttttataaatataattgttagtttgtttggtaggtggtgtttgagctttggctaaaggtagttttcctttagtattggtggctgttttggtcattga

SEQ ID NO: 12050 - DNA, 1118 bp, Glycine max
  Gm_smallRNAprecursor_4883
atgaagcttcttcttcctgttgtaacatttgtagaacttccttcagatttttagctaagacctcctttgatgtcgatcctgctaaaaatgctgccagatgagacttttggttcaaaaacacagaagtctctggatcagctgctttgaggaattctagatgggattggaaccatagttttacttgttctgcatccgctttggatgagtcaaattgtgtccaccattttacaaatgcgtgtctttgtagtgatggatattggtttgtctttttagtcttgctgtaacgatattgccatgagaatatccatgacagtgcaaagcttgaaaagtatttaagatctgctggaattcgtgattcctgcgaattgtattgtttcttaaattgggaaaatccttgttggaccgtttctgggaatatctctgggattggtccaaagaagtcccaccattgcaaaaaccaattgggaaaattgtaaattgtgttggtcttgaaatatatcagccatgaatgtttgaagcgggtattttggtgccaaaacaccttagtcatcaacgtaatcccaataggtataacctactggatcaaatggaactgaaaatctctttcctttgttcaagtccgaaccaaagtgtcttggttgaagaacttttagtatttggatggttgagtgggtgtttaaggtttggtcttttggatctttgaaatgtttgatagatactgagtttgaatctaccaaaatcaattcataaaaagttcttgtcttcaggatagtggttggtttgtagtgaaatcctggtgggaaagccttggccgtcgccttgaagggatttttgtcccaaaattcaggttccatatgcaaaacagttaacaatttatttttataaatataattgttagtttgtttggtaggtggtgtttgagctttggctaaaggtagttttcctttagtattggtggctgttttggtcattgacgcattttggatcattgtttgtaaatttgattcagattcatcatcagattctgaggcaatgtctgcccaagattttttgattatttttggaaatttggtcagacccatgtcttgaagggcctgaagggtttcaattggccatgc

SEQ ID NO: 12051 - DNA, 1189 bp, Glycine max
  Gm_smallRNAprecursor_4884
caaaaacacagaagtctctggatcagctgctttgaggaattctagatgggattggaaccatagttttacttgttctgcatccgctttggatgagtcaaattgtgtccaccattttacaaatgcgtgtctttgtagtgatggatattggtttgtctttttagtcttgctgtaacgatattgccatgagaatatccatgacagtgcaaagcttgaaaagtatttaagatctgctggaattcgtgattcctgcgaattgtattgtttcttaaattgggaaaatccttgttggaccgtttctgggaatatctctgggattggtccaaagaagtcccaccattgcaaaaaccaattgggaaaattgtaaattgtgttggtcttgaaatatatcagccatgaatgtttgaagcgggtattttggtgccaaaacaccttagtcatcaacgtaatcccaataggtataacctactggatcaaatggaactgaaaatctctttcctttgttcaagtccgaaccaaagtgtcttggttgaagaacttttagtatttggatggttgagtgggtgtttaaggtttggtcttttggatctttgaaatgtttgatagatactgagtttgaatctaccaaaatcaattcataaaaagttcttgtcttcaggatagtggttggtttgtagtgaaatcctggtgggaaagccttggccgtcgccttgaagggatttttgtcccaaaattcaggttccatatgcaaaacagttaacaatttatttttataaatataattgttagtttgtttggtaggtggtgtttgagctttggctaaaggtagttttcctttagtattggtggctgttttggtcattgacgcattttggatcattgtttgtaaatttgattcagattcatcatcagattctgaggcaatgtctgcccaagattttttgattatttttggaaatttggtcagacccatgtcttgaagggcctgaagggtttcaattggccatgcatagtcggccgatgtttgtttggcggttgccggtttgggagattcctgagtggatggctcaggtttgattgaggcaatctgggttgatgacccttctaaattggttttctgggtagatgacccagcctgggttggtgacccagaagaggtagatgatttcttgatggttggctctggaagagc

SEQ ID NO: 12052 - DNA, 1224 bp, Glycine max
  Gm_smallRNAprecursor_4885
tcagctgctttgaggaattctagatgggattggaaccatagttttacttgttctgcatccgctttggatgagtcaaattgtgtccaccattttacaaatgcgtgtctttgtagtgatggatattggtttgtctttttagtcttgctgtaacgatattgccatgagaatatccatgacagtgcaaagcttgaaaagtatttaagatctgctggaattcgtgattcctgcgaattgtattgtttcttaaattgggaaaatccttgttggaccgtttctgggaatatctctgggattggtccaaagaagtcccaccattgcaaaaaccaattgggaaaattgtaaattgtgttggtcttgaaatatatcagccatgaatgtttgaagcgggtattttggtgccaaaacaccttagtcatcaacgtaatcccaataggtataacctactggatcaaatggaactgaaaatctctttcctttgttcaagtccgaaccaaagtgtcttggttgaagaacttttagtatttggatggttgagtgggtgtttaaggtttggtcttttggatctttgaaatgtttgatagatactgagtttgaatctaccaaaatcaattcataaaaagttcttgtcttcaggatagtggttggtttgtagtgaaatcctggtgggaaagccttggccgtcgccttgaagggatttttgtcccaaaattcaggttccatatgcaaaacagttaacaatttatttttataaatataattgttagtttgtttggtaggtggtgtttgagctttggctaaaggtagttttcctttagtattggtggctgttttggtcattgacgcattttggatcattgtttgtaaatttgattcagattcatcatcagattctgaggcaatgtctgcccaagattttttgattatttttggaaatttggtcagacccatgtcttgaagggcctgaagggtttcaattggccatgcatagtcggccgatgtttgtttggcggttgccggtttgggagattcctgagtggatggctcaggtttgattgaggcaatctgggttgatgacccttctaaattggttttctgggtagatgacccagcctgggttggtgacccagaagaggtagatgatttcttgatggttggctctggaagagccagcctggctcctttgcctgtactccttcctccccgtagggagattcccgatgcctt

SEQ ID NO: 12053 - DNA, 1222 bp, Glycine max
  Gm_smallRNAprecursor_4886
agctgctttgaggaattctagatgggattggaaccatagttttacttgttctgcatccgctttggatgagtcaaattgtgtccaccattttacaaatgcgtgtctttgtagtgatggatattggtttgtctttttagtcttgctgtaacgatattgccatgagaatatccatgacagtgcaaagcttgaaaagtatttaagatctgctggaattcgtgattcctgcgaattgtattgtttcttaaattgggaaaatccttgttggaccgtttctgggaatatctctgggattggtccaaagaagtcccaccattgcaaaaaccaattgggaaaattgtaaattgtgttggtcttgaaatatatcagccatgaatgtttgaagcgggtattttggtgccaaaacaccttagtcatcaacgtaatcccaataggtataacctactggatcaaatggaactgaaaatctctttcctttgttcaagtccgaaccaaagtgtcttggttgaagaacttttagtatttggatggttgagtgggtgtttaaggtttggtcttttggatctttgaaatgtttgatagatactgagtttgaatctaccaaaatcaattcataaaaagttcttgtcttcaggatagtggttggtttgtagtgaaatcctggtgggaaagccttggccgtcgccttgaagggatttttgtcccaaaattcaggttccatatgcaaaacagttaacaatttatttttataaatataattgttagtttgtttggtaggtggtgtttgagctttggctaaaggtagttttcctttagtattggtggctgttttggtcattgacgcattttggatcattgtttgtaaatttgattcagattcatcatcagattctgaggcaatgtctgcccaagattttttgattatttttggaaatttggtcagacccatgtcttgaagggcctgaagggtttcaattggccatgcatagtcggccgatgtttgtttggcggttgccggtttgggagattcctgagtggatggctcaggtttgattgaggcaatctgggttgatgacccttctaaattggttttctgggtagatgacccagcctgggttggtgacccagaagaggtagatgatttcttgatggttggctctggaagagccagcctggctcctttgcctgtactccttcctccccgtagggagattcccgatgcctt

SEQ ID NO: 12054 - DNA, 1193 bp, Glycine max
  Gm_smallRNAprecursor_4887
ttggaaccatagttttacttgttctgcatccgctttggatgagtcaaattgtgtccaccattttacaaatgcgtgtctttgtagtgatggatattggtttgtctttttagtcttgctgtaacgatattgccatgagaatatccatgacagtgcaaagcttgaaaagtatttaagatctgctggaattcgtgattcctgcgaattgtattgtttcttaaattgggaaaatccttgttggaccgtttctgggaatatctctgggattggtccaaagaagtcccaccattgcaaaaaccaattgggaaaattgtaaattgtgttggtcttgaaatatatcagccatgaatgtttgaagcgggtattttggtgccaaaacaccttagtcatcaacgtaatcccaataggtataacctactggatcaaatggaactgaaaatctctttcctttgttcaagtccgaaccaaagtgtcttggttgaagaacttttagtatttggatggttgagtgggtgtttaaggtttggtcttttggatctttgaaatgtttgatagatactgagtttgaatctaccaaaatcaattcataaaaagttcttgtcttcaggatagtggttggtttgtagtgaaatcctggtgggaaagccttggccgtcgccttgaagggatttttgtcccaaaattcaggttccatatgcaaaacagttaacaatttatttttataaatataattgttagtttgtttggtaggtggtgtttgagctttggctaaaggtagttttcctttagtattggtggctgttttggtcattgacgcattttggatcattgtttgtaaatttgattcagattcatcatcagattctgaggcaatgtctgcccaagattttttgattatttttggaaatttggtcagacccatgtcttgaagggcctgaagggtttcaattggccatgcatagtcggccgatgtttgtttggcggttgccggtttgggagattcctgagtggatggctcaggtttgattgaggcaatctgggttgatgacccttctaaattggttttctgggtagatgacccagcctgggttggtgacccagaagaggtagatgatttcttgatggttggctctggaagagccagcctggctcctttgcctgtactccttcctccccgtagggagattcccgatgcc

SEQ ID NO: 12055 - DNA, 1195 bp, Glycine max
  Gm_smallRNAprecursor_4888
ttggaaccatagttttacttgttctgcatccgctttggatgagtcaaattgtgtccaccattttacaaatgcgtgtctttgtagtgatggatattggtttgtctttttagtcttgctgtaacgatattgccatgagaatatccatgacagtgcaaagcttgaaaagtatttaagatctgctggaattcgtgattcctgcgaattgtattgtttcttaaattgggaaaatccttgttggaccgtttctgggaatatctctgggattggtccaaagaagtcccaccattgcaaaaaccaattgggaaaattgtaaattgtgttggtcttgaaatatatcagccatgaatgtttgaagcgggtattttggtgccaaaacaccttagtcatcaacgtaatcccaataggtataacctactggatcaaatggaactgaaaatctctttcctttgttcaagtccgaaccaaagtgtcttggttgaagaacttttagtatttggatggttgagtgggtgtttaaggtttggtcttttggatctttgaaatgtttgatagatactgagtttgaatctaccaaaatcaattcataaaaagttcttgtcttcaggatagtggttggtttgtagtgaaatcctggtgggaaagccttggccgtcgccttgaagggatttttgtcccaaaattcaggttccatatgcaaaacagttaacaatttatttttataaatataattgttagtttgtttggtaggtggtgtttgagctttggctaaaggtagttttcctttagtattggtggctgttttggtcattgacgcattttggatcattgtttgtaaatttgattcagattcatcatcagattctgaggcaatgtctgcccaagattttttgattatttttggaaatttggtcagacccatgtcttgaagggcctgaagggtttcaattggccatgcatagtcggccgatgtttgtttggcggttgccggtttgggagattcctgagtggatggctcaggtttgattgaggcaatctgggttgatgacccttctaaattggttttctgggtagatgacccagcctgggttggtgacccagaagaggtagatgatttcttgatggttggctctggaagagccagcctggctcctttgcctgtactccttcctccccgtagggagattcccgatgcctt

SEQ ID NO: 12056 - DNA, 1058 bp, Glycine max
  Gm_smallRNAprecursor_4889
agttttacttgttctgcatccgctttggatgagtcaaattgtgtccaccattttacaaatgcgtgtctttgtagtgatggatattggtttgtctttttagtcttgctgtaacgatattgccatgagaatatccatgacagtgcaaagcttgaaaagtatttaagatctgctggaattcgtgattcctgcgaattgtattgtttcttaaattgggaaaatccttgttggaccgtttctgggaatatctctgggattggtccaaagaagtcccaccattgcaaaaaccaattgggaaaattgtaaattgtgttggtcttgaaatatatcagccatgaatgtttgaagcgggtattttggtgccaaaacaccttagtcatcaacgtaatcccaataggtataacctactggatcaaatggaactgaaaatctctttcctttgttcaagtccgaaccaaagtgtcttggttgaagaacttttagtatttggatggttgagtgggtgtttaaggtttggtcttttggatctttgaaatgtttgatagatactgagtttgaatctaccaaaatcaattcataaaaagttcttgtcttcaggatagtggttggtttgtagtgaaatcctggtgggaaagccttggccgtcgccttgaagggatttttgtcccaaaattcaggttccatatgcaaaacagttaacaatttatttttataaatataattgttagtttgtttggtaggtggtgtttgagctttggctaaaggtagttttcctttagtattggtggctgttttggtcattgacgcattttggatcattgtttgtaaatttgattcagattcatcatcagattctgaggcaatgtctgcccaagattttttgattatttttggaaatttggtcagacccatgtcttgaagggcctgaagggtttcaattggccatgcatagtcggccgatgtttgtttggcggttgccggtttgggagattcctgagtggatggctcaggtttgattgaggcaatctgggttgatgacccttctaaattggttttctggg

SEQ ID NO: 12057 - DNA, 1183 bp, Glycine max
  Gm_smallRNAprecursor_4890
agttttacttgttctgcatccgctttggatgagtcaaattgtgtccaccattttacaaatgcgtgtctttgtagtgatggatattggtttgtctttttagtcttgctgtaacgatattgccatgagaatatccatgacagtgcaaagcttgaaaagtatttaagatctgctggaattcgtgattcctgcgaattgtattgtttcttaaattgggaaaatccttgttggaccgtttctgggaatatctctgggattggtccaaagaagtcccaccattgcaaaaaccaattgggaaaattgtaaattgtgttggtcttgaaatatatcagccatgaatgtttgaagcgggtattttggtgccaaaacaccttagtcatcaacgtaatcccaataggtataacctactggatcaaatggaactgaaaatctctttcctttgttcaagtccgaaccaaagtgtcttggttgaagaacttttagtatttggatggttgagtgggtgtttaaggtttggtcttttggatctttgaaatgtttgatagatactgagtttgaatctaccaaaatcaattcataaaaagttcttgtcttcaggatagtggttggtttgtagtgaaatcctggtgggaaagccttggccgtcgccttgaagggatttttgtcccaaaattcaggttccatatgcaaaacagttaacaatttatttttataaatataattgttagtttgtttggtaggtggtgtttgagctttggctaaaggtagttttcctttagtattggtggctgttttggtcattgacgcattttggatcattgtttgtaaatttgattcagattcatcatcagattctgaggcaatgtctgcccaagattttttgattatttttggaaatttggtcagacccatgtcttgaagggcctgaagggtttcaattggccatgcatagtcggccgatgtttgtttggcggttgccggtttgggagattcctgagtggatggctcaggtttgattgaggcaatctgggttgatgacccttctaaattggttttctgggtagatgacccagcctgggttggtgacccagaagaggtagatgatttcttgatggttggctctggaagagccagcctggctcctttgcctgtactccttcctccccgtagggagattcccgatgcc

SEQ ID NO: 12058 - DNA, 1098 bp, Glycine max
  Gm_smallRNAprecursor_4891
aatgcgtgtctttgtagtgatggatattggtttgtctttttagtcttgctgtaacgatattgccatgagaatatccatgacagtgcaaagcttgaaaagtatttaagatctgctggaattcgtgattcctgcgaattgtattgtttcttaaattgggaaaatccttgttggaccgtttctgggaatatctctgggattggtccaaagaagtcccaccattgcaaaaaccaattgggaaaattgtaaattgtgttggtcttgaaatatatcagccatgaatgtttgaagcgggtattttggtgccaaaacaccttagtcatcaacgtaatcccaataggtataacctactggatcaaatggaactgaaaatctctttcctttgttcaagtccgaaccaaagtgtcttggttgaagaacttttagtatttggatggttgagtgggtgtttaaggtttggtcttttggatctttgaaatgtttgatagatactgagtttgaatctaccaaaatcaattcataaaaagttcttgtcttcaggatagtggttggtttgtagtgaaatcctggtgggaaagccttggccgtcgccttgaagggatttttgtcccaaaattcaggttccatatgcaaaacagttaacaatttatttttataaatataattgttagtttgtttggtaggtggtgtttgagctttggctaaaggtagttttcctttagtattggtggctgttttggtcattgacgcattttggatcattgtttgtaaatttgattcagattcatcatcagattctgaggcaatgtctgcccaagattttttgattatttttggaaatttggtcagacccatgtcttgaagggcctgaagggtttcaattggccatgcatagtcggccgatgtttgtttggcggttgccggtttgggagattcctgagtggatggctcaggtttgattgaggcaatctgggttgatgacccttctaaattggttttctgggtagatgacccagcctgggttggtgacccagaagaggtagatgatttcttgatggttggctctggaagagccagcctggctcctttgcctgtactcct

SEQ ID NO: 12059 - DNA, 1090 bp, Glycine max
  Gm_smallRNAprecursor_4892
ttcctgcgaattgtattgtttcttaaattgggaaaatccttgttggaccgtttctgggaatatctctgggattggtccaaagaagtcccaccattgcaaaaaccaattgggaaaattgtaaattgtgttggtcttgaaatatatcagccatgaatgtttgaagcgggtattttggtgccaaaacaccttagtcatcaacgtaatcccaataggtataacctactggatcaaatggaactgaaaatctctttcctttgttcaagtccgaaccaaagtgtcttggttgaagaacttttagtatttggatggttgagtgggtgtttaaggtttggtcttttggatctttgaaatgtttgatagatactgagtttgaatctaccaaaatcaattcataaaaagttcttgtcttcaggatagtggttggtttgtagtgaaatcctggtgggaaagccttggccgtcgccttgaagggatttttgtcccaaaattcaggttccatatgcaaaacagttaacaatttatttttataaatataattgttagtttgtttggtaggtggtgtttgagctttggctaaaggtagttttcctttagtattggtggctgttttggtcattgacgcattttggatcattgtttgtaaatttgattcagattcatcatcagattctgaggcaatgtctgcccaagattttttgattatttttggaaatttggtcagacccatgtcttgaagggcctgaagggtttcaattggccatgcatagtcggccgatgtttgtttggcggttgccggtttgggagattcctgagtggatggctcaggtttgattgaggcaatctgggttgatgacccttctaaattggttttctgggtagatgacccagcctgggttggtgacccagaagaggtagatgatttcttgatggttggctctggaagagccagcctggctcctttgcctgtactccttcctccccgtagggagattcccgatgccttaggaggcattaccacttttctgtaagaattcacgggtaaggtagtcaggtagtgaatttgaggtgcccttgatgtattctatgtcaa

SEQ ID NO: 12060 - DNA, 1141 bp, Glycine max
  Gm_smallRNAprecursor_4893
ttgacgcattttggatcattgtttgtaaatttgattcagattcatcatcagattctgaggcaatgtctgcccaagattttttgattatttttggaaatttggtcagacccatgtcttgaagggcctgaagggtttcaattggccatgcatagtcggccgatgtttgtttggcggttgccggtttgggagattcctgagtggatggctcaggtttgattgaggcaatctgggttgatgacccttctaaattggttttctgggtagatgacccagcctgggttggtgacccagaagaggtagatgatttcttgatggttggctctggaagagccagcctggctcctttgcctgtactccttcctccccgtagggagattcccgatgccttaggaggcattaccacttttctgtaagaattcacgggtaaggtagtcaggtagtgaatttgaggtgcccttgatgtattctatgtcaaaatcaaagacacttaaaattgcttgccatcgtgcaaaaatttgttttgaggcaaggtttttaacatctttttgtaaaatatctttggctgatttacaatcaaccctgattaaaaatttttggtttaataaatccgattgaaatttggaaatgcacaaaacaattgctaaaacctcttttttaacagttgaatattttaattgtgcaggattccaatgttttgatgtatatgcaatgacatgatcttggccacggactctttgtttgaggatgccaccataacctatgtctgaagcatcagtttcgacaattttaaatgcctgtggaataggaagatacagacatttaatggattggactttgactttgatttctttaaccgtttgtgtatggaggtcagaccaaggaggcggatttttcttcagcctatcatgtaatggcttgacaatattatttaaataggggacaaattctcctacgtaatttagacaacctagaaatctttgtaactgggttttgtctaagatttggttggggaatttgctagcaaactctattgacctttcgattggaatgattgtaccttgatatatattgtgaccaaggaatcgaattcgagtttggaaaagattgatttttgatttggagactgccaaaccattttgtt

SEQ ID NO: 12061 - DNA, 1049 bp, Glycine max
  Gm_smallRNAprecursor_4894
ggaaatttggtcagacccatgtcttgaagggcctgaagggtttcaattggccatgcatagtcggccgatgtttgtttggcggttgccggtttgggagattcctgagtggatggctcaggtttgattgaggcaatctgggttgatgacccttctaaattggttttctgggtagatgacccagcctgggttggtgacccagaagaggtagatgatttcttgatggttggctctggaagagccagcctggctcctttgcctgtactccttcctccccgtagggagattcccgatgccttaggaggcattaccacttttctgtaagaattcacgggtaaggtagtcaggtagtgaatttgaggtgcccttgatgtattctatgtcaaaatcaaagacacttaaaattgcttgccatcgtgcaaaaatttgttttgaggcaaggtttttaacatctttttgtaaaatatctttggctgatttacaatcaaccctgattaaaaatttttggtttaataaatccgattgaaatttggaaatgcacaaaacaattgctaaaacctcttttttaacagttgaatattttaattgtgcaggattccaatgttttgatgtatatgcaatgacatgatcttggccacggactctttgtttgaggatgccaccataacctatgtctgaagcatcagtttcgacaattttaaatgcctgtggaataggaagatacagacatttaatggattggactttgactttgatttctttaaccgtttgtgtatggaggtcagaccaaggaggcggatttttcttcagcctatcatgtaatggcttgacaatattatttaaataggggacaaattctcctacgtaatttagacaacctagaaatctttgtaactgggttttgtctaagatttggttggggaatttgctagcaaactctattgacctttcgattggaatgattgtaccttgatatatattgtgaccaaggaatcgaattcgagtttggaaaagattgatttttgatttggagactgccaaaccattttgtt

SEQ ID NO: 12062 - DNA, 1113 bp, Glycine max
  Gm_smallRNAprecursor_4895
ggaaatttggtcagacccatgtcttgaagggcctgaagggtttcaattggccatgcatagtcggccgatgtttgtttggcggttgccggtttgggagattcctgagtggatggctcaggtttgattgaggcaatctgggttgatgacccttctaaattggttttctgggtagatgacccagcctgggttggtgacccagaagaggtagatgatttcttgatggttggctctggaagagccagcctggctcctttgcctgtactccttcctccccgtagggagattcccgatgccttaggaggcattaccacttttctgtaagaattcacgggtaaggtagtcaggtagtgaatttgaggtgcccttgatgtattctatgtcaaaatcaaagacacttaaaattgcttgccatcgtgcaaaaatttgttttgaggcaaggtttttaacatctttttgtaaaatatctttggctgatttacaatcaaccctgattaaaaatttttggtttaataaatccgattgaaatttggaaatgcacaaaacaattgctaaaacctcttttttaacagttgaatattttaattgtgcaggattccaatgttttgatgtatatgcaatgacatgatcttggccacggactctttgtttgaggatgccaccataacctatgtctgaagcatcagtttcgacaattttaaatgcctgtggaataggaagatacagacatttaatggattggactttgactttgatttctttaaccgtttgtgtatggaggtcagaccaaggaggcggatttttcttcagcctatcatgtaatggcttgacaatattatttaaataggggacaaattctcctacgtaatttagacaacctagaaatctttgtaactgggttttgtctaagatttggttggggaatttgctagcaaactctattgacctttcgattggaatgattgtaccttgatatatattgtgaccaaggaatcgaattcgagtttggaaaagattgatttttgatttggagactgccaaaccattttgtttgatgatatgtatgaaggtttggagatgtttgaaatgttggtcaatgttttgggaaaagattaa

SEQ ID NO: 12063 - DNA, 1113 bp, Glycine max; identical to SEQ ID NO: 12062
  Gm_smallRNAprecursor_4896

SEQ ID NO: 12064 - DNA, 1114 bp, Glycine max
  Gm_smallRNAprecursor_4897
ggaaatttggtcagacccatgtcttgaagggcctgaagggtttcaattggccatgcatagtcggccgatgtttgtttggcggttgccggtttgggagattcctgagtggatggctcaggtttgattgaggcaatctgggttgatgacccttctaaattggttttctgggtagatgacccagcctgggttggtgacccagaagaggtagatgatttcttgatggttggctctggaagagccagcctggctcctttgcctgtactccttcctccccgtagggagattcccgatgccttaggaggcattaccacttttctgtaagaattcacgggtaaggtagtcaggtagtgaatttgaggtgcccttgatgtattctatgtcaaaatcaaagacacttaaaattgcttgccatcgtgcaaaaatttgttttgaggcaaggtttttaacatctttttgtaaaatatctttggctgatttacaatcaaccctgattaaaaatttttggtttaataaatccgattgaaatttggaaatgcacaaaacaattgctaaaacctcttttttaacagttgaatattttaattgtgcaggattccaatgttttgatgtatatgcaatgacatgatcttggccacggactctttgtttgaggatgccaccataacctatgtctgaagcatcagtttcgacaattttaaatgcctgtggaataggaagatacagacatttaatggattggactttgactttgatttctttaaccgtttgtgtatggaggtcagaccaaggaggcggatttttcttcagcctatcatgtaatggcttgacaatattatttaaataggggacaaattctcctacgtaatttagacaacctagaaatctttgtaactgggttttgtctaagatttggttggggaatttgctagcaaactctattgacctttcgattggaatgattgtaccttgatatatattgtgaccaaggaatcgaattcgagtttggaaaagattgatttttgatttggagactgccaaaccattttgtttgatgatatgtatgaaggtttggagatgtttgaaatgttggtcaatgttttgggaaaagattaaa

SEQ ID NO: 12065 - DNA, 1207 bp, Glycine max
  Gm_smallRNAprecursor_4898
ggaaatttggtcagacccatgtcttgaagggcctgaagggtttcaattggccatgcatagtcggccgatgtttgtttggcggttgccggtttgggagattcctgagtggatggctcaggtttgattgaggcaatctgggttgatgacccttctaaattggttttctgggtagatgacccagcctgggttggtgacccagaagaggtagatgatttcttgatggttggctctggaagagccagcctggctcctttgcctgtactccttcctccccgtagggagattcccgatgccttaggaggcattaccacttttctgtaagaattcacgggtaaggtagtcaggtagtgaatttgaggtgcccttgatgtattctatgtcaaaatcaaagacacttaaaattgcttgccatcgtgcaaaaatttgttttgaggcaaggtttttaacatctttttgtaaaatatctttggctgatttacaatcaaccctgattaaaaatttttggtttaataaatccgattgaaatttggaaatgcacaaaacaattgctaaaacctcttttttaacagttgaatattttaattgtgcaggattccaatgttttgatgtatatgcaatgacatgatcttggccacggactctttgtttgaggatgccaccataacctatgtctgaagcatcagtttcgacaattttaaatgcctgtggaataggaagatacagacatttaatggattggactttgactttgatttctttaaccgtttgtgtatggaggtcagaccaaggaggcggatttttcttcagcctatcatgtaatggcttgacaatattatttaaataggggacaaattctcctacgtaatttagacaacctagaaatctttgtaactgggttttgtctaagatttggttggggaatttgctagcaaactctattgacctttcgattggaatgattgtaccttgatatatattgtgaccaaggaatcgaattcgagtttggaaaagattgatttttgatttggagactgccaaaccattttgtttgatgatatgtatgaaggtttggagatgtttgaaatgttggtcaatgttttgggaaaagattaaaacatcatctatgtagacaatgacaaattttgaataaggattaaaaatatcgttcataattttttgaaactctgaaggggcattcttcagtccg

SEQ ID NO: 12066 - DNA, 1035 bp, Glycine max
  Gm_smallRNAprecursor_4899
gcggttgccggtttgggagattcctgagtggatggctcaggtttgattgaggcaatctgggttgatgacccttctaaattggttttctgggtagatgacccagcctgggttggtgacccagaagaggtagatgatttcttgatggttggctctggaagagccagcctggctcctttgcctgtactccttcctccccgtagggagattcccgatgccttaggaggcattaccacttttctgtaagaattcacgggtaaggtagtcaggtagtgaatttgaggtgcccttgatgtattctatgtcaaaatcaaagacacttaaaattgcttgccatcgtgcaaaaatttgttttgaggcaaggtttttaacatctttttgtaaaatatctttggctgatttacaatcaaccctgattaaaaatttttggtttaataaatccgattgaaatttggaaatgcacaaaacaattgctaaaacctcttttttaacagttgaatattttaattgtgcaggattccaatgttttgatgtatatgcaatgacatgatcttggccacggactctttgtttgaggatgccaccataacctatgtctgaagcatcagtttcgacaattttaaatgcctgtggaataggaagatacagacatttaatggattggactttgactttgatttctttaaccgtttgtgtatggaggtcagaccaaggaggcggatttttcttcagcctatcatgtaatggcttgacaatattatttaaataggggacaaattctcctacgtaatttagacaacctagaaatctttgtaactgggttttgtctaagatttggttggggaatttgctagcaaactctattgacctttcgattggaatgattgtaccttgatatatattgtgaccaaggaatcgaattcgagtttggaaaagattgatttttgatttggagactgccaaaccattttgtttgatgatatgtatgaaggtttggagatgtttgaaatgttggtcaatgttttgggaaaagattaa

SEQ ID NO: 12067 - DNA, 1247 bp, Glycine max
  Gm_smallRNAprecursor_4900
agatgatttcttgatggttggctctggaagagccagcctggctcctttgcctgtactccttcctccccgtagggagattcccgatgccttaggaggcattaccacttttctgtaagaattcacgggtaaggtagtcaggtagtgaatttgaggtgcccttgatgtattctatgtcaaaatcaaagacacttaaaattgcttgccatcgtgcaaaaatttgttttgaggcaaggtttttaacatctttttgtaaaatatctttggctgatttacaatcaaccctgattaaaaatttttggtttaataaatccgattgaaatttggaaatgcacaaaacaattgctaaaacctcttttttaacagttgaatattttaattgtgcaggattccaatgttttgatgtatatgcaatgacatgatcttggccacggactctttgtttgaggatgccaccataacctatgtctgaagcatcagtttcgacaattttaaatgcctgtggaataggaagatacagacatttaatggattggactttgactttgatttctttaaccgtttgtgtatggaggtcagaccaaggaggcggatttttcttcagcctatcatgtaatggcttgacaatattatttaaataggggacaaattctcctacgtaatttagacaacctagaaatctttgtaactgggttttgtctaagatttggttggggaatttgctagcaaactctattgacctttcgattggaatgattgtaccttgatatatattgtgaccaaggaatcgaattcgagtttggaaaagattgatttttgatttggagactgccaaaccattttgtttgatgatatgtatgaaggtttggagatgtttgaaatgttggtcaatgttttgggaaaagattaaaacatcatctatgtagacaatgacaaattttgaataaggattaaaaatatcgttcataattttttgaaactctgaaggggcattcttcagtccgaatggcatcacgttccattcatattgcccgaaaggtacaggaaacgttgttttgtacctatctgattcttggatttggatttgccaaaatccagatttcatatcaaattttgaaaatatctttgcagaatttaatctgttaagcaaatcttttttgtttggaataggatatctaatccattgtaatgcttgatttaatggtttgtaatttatgactaagcggggtgttccacgctcaatctcagat

SEQ ID NO: 12068 - DNA, 1246 bp, Glycine max
  Gm_smallRNAprecursor_4901
gatgatttcttgatggttggctctggaagagccagcctggctcctttgcctgtactccttcctccccgtagggagattcccgatgccttaggaggcattaccacttttctgtaagaattcacgggtaaggtagtcaggtagtgaatttgaggtgcccttgatgtattctatgtcaaaatcaaagacacttaaaattgcttgccatcgtgcaaaaatttgttttgaggcaaggtttttaacatctttttgtaaaatatctttggctgatttacaatcaaccctgattaaaaatttttggtttaataaatccgattgaaatttggaaatgcacaaaacaattgctaaaacctcttttttaacagttgaatattttaattgtgcaggattccaatgttttgatgtatatgcaatgacatgatcttggccacggactctttgtttgaggatgccaccataacctatgtctgaagcatcagtttcgacaattttaaatgcctgtggaataggaagatacagacatttaatggattggactttgactttgatttctttaaccgtttgtgtatggaggtcagaccaaggaggcggatttttcttcagcctatcatgtaatggcttgacaatattatttaaataggggacaaattctcctacgtaatttagacaacctagaaatctttgtaactgggttttgtctaagatttggttggggaatttgctagcaaactctattgacctttcgattggaatgattgtaccttgatatatattgtgaccaaggaatcgaattcgagtttggaaaagattgatttttgatttggagactgccaaaccattttgtttgatgatatgtatgaaggtttggagatgtttgaaatgttggtcaatgttttgggaaaagattaaaacatcatctatgtagacaatgacaaattttgaataaggattaaaaatatcgttcataattttttgaaactctgaaggggcattcttcagtccgaatggcatcacgttccattcatattgcccgaaaggtacaggaaacgttgttttgtacctatctgattcttggatttggatttgccaaaatccagatttcatatcaaattttgaaaatatctttgcagaatttaatctgttaagcaaatcttttttgtttggaataggatatctaatccattgtaatgcttgatttaatggtttgtaatttatgactaagcggggtgttccacgctcaatctcagat

SEQ ID NO: 12069 - DNA, 1031 bp, Glycine max
  Gm_smallRNAprecursor_4902
ctttttgtaaaatatctttggctgatttacaatcaaccctgattaaaaatttttggtttaataaatccgattgaaatttggaaatgcacaaaacaattgctaaaacctcttttttaacagttgaatattttaattgtgcaggattccaatgttttgatgtatatgcaatgacatgatcttggccacggactctttgtttgaggatgccaccataacctatgtctgaagcatcagtttcgacaattttaaatgcctgtggaataggaagatacagacatttaatggattggactttgactttgatttctttaaccgtttgtgtatggaggtcagaccaaggaggcggatttttcttcagcctatcatgtaatggcttgacaatattatttaaataggggacaaattctcctacgtaatttagacaacctagaaatctttgtaactgggttttgtctaagatttggttggggaatttgctagcaaactctattgacctttcgattggaatgattgtaccttgatatatattgtgaccaaggaatcgaattcgagtttggaaaagattgatttttgatttggagactgccaaaccattttgtttgatgatatgtatgaaggtttggagatgtttgaaatgttggtcaatgttttgggaaaagattaaaacatcatctatgtagacaatgacaaattttgaataaggattaaaaatatcgttcataattttttgaaactctgaaggggcattcttcagtccgaatggcatcacgttccattcatattgcccgaaaggtacaggaaacgttgttttgtacctatctgattcttggatttggatttgccaaaatccagatttcatatcaaattttgaaaatatctttgcagaatttaatctgttaagcaaatcttttttgtttggaataggatatctaatccattgtaatgcttgatttaatggtttgtaatttatgactaagcggggtgttccacgctcaatctcagattgtttgttaacataaaaagccgcacaa

SEQ ID NO: 12070 - DNA, 1234 bp, Glycine max
  Gm_smallRNAprecursor_4903
aatcaaccctgattaaaaatttttggtttaataaatccgattgaaatttggaaatgcacaaaacaattgctaaaacctcttttttaacagttgaatattttaattgtgcaggattccaatgttttgatgtatatgcaatgacatgatcttggccacggactctttgtttgaggatgccaccataacctatgtctgaagcatcagtttcgacaattttaaatgcctgtggaataggaagatacagacatttaatggattggactttgactttgatttctttaaccgtttgtgtatggaggtcagaccaaggaggcggatttttcttcagcctatcatgtaatggcttgacaatattatttaaataggggacaaattctcctacgtaatttagacaacctagaaatctttgtaactgggttttgtctaagatttggttggggaatttgctagcaaactctattgacctttcgattggaatgattgtaccttgatatatattgtgaccaaggaatcgaattcgagtttggaaaagattgatttttgatttggagactgccaaaccattttgtttgatgatatgtatgaaggtttggagatgtttgaaatgttggtcaatgttttgggaaaagattaaaacatcatctatgtagacaatgacaaattttgaataaggattaaaaatatcgttcataattttttgaaactctgaaggggcattcttcagtccgaatggcatcacgttccattcatattgcccgaaaggtacaggaaacgttgttttgtacctatctgattcttggatttggatttgccaaaatccagatttcatatcaaattttgaaaatatctttgcagaatttaatctgttaagcaaatcttttttgtttggaataggatatctaatccattgtaatgcttgatttaatggtttgtaatttatgactaagcggggtgttccacgctcaatctcagattgtttgttaacataaaaagccgcacaagaccatgggcttttgcttttccggattaggcctttatcaagcaaatccttgatttccttttgacagtattgaagaagttcttcattcatttggattggtctggcttttgtgggaatttgtttttccctaaagtctttctcataagggagatcgacaatatgtttctttctgtcccaaaatgcatgtggcaattcagaacaaacggtcgattcaatatgatttaataaagattg

SEQ ID NO: 12071 - DNA, 1061 bp, Glycine max
  Gm_smallRNAprecursor_4904
tatttaaataggggacaaattctcctacgtaatttagacaacctagaaatctttgtaactgggttttgtctaagatttggttggggaatttgctagcaaactctattgacctttcgattggaatgattgtaccttgatatatattgtgaccaaggaatcgaattcgagtttggaaaagattgatttttgatttggagactgccaaaccattttgtttgatgatatgtatgaaggtttggagatgtttgaaatgttggtcaatgttttgggaaaagattaaaacatcatctatgtagacaatgacaaattttgaataaggattaaaaatatcgttcataattttttgaaactctgaaggggcattcttcagtccgaatggcatcacgttccattcatattgcccgaaaggtacaggaaacgttgttttgtacctatctgattcttggatttggatttgccaaaatccagatttcatatcaaattttgaaaatatctttgcagaatttaatctgttaagcaaatcttttttgtttggaataggatatctaatccattgtaatgcttgatttaatggtttgtaatttatgactaagcggggtgttccacgctcaatctcagattgtttgttaacataaaaagccgcacaagaccatgggcttttgcttttccggattaggcctttatcaagcaaatccttgatttccttttgacagtattgaagaagttcttcattcatttggattggtctggcttttgtgggaatttgtttttccctaaagtctttctcataagggagatcgacaatatgtttctttctgtcccaaaatgcatgtggcaattcagaacaaacggtcgattcaatatgatttaataaagattgaattctttcttttacttggggttttcccagttgtatctgaatattattaaaagatacttcttcttttaagaagttaatttgattaatcttattttctataagatttatatttctggaaattggtttagtagaaaaattaaatataatttttcttcctaaataatttgtggttattccttca

SEQ ID NO: 12072 - DNA, 1127 bp, Glycine max
  Gm_smallRNAprecursor_4905
ggacaaattctcctacgtaatttagacaacctagaaatctttgtaactgggttttgtctaagatttggttggggaatttgctagcaaactctattgacctttcgattggaatgattgtaccttgatatatattgtgaccaaggaatcgaattcgagtttggaaaagattgatttttgatttggagactgccaaaccattttgtttgatgatatgtatgaaggtttggagatgtttgaaatgttggtcaatgttttgggaaaagattaaaacatcatctatgtagacaatgacaaattttgaataaggattaaaaatatcgttcataattttttgaaactctgaaggggcattcttcagtccgaatggcatcacgttccattcatattgcccgaaaggtacaggaaacgttgttttgtacctatctgattcttggatttggatttgccaaaatccagatttcatatcaaattttgaaaatatctttgcagaatttaatctgttaagcaaatcttttttgtttggaataggatatctaatccattgtaatgcttgatttaatggtttgtaatttatgactaagcggggtgttccacgctcaatctcagattgtttgttaacataaaaagccgcacaagaccatgggcttttgcttttccggattaggcctttatcaagcaaatccttgatttccttttgacagtattgaagaagttcttcattcatttggattggtctggcttttgtgggaatttgtttttccctaaagtctttctcataagggagatcgacaatatgtttctttctgtcccaaaatgcatgtggcaattcagaacaaacggtcgattcaatatgatttaataaagattgaattctttcttttacttggggttttcccagttgtatctgaatattattaaaagatacttcttcttttaagaagttaatttgattaatcttattttctataagatttatatttctggaaattggtttagtagaaaaattaaatataatttttcttcctaaataatttgtggttattccttcattagatatttggatgggaaacagggctctaatgaagggcgttcctaagattacttcattcttaaggttttttatcaaa

SEQ ID NO: 12073 - DNA, 1159 bp, Glycine max
  Gm_smallRNAprecursor_4906
acccatctttcgggaagagttacttcatcccattttatttttctcgggagagacacgttagcctttgtcatatcagtgataaacaaggttgtttctcctttttgaggttttaacaggactctagatgcacaagtattcatgaccttgtactggatcctataaattaaggctgctgggattgatccttctttcatgtcaaggccatgaaagtgaatgtttaagaatagagagtcaagaatgtttctgtccatcagactcactgttttttttggataacaattaaaatatattggaccttgtcctaggctggtttcgactgttccaattagggagtcttcaaattgattatgcctaatatctcttagacacattaaaactgctgcatctatgcccatatcaattaagggcttgatggctacttgtacacaaccgatgtgtagatatttatacttacggctatgttcataaattgaagtttttgaaagtagatgaaattcttcccctatatcttgtcctagaggaatattgttttttactgttttgattatgtaatcaaagttgtgtttgtctttaattgtttcaggaacgtatagttgatcctgagggatttctggaatgttccagtcatccatgttttgattaatatcttcgaatcggacttcctcatcgaagagattgtgttttggggcgacctcttgggtctggttatcttgatcatttaagagattggtgtttcttgaagaagatgaagtggaggaatttgagcgaaaagagatacgggaaaaggatcgcaataatctagacatgattaaaacattctctaatatctttgccttcatttggttccataggaatctttccataaggctatatgttacagaacttcttggatctgaataaatgaaaaagaagattttttttttcacagacaatatagtttgaacattactcctatagccaccagtatattatgtctcaatattttatttgaacaatacaccttagccttactgccctttctcatccacgggacttactgctacagtatcattcaactaaaatatcagactgctgtgcttccagaaaatactgttcaaacacatactgtttaaattaaaattactgtacatgcttcagatccataagttcagttaacata

SEQ ID NO: 12074 - DNA, 1224 bp, Glycine max
  Gm_smallRNAprecursor_4907
cttacggctatgttcataaattgaagtttttgaaagtagatgaaattcttcccctatatcttgtcctagaggaatattgttttttactgttttgattatgtaatcaaagttgtgtttgtctttaattgtttcaggaacgtatagttgatcctgagggatttctggaatgttccagtcatccatgttttgattaatatcttcgaatcggacttcctcatcgaagagattgtgttttggggcgacctcttgggtctggttatcttgatcatttaagagattggtgtttcttgaagaagatgaagtggaggaatttgagcgaaaagagatacgggaaaaggatcgcaataatctagacatgattaaaacattctctaatatctttgccttcatttggttccataggaatctttccataaggctatatgttacagaacttcttggatctgaataaatgaaaaagaagattttttttttcacagacaatatagtttgaacattactcctatagccaccagtatattatgtctcaatattttatttgaacaatacaccttagccttactgccctttctcatccacgggacttactgctacagtatcattcaactaaaatatcagactgctgtgcttccagaaaatactgttcaaacacatactgtttaaattaaaattactgtacatgcttcagatccataagttcagttaacatatgcccttacagacactattcctacttccccatcaggctctgataccagaggtcagcggagtaggatcacacggacaaataggaagtaagaatgcagtatgattgatgaaatgaaaatataaacttgaaaacagatatcaagggcacaccggagaccggcttacaataacttttaataaattattacatcattcaataacttttaattgaataatattttcttaaaactcactattggattgaaagttcctttcacataaactatatgtacaaaatttcatattaatccaaaattatttactacctcattcatacaaattggcgtaatataaatttttcatcatataccagaatatgcactatttgattatcaacttattgatgttcaattttgataaaatttaacatagacaatcttggcaatatgctgatatagttcaacagttggatcgataaaaattacattttatatgaagttattaaatggtgttatattacatcggtgtaatttgatc

SEQ ID NO: 12075 - DNA, 1188 bp, Glycine max
  Gm_smallRNAprecursor_4908
tgcggcgctttttttttcctattacatagcactttctgagggctcttgctatggggtatatatttataaaaagtgttttatatatatatatatatatatatatatatatatatatatatatatatatatatatatatatatatatatatatatacagtaattttaatttaaacagtatgtgtttgaacagtaattttaacctctggctctgataccagaggtcagcggagtaggatcaaacggacaaataggaagtaagaatgtagtatgattaatgaaatgaaaatataaacttgaaaacagatatcaaggtcacaccggagaccggcttacaaaacccaggttttcataaacaaagaaaccgaagcggcggaagagccgcacaggatcggtgaagggagaagagagaaggatgaaaaatagaaatttattgaatctagaaagaagcgcttacaaaaatcttgtttcagagcacctctcttccgaaacctgaaaaatgactaaatgaaagggtgcctcacaacatgctagaggactccttatatagccaaaaatctaagaccggtagttgccggtagttttgaccgggactatttgactgtttgttacaagacaagtagttttgaccgggactttaatgactacaggacaggtagtattatccagcattaattacaaacagacggttttgtgaccgaaattaaatttaatctaaacagataccaaaacaatcatcttcgttttggtaaaagggatcttcttcgtcttcttcagcagaacttgtttcttccttctttgaggatgaagcttcttcttcctgttgtaacatttgtagaacttccttcagatttttagctaagacctcctttgatgtcgatcctgctaaaaatgctgccagatgagacttttggttcaagaacacagaagtctctggatcagccgctttgaggaattctggatgggatttgaaccataattttacttgttctggatccgctttggatgagtcaaattgtgtccaccattttacaaatgcgtgtctttgtagtgatggatattgatttgtcttttcagtcttgctgtagcgatattgccatgagaatatccatgacagtgcaaagcttgaaaagtatttaagatctgctggaattcgtgattcctgcgaattgtattgtttcttaaattggg

SEQ ID NO: 12076 - DNA, 1130 bp, Glycine max
  Gm_smallRNAprecursor_4909
tatatatatatatatatatatatatatatatatatatatatatatatatatatatatatatatatatatatacagtaattttaatttaaacagtatgtgtttgaacagtaattttaacctctggctctgataccagaggtcagcggagtaggatcaaacggacaaataggaagtaagaatgtagtatgattaatgaaatgaaaatataaacttgaaaacagatatcaaggtcacaccggagaccggcttacaaaacccaggttttcataaacaaagaaaccgaagcggcggaagagccgcacaggatcggtgaagggagaagagagaaggatgaaaaatagaaatttattgaatctagaaagaagcgcttacaaaaatcttgtttcagagcacctctcttccgaaacctgaaaaatgactaaatgaaagggtgcctcacaacatgctagaggactccttatatagccaaaaatctaagaccggtagttgccggtagttttgaccgggactatttgactgtttgttacaagacaagtagttttgaccgggactttaatgactacaggacaggtagtattatccagcattaattacaaacagacggttttgtgaccgaaattaaatttaatctaaacagataccaaaacaatcatcttcgttttggtaaaagggatcttcttcgtcttcttcagcagaacttgtttcttccttctttgaggatgaagcttcttcttcctgttgtaacatttgtagaacttccttcagatttttagctaagacctcctttgatgtcgatcctgctaaaaatgctgccagatgagacttttggttcaagaacacagaagtctctggatcagccgctttgaggaattctggatgggatttgaaccataattttacttgttctggatccgctttggatgagtcaaattgtgtccaccattttacaaatgcgtgtctttgtagtgatggatattgatttgtcttttcagtcttgctgtagcgatattgccatgagaatatccatgacagtgcaaagcttgaaaagtatttaagatctgctggaattcgtgattcctgcgaattgtattgtttcttaaattgggaaaatccttgttggaccgtttctg

SEQ ID NO: 12077 - DNA, 1143 bp, Glycine max
  Gm_smallRNAprecursor_4910
tatatatatatatatatatatatatatatatatatatatatatatatatatatatatatatatatatatatacagtaattttaatttaaacagtatgtgtttgaacagtaattttaacctctggctctgataccagaggtcagcggagtaggatcaaacggacaaataggaagtaagaatgtagtatgattaatgaaatgaaaatataaacttgaaaacagatatcaaggtcacaccggagaccggcttacaaaacccaggttttcataaacaaagaaaccgaagcggcggaagagccgcacaggatcggtgaagggagaagagagaaggatgaaaaatagaaatttattgaatctagaaagaagcgcttacaaaaatcttgtttcagagcacctctcttccgaaacctgaaaaatgactaaatgaaagggtgcctcacaacatgctagaggactccttatatagccaaaaatctaagaccggtagttgccggtagttttgaccgggactatttgactgtttgttacaagacaagtagttttgaccgggactttaatgactacaggacaggtagtattatccagcattaattacaaacagacggttttgtgaccgaaattaaatttaatctaaacagataccaaaacaatcatcttcgttttggtaaaagggatcttcttcgtcttcttcagcagaacttgtttcttccttctttgaggatgaagcttcttcttcctgttgtaacatttgtagaacttccttcagatttttagctaagacctcctttgatgtcgatcctgctaaaaatgctgccagatgagacttttggttcaagaacacagaagtctctggatcagccgctttgaggaattctggatgggatttgaaccataattttacttgttctggatccgctttggatgagtcaaattgtgtccaccattttacaaatgcgtgtctttgtagtgatggatattgatttgtcttttcagtcttgctgtagcgatattgccatgagaatatccatgacagtgcaaagcttgaaaagtatttaagatctgctggaattcgtgattcctgcgaattgtattgtttcttaaattgggaaaatccttgttggaccgtttctgggaatatctctgg

SEQ ID NO: 12078 - DNA, 1061 bp, Glycine max
  Gm_smallRNAprecursor_4911
ataccagaggtcagcggagtaggatcaaacggacaaataggaagtaagaatgtagtatgattaatgaaatgaaaatataaacttgaaaacagatatcaaggtcacaccggagaccggcttacaaaacccaggttttcataaacaaagaaaccgaagcggcggaagagccgcacaggatcggtgaagggagaagagagaaggatgaaaaatagaaatttattgaatctagaaagaagcgcttacaaaaatcttgtttcagagcacctctcttccgaaacctgaaaaatgactaaatgaaagggtgcctcacaacatgctagaggactccttatatagccaaaaatctaagaccggtagttgccggtagttttgaccgggactatttgactgtttgttacaagacaagtagttttgaccgggactttaatgactacaggacaggtagtattatccagcattaattacaaacagacggttttgtgaccgaaattaaatttaatctaaacagataccaaaacaatcatcttcgttttggtaaaagggatcttcttcgtcttcttcagcagaacttgtttcttccttctttgaggatgaagcttcttcttcctgttgtaacatttgtagaacttccttcagatttttagctaagacctcctttgatgtcgatcctgctaaaaatgctgccagatgagacttttggttcaagaacacagaagtctctggatcagccgctttgaggaattctggatgggatttgaaccataattttacttgttctggatccgctttggatgagtcaaattgtgtccaccattttacaaatgcgtgtctttgtagtgatggatattgatttgtcttttcagtcttgctgtagcgatattgccatgagaatatccatgacagtgcaaagcttgaaaagtatttaagatctgctggaattcgtgattcctgcgaattgtattgtttcttaaattgggaaaatccttgttggaccgtttctgggaatatctctgggattggtccaaagaagtcccaccattgcaaaaaccaattgggaaaat

SEQ ID NO: 12079 - DNA, 1063 bp, Glycine max
  Gm_smallRNAprecursor_4912
ataccagaggtcagcggagtaggatcaaacggacaaataggaagtaagaatgtagtatgattaatgaaatgaaaatataaacttgaaaacagatatcaaggtcacaccggagaccggcttacaaaacccaggttttcataaacaaagaaaccgaagcggcggaagagccgcacaggatcggtgaagggagaagagagaaggatgaaaaatagaaatttattgaatctagaaagaagcgcttacaaaaatcttgtttcagagcacctctcttccgaaacctgaaaaatgactaaatgaaagggtgcctcacaacatgctagaggactccttatatagccaaaaatctaagaccggtagttgccggtagttttgaccgggactatttgactgtttgttacaagacaagtagttttgaccgggactttaatgactacaggacaggtagtattatccagcattaattacaaacagacggttttgtgaccgaaattaaatttaatctaaacagataccaaaacaatcatcttcgttttggtaaaagggatcttcttcgtcttcttcagcagaacttgtttcttccttctttgaggatgaagcttcttcttcctgttgtaacatttgtagaacttccttcagatttttagctaagacctcctttgatgtcgatcctgctaaaaatgctgccagatgagacttttggttcaagaacacagaagtctctggatcagccgctttgaggaattctggatgggatttgaaccataattttacttgttctggatccgctttggatgagtcaaattgtgtccaccattttacaaatgcgtgtctttgtagtgatggatattgatttgtcttttcagtcttgctgtagcgatattgccatgagaatatccatgacagtgcaaagcttgaaaagtatttaagatctgctggaattcgtgattcctgcgaattgtattgtttcttaaattgggaaaatccttgttggaccgtttctgggaatatctctgggattggtccaaagaagtcccaccattgcaaaaaccaattgggaaaattg

SEQ ID NO: 12080 - DNA, 1063 bp, Glycine max; identical to SEQ ID NO: 12079
  Gm_smallRNAprecursor_4913

SEQ ID NO: 12081 - DNA, 1064 bp, Glycine max
  Gm_smallRNAprecursor_4914
ataccagaggtcagcggagtaggatcaaacggacaaataggaagtaagaatgtagtatgattaatgaaatgaaaatataaacttgaaaacagatatcaaggtcacaccggagaccggcttacaaaacccaggttttcataaacaaagaaaccgaagcggcggaagagccgcacaggatcggtgaagggagaagagagaaggatgaaaaatagaaatttattgaatctagaaagaagcgcttacaaaaatcttgtttcagagcacctctcttccgaaacctgaaaaatgactaaatgaaagggtgcctcacaacatgctagaggactccttatatagccaaaaatctaagaccggtagttgccggtagttttgaccgggactatttgactgtttgttacaagacaagtagttttgaccgggactttaatgactacaggacaggtagtattatccagcattaattacaaacagacggttttgtgaccgaaattaaatttaatctaaacagataccaaaacaatcatcttcgttttggtaaaagggatcttcttcgtcttcttcagcagaacttgtttcttccttctttgaggatgaagcttcttcttcctgttgtaacatttgtagaacttccttcagatttttagctaagacctcctttgatgtcgatcctgctaaaaatgctgccagatgagacttttggttcaagaacacagaagtctctggatcagccgctttgaggaattctggatgggatttgaaccataattttacttgttctggatccgctttggatgagtcaaattgtgtccaccattttacaaatgcgtgtctttgtagtgatggatattgatttgtcttttcagtcttgctgtagcgatattgccatgagaatatccatgacagtgcaaagcttgaaaagtatttaagatctgctggaattcgtgattcctgcgaattgtattgtttcttaaattgggaaaatccttgttggaccgtttctgggaatatctctgggattggtccaaagaagtcccaccattgcaaaaaccaattgggaaaattgt

SEQ ID NO: 12082 - DNA, 1209 bp, Glycine max
  Gm_smallRNAprecursor_4915
ataccagaggtcagcggagtaggatcaaacggacaaataggaagtaagaatgtagtatgattaatgaaatgaaaatataaacttgaaaacagatatcaaggtcacaccggagaccggcttacaaaacccaggttttcataaacaaagaaaccgaagcggcggaagagccgcacaggatcggtgaagggagaagagagaaggatgaaaaatagaaatttattgaatctagaaagaagcgcttacaaaaatcttgtttcagagcacctctcttccgaaacctgaaaaatgactaaatgaaagggtgcctcacaacatgctagaggactccttatatagccaaaaatctaagaccggtagttgccggtagttttgaccgggactatttgactgtttgttacaagacaagtagttttgaccgggactttaatgactacaggacaggtagtattatccagcattaattacaaacagacggttttgtgaccgaaattaaatttaatctaaacagataccaaaacaatcatcttcgttttggtaaaagggatcttcttcgtcttcttcagcagaacttgtttcttccttctttgaggatgaagcttcttcttcctgttgtaacatttgtagaacttccttcagatttttagctaagacctcctttgatgtcgatcctgctaaaaatgctgccagatgagacttttggttcaagaacacagaagtctctggatcagccgctttgaggaattctggatgggatttgaaccataattttacttgttctggatccgctttggatgagtcaaattgtgtccaccattttacaaatgcgtgtctttgtagtgatggatattgatttgtcttttcagtcttgctgtagcgatattgccatgagaatatccatgacagtgcaaagcttgaaaagtatttaagatctgctggaattcgtgattcctgcgaattgtattgtttcttaaattgggaaaatccttgttggaccgtttctgggaatatctctgggattggtccaaagaagtcccaccattgcaaaaaccaattgggaaaattgtaaattgtgttggtcttgaaatatatcagccatgaatgcttgaagcgggtattttggtgccaaaacaccttagtccaagcatcaacgtaatcccaataggtataacctaccggatcaaatggaactgaaaatctcttccctttgtt

SEQ ID NO: 12083 - DNA, 1057 bp, Glycine max
  Gm_smallRNAprecursor_4916
ccagaggtcagcggagtaggatcaaacggacaaataggaagtaagaatgtagtatgattaatgaaatgaaaatataaacttgaaaacagatatcaaggtcacaccggagaccggcttacaaaacccaggttttcataaacaaagaaaccgaagcggcggaagagccgcacaggatcggtgaagggagaagagagaaggatgaaaaatagaaatttattgaatctagaaagaagcgcttacaaaaatcttgtttcagagcacctctcttccgaaacctgaaaaatgactaaatgaaagggtgcctcacaacatgctagaggactccttatatagccaaaaatctaagaccggtagttgccggtagttttgaccgggactatttgactgtttgttacaagacaagtagttttgaccgggactttaatgactacaggacaggtagtattatccagcattaattacaaacagacggttttgtgaccgaaattaaatttaatctaaacagataccaaaacaatcatcttcgttttggtaaaagggatcttcttcgtcttcttcagcagaacttgtttcttccttctttgaggatgaagcttcttcttcctgttgtaacatttgtagaacttccttcagatttttagctaagacctcctttgatgtcgatcctgctaaaaatgctgccagatgagacttttggttcaagaacacagaagtctctggatcagccgctttgaggaattctggatgggatttgaaccataattttacttgttctggatccgctttggatgagtcaaattgtgtccaccattttacaaatgcgtgtctttgtagtgatggatattgatttgtcttttcagtcttgctgtagcgatattgccatgagaatatccatgacagtgcaaagcttgaaaagtatttaagatctgctggaattcgtgattcctgcgaattgtattgtttcttaaattgggaaaatccttgttggaccgtttctgggaatatctctgggattggtccaaagaagtcccaccattgcaaaaaccaattgggaaaa

SEQ ID NO: 12084 - DNA, 1058 bp, Glycine max
  Gm_smallRNAprecursor_4917
ccagaggtcagcggagtaggatcaaacggacaaataggaagtaagaatgtagtatgattaatgaaatgaaaatataaacttgaaaacagatatcaaggtcacaccggagaccggcttacaaaacccaggttttcataaacaaagaaaccgaagcggcggaagagccgcacaggatcggtgaagggagaagagagaaggatgaaaaatagaaatttattgaatctagaaagaagcgcttacaaaaatcttgtttcagagcacctctcttccgaaacctgaaaaatgactaaatgaaagggtgcctcacaacatgctagaggactccttatatagccaaaaatctaagaccggtagttgccggtagttttgaccgggactatttgactgtttgttacaagacaagtagttttgaccgggactttaatgactacaggacaggtagtattatccagcattaattacaaacagacggttttgtgaccgaaattaaatttaatctaaacagataccaaaacaatcatcttcgttttggtaaaagggatcttcttcgtcttcttcagcagaacttgtttcttccttctttgaggatgaagcttcttcttcctgttgtaacatttgtagaacttccttcagatttttagctaagacctcctttgatgtcgatcctgctaaaaatgctgccagatgagacttttggttcaagaacacagaagtctctggatcagccgctttgaggaattctggatgggatttgaaccataattttacttgttctggatccgctttggatgagtcaaattgtgtccaccattttacaaatgcgtgtctttgtagtgatggatattgatttgtcttttcagtcttgctgtagcgatattgccatgagaatatccatgacagtgcaaagcttgaaaagtatttaagatctgctggaattcgtgattcctgcgaattgtattgtttcttaaattgggaaaatccttgttggaccgtttctgggaatatctctgggattggtccaaagaagtcccaccattgcaaaaaccaattgggaaaat

SEQ ID NO: 12085 - DNA, 1083 bp, Glycine max
  Gm_smallRNAprecursor_4918
ccagaggtcagcggagtaggatcaaacggacaaataggaagtaagaatgtagtatgattaatgaaatgaaaatataaacttgaaaacagatatcaaggtcacaccggagaccggcttacaaaacccaggttttcataaacaaagaaaccgaagcggcggaagagccgcacaggatcggtgaagggagaagagagaaggatgaaaaatagaaatttattgaatctagaaagaagcgcttacaaaaatcttgtttcagagcacctctcttccgaaacctgaaaaatgactaaatgaaagggtgcctcacaacatgctagaggactccttatatagccaaaaatctaagaccggtagttgccggtagttttgaccgggactatttgactgtttgttacaagacaagtagttttgaccgggactttaatgactacaggacaggtagtattatccagcattaattacaaacagacggttttgtgaccgaaattaaatttaatctaaacagataccaaaacaatcatcttcgttttggtaaaagggatcttcttcgtcttcttcagcagaacttgtttcttccttctttgaggatgaagcttcttcttcctgttgtaacatttgtagaacttccttcagatttttagctaagacctcctttgatgtcgatcctgctaaaaatgctgccagatgagacttttggttcaagaacacagaagtctctggatcagccgctttgaggaattctggatgggatttgaaccataattttacttgttctggatccgctttggatgagtcaaattgtgtccaccattttacaaatgcgtgtctttgtagtgatggatattgatttgtcttttcagtcttgctgtagcgatattgccatgagaatatccatgacagtgcaaagcttgaaaagtatttaagatctgctggaattcgtgattcctgcgaattgtattgtttcttaaattgggaaaatccttgttggaccgtttctgggaatatctctgggattggtccaaagaagtcccaccattgcaaaaaccaattgggaaaattgtaaattgtgttggtcttgaaata

SEQ ID NO: 12086 - DNA, 1056 bp, Glycine max
  Gm_smallRNAprecursor_4919
cagaggtcagcggagtaggatcaaacggacaaataggaagtaagaatgtagtatgattaatgaaatgaaaatataaacttgaaaacagatatcaaggtcacaccggagaccggcttacaaaacccaggttttcataaacaaagaaaccgaagcggcggaagagccgcacaggatcggtgaagggagaagagagaaggatgaaaaatagaaatttattgaatctagaaagaagcgcttacaaaaatcttgtttcagagcacctctcttccgaaacctgaaaaatgactaaatgaaagggtgcctcacaacatgctagaggactccttatatagccaaaaatctaagaccggtagttgccggtagttttgaccgggactatttgactgtttgttacaagacaagtagttttgaccgggactttaatgactacaggacaggtagtattatccagcattaattacaaacagacggttttgtgaccgaaattaaatttaatctaaacagataccaaaacaatcatcttcgttttggtaaaagggatcttcttcgtcttcttcagcagaacttgtttcttccttctttgaggatgaagcttcttcttcctgttgtaacatttgtagaacttccttcagatttttagctaagacctcctttgatgtcgatcctgctaaaaatgctgccagatgagacttttggttcaagaacacagaagtctctggatcagccgctttgaggaattctggatgggatttgaaccataattttacttgttctggatccgctttggatgagtcaaattgtgtccaccattttacaaatgcgtgtctttgtagtgatggatattgatttgtcttttcagtcttgctgtagcgatattgccatgagaatatccatgacagtgcaaagcttgaaaagtatttaagatctgctggaattcgtgattcctgcgaattgtattgtttcttaaattgggaaaatccttgttggaccgtttctgggaatatctctgggattggtccaaagaagtcccaccattgcaaaaaccaattgggaaaa

SEQ ID NO: 12087 - DNA, 1056 bp, Glycine max; identical to SEQ ID NO: 12086
  Gm_smallRNAprecursor_4920

SEQ ID NO: 12088 - DNA, 1057 bp, Glycine max
  Gm_smallRNAprecursor_4921
cagaggtcagcggagtaggatcaaacggacaaataggaagtaagaatgtagtatgattaatgaaatgaaaatataaacttgaaaacagatatcaaggtcacaccggagaccggcttacaaaacccaggttttcataaacaaagaaaccgaagcggcggaagagccgcacaggatcggtgaagggagaagagagaaggatgaaaaatagaaatttattgaatctagaaagaagcgcttacaaaaatcttgtttcagagcacctctcttccgaaacctgaaaaatgactaaatgaaagggtgcctcacaacatgctagaggactccttatatagccaaaaatctaagaccggtagttgccggtagttttgaccgggactatttgactgtttgttacaagacaagtagttttgaccgggactttaatgactacaggacaggtagtattatccagcattaattacaaacagacggttttgtgaccgaaattaaatttaatctaaacagataccaaaacaatcatcttcgttttggtaaaagggatcttcttcgtcttcttcagcagaacttgtttcttccttctttgaggatgaagcttcttcttcctgttgtaacatttgtagaacttccttcagatttttagctaagacctcctttgatgtcgatcctgctaaaaatgctgccagatgagacttttggttcaagaacacagaagtctctggatcagccgctttgaggaattctggatgggatttgaaccataattttacttgttctggatccgctttggatgagtcaaattgtgtccaccattttacaaatgcgtgtctttgtagtgatggatattgatttgtcttttcagtcttgctgtagcgatattgccatgagaatatccatgacagtgcaaagcttgaaaagtatttaagatctgctggaattcgtgattcctgcgaattgtattgtttcttaaattgggaaaatccttgttggaccgtttctgggaatatctctgggattggtccaaagaagtcccaccattgcaaaaaccaattgggaaaat

SEQ ID NO: 12089 - DNA, 1059 bp, Glycine max
  Gm_smallRNAprecursor_4922
cagaggtcagcggagtaggatcaaacggacaaataggaagtaagaatgtagtatgattaatgaaatgaaaatataaacttgaaaacagatatcaaggtcacaccggagaccggcttacaaaacccaggttttcataaacaaagaaaccgaagcggcggaagagccgcacaggatcggtgaagggagaagagagaaggatgaaaaatagaaatttattgaatctagaaagaagcgcttacaaaaatcttgtttcagagcacctctcttccgaaacctgaaaaatgactaaatgaaagggtgcctcacaacatgctagaggactccttatatagccaaaaatctaagaccggtagttgccggtagttttgaccgggactatttgactgtttgttacaagacaagtagttttgaccgggactttaatgactacaggacaggtagtattatccagcattaattacaaacagacggttttgtgaccgaaattaaatttaatctaaacagataccaaaacaatcatcttcgttttggtaaaagggatcttcttcgtcttcttcagcagaacttgtttcttccttctttgaggatgaagcttcttcttcctgttgtaacatttgtagaacttccttcagatttttagctaagacctcctttgatgtcgatcctgctaaaaatgctgccagatgagacttttggttcaagaacacagaagtctctggatcagccgctttgaggaattctggatgggatttgaaccataattttacttgttctggatccgctttggatgagtcaaattgtgtccaccattttacaaatgcgtgtctttgtagtgatggatattgatttgtcttttcagtcttgctgtagcgatattgccatgagaatatccatgacagtgcaaagcttgaaaagtatttaagatctgctggaattcgtgattcctgcgaattgtattgtttcttaaattgggaaaatccttgttggaccgtttctgggaatatctctgggattggtccaaagaagtcccaccattgcaaaaaccaattgggaaaattg

SEQ ID NO: 12090 - DNA, 1059 bp, Glycine max; identical to SEQ ID NO: 12089
  Gm_smallRNAprecursor_4923

SEQ ID NO: 12091 - DNA, 1082 bp, Glycine max
  Gm_smallRNAprecursor_4924
cagaggtcagcggagtaggatcaaacggacaaataggaagtaagaatgtagtatgattaatgaaatgaaaatataaacttgaaaacagatatcaaggtcacaccggagaccggcttacaaaacccaggttttcataaacaaagaaaccgaagcggcggaagagccgcacaggatcggtgaagggagaagagagaaggatgaaaaatagaaatttattgaatctagaaagaagcgcttacaaaaatcttgtttcagagcacctctcttccgaaacctgaaaaatgactaaatgaaagggtgcctcacaacatgctagaggactccttatatagccaaaaatctaagaccggtagttgccggtagttttgaccgggactatttgactgtttgttacaagacaagtagttttgaccgggactttaatgactacaggacaggtagtattatccagcattaattacaaacagacggttttgtgaccgaaattaaatttaatctaaacagataccaaaacaatcatcttcgttttggtaaaagggatcttcttcgtcttcttcagcagaacttgtttcttccttctttgaggatgaagcttcttcttcctgttgtaacatttgtagaacttccttcagatttttagctaagacctcctttgatgtcgatcctgctaaaaatgctgccagatgagacttttggttcaagaacacagaagtctctggatcagccgctttgaggaattctggatgggatttgaaccataattttacttgttctggatccgctttggatgagtcaaattgtgtccaccattttacaaatgcgtgtctttgtagtgatggatattgatttgtcttttcagtcttgctgtagcgatattgccatgagaatatccatgacagtgcaaagcttgaaaagtatttaagatctgctggaattcgtgattcctgcgaattgtattgtttcttaaattgggaaaatccttgttggaccgtttctgggaatatctctgggattggtccaaagaagtcccaccattgcaaaaaccaattgggaaaattgtaaattgtgttggtcttgaaata

SEQ ID NO: 12092 - DNA, 1055 bp, Glycine max
  Gm_smallRNAprecursor_4925
agaggtcagcggagtaggatcaaacggacaaataggaagtaagaatgtagtatgattaatgaaatgaaaatataaacttgaaaacagatatcaaggtcacaccggagaccggcttacaaaacccaggttttcataaacaaagaaaccgaagcggcggaagagccgcacaggatcggtgaagggagaagagagaaggatgaaaaatagaaatttattgaatctagaaagaagcgcttacaaaaatcttgtttcagagcacctctcttccgaaacctgaaaaatgactaaatgaaagggtgcctcacaacatgctagaggactccttatatagccaaaaatctaagaccggtagttgccggtagttttgaccgggactatttgactgtttgttacaagacaagtagttttgaccgggactttaatgactacaggacaggtagtattatccagcattaattacaaacagacggttttgtgaccgaaattaaatttaatctaaacagataccaaaacaatcatcttcgttttggtaaaagggatcttcttcgtcttcttcagcagaacttgtttcttccttctttgaggatgaagcttcttcttcctgttgtaacatttgtagaacttccttcagatttttagctaagacctcctttgatgtcgatcctgctaaaaatgctgccagatgagacttttggttcaagaacacagaagtctctggatcagccgctttgaggaattctggatgggatttgaaccataattttacttgttctggatccgctttggatgagtcaaattgtgtccaccattttacaaatgcgtgtctttgtagtgatggatattgatttgtcttttcagtcttgctgtagcgatattgccatgagaatatccatgacagtgcaaagcttgaaaagtatttaagatctgctggaattcgtgattcctgcgaattgtattgtttcttaaattgggaaaatccttgttggaccgtttctgggaatatctctgggattggtccaaagaagtcccaccattgcaaaaaccaattgggaaaa

SEQ ID NO: 12093 - DNA, 1058 bp, Glycine max
  Gm_smallRNAprecursor_4926
agaggtcagcggagtaggatcaaacggacaaataggaagtaagaatgtagtatgattaatgaaatgaaaatataaacttgaaaacagatatcaaggtcacaccggagaccggcttacaaaacccaggttttcataaacaaagaaaccgaagcggcggaagagccgcacaggatcggtgaagggagaagagagaaggatgaaaaatagaaatttattgaatctagaaagaagcgcttacaaaaatcttgtttcagagcacctctcttccgaaacctgaaaaatgactaaatgaaagggtgcctcacaacatgctagaggactccttatatagccaaaaatctaagaccggtagttgccggtagttttgaccgggactatttgactgtttgttacaagacaagtagttttgaccgggactttaatgactacaggacaggtagtattatccagcattaattacaaacagacggttttgtgaccgaaattaaatttaatctaaacagataccaaaacaatcatcttcgttttggtaaaagggatcttcttcgtcttcttcagcagaacttgtttcttccttctttgaggatgaagcttcttcttcctgttgtaacatttgtagaacttccttcagatttttagctaagacctcctttgatgtcgatcctgctaaaaatgctgccagatgagacttttggttcaagaacacagaagtctctggatcagccgctttgaggaattctggatgggatttgaaccataattttacttgttctggatccgctttggatgagtcaaattgtgtccaccattttacaaatgcgtgtctttgtagtgatggatattgatttgtcttttcagtcttgctgtagcgatattgccatgagaatatccatgacagtgcaaagcttgaaaagtatttaagatctgctggaattcgtgattcctgcgaattgtattgtttcttaaattgggaaaatccttgttggaccgtttctgggaatatctctgggattggtccaaagaagtcccaccattgcaaaaaccaattgggaaaattg

SEQ ID NO: 12094 - DNA, 1058 bp, Glycine max; identical to SEQ ID NO: 12093
  Gm_smallRNAprecursor_4927

SEQ ID NO: 12095 - DNA, 1081 bp, Glycine max
  Gm_smallRNAprecursor_4928
agaggtcagcggagtaggatcaaacggacaaataggaagtaagaatgtagtatgattaatgaaatgaaaatataaacttgaaaacagatatcaaggtcacaccggagaccggcttacaaaacccaggttttcataaacaaagaaaccgaagcggcggaagagccgcacaggatcggtgaagggagaagagagaaggatgaaaaatagaaatttattgaatctagaaagaagcgcttacaaaaatcttgtttcagagcacctctcttccgaaacctgaaaaatgactaaatgaaagggtgcctcacaacatgctagaggactccttatatagccaaaaatctaagaccggtagttgccggtagttttgaccgggactatttgactgtttgttacaagacaagtagttttgaccgggactttaatgactacaggacaggtagtattatccagcattaattacaaacagacggttttgtgaccgaaattaaatttaatctaaacagataccaaaacaatcatcttcgttttggtaaaagggatcttcttcgtcttcttcagcagaacttgtttcttccttctttgaggatgaagcttcttcttcctgttgtaacatttgtagaacttccttcagatttttagctaagacctcctttgatgtcgatcctgctaaaaatgctgccagatgagacttttggttcaagaacacagaagtctctggatcagccgctttgaggaattctggatgggatttgaaccataattttacttgttctggatccgctttggatgagtcaaattgtgtccaccattttacaaatgcgtgtctttgtagtgatggatattgatttgtcttttcagtcttgctgtagcgatattgccatgagaatatccatgacagtgcaaagcttgaaaagtatttaagatctgctggaattcgtgattcctgcgaattgtattgtttcttaaattgggaaaatccttgttggaccgtttctgggaatatctctgggattggtccaaagaagtcccaccattgcaaaaaccaattgggaaaattgtaaattgtgttggtcttgaaata

SEQ ID NO: 12096 - DNA, 1032 bp, Glycine max
  Gm_smallRNAprecursor_4929
tcggtgaagggagaagagagaaggatgaaaaatagaaatttattgaatctagaaagaagcgcttacaaaaatcttgtttcagagcacctctcttccgaaacctgaaaaatgactaaatgaaagggtgcctcacaacatgctagaggactccttatatagccaaaaatctaagaccggtagttgccggtagttttgaccgggactatttgactgtttgttacaagacaagtagttttgaccgggactttaatgactacaggacaggtagtattatccagcattaattacaaacagacggttttgtgaccgaaattaaatttaatctaaacagataccaaaacaatcatcttcgttttggtaaaagggatcttcttcgtcttcttcagcagaacttgtttcttccttctttgaggatgaagcttcttcttcctgttgtaacatttgtagaacttccttcagatttttagctaagacctcctttgatgtcgatcctgctaaaaatgctgccagatgagacttttggttcaagaacacagaagtctctggatcagccgctttgaggaattctggatgggatttgaaccataattttacttgttctggatccgctttggatgagtcaaattgtgtccaccattttacaaatgcgtgtctttgtagtgatggatattgatttgtcttttcagtcttgctgtagcgatattgccatgagaatatccatgacagtgcaaagcttgaaaagtatttaagatctgctggaattcgtgattcctgcgaattgtattgtttcttaaattgggaaaatccttgttggaccgtttctgggaatatctctgggattggtccaaagaagtcccaccattgcaaaaaccaattgggaaaattgtaaattgtgttggtcttgaaatatatcagccatgaatgcttgaagcgggtattttggtgccaaaacaccttagtccaagcatcaacgtaatcccaataggtataacctaccggatcaaatggaactgaaaatctcttccctttgtt

SEQ ID NO: 12097 - DNA, 1131 bp, Glycine max
  Gm_smallRNAprecursor_4930
tttgttacaagacaagtagttttgaccgggactttaatgactacaggacaggtagtattatccagcattaattacaaacagacggttttgtgaccgaaattaaatttaatctaaacagataccaaaacaatcatcttcgttttggtaaaagggatcttcttcgtcttcttcagcagaacttgtttcttccttctttgaggatgaagcttcttcttcctgttgtaacatttgtagaacttccttcagatttttagctaagacctcctttgatgtcgatcctgctaaaaatgctgccagatgagacttttggttcaagaacacagaagtctctggatcagccgctttgaggaattctggatgggatttgaaccataattttacttgttctggatccgctttggatgagtcaaattgtgtccaccattttacaaatgcgtgtctttgtagtgatggatattgatttgtcttttcagtcttgctgtagcgatattgccatgagaatatccatgacagtgcaaagcttgaaaagtatttaagatctgctggaattcgtgattcctgcgaattgtattgtttcttaaattgggaaaatccttgttggaccgtttctgggaatatctctgggattggtccaaagaagtcccaccattgcaaaaaccaattgggaaaattgtaaattgtgttggtcttgaaatatatcagccatgaatgcttgaagcgggtattttggtgccaaaacaccttagtccaagcatcaacgtaatcccaataggtataacctaccggatcaaatggaactgaaaatctcttccctttgtttaagtctgaaccaaagtgtcttggttgaagaacttttagtatttggatggttgagtgggtgtttaaggtttggtcttttggatctttgaaatgtttgatagatactgagtttgaatctaccaaaatcaattcataaaaagttcttgtcttcaggatggtggttggtttgtagtgaaatcctggtgggaaagccttggccgtcgccttgaagggatttttgtcccaaaattcaggttccatctgcaaaacagttaacaatttatttttataaatataattgttagtttgtttggtaggtggtgtttgagcttt

SEQ ID NO: 12098 - DNA, 1146 bp, Glycine max
  Gm_smallRNAprecursor_4931
ggactttaatgactacaggacaggtagtattatccagcattaattacaaacagacggttttgtgaccgaaattaaatttaatctaaacagataccaaaacaatcatcttcgttttggtaaaagggatcttcttcgtcttcttcagcagaacttgtttcttccttctttgaggatgaagcttcttcttcctgttgtaacatttgtagaacttccttcagatttttagctaagacctcctttgatgtcgatcctgctaaaaatgctgccagatgagacttttggttcaagaacacagaagtctctggatcagccgctttgaggaattctggatgggatttgaaccataattttacttgttctggatccgctttggatgagtcaaattgtgtccaccattttacaaatgcgtgtctttgtagtgatggatattgatttgtcttttcagtcttgctgtagcgatattgccatgagaatatccatgacagtgcaaagcttgaaaagtatttaagatctgctggaattcgtgattcctgcgaattgtattgtttcttaaattgggaaaatccttgttggaccgtttctgggaatatctctgggattggtccaaagaagtcccaccattgcaaaaaccaattgggaaaattgtaaattgtgttggtcttgaaatatatcagccatgaatgcttgaagcgggtattttggtgccaaaacaccttagtccaagcatcaacgtaatcccaataggtataacctaccggatcaaatggaactgaaaatctcttccctttgtttaagtctgaaccaaagtgtcttggttgaagaacttttagtatttggatggttgagtgggtgtttaaggtttggtcttttggatctttgaaatgtttgatagatactgagtttgaatctaccaaaatcaattcataaaaagttcttgtcttcaggatggtggttggtttgtagtgaaatcctggtgggaaagccttggccgtcgccttgaagggatttttgtcccaaaattcaggttccatctgcaaaacagttaacaatttatttttataaatataattgttagtttgtttggtaggtggtgtttgagctttggctaaaggtagttttcctttagtattggtggctgttttggtc

SEQ ID NO: 12099 - DNA, 1080 bp, Glycine max
  Gm_smallRNAprecursor_4932
ttcagcagaacttgtttcttccttctttgaggatgaagcttcttcttcctgttgtaacatttgtagaacttccttcagatttttagctaagacctcctttgatgtcgatcctgctaaaaatgctgccagatgagacttttggttcaagaacacagaagtctctggatcagccgctttgaggaattctggatgggatttgaaccataattttacttgttctggatccgctttggatgagtcaaattgtgtccaccattttacaaatgcgtgtctttgtagtgatggatattgatttgtcttttcagtcttgctgtagcgatattgccatgagaatatccatgacagtgcaaagcttgaaaagtatttaagatctgctggaattcgtgattcctgcgaattgtattgtttcttaaattgggaaaatccttgttggaccgtttctgggaatatctctgggattggtccaaagaagtcccaccattgcaaaaaccaattgggaaaattgtaaattgtgttggtcttgaaatatatcagccatgaatgcttgaagcgggtattttggtgccaaaacaccttagtccaagcatcaacgtaatcccaataggtataacctaccggatcaaatggaactgaaaatctcttccctttgtttaagtctgaaccaaagtgtcttggttgaagaacttttagtatttggatggttgagtgggtgtttaaggtttggtcttttggatctttgaaatgtttgatagatactgagtttgaatctaccaaaatcaattcataaaaagttcttgtcttcaggatggtggttggtttgtagtgaaatcctggtgggaaagccttggccgtcgccttgaagggatttttgtcccaaaattcaggttccatctgcaaaacagttaacaatttatttttataaatataattgttagtttgtttggtaggtggtgtttgagctttggctaaaggtagttttcctttagtattggtggctgttttggtcattgacgcattttggatcattgtttgtaaatttgattcagattcatcatcagattctgaggcaatgtctgccca

SEQ ID NO: 12100 - DNA, 1104 bp, Glycine max
  Gm_smallRNAprecursor_4933
ttcagcagaacttgtttcttccttctttgaggatgaagcttcttcttcctgttgtaacatttgtagaacttccttcagatttttagctaagacctcctttgatgtcgatcctgctaaaaatgctgccagatgagacttttggttcaagaacacagaagtctctggatcagccgctttgaggaattctggatgggatttgaaccataattttacttgttctggatccgctttggatgagtcaaattgtgtccaccattttacaaatgcgtgtctttgtagtgatggatattgatttgtcttttcagtcttgctgtagcgatattgccatgagaatatccatgacagtgcaaagcttgaaaagtatttaagatctgctggaattcgtgattcctgcgaattgtattgtttcttaaattgggaaaatccttgttggaccgtttctgggaatatctctgggattggtccaaagaagtcccaccattgcaaaaaccaattgggaaaattgtaaattgtgttggtcttgaaatatatcagccatgaatgcttgaagcgggtattttggtgccaaaacaccttagtccaagcatcaacgtaatcccaataggtataacctaccggatcaaatggaactgaaaatctcttccctttgtttaagtctgaaccaaagtgtcttggttgaagaacttttagtatttggatggttgagtgggtgtttaaggtttggtcttttggatctttgaaatgtttgatagatactgagtttgaatctaccaaaatcaattcataaaaagttcttgtcttcaggatggtggttggtttgtagtgaaatcctggtgggaaagccttggccgtcgccttgaagggatttttgtcccaaaattcaggttccatctgcaaaacagttaacaatttatttttataaatataattgttagtttgtttggtaggtggtgtttgagctttggctaaaggtagttttcctttagtattggtggctgttttggtcattgacgcattttggatcattgtttgtaaatttgattcagattcatcatcagattctgaggcaatgtctgcccaagattttttgattatttttggaaa

SEQ ID NO: 12101 - DNA, 1107 bp, Glycine max
  Gm_smallRNAprecursor_4934
gtagaacttccttcagatttttagctaagacctcctttgatgtcgatcctgctaaaaatgctgccagatgagacttttggttcaagaacacagaagtctctggatcagccgctttgaggaattctggatgggatttgaaccataattttacttgttctggatccgctttggatgagtcaaattgtgtccaccattttacaaatgcgtgtctttgtagtgatggatattgatttgtcttttcagtcttgctgtagcgatattgccatgagaatatccatgacagtgcaaagcttgaaaagtatttaagatctgctggaattcgtgattcctgcgaattgtattgtttcttaaattgggaaaatccttgttggaccgtttctgggaatatctctgggattggtccaaagaagtcccaccattgcaaaaaccaattgggaaaattgtaaattgtgttggtcttgaaatatatcagccatgaatgcttgaagcgggtattttggtgccaaaacaccttagtccaagcatcaacgtaatcccaataggtataacctaccggatcaaatggaactgaaaatctcttccctttgtttaagtctgaaccaaagtgtcttggttgaagaacttttagtatttggatggttgagtgggtgtttaaggtttggtcttttggatctttgaaatgtttgatagatactgagtttgaatctaccaaaatcaattcataaaaagttcttgtcttcaggatggtggttggtttgtagtgaaatcctggtgggaaagccttggccgtcgccttgaagggatttttgtcccaaaattcaggttccatctgcaaaacagttaacaatttatttttataaatataattgttagtttgtttggtaggtggtgtttgagctttggctaaaggtagttttcctttagtattggtggctgttttggtcattgacgcattttggatcattgtttgtaaatttgattcagattcatcatcagattctgaggcaatgtctgcccaagattttttgattatttttggaaatttggtcagacccatgtcttgaagggcctgaagggtttcaattggccaagcatagtcggccgatg

SEQ ID NO: 12102 - DNA, 1107 bp, Glycine max; identical to SEQ ID NO: 12101
  Gm_smallRNAprecursor_4935

SEQ ID NO: 12103 - DNA, 1108 bp, Glycine max
  Gm_smallRNAprecursor_4936
gtagaacttccttcagatttttagctaagacctcctttgatgtcgatcctgctaaaaatgctgccagatgagacttttggttcaagaacacagaagtctctggatcagccgctttgaggaattctggatgggatttgaaccataattttacttgttctggatccgctttggatgagtcaaattgtgtccaccattttacaaatgcgtgtctttgtagtgatggatattgatttgtcttttcagtcttgctgtagcgatattgccatgagaatatccatgacagtgcaaagcttgaaaagtatttaagatctgctggaattcgtgattcctgcgaattgtattgtttcttaaattgggaaaatccttgttggaccgtttctgggaatatctctgggattggtccaaagaagtcccaccattgcaaaaaccaattgggaaaattgtaaattgtgttggtcttgaaatatatcagccatgaatgcttgaagcgggtattttggtgccaaaacaccttagtccaagcatcaacgtaatcccaataggtataacctaccggatcaaatggaactgaaaatctcttccctttgtttaagtctgaaccaaagtgtcttggttgaagaacttttagtatttggatggttgagtgggtgtttaaggtttggtcttttggatctttgaaatgtttgatagatactgagtttgaatctaccaaaatcaattcataaaaagttcttgtcttcaggatggtggttggtttgtagtgaaatcctggtgggaaagccttggccgtcgccttgaagggatttttgtcccaaaattcaggttccatctgcaaaacagttaacaatttatttttataaatataattgttagtttgtttggtaggtggtgtttgagctttggctaaaggtagttttcctttagtattggtggctgttttggtcattgacgcattttggatcattgtttgtaaatttgattcagattcatcatcagattctgaggcaatgtctgcccaagattttttgattatttttggaaatttggtcagacccatgtcttgaagggcctgaagggtttcaattggccaagcatagtcggccgatgt

SEQ ID NO: 12104 - DNA, 1101 bp, Glycine max
  Gm_smallRNAprecursor_4937
gaacttccttcagatttttagctaagacctcctttgatgtcgatcctgctaaaaatgctgccagatgagacttttggttcaagaacacagaagtctctggatcagccgctttgaggaattctggatgggatttgaaccataattttacttgttctggatccgctttggatgagtcaaattgtgtccaccattttacaaatgcgtgtctttgtagtgatggatattgatttgtcttttcagtcttgctgtagcgatattgccatgagaatatccatgacagtgcaaagcttgaaaagtatttaagatctgctggaattcgtgattcctgcgaattgtattgtttcttaaattgggaaaatccttgttggaccgtttctgggaatatctctgggattggtccaaagaagtcccaccattgcaaaaaccaattgggaaaattgtaaattgtgttggtcttgaaatatatcagccatgaatgcttgaagcgggtattttggtgccaaaacaccttagtccaagcatcaacgtaatcccaataggtataacctaccggatcaaatggaactgaaaatctcttccctttgtttaagtctgaaccaaagtgtcttggttgaagaacttttagtatttggatggttgagtgggtgtttaaggtttggtcttttggatctttgaaatgtttgatagatactgagtttgaatctaccaaaatcaattcataaaaagttcttgtcttcaggatggtggttggtttgtagtgaaatcctggtgggaaagccttggccgtcgccttgaagggatttttgtcccaaaattcaggttccatctgcaaaacagttaacaatttatttttataaatataattgttagtttgtttggtaggtggtgtttgagctttggctaaaggtagttttcctttagtattggtggctgttttggtcattgacgcattttggatcattgtttgtaaatttgattcagattcatcatcagattctgaggcaatgtctgcccaagattttttgattatttttggaaatttggtcagacccatgtcttgaagggcctgaagggtttcaattggccaagcatagtcggccg

SEQ ID NO: 12105 - DNA, 1134 bp, Glycine max
  Gm_smallRNAprecursor_4938
acttccttcagatttttagctaagacctcctttgatgtcgatcctgctaaaaatgctgccagatgagacttttggttcaagaacacagaagtctctggatcagccgctttgaggaattctggatgggatttgaaccataattttacttgttctggatccgctttggatgagtcaaattgtgtccaccattttacaaatgcgtgtctttgtagtgatggatattgatttgtcttttcagtcttgctgtagcgatattgccatgagaatatccatgacagtgcaaagcttgaaaagtatttaagatctgctggaattcgtgattcctgcgaattgtattgtttcttaaattgggaaaatccttgttggaccgtttctgggaatatctctgggattggtccaaagaagtcccaccattgcaaaaaccaattgggaaaattgtaaattgtgttggtcttgaaatatatcagccatgaatgcttgaagcgggtattttggtgccaaaacaccttagtccaagcatcaacgtaatcccaataggtataacctaccggatcaaatggaactgaaaatctcttccctttgtttaagtctgaaccaaagtgtcttggttgaagaacttttagtatttggatggttgagtgggtgtttaaggtttggtcttttggatctttgaaatgtttgatagatactgagtttgaatctaccaaaatcaattcataaaaagttcttgtcttcaggatggtggttggtttgtagtgaaatcctggtgggaaagccttggccgtcgccttgaagggatttttgtcccaaaattcaggttccatctgcaaaacagttaacaatttatttttataaatataattgttagtttgtttggtaggtggtgtttgagctttggctaaaggtagttttcctttagtattggtggctgttttggtcattgacgcattttggatcattgtttgtaaatttgattcagattcatcatcagattctgaggcaatgtctgcccaagattttttgattatttttggaaatttggtcagacccatgtcttgaagggcctgaagggtttcaattggccaagcatagtcggccgatgtttgtttggcggttgccggtttgggagattcc

SEQ ID NO: 12106 - DNA, 1140 bp, Glycine max
  Gm_smallRNAprecursor_4939
tttttagctaagacctcctttgatgtcgatcctgctaaaaatgctgccagatgagacttttggttcaagaacacagaagtctctggatcagccgctttgaggaattctggatgggatttgaaccataattttacttgttctggatccgctttggatgagtcaaattgtgtccaccattttacaaatgcgtgtctttgtagtgatggatattgatttgtcttttcagtcttgctgtagcgatattgccatgagaatatccatgacagtgcaaagcttgaaaagtatttaagatctgctggaattcgtgattcctgcgaattgtattgtttcttaaattgggaaaatccttgttggaccgtttctgggaatatctctgggattggtccaaagaagtcccaccattgcaaaaaccaattgggaaaattgtaaattgtgttggtcttgaaatatatcagccatgaatgcttgaagcgggtattttggtgccaaaacaccttagtccaagcatcaacgtaatcccaataggtataacctaccggatcaaatggaactgaaaatctcttccctttgtttaagtctgaaccaaagtgtcttggttgaagaacttttagtatttggatggttgagtgggtgtttaaggtttggtcttttggatctttgaaatgtttgatagatactgagtttgaatctaccaaaatcaattcataaaaagttcttgtcttcaggatggtggttggtttgtagtgaaatcctggtgggaaagccttggccgtcgccttgaagggatttttgtcccaaaattcaggttccatctgcaaaacagttaacaatttatttttataaatataattgttagtttgtttggtaggtggtgtttgagctttggctaaaggtagttttcctttagtattggtggctgttttggtcattgacgcattttggatcattgtttgtaaatttgattcagattcatcatcagattctgaggcaatgtctgcccaagattttttgattatttttggaaatttggtcagacccatgtcttgaagggcctgaagggtttcaattggccaagcatagtcggccgatgtttgtttggcggttgccggtttgggagattcctgagtggatggctcaggt

SEQ ID NO: 12107 - DNA, 1090 bp, Glycine max
  Gm_smallRNAprecursor_4940
gtcgatcctgctaaaaatgctgccagatgagacttttggttcaagaacacagaagtctctggatcagccgctttgaggaattctggatgggatttgaaccataattttacttgttctggatccgctttggatgagtcaaattgtgtccaccattttacaaatgcgtgtctttgtagtgatggatattgatttgtcttttcagtcttgctgtagcgatattgccatgagaatatccatgacagtgcaaagcttgaaaagtatttaagatctgctggaattcgtgattcctgcgaattgtattgtttcttaaattgggaaaatccttgttggaccgtttctgggaatatctctgggattggtccaaagaagtcccaccattgcaaaaaccaattgggaaaattgtaaattgtgttggtcttgaaatatatcagccatgaatgcttgaagcgggtattttggtgccaaaacaccttagtccaagcatcaacgtaatcccaataggtataacctaccggatcaaatggaactgaaaatctcttccctttgtttaagtctgaaccaaagtgtcttggttgaagaacttttagtatttggatggttgagtgggtgtttaaggtttggtcttttggatctttgaaatgtttgatagatactgagtttgaatctaccaaaatcaattcataaaaagttcttgtcttcaggatggtggttggtttgtagtgaaatcctggtgggaaagccttggccgtcgccttgaagggatttttgtcccaaaattcaggttccatctgcaaaacagttaacaatttatttttataaatataattgttagtttgtttggtaggtggtgtttgagctttggctaaaggtagttttcctttagtattggtggctgttttggtcattgacgcattttggatcattgtttgtaaatttgattcagattcatcatcagattctgaggcaatgtctgcccaagattttttgattatttttggaaatttggtcagacccatgtcttgaagggcctgaagggtttcaattggccaagcatagtcggccgatgtttgtttggcggttgccggtttgg

SEQ ID NO: 12108 - DNA, 1087 bp, Glycine max
  Gm_smallRNAprecursor_4941
gatcctgctaaaaatgctgccagatgagacttttggttcaagaacacagaagtctctggatcagccgctttgaggaattctggatgggatttgaaccataattttacttgttctggatccgctttggatgagtcaaattgtgtccaccattttacaaatgcgtgtctttgtagtgatggatattgatttgtcttttcagtcttgctgtagcgatattgccatgagaatatccatgacagtgcaaagcttgaaaagtatttaagatctgctggaattcgtgattcctgcgaattgtattgtttcttaaattgggaaaatccttgttggaccgtttctgggaatatctctgggattggtccaaagaagtcccaccattgcaaaaaccaattgggaaaattgtaaattgtgttggtcttgaaatatatcagccatgaatgcttgaagcgggtattttggtgccaaaacaccttagtccaagcatcaacgtaatcccaataggtataacctaccggatcaaatggaactgaaaatctcttccctttgtttaagtctgaaccaaagtgtcttggttgaagaacttttagtatttggatggttgagtgggtgtttaaggtttggtcttttggatctttgaaatgtttgatagatactgagtttgaatctaccaaaatcaattcataaaaagttcttgtcttcaggatggtggttggtttgtagtgaaatcctggtgggaaagccttggccgtcgccttgaagggatttttgtcccaaaattcaggttccatctgcaaaacagttaacaatttatttttataaatataattgttagtttgtttggtaggtggtgtttgagctttggctaaaggtagttttcctttagtattggtggctgttttggtcattgacgcattttggatcattgtttgtaaatttgattcagattcatcatcagattctgaggcaatgtctgcccaagattttttgattatttttggaaatttggtcagacccatgtcttgaagggcctgaagggtttcaattggccaagcatagtcggccgatgtttgtttggcggttgccggtttgg

SEQ ID NO: 12109 - DNA, 1224 bp, Glycine max
  Gm_smallRNAprecursor_4942
cgctttgaggaattctggatgggatttgaaccataattttacttgttctggatccgctttggatgagtcaaattgtgtccaccattttacaaatgcgtgtctttgtagtgatggatattgatttgtcttttcagtcttgctgtagcgatattgccatgagaatatccatgacagtgcaaagcttgaaaagtatttaagatctgctggaattcgtgattcctgcgaattgtattgtttcttaaattgggaaaatccttgttggaccgtttctgggaatatctctgggattggtccaaagaagtcccaccattgcaaaaaccaattgggaaaattgtaaattgtgttggtcttgaaatatatcagccatgaatgcttgaagcgggtattttggtgccaaaacaccttagtccaagcatcaacgtaatcccaataggtataacctaccggatcaaatggaactgaaaatctcttccctttgtttaagtctgaaccaaagtgtcttggttgaagaacttttagtatttggatggttgagtgggtgtttaaggtttggtcttttggatctttgaaatgtttgatagatactgagtttgaatctaccaaaatcaattcataaaaagttcttgtcttcaggatggtggttggtttgtagtgaaatcctggtgggaaagccttggccgtcgccttgaagggatttttgtcccaaaattcaggttccatctgcaaaacagttaacaatttatttttataaatataattgttagtttgtttggtaggtggtgtttgagctttggctaaaggtagttttcctttagtattggtggctgttttggtcattgacgcattttggatcattgtttgtaaatttgattcagattcatcatcagattctgaggcaatgtctgcccaagattttttgattatttttggaaatttggtcagacccatgtcttgaagggcctgaagggtttcaattggccaagcatagtcggccgatgtttgtttggcggttgccggtttgggagattcctgagtggatggctcaggtttgattgaggcaatctgggttgatgacccttctaaattggttttctgggtagatgacccagcctgggttggtgacccagaagaggtagatgatttcttgatggttggctctggaagagccagcctggctcctttgcctgtactccttcctccccgtagggagattcccgatgcctt

SEQ ID NO: 12110 - DNA, 1222 bp, Glycine max
  Gm_smallRNAprecursor_4943
ctttgaggaattctggatgggatttgaaccataattttacttgttctggatccgctttggatgagtcaaattgtgtccaccattttacaaatgcgtgtctttgtagtgatggatattgatttgtcttttcagtcttgctgtagcgatattgccatgagaatatccatgacagtgcaaagcttgaaaagtatttaagatctgctggaattcgtgattcctgcgaattgtattgtttcttaaattgggaaaatccttgttggaccgtttctgggaatatctctgggattggtccaaagaagtcccaccattgcaaaaaccaattgggaaaattgtaaattgtgttggtcttgaaatatatcagccatgaatgcttgaagcgggtattttggtgccaaaacaccttagtccaagcatcaacgtaatcccaataggtataacctaccggatcaaatggaactgaaaatctcttccctttgtttaagtctgaaccaaagtgtcttggttgaagaacttttagtatttggatggttgagtgggtgtttaaggtttggtcttttggatctttgaaatgtttgatagatactgagtttgaatctaccaaaatcaattcataaaaagttcttgtcttcaggatggtggttggtttgtagtgaaatcctggtgggaaagccttggccgtcgccttgaagggatttttgtcccaaaattcaggttccatctgcaaaacagttaacaatttatttttataaatataattgttagtttgtttggtaggtggtgtttgagctttggctaaaggtagttttcctttagtattggtggctgttttggtcattgacgcattttggatcattgtttgtaaatttgattcagattcatcatcagattctgaggcaatgtctgcccaagattttttgattatttttggaaatttggtcagacccatgtcttgaagggcctgaagggtttcaattggccaagcatagtcggccgatgtttgtttggcggttgccggtttgggagattcctgagtggatggctcaggtttgattgaggcaatctgggttgatgacccttctaaattggttttctgggtagatgacccagcctgggttggtgacccagaagaggtagatgatttcttgatggttggctctggaagagccagcctggctcctttgcctgtactccttcctccccgtagggagattcccgatgcctt

SEQ ID NO: 12111 - DNA, 1193 bp, Glycine max
  Gm_smallRNAprecursor_4944
accataattttacttgttctggatccgctttggatgagtcaaattgtgtccaccattttacaaatgcgtgtctttgtagtgatggatattgatttgtcttttcagtcttgctgtagcgatattgccatgagaatatccatgacagtgcaaagcttgaaaagtatttaagatctgctggaattcgtgattcctgcgaattgtattgtttcttaaattgggaaaatccttgttggaccgtttctgggaatatctctgggattggtccaaagaagtcccaccattgcaaaaaccaattgggaaaattgtaaattgtgttggtcttgaaatatatcagccatgaatgcttgaagcgggtattttggtgccaaaacaccttagtccaagcatcaacgtaatcccaataggtataacctaccggatcaaatggaactgaaaatctcttccctttgtttaagtctgaaccaaagtgtcttggttgaagaacttttagtatttggatggttgagtgggtgtttaaggtttggtcttttggatctttgaaatgtttgatagatactgagtttgaatctaccaaaatcaattcataaaaagttcttgtcttcaggatggtggttggtttgtagtgaaatcctggtgggaaagccttggccgtcgccttgaagggatttttgtcccaaaattcaggttccatctgcaaaacagttaacaatttatttttataaatataattgttagtttgtttggtaggtggtgtttgagctttggctaaaggtagttttcctttagtattggtggctgttttggtcattgacgcattttggatcattgtttgtaaatttgattcagattcatcatcagattctgaggcaatgtctgcccaagattttttgattatttttggaaatttggtcagacccatgtcttgaagggcctgaagggtttcaattggccaagcatagtcggccgatgtttgtttggcggttgccggtttgggagattcctgagtggatggctcaggtttgattgaggcaatctgggttgatgacccttctaaattggttttctgggtagatgacccagcctgggttggtgacccagaagaggtagatgatttcttgatggttggctctggaagagccagcctggctcctttgcctgtactccttcctccccgtagggagattcccgatgcc

SEQ ID NO: 12112 - DNA, 1195 bp, Glycine max
  Gm_smallRNAprecursor_4945
accataattttacttgttctggatccgctttggatgagtcaaattgtgtccaccattttacaaatgcgtgtctttgtagtgatggatattgatttgtcttttcagtcttgctgtagcgatattgccatgagaatatccatgacagtgcaaagcttgaaaagtatttaagatctgctggaattcgtgattcctgcgaattgtattgtttcttaaattgggaaaatccttgttggaccgtttctgggaatatctctgggattggtccaaagaagtcccaccattgcaaaaaccaattgggaaaattgtaaattgtgttggtcttgaaatatatcagccatgaatgcttgaagcgggtattttggtgccaaaacaccttagtccaagcatcaacgtaatcccaataggtataacctaccggatcaaatggaactgaaaatctcttccctttgtttaagtctgaaccaaagtgtcttggttgaagaacttttagtatttggatggttgagtgggtgtttaaggtttggtcttttggatctttgaaatgtttgatagatactgagtttgaatctaccaaaatcaattcataaaaagttcttgtcttcaggatggtggttggtttgtagtgaaatcctggtgggaaagccttggccgtcgccttgaagggatttttgtcccaaaattcaggttccatctgcaaaacagttaacaatttatttttataaatataattgttagtttgtttggtaggtggtgtttgagctttggctaaaggtagttttcctttagtattggtggctgttttggtcattgacgcattttggatcattgtttgtaaatttgattcagattcatcatcagattctgaggcaatgtctgcccaagattttttgattatttttggaaatttggtcagacccatgtcttgaagggcctgaagggtttcaattggccaagcatagtcggccgatgtttgtttggcggttgccggtttgggagattcctgagtggatggctcaggtttgattgaggcaatctgggttgatgacccttctaaattggttttctgggtagatgacccagcctgggttggtgacccagaagaggtagatgatttcttgatggttggctctggaagagccagcctggctcctttgcctgtactccttcctccccgtagggagattcccgatgcctt

SEQ ID NO: 12113 - DNA, 1058 bp, Glycine max
  Gm_smallRNAprecursor_4946
tacttgttctggatccgctttggatgagtcaaattgtgtccaccattttacaaatgcgtgtctttgtagtgatggatattgatttgtcttttcagtcttgctgtagcgatattgccatgagaatatccatgacagtgcaaagcttgaaaagtatttaagatctgctggaattcgtgattcctgcgaattgtattgtttcttaaattgggaaaatccttgttggaccgtttctgggaatatctctgggattggtccaaagaagtcccaccattgcaaaaaccaattgggaaaattgtaaattgtgttggtcttgaaatatatcagccatgaatgcttgaagcgggtattttggtgccaaaacaccttagtccaagcatcaacgtaatcccaataggtataacctaccggatcaaatggaactgaaaatctcttccctttgtttaagtctgaaccaaagtgtcttggttgaagaacttttagtatttggatggttgagtgggtgtttaaggtttggtcttttggatctttgaaatgtttgatagatactgagtttgaatctaccaaaatcaattcataaaaagttcttgtcttcaggatggtggttggtttgtagtgaaatcctggtgggaaagccttggccgtcgccttgaagggatttttgtcccaaaattcaggttccatctgcaaaacagttaacaatttatttttataaatataattgttagtttgtttggtaggtggtgtttgagctttggctaaaggtagttttcctttagtattggtggctgttttggtcattgacgcattttggatcattgtttgtaaatttgattcagattcatcatcagattctgaggcaatgtctgcccaagattttttgattatttttggaaatttggtcagacccatgtcttgaagggcctgaagggtttcaattggccaagcatagtcggccgatgtttgtttggcggttgccggtttgggagattcctgagtggatggctcaggtttgattgaggcaatctgggttgatgacccttctaaattggttttctggg

SEQ ID NO: 12114 - DNA, 1176 bp, Glycine max
  Gm_smallRNAprecursor_4947
tacttgttctggatccgctttggatgagtcaaattgtgtccaccattttacaaatgcgtgtctttgtagtgatggatattgatttgtcttttcagtcttgctgtagcgatattgccatgagaatatccatgacagtgcaaagcttgaaaagtatttaagatctgctggaattcgtgattcctgcgaattgtattgtttcttaaattgggaaaatccttgttggaccgtttctgggaatatctctgggattggtccaaagaagtcccaccattgcaaaaaccaattgggaaaattgtaaattgtgttggtcttgaaatatatcagccatgaatgcttgaagcgggtattttggtgccaaaacaccttagtccaagcatcaacgtaatcccaataggtataacctaccggatcaaatggaactgaaaatctcttccctttgtttaagtctgaaccaaagtgtcttggttgaagaacttttagtatttggatggttgagtgggtgtttaaggtttggtcttttggatctttgaaatgtttgatagatactgagtttgaatctaccaaaatcaattcataaaaagttcttgtcttcaggatggtggttggtttgtagtgaaatcctggtgggaaagccttggccgtcgccttgaagggatttttgtcccaaaattcaggttccatctgcaaaacagttaacaatttatttttataaatataattgttagtttgtttggtaggtggtgtttgagctttggctaaaggtagttttcctttagtattggtggctgttttggtcattgacgcattttggatcattgtttgtaaatttgattcagattcatcatcagattctgaggcaatgtctgcccaagattttttgattatttttggaaatttggtcagacccatgtcttgaagggcctgaagggtttcaattggccaagcatagtcggccgatgtttgtttggcggttgccggtttgggagattcctgagtggatggctcaggtttgattgaggcaatctgggttgatgacccttctaaattggttttctgggtagatgacccagcctgggttggtgacccagaagaggtagatgatttcttgatggttggctctggaagagccagcctggctcctttgcctgtactccttcctccccgtagggagattcc

SEQ ID NO: 12115 - DNA, 1183 bp, Glycine max
  Gm_smallRNAprecursor_4948
tacttgttctggatccgctttggatgagtcaaattgtgtccaccattttacaaatgcgtgtctttgtagtgatggatattgatttgtcttttcagtcttgctgtagcgatattgccatgagaatatccatgacagtgcaaagcttgaaaagtatttaagatctgctggaattcgtgattcctgcgaattgtattgtttcttaaattgggaaaatccttgttggaccgtttctgggaatatctctgggattggtccaaagaagtcccaccattgcaaaaaccaattgggaaaattgtaaattgtgttggtcttgaaatatatcagccatgaatgcttgaagcgggtattttggtgccaaaacaccttagtccaagcatcaacgtaatcccaataggtataacctaccggatcaaatggaactgaaaatctcttccctttgtttaagtctgaaccaaagtgtcttggttgaagaacttttagtatttggatggttgagtgggtgtttaaggtttggtcttttggatctttgaaatgtttgatagatactgagtttgaatctaccaaaatcaattcataaaaagttcttgtcttcaggatggtggttggtttgtagtgaaatcctggtgggaaagccttggccgtcgccttgaagggatttttgtcccaaaattcaggttccatctgcaaaacagttaacaatttatttttataaatataattgttagtttgtttggtaggtggtgtttgagctttggctaaaggtagttttcctttagtattggtggctgttttggtcattgacgcattttggatcattgtttgtaaatttgattcagattcatcatcagattctgaggcaatgtctgcccaagattttttgattatttttggaaatttggtcagacccatgtcttgaagggcctgaagggtttcaattggccaagcatagtcggccgatgtttgtttggcggttgccggtttgggagattcctgagtggatggctcaggtttgattgaggcaatctgggttgatgacccttctaaattggttttctgggtagatgacccagcctgggttggtgacccagaagaggtagatgatttcttgatggttggctctggaagagccagcctggctcctttgcctgtactccttcctccccgtagggagattcccgatgcc

SEQ ID NO: 12116 - DNA, 1159 bp, Glycine max
  Gm_smallRNAprecursor_4949
ctggatccgctttggatgagtcaaattgtgtccaccattttacaaatgcgtgtctttgtagtgatggatattgatttgtcttttcagtcttgctgtagcgatattgccatgagaatatccatgacagtgcaaagcttgaaaagtatttaagatctgctggaattcgtgattcctgcgaattgtattgtttcttaaattgggaaaatccttgttggaccgtttctgggaatatctctgggattggtccaaagaagtcccaccattgcaaaaaccaattgggaaaattgtaaattgtgttggtcttgaaatatatcagccatgaatgcttgaagcgggtattttggtgccaaaacaccttagtccaagcatcaacgtaatcccaataggtataacctaccggatcaaatggaactgaaaatctcttccctttgtttaagtctgaaccaaagtgtcttggttgaagaacttttagtatttggatggttgagtgggtgtttaaggtttggtcttttggatctttgaaatgtttgatagatactgagtttgaatctaccaaaatcaattcataaaaagttcttgtcttcaggatggtggttggtttgtagtgaaatcctggtgggaaagccttggccgtcgccttgaagggatttttgtcccaaaattcaggttccatctgcaaaacagttaacaatttatttttataaatataattgttagtttgtttggtaggtggtgtttgagctttggctaaaggtagttttcctttagtattggtggctgttttggtcattgacgcattttggatcattgtttgtaaatttgattcagattcatcatcagattctgaggcaatgtctgcccaagattttttgattatttttggaaatttggtcagacccatgtcttgaagggcctgaagggtttcaattggccaagcatagtcggccgatgtttgtttggcggttgccggtttgggagattcctgagtggatggctcaggtttgattgaggcaatctgggttgatgacccttctaaattggttttctgggtagatgacccagcctgggttggtgacccagaagaggtagatgatttcttgatggttggctctggaagagccagcctggctcctttgcctgtactccttcctccccgtag

SEQ ID NO: 12117 - DNA, 1098 bp, Glycine max
  Gm_smallRNAprecursor_4950
gtgtctttgtagtgatggatattgatttgtcttttcagtcttgctgtagcgatattgccatgagaatatccatgacagtgcaaagcttgaaaagtatttaagatctgctggaattcgtgattcctgcgaattgtattgtttcttaaattgggaaaatccttgttggaccgtttctgggaatatctctgggattggtccaaagaagtcccaccattgcaaaaaccaattgggaaaattgtaaattgtgttggtcttgaaatatatcagccatgaatgcttgaagcgggtattttggtgccaaaacaccttagtccaagcatcaacgtaatcccaataggtataacctaccggatcaaatggaactgaaaatctcttccctttgtttaagtctgaaccaaagtgtcttggttgaagaacttttagtatttggatggttgagtgggtgtttaaggtttggtcttttggatctttgaaatgtttgatagatactgagtttgaatctaccaaaatcaattcataaaaagttcttgtcttcaggatggtggttggtttgtagtgaaatcctggtgggaaagccttggccgtcgccttgaagggatttttgtcccaaaattcaggttccatctgcaaaacagttaacaatttatttttataaatataattgttagtttgtttggtaggtggtgtttgagctttggctaaaggtagttttcctttagtattggtggctgttttggtcattgacgcattttggatcattgtttgtaaatttgattcagattcatcatcagattctgaggcaatgtctgcccaagattttttgattatttttggaaatttggtcagacccatgtcttgaagggcctgaagggtttcaattggccaagcatagtcggccgatgtttgtttggcggttgccggtttgggagattcctgagtggatggctcaggtttgattgaggcaatctgggttgatgacccttctaaattggttttctgggtagatgacccagcctgggttggtgacccagaagaggtagatgatttcttgatggttggctctggaagagccagcctggctcctttgcctgtactcct

SEQ ID NO: 12118 - DNA, 1098 bp, Glycine max
  Gm_smallRNAprecursor_4951
ttgatttgtcttttcagtcttgctgtagcgatattgccatgagaatatccatgacagtgcaaagcttgaaaagtatttaagatctgctggaattcgtgattcctgcgaattgtattgtttcttaaattgggaaaatccttgttggaccgtttctgggaatatctctgggattggtccaaagaagtcccaccattgcaaaaaccaattgggaaaattgtaaattgtgttggtcttgaaatatatcagccatgaatgcttgaagcgggtattttggtgccaaaacaccttagtccaagcatcaacgtaatcccaataggtataacctaccggatcaaatggaactgaaaatctcttccctttgtttaagtctgaaccaaagtgtcttggttgaagaacttttagtatttggatggttgagtgggtgtttaaggtttggtcttttggatctttgaaatgtttgatagatactgagtttgaatctaccaaaatcaattcataaaaagttcttgtcttcaggatggtggttggtttgtagtgaaatcctggtgggaaagccttggccgtcgccttgaagggatttttgtcccaaaattcaggttccatctgcaaaacagttaacaatttatttttataaatataattgttagtttgtttggtaggtggtgtttgagctttggctaaaggtagttttcctttagtattggtggctgttttggtcattgacgcattttggatcattgtttgtaaatttgattcagattcatcatcagattctgaggcaatgtctgcccaagattttttgattatttttggaaatttggtcagacccatgtcttgaagggcctgaagggtttcaattggccaagcatagtcggccgatgtttgtttggcggttgccggtttgggagattcctgagtggatggctcaggtttgattgaggcaatctgggttgatgacccttctaaattggttttctgggtagatgacccagcctgggttggtgacccagaagaggtagatgatttcttgatggttggctctggaagagccagcctggctcctttgcctgtactccttcctccccgtagggagattcc

SEQ ID NO: 12119 - DNA, 1090 bp, Glycine max
  Gm_smallRNAprecursor_4952
gcgaattgtattgtttcttaaattgggaaaatccttgttggaccgtttctgggaatatctctgggattggtccaaagaagtcccaccattgcaaaaaccaattgggaaaattgtaaattgtgttggtcttgaaatatatcagccatgaatgcttgaagcgggtattttggtgccaaaacaccttagtccaagcatcaacgtaatcccaataggtataacctaccggatcaaatggaactgaaaatctcttccctttgtttaagtctgaaccaaagtgtcttggttgaagaacttttagtatttggatggttgagtgggtgtttaaggtttggtcttttggatctttgaaatgtttgatagatactgagtttgaatctaccaaaatcaattcataaaaagttcttgtcttcaggatggtggttggtttgtagtgaaatcctggtgggaaagccttggccgtcgccttgaagggatttttgtcccaaaattcaggttccatctgcaaaacagttaacaatttatttttataaatataattgttagtttgtttggtaggtggtgtttgagctttggctaaaggtagttttcctttagtattggtggctgttttggtcattgacgcattttggatcattgtttgtaaatttgattcagattcatcatcagattctgaggcaatgtctgcccaagattttttgattatttttggaaatttggtcagacccatgtcttgaagggcctgaagggtttcaattggccaagcatagtcggccgatgtttgtttggcggttgccggtttgggagattcctgagtggatggctcaggtttgattgaggcaatctgggttgatgacccttctaaattggttttctgggtagatgacccagcctgggttggtgacccagaagaggtagatgatttcttgatggttggctctggaagagccagcctggctcctttgcctgtactccttcctccccgtagggagattcccgatgccttaggaggcattaccacttttctgtaagaattcacgggtaaggtagtcaggtagtgaatttgaggtgcccttgatgtattctatgtcaa

SEQ ID NO: 12120 - DNA, 1113 bp, Glycine max
  Gm_smallRNAprecursor_4953
ggaaatttggtcagacccatgtcttgaagggcctgaagggtttcaattggccaagcatagtcggccgatgtttgtttggcggttgccggtttgggagattcctgagtggatggctcaggtttgattgaggcaatctgggttgatgacccttctaaattggttttctgggtagatgacccagcctgggttggtgacccagaagaggtagatgatttcttgatggttggctctggaagagccagcctggctcctttgcctgtactccttcctccccgtagggagattcccgatgccttaggaggcattaccacttttctgtaagaattcacgggtaaggtagtcaggtagtgaatttgaggtgcccttgatgtattctatgtcaaaatcaaagacacttaaaattgcttgccatcgcgcaaaaatttgttttgaggcaaggtttttaacatctttttgtaaaatatctttggctgatttacaatcaaccctaattaaaaatttttggtttaataaatccgattgaaatttggaaatgcacaaaacaattgctaaaacttcttttttaacagttgaatattttaattgtgcaggattccaatgttttgatgtatatgcaatgacatgatcttggccatggactctttgtctgaggatgccaccataacctatgtctgaagcatcagtttcgacaattttaaatgcctgtggaataggaagatacagacatttaatagattggactttgaatttgatttctttaaccgtttgtgtatggaggtcagaccaaggaggcggatttttcttcagcctatcatgtaatggcttgactatattatttaaataggggacaaattctcctacgtaatttagacaacctagaaatctttgtaactgggttttgtctaagatttggttggggaatttgctagcaaactctattgacctttcgattggaatgattgtaccttgatatatattgtgaccaaggaatcgaattcgagtttggaaaagattgatttttgatttggagactgccaaaccattttgtttgatgatatgtatgaaggtttggagatgtttgaaatgttggtcaatgttttgggaaaagattaa

SEQ ID NO: 12121 - DNA, 1113 bp, Glycine max; identical to SEQ ID NO: 12120
  Gm_smallRNAprecursor_4954

SEQ ID NO: 12122 - DNA, 1114 bp, Glycine max
  Gm_smallRNAprecursor_4955
ggaaatttggtcagacccatgtcttgaagggcctgaagggtttcaattggccaagcatagtcggccgatgtttgtttggcggttgccggtttgggagattcctgagtggatggctcaggtttgattgaggcaatctgggttgatgacccttctaaattggttttctgggtagatgacccagcctgggttggtgacccagaagaggtagatgatttcttgatggttggctctggaagagccagcctggctcctttgcctgtactccttcctccccgtagggagattcccgatgccttaggaggcattaccacttttctgtaagaattcacgggtaaggtagtcaggtagtgaatttgaggtgcccttgatgtattctatgtcaaaatcaaagacacttaaaattgcttgccatcgcgcaaaaatttgttttgaggcaaggtttttaacatctttttgtaaaatatctttggctgatttacaatcaaccctaattaaaaatttttggtttaataaatccgattgaaatttggaaatgcacaaaacaattgctaaaacttcttttttaacagttgaatattttaattgtgcaggattccaatgttttgatgtatatgcaatgacatgatcttggccatggactctttgtctgaggatgccaccataacctatgtctgaagcatcagtttcgacaattttaaatgcctgtggaataggaagatacagacatttaatagattggactttgaatttgatttctttaaccgtttgtgtatggaggtcagaccaaggaggcggatttttcttcagcctatcatgtaatggcttgactatattatttaaataggggacaaattctcctacgtaatttagacaacctagaaatctttgtaactgggttttgtctaagatttggttggggaatttgctagcaaactctattgacctttcgattggaatgattgtaccttgatatatattgtgaccaaggaatcgaattcgagtttggaaaagattgatttttgatttggagactgccaaaccattttgtttgatgatatgtatgaaggtttggagatgtttgaaatgttggtcaatgttttgggaaaagattaaa

SEQ ID NO: 12123 - DNA, 1207 bp, Glycine max
  Gm_smallRNAprecursor_4956
ggaaatttggtcagacccatgtcttgaagggcctgaagggtttcaattggccaagcatagtcggccgatgtttgtttggcggttgccggtttgggagattcctgagtggatggctcaggtttgattgaggcaatctgggttgatgacccttctaaattggttttctgggtagatgacccagcctgggttggtgacccagaagaggtagatgatttcttgatggttggctctggaagagccagcctggctcctttgcctgtactccttcctccccgtagggagattcccgatgccttaggaggcattaccacttttctgtaagaattcacgggtaaggtagtcaggtagtgaatttgaggtgcccttgatgtattctatgtcaaaatcaaagacacttaaaattgcttgccatcgcgcaaaaatttgttttgaggcaaggtttttaacatctttttgtaaaatatctttggctgatttacaatcaaccctaattaaaaatttttggtttaataaatccgattgaaatttggaaatgcacaaaacaattgctaaaacttcttttttaacagttgaatattttaattgtgcaggattccaatgttttgatgtatatgcaatgacatgatcttggccatggactctttgtctgaggatgccaccataacctatgtctgaagcatcagtttcgacaattttaaatgcctgtggaataggaagatacagacatttaatagattggactttgaatttgatttctttaaccgtttgtgtatggaggtcagaccaaggaggcggatttttcttcagcctatcatgtaatggcttgactatattatttaaataggggacaaattctcctacgtaatttagacaacctagaaatctttgtaactgggttttgtctaagatttggttggggaatttgctagcaaactctattgacctttcgattggaatgattgtaccttgatatatattgtgaccaaggaatcgaattcgagtttggaaaagattgatttttgatttggagactgccaaaccattttgtttgatgatatgtatgaaggtttggagatgtttgaaatgttggtcaatgttttgggaaaagattaaaacatcatctatgtagacaatgacaaattttgaataaggattaaaaatatcgttcataattttttgaaattctgaaggggcattcttcagtccg

SEQ ID NO: 12124 - DNA, 1035 bp, Glycine max
  Gm_smallRNAprecursor_4957
gcggttgccggtttgggagattcctgagtggatggctcaggtttgattgaggcaatctgggttgatgacccttctaaattggttttctgggtagatgacccagcctgggttggtgacccagaagaggtagatgatttcttgatggttggctctggaagagccagcctggctcctttgcctgtactccttcctccccgtagggagattcccgatgccttaggaggcattaccacttttctgtaagaattcacgggtaaggtagtcaggtagtgaatttgaggtgcccttgatgtattctatgtcaaaatcaaagacacttaaaattgcttgccatcgcgcaaaaatttgttttgaggcaaggtttttaacatctttttgtaaaatatctttggctgatttacaatcaaccctaattaaaaatttttggtttaataaatccgattgaaatttggaaatgcacaaaacaattgctaaaacttcttttttaacagttgaatattttaattgtgcaggattccaatgttttgatgtatatgcaatgacatgatcttggccatggactctttgtctgaggatgccaccataacctatgtctgaagcatcagtttcgacaattttaaatgcctgtggaataggaagatacagacatttaatagattggactttgaatttgatttctttaaccgtttgtgtatggaggtcagaccaaggaggcggatttttcttcagcctatcatgtaatggcttgactatattatttaaataggggacaaattctcctacgtaatttagacaacctagaaatctttgtaactgggttttgtctaagatttggttggggaatttgctagcaaactctattgacctttcgattggaatgattgtaccttgatatatattgtgaccaaggaatcgaattcgagtttggaaaagattgatttttgatttggagactgccaaaccattttgtttgatgatatgtatgaaggtttggagatgtttgaaatgttggtcaatgttttgggaaaagattaa

SEQ ID NO: 12125 - DNA, 1247 bp, Glycine max
  Gm_smallRNAprecursor_4958
agatgatttcttgatggttggctctggaagagccagcctggctcctttgcctgtactccttcctccccgtagggagattcccgatgccttaggaggcattaccacttttctgtaagaattcacgggtaaggtagtcaggtagtgaatttgaggtgcccttgatgtattctatgtcaaaatcaaagacacttaaaattgcttgccatcgcgcaaaaatttgttttgaggcaaggtttttaacatctttttgtaaaatatctttggctgatttacaatcaaccctaattaaaaatttttggtttaataaatccgattgaaatttggaaatgcacaaaacaattgctaaaacttcttttttaacagttgaatattttaattgtgcaggattccaatgttttgatgtatatgcaatgacatgatcttggccatggactctttgtctgaggatgccaccataacctatgtctgaagcatcagtttcgacaattttaaatgcctgtggaataggaagatacagacatttaatagattggactttgaatttgatttctttaaccgtttgtgtatggaggtcagaccaaggaggcggatttttcttcagcctatcatgtaatggcttgactatattatttaaataggggacaaattctcctacgtaatttagacaacctagaaatctttgtaactgggttttgtctaagatttggttggggaatttgctagcaaactctattgacctttcgattggaatgattgtaccttgatatatattgtgaccaaggaatcgaattcgagtttggaaaagattgatttttgatttggagactgccaaaccattttgtttgatgatatgtatgaaggtttggagatgtttgaaatgttggtcaatgttttgggaaaagattaaaacatcatctatgtagacaatgacaaattttgaataaggattaaaaatatcgttcataattttttgaaattctgaaggggcattcttcagtccgaatggcatcacgttccattcatattgcccgaaaggtacagtaaacgctgttttgtacctatctgattcttggatttggatttgccaaaatccagatttcatatcaaattttgaaaatatctttgcagaatttaatctgttaagcaaatcttttttgtttgggataggatatctaatccattgtaatgcttgatttaatggtttgtaatttatgactaagcggggtgttccacgctcaatctcagat

SEQ ID NO: 12126 - DNA, 1246 bp, Glycine max
  Gm_smallRNAprecursor_4959
gatgatttcttgatggttggctctggaagagccagcctggctcctttgcctgtactccttcctccccgtagggagattcccgatgccttaggaggcattaccacttttctgtaagaattcacgggtaaggtagtcaggtagtgaatttgaggtgcccttgatgtattctatgtcaaaatcaaagacacttaaaattgcttgccatcgcgcaaaaatttgttttgaggcaaggtttttaacatctttttgtaaaatatctttggctgatttacaatcaaccctaattaaaaatttttggtttaataaatccgattgaaatttggaaatgcacaaaacaattgctaaaacttcttttttaacagttgaatattttaattgtgcaggattccaatgttttgatgtatatgcaatgacatgatcttggccatggactctttgtctgaggatgccaccataacctatgtctgaagcatcagtttcgacaattttaaatgcctgtggaataggaagatacagacatttaatagattggactttgaatttgatttctttaaccgtttgtgtatggaggtcagaccaaggaggcggatttttcttcagcctatcatgtaatggcttgactatattatttaaataggggacaaattctcctacgtaatttagacaacctagaaatctttgtaactgggttttgtctaagatttggttggggaatttgctagcaaactctattgacctttcgattggaatgattgtaccttgatatatattgtgaccaaggaatcgaattcgagtttggaaaagattgatttttgatttggagactgccaaaccattttgtttgatgatatgtatgaaggtttggagatgtttgaaatgttggtcaatgttttgggaaaagattaaaacatcatctatgtagacaatgacaaattttgaataaggattaaaaatatcgttcataattttttgaaattctgaaggggcattcttcagtccgaatggcatcacgttccattcatattgcccgaaaggtacagtaaacgctgttttgtacctatctgattcttggatttggatttgccaaaatccagatttcatatcaaattttgaaaatatctttgcagaatttaatctgttaagcaaatcttttttgtttgggataggatatctaatccattgtaatgcttgatttaatggtttgtaatttatgactaagcggggtgttccacgctcaatctcagat

SEQ ID NO: 12127 - DNA, 1031 bp, Glycine max
  Gm_smallRNAprecursor_4960
ctttttgtaaaatatctttggctgatttacaatcaaccctaattaaaaatttttggtttaataaatccgattgaaatttggaaatgcacaaaacaattgctaaaacttcttttttaacagttgaatattttaattgtgcaggattccaatgttttgatgtatatgcaatgacatgatcttggccatggactctttgtctgaggatgccaccataacctatgtctgaagcatcagtttcgacaattttaaatgcctgtggaataggaagatacagacatttaatagattggactttgaatttgatttctttaaccgtttgtgtatggaggtcagaccaaggaggcggatttttcttcagcctatcatgtaatggcttgactatattatttaaataggggacaaattctcctacgtaatttagacaacctagaaatctttgtaactgggttttgtctaagatttggttggggaatttgctagcaaactctattgacctttcgattggaatgattgtaccttgatatatattgtgaccaaggaatcgaattcgagtttggaaaagattgatttttgatttggagactgccaaaccattttgtttgatgatatgtatgaaggtttggagatgtttgaaatgttggtcaatgttttgggaaaagattaaaacatcatctatgtagacaatgacaaattttgaataaggattaaaaatatcgttcataattttttgaaattctgaaggggcattcttcagtccgaatggcatcacgttccattcatattgcccgaaaggtacagtaaacgctgttttgtacctatctgattcttggatttggatttgccaaaatccagatttcatatcaaattttgaaaatatctttgcagaatttaatctgttaagcaaatcttttttgtttgggataggatatctaatccattgtaatgcttgatttaatggtttgtaatttatgactaagcggggtgttccacgctcaatctcagattgtttgttaacataaaaagtcgcacaa

SEQ ID NO: 12128 - DNA, 1234 bp, Glycine max
  Gm_smallRNAprecursor_4961
aatcaaccctaattaaaaatttttggtttaataaatccgattgaaatttggaaatgcacaaaacaattgctaaaacttcttttttaacagttgaatattttaattgtgcaggattccaatgttttgatgtatatgcaatgacatgatcttggccatggactctttgtctgaggatgccaccataacctatgtctgaagcatcagtttcgacaattttaaatgcctgtggaataggaagatacagacatttaatagattggactttgaatttgatttctttaaccgtttgtgtatggaggtcagaccaaggaggcggatttttcttcagcctatcatgtaatggcttgactatattatttaaataggggacaaattctcctacgtaatttagacaacctagaaatctttgtaactgggttttgtctaagatttggttggggaatttgctagcaaactctattgacctttcgattggaatgattgtaccttgatatatattgtgaccaaggaatcgaattcgagtttggaaaagattgatttttgatttggagactgccaaaccattttgtttgatgatatgtatgaaggtttggagatgtttgaaatgttggtcaatgttttgggaaaagattaaaacatcatctatgtagacaatgacaaattttgaataaggattaaaaatatcgttcataattttttgaaattctgaaggggcattcttcagtccgaatggcatcacgttccattcatattgcccgaaaggtacagtaaacgctgttttgtacctatctgattcttggatttggatttgccaaaatccagatttcatatcaaattttgaaaatatctttgcagaatttaatctgttaagcaaatcttttttgtttgggataggatatctaatccattgtaatgcttgatttaatggtttgtaatttatgactaagcggggtgttccacgctcaatctcagattgtttgttaacataaaaagtcgcacaagaccatgggcttttgcttttccggattaggcctttatcaagcaaatccttgatttccttttgacaatattgaagaagttcttcattcatttggattggtctggcttttgtgggaatttgtttttccctaaagtctttctcataagggagatcgacaatatgcttctttctgtcccaaaatgcatgtggcaattcagaacaaacggtcgattcaatatgatttaataaagattg

SEQ ID NO: 12129 - DNA, 1061 bp, Glycine max
  Gm_smallRNAprecursor_4962
tatttaaataggggacaaattctcctacgtaatttagacaacctagaaatctttgtaactgggttttgtctaagatttggttggggaatttgctagcaaactctattgacctttcgattggaatgattgtaccttgatatatattgtgaccaaggaatcgaattcgagtttggaaaagattgatttttgatttggagactgccaaaccattttgtttgatgatatgtatgaaggtttggagatgtttgaaatgttggtcaatgttttgggaaaagattaaaacatcatctatgtagacaatgacaaattttgaataaggattaaaaatatcgttcataattttttgaaattctgaaggggcattcttcagtccgaatggcatcacgttccattcatattgcccgaaaggtacagtaaacgctgttttgtacctatctgattcttggatttggatttgccaaaatccagatttcatatcaaattttgaaaatatctttgcagaatttaatctgttaagcaaatcttttttgtttgggataggatatctaatccattgtaatgcttgatttaatggtttgtaatttatgactaagcggggtgttccacgctcaatctcagattgtttgttaacataaaaagtcgcacaagaccatgggcttttgcttttccggattaggcctttatcaagcaaatccttgatttccttttgacaatattgaagaagttcttcattcatttggattggtctggcttttgtgggaatttgtttttccctaaagtctttctcataagggagatcgacaatatgcttctttctgtcccaaaatgcatgtggcaattcagaacaaacggtcgattcaatatgatttaataaagattgaattctttcttttacttggggttttcccagttgtatctgaatattattaaaagatacttcttcttttaagaagttaatttgattaatcttattttctataagatttatatttctagaaattggtttagtagaaaaattaaatataatttttcttcctaaataatttgtggttattccttca

SEQ ID NO: 12130 - DNA, 1159 bp, Glycine max
  Gm_smallRNAprecursor_4963
acccatctttcgggaagagttacttcatcccattttatttttcttgggagagacacgttagcctttgtcatatcagtgataaacaaggttgtttctcctttttgaggttttaacaggactctagatgcacaagtattcatgaccttgtactggatcctataaattaaggctgctgggattgatccttctttcatgtcaaggccatgaaagtggatgtttaagaacagagagtcaagaatgtttctgtccatcaaactcactgttttgtttggataacaattaaaatatattggaccttgtcctaggctggtttcgactgttccaattagggagtcttcaaattgattatgcctaatatctcttagacacattaaaactgctgcatctatgcccatatcaattaagggcttgatggctacttgtacacaaccgatgtgtaaatatttatacttacggctatgttcataaattgaattctttgaaagtagatgaaattcttcccctatatcttgtcctagaggaatattgttttctactgttttgattatgtaatcaaagttgtgtttgtctttaattgtctcaggaacgtatagttgatcctgagggatttctggaatgttccagtcatccatgttttgattaatatcttcgaatcggacttcctcatcgaagagattgtgttttggggcgacctcttgggtctggttatcttgatcatttaagagattggtgtttcttgaagaagatgaagtggaggaattcgagcgaaaagaaatacgggaaaaggatcgcaataatctagacatgattaaaacattctctaatatctttgccttcatttggttccataggaatctttccataaggctatatgttacagaacttcttggatctgaataaatgaaaagaagatttttttttcacagacaatatagtttgaacattactcctatagccaccagtatattatgtctcaatattttatttgaacaatacaccttagccttactgccctttctcatccacgggacttactgctacagtatcattcaactaaaatatcagactgctgtgcttccagaaaatactgttcaaacacatactgtttaaattaaaattactgttcaaacacacacatatatatatatatatatatata

SEQ ID NO: 12131 - DNA, 1092 bp, Glycine max
  Gm_smallRNAprecursor_4964
tttacccatgaacagagtttcgttggcaattaattcagccattatgcaacccactgaccacatgttaattttctgttgagtattctttagcacccagcaaaagttcaggcaatgttgttaatggcggatggcggttcatgacggaaagtcaaaaatccgccataaaaatatggcggatggcgtagcggaaaatggcggatgtcatgacggacacaaaaaaaaaaaacatatatataaactcattgaaattgaaaaaaacaaaggattgcattcaaataaactaaaaaagtttcatgagttcatacaataatcaagtaccaacaccaaataaactcattaaagagttcaaaataagaaaatgataaaaacataatgcaaagtgcaaagtgaaggttgaggctctaatcatcttctccaatcccaacataatcatcttcgttgttatcatatggtaatggagcatctccctctccctcttccccatcagacgcctcaaaattgaccatgatttcttcttcttcagattcaacatcaatattctcctcaacatctagatcctcatcattttcttggactgctttttgcttccttgatgaagatccaacaaccattgcctgttttttagaagtttgggcagcaacaacacttgttttttgctttttctgcctagtatacatcctacactctccaacccccgaagcctgatacacagttgcccaatttagagcatcatcatcttcaaataccaaatcatttccagcatcattatcatcatcttgatccatctctcccacgagccattcattgcatacatcaatatcattaagagaaattcgatcaatttcatctcttgcattatatctttgcttcaattgttggttgtatttgacaaacaccaaatcatgcaacctcttgtgctcaagcctatttctttttttggaatgaatctacaacataacaaataaatgttgatttcaatctcaaatatactccaaatataacttgatcatcaaaattaaataaaattaaaaagtatagttagagttttgtcacaattacttgctcaaacacactccaatttctttcacatcc

SEQ ID NO: 12132 - DNA, 1247 bp, Glycine max
  Gm_smallRNAprecursor_4965
cccttcaagacatgggtctaaccaaatttccaaaaataatcaaaaaatcttgggcagacattgcctcagaatctgatgatgaatctgaatcaaatttacaaacaatgatccaaaatgcatcaatgacagaaacaactaccaatcctaaagggaaactacctttagccaaagctcaaacaccacctaccaaacaaactaacaattatattaataaaaataaatttgtaactgttttgcacatggaacctgaattttgggacaaaaatcccttcaaggcgacggccaaggctttcccaccaggatttcactacaaaccaaccaccatcctgaagacaagaactttttatgaattgatttgggtagattcaaattcagtatttatcaaacatttcaaagacccaaaagaccaaacattaaacacccactccacaatccaaatactaaaagttcttcaaccaagacactttggttcggacttgaacaaaggaaagagattttcagttccatttgatccggtaggttatacctattgggattatgttgatgcttggactaaggtgttttggcaccaaaatacccgcttcaagcattcatggctgatatatttcaagaccaatacaatttacaattttcgcaattggtttttgcaatggtgggacttctttggaccaatcccagagatattcccagaaacagtccaacaaggatttgctcaatttgagagacaataaaattcgcaggaatcacgaattccagcagatcttaaatacttttcaagctttgcattgtcatggatcttctcatggcaatatccttacagcaagactgaaaagacaaaccaatatccatcactacaaagacacacatttgtaaaatggtggacacaatttgactcatccaaagcagatccagaacaagtaaaagtctggttccaatcccatccagaattcctcaaagcagctaatcaagaaacttctgtgtttttgaaccaaaagtctcatctggcagcatttttagcaggatcgaaatcaaaggaggtcctagctaaaaatctaaaggaagttctacaaatgttacagcaggaagaagaaggttcatcctcaaagaaggaagaaacaagttctgctgaagaagaagaagaagaccccttttaccaaaacgaagatgattgttttggtatctgtttagattaaatttaatttcggtcacaaaaccgtctgtttgtaattaatgtgtaattaatgctg

SEQ ID NO: 12133 - DNA, 1248 bp, Glycine max
  Gm_smallRNAprecursor_4966
cccttcaagacatgggtctaaccaaatttccaaaaataatcaaaaaatcttgggcagacattgcctcagaatctgatgatgaatctgaatcaaatttacaaacaatgatccaaaatgcatcaatgacagaaacaactaccaatcctaaagggaaactacctttagccaaagctcaaacaccacctaccaaacaaactaacaattatattaataaaaataaatttgtaactgttttgcacatggaacctgaattttgggacaaaaatcccttcaaggcgacggccaaggctttcccaccaggatttcactacaaaccaaccaccatcctgaagacaagaactttttatgaattgatttgggtagattcaaattcagtatttatcaaacatttcaaagacccaaaagaccaaacattaaacacccactccacaatccaaatactaaaagttcttcaaccaagacactttggttcggacttgaacaaaggaaagagattttcagttccatttgatccggtaggttatacctattgggattatgttgatgcttggactaaggtgttttggcaccaaaatacccgcttcaagcattcatggctgatatatttcaagaccaatacaatttacaattttcgcaattggtttttgcaatggtgggacttctttggaccaatcccagagatattcccagaaacagtccaacaaggatttgctcaatttgagagacaataaaattcgcaggaatcacgaattccagcagatcttaaatacttttcaagctttgcattgtcatggatcttctcatggcaatatccttacagcaagactgaaaagacaaaccaatatccatcactacaaagacacacatttgtaaaatggtggacacaatttgactcatccaaagcagatccagaacaagtaaaagtctggttccaatcccatccagaattcctcaaagcagctaatcaagaaacttctgtgtttttgaaccaaaagtctcatctggcagcatttttagcaggatcgaaatcaaaggaggtcctagctaaaaatctaaaggaagttctacaaatgttacagcaggaagaagaaggttcatcctcaaagaaggaagaaacaagttctgctgaagaagaagaagaagaccccttttaccaaaacgaagatgattgttttggtatctgtttagattaaatttaatttcggtcacaaaaccgtctgtttgtaattaatgtgtaattaatgctgg

SEQ ID NO: 12134 - DNA, 1045 bp, Glycine max
  Gm_smallRNAprecursor_4967
tccaaaaataatcaaaaaatcttgggcagacattgcctcagaatctgatgatgaatctgaatcaaatttacaaacaatgatccaaaatgcatcaatgacagaaacaactaccaatcctaaagggaaactacctttagccaaagctcaaacaccacctaccaaacaaactaacaattatattaataaaaataaatttgtaactgttttgcacatggaacctgaattttgggacaaaaatcccttcaaggcgacggccaaggctttcccaccaggatttcactacaaaccaaccaccatcctgaagacaagaactttttatgaattgatttgggtagattcaaattcagtatttatcaaacatttcaaagacccaaaagaccaaacattaaacacccactccacaatccaaatactaaaagttcttcaaccaagacactttggttcggacttgaacaaaggaaagagattttcagttccatttgatccggtaggttatacctattgggattatgttgatgcttggactaaggtgttttggcaccaaaatacccgcttcaagcattcatggctgatatatttcaagaccaatacaatttacaattttcgcaattggtttttgcaatggtgggacttctttggaccaatcccagagatattcccagaaacagtccaacaaggatttgctcaatttgagagacaataaaattcgcaggaatcacgaattccagcagatcttaaatacttttcaagctttgcattgtcatggatcttctcatggcaatatccttacagcaagactgaaaagacaaaccaatatccatcactacaaagacacacatttgtaaaatggtggacacaatttgactcatccaaagcagatccagaacaagtaaaagtctggttccaatcccatccagaattcctcaaagcagctaatcaagaaacttctgtgtttttgaaccaaaagtctcatctggcagcatttttagcaggatcgaaatcaaaggaggtcctagctaaaaatctaaaggaagttctacaaatg

SEQ ID NO: 12135 - DNA, 1163 bp, Glycine max
  Gm_smallRNAprecursor_4968
aaaaataatcaaaaaatcttgggcagacattgcctcagaatctgatgatgaatctgaatcaaatttacaaacaatgatccaaaatgcatcaatgacagaaacaactaccaatcctaaagggaaactacctttagccaaagctcaaacaccacctaccaaacaaactaacaattatattaataaaaataaatttgtaactgttttgcacatggaacctgaattttgggacaaaaatcccttcaaggcgacggccaaggctttcccaccaggatttcactacaaaccaaccaccatcctgaagacaagaactttttatgaattgatttgggtagattcaaattcagtatttatcaaacatttcaaagacccaaaagaccaaacattaaacacccactccacaatccaaatactaaaagttcttcaaccaagacactttggttcggacttgaacaaaggaaagagattttcagttccatttgatccggtaggttatacctattgggattatgttgatgcttggactaaggtgttttggcaccaaaatacccgcttcaagcattcatggctgatatatttcaagaccaatacaatttacaattttcgcaattggtttttgcaatggtgggacttctttggaccaatcccagagatattcccagaaacagtccaacaaggatttgctcaatttgagagacaataaaattcgcaggaatcacgaattccagcagatcttaaatacttttcaagctttgcattgtcatggatcttctcatggcaatatccttacagcaagactgaaaagacaaaccaatatccatcactacaaagacacacatttgtaaaatggtggacacaatttgactcatccaaagcagatccagaacaagtaaaagtctggttccaatcccatccagaattcctcaaagcagctaatcaagaaacttctgtgtttttgaaccaaaagtctcatctggcagcatttttagcaggatcgaaatcaaaggaggtcctagctaaaaatctaaaggaagttctacaaatgttacagcaggaagaagaaggttcatcctcaaagaaggaagaaacaagttctgctgaagaagaagaagaagaccccttttaccaaaacgaagatgattgttttggtatctgtttagattaaa

SEQ ID NO: 12136 - DNA, 1060 bp, Glycine max
  Gm_smallRNAprecursor_4969
aattatattaataaaaataaatttgtaactgttttgcacatggaacctgaattttgggacaaaaatcccttcaaggcgacggccaaggctttcccaccaggatttcactacaaaccaaccaccatcctgaagacaagaactttttatgaattgatttgggtagattcaaattcagtatttatcaaacatttcaaagacccaaaagaccaaacattaaacacccactccacaatccaaatactaaaagttcttcaaccaagacactttggttcggacttgaacaaaggaaagagattttcagttccatttgatccggtaggttatacctattgggattatgttgatgcttggactaaggtgttttggcaccaaaatacccgcttcaagcattcatggctgatatatttcaagaccaatacaatttacaattttcgcaattggtttttgcaatggtgggacttctttggaccaatcccagagatattcccagaaacagtccaacaaggatttgctcaatttgagagacaataaaattcgcaggaatcacgaattccagcagatcttaaatacttttcaagctttgcattgtcatggatcttctcatggcaatatccttacagcaagactgaaaagacaaaccaatatccatcactacaaagacacacatttgtaaaatggtggacacaatttgactcatccaaagcagatccagaacaagtaaaagtctggttccaatcccatccagaattcctcaaagcagctaatcaagaaacttctgtgtttttgaaccaaaagtctcatctggcagcatttttagcaggatcgaaatcaaaggaggtcctagctaaaaatctaaaggaagttctacaaatgttacagcaggaagaagaaggttcatcctcaaagaaggaagaaacaagttctgctgaagaagaagaagaagaccccttttaccaaaacgaagatgattgttttggtatctgtttagattaaatttaatttcggtcacaaaaccgtctgtttgtaattaatgtgtaattaatgctggaccatacaacct

SEQ ID NO: 12137 - DNA, 1189 bp, Glycine max
  Gm_smallRNAprecursor_4970
cacaatccaaatactaaaagttcttcaaccaagacactttggttcggacttgaacaaaggaaagagattttcagttccatttgatccggtaggttatacctattgggattatgttgatgcttggactaaggtgttttggcaccaaaatacccgcttcaagcattcatggctgatatatttcaagaccaatacaatttacaattttcgcaattggtttttgcaatggtgggacttctttggaccaatcccagagatattcccagaaacagtccaacaaggatttgctcaatttgagagacaataaaattcgcaggaatcacgaattccagcagatcttaaatacttttcaagctttgcattgtcatggatcttctcatggcaatatccttacagcaagactgaaaagacaaaccaatatccatcactacaaagacacacatttgtaaaatggtggacacaatttgactcatccaaagcagatccagaacaagtaaaagtctggttccaatcccatccagaattcctcaaagcagctaatcaagaaacttctgtgtttttgaaccaaaagtctcatctggcagcatttttagcaggatcgaaatcaaaggaggtcctagctaaaaatctaaaggaagttctacaaatgttacagcaggaagaagaaggttcatcctcaaagaaggaagaaacaagttctgctgaagaagaagaagaagaccccttttaccaaaacgaagatgattgttttggtatctgtttagattaaatttaatttcggtcacaaaaccgtctgtttgtaattaatgtgtaattaatgctggaccatacaacctgtcctctagccattaaagtcccggtcaaaactacttgtcttgtaacaagcagtcaaatagtcccggtcaaaactaccggcaactaccggtcttaggtttttggctatataaggagtcctcaagtagtgttcaaactaaattgttcgcaaaaaaaagaaaaactttttcatttattcagatccaagaagttctgtaacatatagccttatggaaatatttctatggaaccaaatgaaggcaaagatattagagaatgttataatcatgtctagactattgcgctatttttcccgtatctcttttcgatcaaattcttcttcttcatcttcttcaagaaattccaatttattaagtga

SEQ ID NO: 12138 - DNA, 1046 bp, Glycine max
  Gm_smallRNAprecursor_4971
tcaagaccaatacaatttacaattttcgcaattggtttttgcaatggtgggacttctttggaccaatcccagagatattcccagaaacagtccaacaaggatttgctcaatttgagagacaataaaattcgcaggaatcacgaattccagcagatcttaaatacttttcaagctttgcattgtcatggatcttctcatggcaatatccttacagcaagactgaaaagacaaaccaatatccatcactacaaagacacacatttgtaaaatggtggacacaatttgactcatccaaagcagatccagaacaagtaaaagtctggttccaatcccatccagaattcctcaaagcagctaatcaagaaacttctgtgtttttgaaccaaaagtctcatctggcagcatttttagcaggatcgaaatcaaaggaggtcctagctaaaaatctaaaggaagttctacaaatgttacagcaggaagaagaaggttcatcctcaaagaaggaagaaacaagttctgctgaagaagaagaagaagaccccttttaccaaaacgaagatgattgttttggtatctgtttagattaaatttaatttcggtcacaaaaccgtctgtttgtaattaatgtgtaattaatgctggaccatacaacctgtcctctagccattaaagtcccggtcaaaactacttgtcttgtaacaagcagtcaaatagtcccggtcaaaactaccggcaactaccggtcttaggtttttggctatataaggagtcctcaagtagtgttcaaactaaattgttcgcaaaaaaaagaaaaactttttcatttattcagatccaagaagttctgtaacatatagccttatggaaatatttctatggaaccaaatgaaggcaaagatattagagaatgttataatcatgtctagactattgcgctatttttcccgtatctcttttcgatcaaattcttcttcttcatcttcttcaagaaattccaatttattaagtgatcaagataaccagacccaagaggtcgcccccaaaca

SEQ ID NO: 12139 - DNA, 1213 bp, Glycine max
  Gm_smallRNAprecursor_4972
caatacaatttacaattttcgcaattggtttttgcaatggtgggacttctttggaccaatcccagagatattcccagaaacagtccaacaaggatttgctcaatttgagagacaataaaattcgcaggaatcacgaattccagcagatcttaaatacttttcaagctttgcattgtcatggatcttctcatggcaatatccttacagcaagactgaaaagacaaaccaatatccatcactacaaagacacacatttgtaaaatggtggacacaatttgactcatccaaagcagatccagaacaagtaaaagtctggttccaatcccatccagaattcctcaaagcagctaatcaagaaacttctgtgtttttgaaccaaaagtctcatctggcagcatttttagcaggatcgaaatcaaaggaggtcctagctaaaaatctaaaggaagttctacaaatgttacagcaggaagaagaaggttcatcctcaaagaaggaagaaacaagttctgctgaagaagaagaagaagaccccttttaccaaaacgaagatgattgttttggtatctgtttagattaaatttaatttcggtcacaaaaccgtctgtttgtaattaatgtgtaattaatgctggaccatacaacctgtcctctagccattaaagtcccggtcaaaactacttgtcttgtaacaagcagtcaaatagtcccggtcaaaactaccggcaactaccggtcttaggtttttggctatataaggagtcctcaagtagtgttcaaactaaattgttcgcaaaaaaaagaaaaactttttcatttattcagatccaagaagttctgtaacatatagccttatggaaatatttctatggaaccaaatgaaggcaaagatattagagaatgttataatcatgtctagactattgcgctatttttcccgtatctcttttcgatcaaattcttcttcttcatcttcttcaagaaattccaatttattaagtgatcaagataaccagacccaagaggtcgcccccaaacacaatctcttcaatgaggaagtccgattcgaagatatcaatcaaaacatggatgactggaacattccagaaatccctcaggatcaactatacgtttctgaaacaattaaggacaaacacaactttgattacataatcaaaatagtagaaaaaaatattcctctaggacaagatat

SEQ ID NO: 12140 - DNA, 1061 bp, Glycine max
  Gm_smallRNAprecursor_4973
atcgtggatcctgcagctttgtgcattgtacagcaacttccagtattttcgggcaggatgtcctggacattgtatccgacatcttggatcctgcagctttgtgcattgtacagcaacttccagtattttcgggcaggatgtcccggacattgtatctgacatcttggatcctgcagcttcaattcttcatttgacatttcatcttgccttgtgcattgtgcagcccgatcttattctttgacataacgttggacatcatgtgcagcaactccagctttccttcaatgtctaagtgcttatgttttaacaaaatcttagccaatcttttaaaactccgtagagctaagcactaacagttttgaccgggactatttgactatttgttacaagacaagtagttttgaccgggactttaatggctagaggacaggttgtattgtccaacattaattacacattaattacaaacagacggttttgtgaccgaaattaaatttaatctaaacagataccaaaacaatcatcttcgttttggtaaaaggggtcttcttcttcttcttcagcagaacttgtttcttccttctttgaggatgaaccttcttcttcctgctgtaacatttgcagaacttcctttagatttttagctaggacctcctttgatttcgatcctgctaaaaatgctgtcagatgagacttttggttcaaaaacacagaagtttctggatcagctgctttgaggaattctggatgggattgaaaccagacttttacttgttctggatctgctttggatgagtcaaattgtgtccaccattttacaaatgtgtgtctttgtagtgatggatattggtttgtcttttcagtcttgctgtaaggatattgccatgagaagatccatgacagtgcaaagcttgaaaagtatttaagatctactggaattcgtgattcctgcgaattttattgtctctgaaattgagcaaatccttgttggactgtttctgggaatatctctgggattggtccaaagaagtcccaccattgcaaaaaccaattgggaaaat

SEQ ID NO: 12141 - DNA, 1063 bp, Glycine max
  Gm_smallRNAprecursor_4974
atcgtggatcctgcagctttgtgcattgtacagcaacttccagtattttcgggcaggatgtcctggacattgtatccgacatcttggatcctgcagctttgtgcattgtacagcaacttccagtattttcgggcaggatgtcccggacattgtatctgacatcttggatcctgcagcttcaattcttcatttgacatttcatcttgccttgtgcattgtgcagcccgatcttattctttgacataacgttggacatcatgtgcagcaactccagctttccttcaatgtctaagtgcttatgttttaacaaaatcttagccaatcttttaaaactccgtagagctaagcactaacagttttgaccgggactatttgactatttgttacaagacaagtagttttgaccgggactttaatggctagaggacaggttgtattgtccaacattaattacacattaattacaaacagacggttttgtgaccgaaattaaatttaatctaaacagataccaaaacaatcatcttcgttttggtaaaaggggtcttcttcttcttcttcagcagaacttgtttcttccttctttgaggatgaaccttcttcttcctgctgtaacatttgcagaacttcctttagatttttagctaggacctcctttgatttcgatcctgctaaaaatgctgtcagatgagacttttggttcaaaaacacagaagtttctggatcagctgctttgaggaattctggatgggattgaaaccagacttttacttgttctggatctgctttggatgagtcaaattgtgtccaccattttacaaatgtgtgtctttgtagtgatggatattggtttgtcttttcagtcttgctgtaaggatattgccatgagaagatccatgacagtgcaaagcttgaaaagtatttaagatctactggaattcgtgattcctgcgaattttattgtctctgaaattgagcaaatccttgttggactgtttctgggaatatctctgggattggtccaaagaagtcccaccattgcaaaaaccaattgggaaaattg

SEQ ID NO: 12142 - DNA, 1063 bp, Glycine max; identical to SEQ ID NO: 12141
  Gm_smallRNAprecursor_4975

SEQ ID NO: 12143 - DNA, 1064 bp, Glycine max
  Gm_smallRNAprecursor_4976
atcgtggatcctgcagctttgtgcattgtacagcaacttccagtattttcgggcaggatgtcctggacattgtatccgacatcttggatcctgcagctttgtgcattgtacagcaacttccagtattttcgggcaggatgtcccggacattgtatctgacatcttggatcctgcagcttcaattcttcatttgacatttcatcttgccttgtgcattgtgcagcccgatcttattctttgacataacgttggacatcatgtgcagcaactccagctttccttcaatgtctaagtgcttatgttttaacaaaatcttagccaatcttttaaaactccgtagagctaagcactaacagttttgaccgggactatttgactatttgttacaagacaagtagttttgaccgggactttaatggctagaggacaggttgtattgtccaacattaattacacattaattacaaacagacggttttgtgaccgaaattaaatttaatctaaacagataccaaaacaatcatcttcgttttggtaaaaggggtcttcttcttcttcttcagcagaacttgtttcttccttctttgaggatgaaccttcttcttcctgctgtaacatttgcagaacttcctttagatttttagctaggacctcctttgatttcgatcctgctaaaaatgctgtcagatgagacttttggttcaaaaacacagaagtttctggatcagctgctttgaggaattctggatgggattgaaaccagacttttacttgttctggatctgctttggatgagtcaaattgtgtccaccattttacaaatgtgtgtctttgtagtgatggatattggtttgtcttttcagtcttgctgtaaggatattgccatgagaagatccatgacagtgcaaagcttgaaaagtatttaagatctactggaattcgtgattcctgcgaattttattgtctctgaaattgagcaaatccttgttggactgtttctgggaatatctctgggattggtccaaagaagtcccaccattgcaaaaaccaattgggaaaattgt

SEQ ID NO: 12144 - DNA, 1057 bp, Glycine max
  Gm_smallRNAprecursor_4977
gtggatcctgcagctttgtgcattgtacagcaacttccagtattttcgggcaggatgtcctggacattgtatccgacatcttggatcctgcagctttgtgcattgtacagcaacttccagtattttcgggcaggatgtcccggacattgtatctgacatcttggatcctgcagcttcaattcttcatttgacatttcatcttgccttgtgcattgtgcagcccgatcttattctttgacataacgttggacatcatgtgcagcaactccagctttccttcaatgtctaagtgcttatgttttaacaaaatcttagccaatcttttaaaactccgtagagctaagcactaacagttttgaccgggactatttgactatttgttacaagacaagtagttttgaccgggactttaatggctagaggacaggttgtattgtccaacattaattacacattaattacaaacagacggttttgtgaccgaaattaaatttaatctaaacagataccaaaacaatcatcttcgttttggtaaaaggggtcttcttcttcttcttcagcagaacttgtttcttccttctttgaggatgaaccttcttcttcctgctgtaacatttgcagaacttcctttagatttttagctaggacctcctttgatttcgatcctgctaaaaatgctgtcagatgagacttttggttcaaaaacacagaagtttctggatcagctgctttgaggaattctggatgggattgaaaccagacttttacttgttctggatctgctttggatgagtcaaattgtgtccaccattttacaaatgtgtgtctttgtagtgatggatattggtttgtcttttcagtcttgctgtaaggatattgccatgagaagatccatgacagtgcaaagcttgaaaagtatttaagatctactggaattcgtgattcctgcgaattttattgtctctgaaattgagcaaatccttgttggactgtttctgggaatatctctgggattggtccaaagaagtcccaccattgcaaaaaccaattgggaaaa

SEQ ID NO: 12145 - DNA, 1058 bp, Glycine max
  Gm_smallRNAprecursor_4978
gtggatcctgcagctttgtgcattgtacagcaacttccagtattttcgggcaggatgtcctggacattgtatccgacatcttggatcctgcagctttgtgcattgtacagcaacttccagtattttcgggcaggatgtcccggacattgtatctgacatcttggatcctgcagcttcaattcttcatttgacatttcatcttgccttgtgcattgtgcagcccgatcttattctttgacataacgttggacatcatgtgcagcaactccagctttccttcaatgtctaagtgcttatgttttaacaaaatcttagccaatcttttaaaactccgtagagctaagcactaacagttttgaccgggactatttgactatttgttacaagacaagtagttttgaccgggactttaatggctagaggacaggttgtattgtccaacattaattacacattaattacaaacagacggttttgtgaccgaaattaaatttaatctaaacagataccaaaacaatcatcttcgttttggtaaaaggggtcttcttcttcttcttcagcagaacttgtttcttccttctttgaggatgaaccttcttcttcctgctgtaacatttgcagaacttcctttagatttttagctaggacctcctttgatttcgatcctgctaaaaatgctgtcagatgagacttttggttcaaaaacacagaagtttctggatcagctgctttgaggaattctggatgggattgaaaccagacttttacttgttctggatctgctttggatgagtcaaattgtgtccaccattttacaaatgtgtgtctttgtagtgatggatattggtttgtcttttcagtcttgctgtaaggatattgccatgagaagatccatgacagtgcaaagcttgaaaagtatttaagatctactggaattcgtgattcctgcgaattttattgtctctgaaattgagcaaatccttgttggactgtttctgggaatatctctgggattggtccaaagaagtcccaccattgcaaaaaccaattgggaaaat

SEQ ID NO: 12146 - DNA, 1056 bp, Glycine max
  Gm_smallRNAprecursor_4979
tggatcctgcagctttgtgcattgtacagcaacttccagtattttcgggcaggatgtcctggacattgtatccgacatcttggatcctgcagctttgtgcattgtacagcaacttccagtattttcgggcaggatgtcccggacattgtatctgacatcttggatcctgcagcttcaattcttcatttgacatttcatcttgccttgtgcattgtgcagcccgatcttattctttgacataacgttggacatcatgtgcagcaactccagctttccttcaatgtctaagtgcttatgttttaacaaaatcttagccaatcttttaaaactccgtagagctaagcactaacagttttgaccgggactatttgactatttgttacaagacaagtagttttgaccgggactttaatggctagaggacaggttgtattgtccaacattaattacacattaattacaaacagacggttttgtgaccgaaattaaatttaatctaaacagataccaaaacaatcatcttcgttttggtaaaaggggtcttcttcttcttcttcagcagaacttgtttcttccttctttgaggatgaaccttcttcttcctgctgtaacatttgcagaacttcctttagatttttagctaggacctcctttgatttcgatcctgctaaaaatgctgtcagatgagacttttggttcaaaaacacagaagtttctggatcagctgctttgaggaattctggatgggattgaaaccagacttttacttgttctggatctgctttggatgagtcaaattgtgtccaccattttacaaatgtgtgtctttgtagtgatggatattggtttgtcttttcagtcttgctgtaaggatattgccatgagaagatccatgacagtgcaaagcttgaaaagtatttaagatctactggaattcgtgattcctgcgaattttattgtctctgaaattgagcaaatccttgttggactgtttctgggaatatctctgggattggtccaaagaagtcccaccattgcaaaaaccaattgggaaaa

SEQ ID NO: 12147 - DNA, 1056 bp, Glycine max; identical to SEQ ID NO: 12146
  Gm_smallRNAprecursor_4980

SEQ ID NO: 12148 - DNA, 1057 bp, Glycine max
  Gm_smallRNAprecursor_4981
tggatcctgcagctttgtgcattgtacagcaacttccagtattttcgggcaggatgtcctggacattgtatccgacatcttggatcctgcagctttgtgcattgtacagcaacttccagtattttcgggcaggatgtcccggacattgtatctgacatcttggatcctgcagcttcaattcttcatttgacatttcatcttgccttgtgcattgtgcagcccgatcttattctttgacataacgttggacatcatgtgcagcaactccagctttccttcaatgtctaagtgcttatgttttaacaaaatcttagccaatcttttaaaactccgtagagctaagcactaacagttttgaccgggactatttgactatttgttacaagacaagtagttttgaccgggactttaatggctagaggacaggttgtattgtccaacattaattacacattaattacaaacagacggttttgtgaccgaaattaaatttaatctaaacagataccaaaacaatcatcttcgttttggtaaaaggggtcttcttcttcttcttcagcagaacttgtttcttccttctttgaggatgaaccttcttcttcctgctgtaacatttgcagaacttcctttagatttttagctaggacctcctttgatttcgatcctgctaaaaatgctgtcagatgagacttttggttcaaaaacacagaagtttctggatcagctgctttgaggaattctggatgggattgaaaccagacttttacttgttctggatctgctttggatgagtcaaattgtgtccaccattttacaaatgtgtgtctttgtagtgatggatattggtttgtcttttcagtcttgctgtaaggatattgccatgagaagatccatgacagtgcaaagcttgaaaagtatttaagatctactggaattcgtgattcctgcgaattttattgtctctgaaattgagcaaatccttgttggactgtttctgggaatatctctgggattggtccaaagaagtcccaccattgcaaaaaccaattgggaaaat

SEQ ID NO: 12149 - DNA, 1059 bp, Glycine max
  Gm_smallRNAprecursor_4982
tggatcctgcagctttgtgcattgtacagcaacttccagtattttcgggcaggatgtcctggacattgtatccgacatcttggatcctgcagctttgtgcattgtacagcaacttccagtattttcgggcaggatgtcccggacattgtatctgacatcttggatcctgcagcttcaattcttcatttgacatttcatcttgccttgtgcattgtgcagcccgatcttattctttgacataacgttggacatcatgtgcagcaactccagctttccttcaatgtctaagtgcttatgttttaacaaaatcttagccaatcttttaaaactccgtagagctaagcactaacagttttgaccgggactatttgactatttgttacaagacaagtagttttgaccgggactttaatggctagaggacaggttgtattgtccaacattaattacacattaattacaaacagacggttttgtgaccgaaattaaatttaatctaaacagataccaaaacaatcatcttcgttttggtaaaaggggtcttcttcttcttcttcagcagaacttgtttcttccttctttgaggatgaaccttcttcttcctgctgtaacatttgcagaacttcctttagatttttagctaggacctcctttgatttcgatcctgctaaaaatgctgtcagatgagacttttggttcaaaaacacagaagtttctggatcagctgctttgaggaattctggatgggattgaaaccagacttttacttgttctggatctgctttggatgagtcaaattgtgtccaccattttacaaatgtgtgtctttgtagtgatggatattggtttgtcttttcagtcttgctgtaaggatattgccatgagaagatccatgacagtgcaaagcttgaaaagtatttaagatctactggaattcgtgattcctgcgaattttattgtctctgaaattgagcaaatccttgttggactgtttctgggaatatctctgggattggtccaaagaagtcccaccattgcaaaaaccaattgggaaaattg

SEQ ID NO: 12150 - DNA, 1059 bp, Glycine max; identical to SEQ ID NO: 12149
  Gm_smallRNAprecursor_4983

SEQ ID NO: 12151 - DNA, 1055 bp, Glycine max
  Gm_smallRNAprecursor_4984
ggatcctgcagctttgtgcattgtacagcaacttccagtattttcgggcaggatgtcctggacattgtatccgacatcttggatcctgcagctttgtgcattgtacagcaacttccagtattttcgggcaggatgtcccggacattgtatctgacatcttggatcctgcagcttcaattcttcatttgacatttcatcttgccttgtgcattgtgcagcccgatcttattctttgacataacgttggacatcatgtgcagcaactccagctttccttcaatgtctaagtgcttatgttttaacaaaatcttagccaatcttttaaaactccgtagagctaagcactaacagttttgaccgggactatttgactatttgttacaagacaagtagttttgaccgggactttaatggctagaggacaggttgtattgtccaacattaattacacattaattacaaacagacggttttgtgaccgaaattaaatttaatctaaacagataccaaaacaatcatcttcgttttggtaaaaggggtcttcttcttcttcttcagcagaacttgtttcttccttctttgaggatgaaccttcttcttcctgctgtaacatttgcagaacttcctttagatttttagctaggacctcctttgatttcgatcctgctaaaaatgctgtcagatgagacttttggttcaaaaacacagaagtttctggatcagctgctttgaggaattctggatgggattgaaaccagacttttacttgttctggatctgctttggatgagtcaaattgtgtccaccattttacaaatgtgtgtctttgtagtgatggatattggtttgtcttttcagtcttgctgtaaggatattgccatgagaagatccatgacagtgcaaagcttgaaaagtatttaagatctactggaattcgtgattcctgcgaattttattgtctctgaaattgagcaaatccttgttggactgtttctgggaatatctctgggattggtccaaagaagtcccaccattgcaaaaaccaattgggaaaa

SEQ ID NO: 12152 - DNA, 1058 bp, Glycine max
  Gm_smallRNAprecursor_4985
ggatcctgcagctttgtgcattgtacagcaacttccagtattttcgggcaggatgtcctggacattgtatccgacatcttggatcctgcagctttgtgcattgtacagcaacttccagtattttcgggcaggatgtcccggacattgtatctgacatcttggatcctgcagcttcaattcttcatttgacatttcatcttgccttgtgcattgtgcagcccgatcttattctttgacataacgttggacatcatgtgcagcaactccagctttccttcaatgtctaagtgcttatgttttaacaaaatcttagccaatcttttaaaactccgtagagctaagcactaacagttttgaccgggactatttgactatttgttacaagacaagtagttttgaccgggactttaatggctagaggacaggttgtattgtccaacattaattacacattaattacaaacagacggttttgtgaccgaaattaaatttaatctaaacagataccaaaacaatcatcttcgttttggtaaaaggggtcttcttcttcttcttcagcagaacttgtttcttccttctttgaggatgaaccttcttcttcctgctgtaacatttgcagaacttcctttagatttttagctaggacctcctttgatttcgatcctgctaaaaatgctgtcagatgagacttttggttcaaaaacacagaagtttctggatcagctgctttgaggaattctggatgggattgaaaccagacttttacttgttctggatctgctttggatgagtcaaattgtgtccaccattttacaaatgtgtgtctttgtagtgatggatattggtttgtcttttcagtcttgctgtaaggatattgccatgagaagatccatgacagtgcaaagcttgaaaagtatttaagatctactggaattcgtgattcctgcgaattttattgtctctgaaattgagcaaatccttgttggactgtttctgggaatatctctgggattggtccaaagaagtcccaccattgcaaaaaccaattgggaaaattg

SEQ ID NO: 12153 - DNA, 1058 bp, Glycine max; identical to SEQ ID NO: 12152
  Gm_smallRNAprecursor_4986

SEQ ID NO: 12154 - DNA, 1173 bp, Glycine max
  Gm_smallRNAprecursor_4987
tgcagcccgatcttattctttgacataacgttggacatcatgtgcagcaactccagctttccttcaatgtctaagtgcttatgttttaacaaaatcttagccaatcttttaaaactccgtagagctaagcactaacagttttgaccgggactatttgactatttgttacaagacaagtagttttgaccgggactttaatggctagaggacaggttgtattgtccaacattaattacacattaattacaaacagacggttttgtgaccgaaattaaatttaatctaaacagataccaaaacaatcatcttcgttttggtaaaaggggtcttcttcttcttcttcagcagaacttgtttcttccttctttgaggatgaaccttcttcttcctgctgtaacatttgcagaacttcctttagatttttagctaggacctcctttgatttcgatcctgctaaaaatgctgtcagatgagacttttggttcaaaaacacagaagtttctggatcagctgctttgaggaattctggatgggattgaaaccagacttttacttgttctggatctgctttggatgagtcaaattgtgtccaccattttacaaatgtgtgtctttgtagtgatggatattggtttgtcttttcagtcttgctgtaaggatattgccatgagaagatccatgacagtgcaaagcttgaaaagtatttaagatctactggaattcgtgattcctgcgaattttattgtctctgaaattgagcaaatccttgttggactgtttctgggaatatctctgggattggtccaaagaagtcccaccattgcaaaaaccaattgggaaaattgtaaattgtattggtcttgaaatatatcagccatgaatgcttgaagcgagtattttggtgccaaaacaccttagtccaagcatcaacataatcccaataggtataacctaccggatcaaatggaactgaaaatctctttcctttgttcaagtccgaaccgaagtgtcttggttgaagaacttttagtatttggattgtggagtgggtgtttaatgtttggtcttttgggtctttgaaatgttggtagatactgaatttgaatctaccaaaatcaattcatagaaagttcttgtcttcaggatggtggttggtttgtagtgaagtcctgg

SEQ ID NO: 12155 - DNA, 1164 bp, Glycine max
  Gm_smallRNAprecursor_4988
atcttattctttgacataacgttggacatcatgtgcagcaactccagctttccttcaatgtctaagtgcttatgttttaacaaaatcttagccaatcttttaaaactccgtagagctaagcactaacagttttgaccgggactatttgactatttgttacaagacaagtagttttgaccgggactttaatggctagaggacaggttgtattgtccaacattaattacacattaattacaaacagacggttttgtgaccgaaattaaatttaatctaaacagataccaaaacaatcatcttcgttttggtaaaaggggtcttcttcttcttcttcagcagaacttgtttcttccttctttgaggatgaaccttcttcttcctgctgtaacatttgcagaacttcctttagatttttagctaggacctcctttgatttcgatcctgctaaaaatgctgtcagatgagacttttggttcaaaaacacagaagtttctggatcagctgctttgaggaattctggatgggattgaaaccagacttttacttgttctggatctgctttggatgagtcaaattgtgtccaccattttacaaatgtgtgtctttgtagtgatggatattggtttgtcttttcagtcttgctgtaaggatattgccatgagaagatccatgacagtgcaaagcttgaaaagtatttaagatctactggaattcgtgattcctgcgaattttattgtctctgaaattgagcaaatccttgttggactgtttctgggaatatctctgggattggtccaaagaagtcccaccattgcaaaaaccaattgggaaaattgtaaattgtattggtcttgaaatatatcagccatgaatgcttgaagcgagtattttggtgccaaaacaccttagtccaagcatcaacataatcccaataggtataacctaccggatcaaatggaactgaaaatctctttcctttgttcaagtccgaaccgaagtgtcttggttgaagaacttttagtatttggattgtggagtgggtgtttaatgtttggtcttttgggtctttgaaatgttggtagatactgaatttgaatctaccaaaatcaattcatagaaagttcttgtcttcaggatggtggttggtttgtagtgaagtcctgg

SEQ ID NO: 12156 - DNA, 1163 bp, Glycine max
  Gm_smallRNAprecursor_4989
tcttattctttgacataacgttggacatcatgtgcagcaactccagctttccttcaatgtctaagtgcttatgttttaacaaaatcttagccaatcttttaaaactccgtagagctaagcactaacagttttgaccgggactatttgactatttgttacaagacaagtagttttgaccgggactttaatggctagaggacaggttgtattgtccaacattaattacacattaattacaaacagacggttttgtgaccgaaattaaatttaatctaaacagataccaaaacaatcatcttcgttttggtaaaaggggtcttcttcttcttcttcagcagaacttgtttcttccttctttgaggatgaaccttcttcttcctgctgtaacatttgcagaacttcctttagatttttagctaggacctcctttgatttcgatcctgctaaaaatgctgtcagatgagacttttggttcaaaaacacagaagtttctggatcagctgctttgaggaattctggatgggattgaaaccagacttttacttgttctggatctgctttggatgagtcaaattgtgtccaccattttacaaatgtgtgtctttgtagtgatggatattggtttgtcttttcagtcttgctgtaaggatattgccatgagaagatccatgacagtgcaaagcttgaaaagtatttaagatctactggaattcgtgattcctgcgaattttattgtctctgaaattgagcaaatccttgttggactgtttctgggaatatctctgggattggtccaaagaagtcccaccattgcaaaaaccaattgggaaaattgtaaattgtattggtcttgaaatatatcagccatgaatgcttgaagcgagtattttggtgccaaaacaccttagtccaagcatcaacataatcccaataggtataacctaccggatcaaatggaactgaaaatctctttcctttgttcaagtccgaaccgaagtgtcttggttgaagaacttttagtatttggattgtggagtgggtgtttaatgtttggtcttttgggtctttgaaatgttggtagatactgaatttgaatctaccaaaatcaattcatagaaagttcttgtcttcaggatggtggttggtttgtagtgaagtcctgg

SEQ ID NO: 12157 - DNA, 1131 bp, Glycine max
  Gm_smallRNAprecursor_4990
acaagtagttttgaccgggactttaatggctagaggacaggttgtattgtccaacattaattacacattaattacaaacagacggttttgtgaccgaaattaaatttaatctaaacagataccaaaacaatcatcttcgttttggtaaaaggggtcttcttcttcttcttcagcagaacttgtttcttccttctttgaggatgaaccttcttcttcctgctgtaacatttgcagaacttcctttagatttttagctaggacctcctttgatttcgatcctgctaaaaatgctgtcagatgagacttttggttcaaaaacacagaagtttctggatcagctgctttgaggaattctggatgggattgaaaccagacttttacttgttctggatctgctttggatgagtcaaattgtgtccaccattttacaaatgtgtgtctttgtagtgatggatattggtttgtcttttcagtcttgctgtaaggatattgccatgagaagatccatgacagtgcaaagcttgaaaagtatttaagatctactggaattcgtgattcctgcgaattttattgtctctgaaattgagcaaatccttgttggactgtttctgggaatatctctgggattggtccaaagaagtcccaccattgcaaaaaccaattgggaaaattgtaaattgtattggtcttgaaatatatcagccatgaatgcttgaagcgagtattttggtgccaaaacaccttagtccaagcatcaacataatcccaataggtataacctaccggatcaaatggaactgaaaatctctttcctttgttcaagtccgaaccgaagtgtcttggttgaagaacttttagtatttggattgtggagtgggtgtttaatgtttggtcttttgggtctttgaaatgttggtagatactgaatttgaatctaccaaaatcaattcatagaaagttcttgtcttcaggatggtggttggtttgtagtgaagtcctggtgggaaagccttagtcgtcgccttgaagggatttttgtcccaaaattcaggttccatctgcaaaacagttacaaatttatttttataaatataattgttagtttttttggtaggtggtgtttgagctttg

SEQ ID NO: 12158 - DNA, 1100 bp, Glycine max
  Gm_smallRNAprecursor_4991
gcagaacttgtttcttccttctttgaggatgaaccttcttcttcctgctgtaacatttgcagaacttcctttagatttttagctaggacctcctttgatttcgatcctgctaaaaatgctgtcagatgagacttttggttcaaaaacacagaagtttctggatcagctgctttgaggaattctggatgggattgaaaccagacttttacttgttctggatctgctttggatgagtcaaattgtgtccaccattttacaaatgtgtgtctttgtagtgatggatattggtttgtcttttcagtcttgctgtaaggatattgccatgagaagatccatgacagtgcaaagcttgaaaagtatttaagatctactggaattcgtgattcctgcgaattttattgtctctgaaattgagcaaatccttgttggactgtttctgggaatatctctgggattggtccaaagaagtcccaccattgcaaaaaccaattgggaaaattgtaaattgtattggtcttgaaatatatcagccatgaatgcttgaagcgagtattttggtgccaaaacaccttagtccaagcatcaacataatcccaataggtataacctaccggatcaaatggaactgaaaatctctttcctttgttcaagtccgaaccgaagtgtcttggttgaagaacttttagtatttggattgtggagtgggtgtttaatgtttggtcttttgggtctttgaaatgttggtagatactgaatttgaatctaccaaaatcaattcatagaaagttcttgtcttcaggatggtggttggtttgtagtgaagtcctggtgggaaagccttagtcgtcgccttgaagggatttttgtcccaaaattcaggttccatctgcaaaacagttacaaatttatttttataaatataattgttagtttttttggtaggtggtgtttgagctttggctaaaggtagtttccctttaggattggtagttgttttggtgattgatgcattctggatcattgtttgtaaatttgattcagattcatcatcagattctgaggcaatgtctgcccgagattttttgattatttttggaaat

SEQ ID NO: 12159 - DNA, 1170 bp, Glycine max
  Gm_smallRNAprecursor_4992
gcagaacttgtttcttccttctttgaggatgaaccttcttcttcctgctgtaacatttgcagaacttcctttagatttttagctaggacctcctttgatttcgatcctgctaaaaatgctgtcagatgagacttttggttcaaaaacacagaagtttctggatcagctgctttgaggaattctggatgggattgaaaccagacttttacttgttctggatctgctttggatgagtcaaattgtgtccaccattttacaaatgtgtgtctttgtagtgatggatattggtttgtcttttcagtcttgctgtaaggatattgccatgagaagatccatgacagtgcaaagcttgaaaagtatttaagatctactggaattcgtgattcctgcgaattttattgtctctgaaattgagcaaatccttgttggactgtttctgggaatatctctgggattggtccaaagaagtcccaccattgcaaaaaccaattgggaaaattgtaaattgtattggtcttgaaatatatcagccatgaatgcttgaagcgagtattttggtgccaaaacaccttagtccaagcatcaacataatcccaataggtataacctaccggatcaaatggaactgaaaatctctttcctttgttcaagtccgaaccgaagtgtcttggttgaagaacttttagtatttggattgtggagtgggtgtttaatgtttggtcttttgggtctttgaaatgttggtagatactgaatttgaatctaccaaaatcaattcatagaaagttcttgtcttcaggatggtggttggtttgtagtgaagtcctggtgggaaagccttagtcgtcgccttgaagggatttttgtcccaaaattcaggttccatctgcaaaacagttacaaatttatttttataaatataattgttagtttttttggtaggtggtgtttgagctttggctaaaggtagtttccctttaggattggtagttgttttggtgattgatgcattctggatcattgtttgtaaatttgattcagattcatcatcagattctgaggcaatgtctgcccgagattttttgattatttttggaaatttggttagacccatgtcttgaagggcctgaagggtttcaattggccatgcatagtcggccgatgtttggt

SEQ ID NO: 12160 - DNA, 1098 bp, Glycine max
  Gm_smallRNAprecursor_4993
agaacttgtttcttccttctttgaggatgaaccttcttcttcctgctgtaacatttgcagaacttcctttagatttttagctaggacctcctttgatttcgatcctgctaaaaatgctgtcagatgagacttttggttcaaaaacacagaagtttctggatcagctgctttgaggaattctggatgggattgaaaccagacttttacttgttctggatctgctttggatgagtcaaattgtgtccaccattttacaaatgtgtgtctttgtagtgatggatattggtttgtcttttcagtcttgctgtaaggatattgccatgagaagatccatgacagtgcaaagcttgaaaagtatttaagatctactggaattcgtgattcctgcgaattttattgtctctgaaattgagcaaatccttgttggactgtttctgggaatatctctgggattggtccaaagaagtcccaccattgcaaaaaccaattgggaaaattgtaaattgtattggtcttgaaatatatcagccatgaatgcttgaagcgagtattttggtgccaaaacaccttagtccaagcatcaacataatcccaataggtataacctaccggatcaaatggaactgaaaatctctttcctttgttcaagtccgaaccgaagtgtcttggttgaagaacttttagtatttggattgtggagtgggtgtttaatgtttggtcttttgggtctttgaaatgttggtagatactgaatttgaatctaccaaaatcaattcatagaaagttcttgtcttcaggatggtggttggtttgtagtgaagtcctggtgggaaagccttagtcgtcgccttgaagggatttttgtcccaaaattcaggttccatctgcaaaacagttacaaatttatttttataaatataattgttagtttttttggtaggtggtgtttgagctttggctaaaggtagtttccctttaggattggtagttgttttggtgattgatgcattctggatcattgtttgtaaatttgattcagattcatcatcagattctgaggcaatgtctgcccgagattttttgattatttttggaaat

SEQ ID NO: 12161 - DNA, 1107 bp, Glycine max
  Gm_smallRNAprecursor_4994
gcagaacttcctttagatttttagctaggacctcctttgatttcgatcctgctaaaaatgctgtcagatgagacttttggttcaaaaacacagaagtttctggatcagctgctttgaggaattctggatgggattgaaaccagacttttacttgttctggatctgctttggatgagtcaaattgtgtccaccattttacaaatgtgtgtctttgtagtgatggatattggtttgtcttttcagtcttgctgtaaggatattgccatgagaagatccatgacagtgcaaagcttgaaaagtatttaagatctactggaattcgtgattcctgcgaattttattgtctctgaaattgagcaaatccttgttggactgtttctgggaatatctctgggattggtccaaagaagtcccaccattgcaaaaaccaattgggaaaattgtaaattgtattggtcttgaaatatatcagccatgaatgcttgaagcgagtattttggtgccaaaacaccttagtccaagcatcaacataatcccaataggtataacctaccggatcaaatggaactgaaaatctctttcctttgttcaagtccgaaccgaagtgtcttggttgaagaacttttagtatttggattgtggagtgggtgtttaatgtttggtcttttgggtctttgaaatgttggtagatactgaatttgaatctaccaaaatcaattcatagaaagttcttgtcttcaggatggtggttggtttgtagtgaagtcctggtgggaaagccttagtcgtcgccttgaagggatttttgtcccaaaattcaggttccatctgcaaaacagttacaaatttatttttataaatataattgttagtttttttggtaggtggtgtttgagctttggctaaaggtagtttccctttaggattggtagttgttttggtgattgatgcattctggatcattgtttgtaaatttgattcagattcatcatcagattctgaggcaatgtctgcccgagattttttgattatttttggaaatttggttagacccatgtcttgaagggcctgaagggtttcaattggccatgcatagtcggccgatgt

SEQ ID NO: 12162 - DNA, 1107 bp, Glycine max; identical to SEQ ID NO: 12161
  Gm_smallRNAprecursor_4995

SEQ ID NO: 12163 - DNA, 1108 bp, Glycine max
  Gm_smallRNAprecursor_4996
gcagaacttcctttagatttttagctaggacctcctttgatttcgatcctgctaaaaatgctgtcagatgagacttttggttcaaaaacacagaagtttctggatcagctgctttgaggaattctggatgggattgaaaccagacttttacttgttctggatctgctttggatgagtcaaattgtgtccaccattttacaaatgtgtgtctttgtagtgatggatattggtttgtcttttcagtcttgctgtaaggatattgccatgagaagatccatgacagtgcaaagcttgaaaagtatttaagatctactggaattcgtgattcctgcgaattttattgtctctgaaattgagcaaatccttgttggactgtttctgggaatatctctgggattggtccaaagaagtcccaccattgcaaaaaccaattgggaaaattgtaaattgtattggtcttgaaatatatcagccatgaatgcttgaagcgagtattttggtgccaaaacaccttagtccaagcatcaacataatcccaataggtataacctaccggatcaaatggaactgaaaatctctttcctttgttcaagtccgaaccgaagtgtcttggttgaagaacttttagtatttggattgtggagtgggtgtttaatgtttggtcttttgggtctttgaaatgttggtagatactgaatttgaatctaccaaaatcaattcatagaaagttcttgtcttcaggatggtggttggtttgtagtgaagtcctggtgggaaagccttagtcgtcgccttgaagggatttttgtcccaaaattcaggttccatctgcaaaacagttacaaatttatttttataaatataattgttagtttttttggtaggtggtgtttgagctttggctaaaggtagtttccctttaggattggtagttgttttggtgattgatgcattctggatcattgtttgtaaatttgattcagattcatcatcagattctgaggcaatgtctgcccgagattttttgattatttttggaaatttggttagacccatgtcttgaagggcctgaagggtttcaattggccatgcatagtcggccgatgtt

SEQ ID NO: 12164 - DNA, 1101 bp, Glycine max
  Gm_smallRNAprecursor_4997
gaacttcctttagatttttagctaggacctcctttgatttcgatcctgctaaaaatgctgtcagatgagacttttggttcaaaaacacagaagtttctggatcagctgctttgaggaattctggatgggattgaaaccagacttttacttgttctggatctgctttggatgagtcaaattgtgtccaccattttacaaatgtgtgtctttgtagtgatggatattggtttgtcttttcagtcttgctgtaaggatattgccatgagaagatccatgacagtgcaaagcttgaaaagtatttaagatctactggaattcgtgattcctgcgaattttattgtctctgaaattgagcaaatccttgttggactgtttctgggaatatctctgggattggtccaaagaagtcccaccattgcaaaaaccaattgggaaaattgtaaattgtattggtcttgaaatatatcagccatgaatgcttgaagcgagtattttggtgccaaaacaccttagtccaagcatcaacataatcccaataggtataacctaccggatcaaatggaactgaaaatctctttcctttgttcaagtccgaaccgaagtgtcttggttgaagaacttttagtatttggattgtggagtgggtgtttaatgtttggtcttttgggtctttgaaatgttggtagatactgaatttgaatctaccaaaatcaattcatagaaagttcttgtcttcaggatggtggttggtttgtagtgaagtcctggtgggaaagccttagtcgtcgccttgaagggatttttgtcccaaaattcaggttccatctgcaaaacagttacaaatttatttttataaatataattgttagtttttttggtaggtggtgtttgagctttggctaaaggtagtttccctttaggattggtagttgttttggtgattgatgcattctggatcattgtttgtaaatttgattcagattcatcatcagattctgaggcaatgtctgcccgagattttttgattatttttggaaatttggttagacccatgtcttgaagggcctgaagggtttcaattggccatgcatagtcggccga

SEQ ID NO: 12165 - DNA, 1084 bp, Glycine max
  Gm_smallRNAprecursor_4998
agctgctttgaggaattctggatgggattgaaaccagacttttacttgttctggatctgctttggatgagtcaaattgtgtccaccattttacaaatgtgtgtctttgtagtgatggatattggtttgtcttttcagtcttgctgtaaggatattgccatgagaagatccatgacagtgcaaagcttgaaaagtatttaagatctactggaattcgtgattcctgcgaattttattgtctctgaaattgagcaaatccttgttggactgtttctgggaatatctctgggattggtccaaagaagtcccaccattgcaaaaaccaattgggaaaattgtaaattgtattggtcttgaaatatatcagccatgaatgcttgaagcgagtattttggtgccaaaacaccttagtccaagcatcaacataatcccaataggtataacctaccggatcaaatggaactgaaaatctctttcctttgttcaagtccgaaccgaagtgtcttggttgaagaacttttagtatttggattgtggagtgggtgtttaatgtttggtcttttgggtctttgaaatgttggtagatactgaatttgaatctaccaaaatcaattcatagaaagttcttgtcttcaggatggtggttggtttgtagtgaagtcctggtgggaaagccttagtcgtcgccttgaagggatttttgtcccaaaattcaggttccatctgcaaaacagttacaaatttatttttataaatataattgttagtttttttggtaggtggtgtttgagctttggctaaaggtagtttccctttaggattggtagttgttttggtgattgatgcattctggatcattgtttgtaaatttgattcagattcatcatcagattctgaggcaatgtctgcccgagattttttgattatttttggaaatttggttagacccatgtcttgaagggcctgaagggtttcaattggccatgcatagtcggccgatgtttggttggcagttgctggtttgggagattcctgagtggatggcttaggtttgattgaggcaatttgggttgatgacccttcta

SEQ ID NO: 12166 - DNA, 1083 bp, Glycine max
  Gm_smallRNAprecursor_4999
gctgctttgaggaattctggatgggattgaaaccagacttttacttgttctggatctgctttggatgagtcaaattgtgtccaccattttacaaatgtgtgtctttgtagtgatggatattggtttgtcttttcagtcttgctgtaaggatattgccatgagaagatccatgacagtgcaaagcttgaaaagtatttaagatctactggaattcgtgattcctgcgaattttattgtctctgaaattgagcaaatccttgttggactgtttctgggaatatctctgggattggtccaaagaagtcccaccattgcaaaaaccaattgggaaaattgtaaattgtattggtcttgaaatatatcagccatgaatgcttgaagcgagtattttggtgccaaaacaccttagtccaagcatcaacataatcccaataggtataacctaccggatcaaatggaactgaaaatctctttcctttgttcaagtccgaaccgaagtgtcttggttgaagaacttttagtatttggattgtggagtgggtgtttaatgtttggtcttttgggtctttgaaatgttggtagatactgaatttgaatctaccaaaatcaattcatagaaagttcttgtcttcaggatggtggttggtttgtagtgaagtcctggtgggaaagccttagtcgtcgccttgaagggatttttgtcccaaaattcaggttccatctgcaaaacagttacaaatttatttttataaatataattgttagtttttttggtaggtggtgtttgagctttggctaaaggtagtttccctttaggattggtagttgttttggtgattgatgcattctggatcattgtttgtaaatttgattcagattcatcatcagattctgaggcaatgtctgcccgagattttttgattatttttggaaatttggttagacccatgtcttgaagggcctgaagggtttcaattggccatgcatagtcggccgatgtttggttggcagttgctggtttgggagattcctgagtggatggcttaggtttgattgaggcaatttgggttgatgacccttcta

SEQ ID NO: 12167 - DNA, 1081 bp, Glycine max
  Gm_smallRNAprecursor_5000
ctgctttgaggaattctggatgggattgaaaccagacttttacttgttctggatctgctttggatgagtcaaattgtgtccaccattttacaaatgtgtgtctttgtagtgatggatattggtttgtcttttcagtcttgctgtaaggatattgccatgagaagatccatgacagtgcaaagcttgaaaagtatttaagatctactggaattcgtgattcctgcgaattttattgtctctgaaattgagcaaatccttgttggactgtttctgggaatatctctgggattggtccaaagaagtcccaccattgcaaaaaccaattgggaaaattgtaaattgtattggtcttgaaatatatcagccatgaatgcttgaagcgagtattttggtgccaaaacaccttagtccaagcatcaacataatcccaataggtataacctaccggatcaaatggaactgaaaatctctttcctttgttcaagtccgaaccgaagtgtcttggttgaagaacttttagtatttggattgtggagtgggtgtttaatgtttggtcttttgggtctttgaaatgttggtagatactgaatttgaatctaccaaaatcaattcatagaaagttcttgtcttcaggatggtggttggtttgtagtgaagtcctggtgggaaagccttagtcgtcgccttgaagggatttttgtcccaaaattcaggttccatctgcaaaacagttacaaatttatttttataaatataattgttagtttttttggtaggtggtgtttgagctttggctaaaggtagtttccctttaggattggtagttgttttggtgattgatgcattctggatcattgtttgtaaatttgattcagattcatcatcagattctgaggcaatgtctgcccgagattttttgattatttttggaaatttggttagacccatgtcttgaagggcctgaagggtttcaattggccatgcatagtcggccgatgtttggttggcagttgctggtttgggagattcctgagtggatggcttaggtttgattgaggcaatttgggttgatgacccttct

SEQ ID NO: 12168 - DNA, 1113 bp, Glycine max
  Gm_smallRNAprecursor_5001
ggaaatttggttagacccatgtcttgaagggcctgaagggtttcaattggccatgcatagtcggccgatgtttggttggcagttgctggtttgggagattcctgagtggatggcttaggtttgattgaggcaatttgggttgatgacccttctaaattggttttctgggtagatgacctagcctgggttggtgacccagaagaggttgatgatttcttaatggttggctctggaagagccagtctggctcctttgcctgtacttcttcctccccttagggagatttccgatgccttaggaggcattaccacttttctgtaagaattcacggataaggtagtcaggtaatgaatttgaggtgcccttgatgtattctatgtcaaaatcaaagacacttagaattgcttgccatcttgcaaaaatttgttttgaggcaaggtttttaacatctttttgtaaaatatctttggctgatttacaatcaactctgattaaaaaattttggtttaataaatccgattgaaatatggaaatgcacaacacaattgttaaaacttcctttttaacagttgaatattttaattatgcagaattccaatgttttgatgtatatgcaatgacatgatcttggccatggactctttgtttgaggatgccaccatagcctatgtctgaagcatcagtttcgacaattttaaatgcctgtggaataggaagatacagacattttatggattggactttgattttgatttctttaactgtttgtgtatggaggtcagaccaaggaggcggatttttcttcagcctatcatgcaatggcttgacaatattgtttaaataggggacaaattctcctacgtaatttagaatacctagaaatctttgtaactgggttttgtctaagatttggttgggaaatttgctagcaaactcaattgacctttctattggaatgattgtaccttgatatatattgtgaccaaggaatcgaattcgagtttggaaaagattgatttttgatttggagactgccaaaccattctgtttgatgatatggatgaaagtctggagatgtttgaaatgttggtcaatgttttgggaaaagattaa

SEQ ID NO: 12169 - DNA, 1113 bp, Glycine max; identical to SEQ ID NO: 12168
  Gm_smallRNAprecursor_5002

SEQ ID NO: 12170 - DNA, 1114 bp, Glycine max
  Gm_smallRNAprecursor_5003
ggaaatttggttagacccatgtcttgaagggcctgaagggtttcaattggccatgcatagtcggccgatgtttggttggcagttgctggtttgggagattcctgagtggatggcttaggtttgattgaggcaatttgggttgatgacccttctaaattggttttctgggtagatgacctagcctgggttggtgacccagaagaggttgatgatttcttaatggttggctctggaagagccagtctggctcctttgcctgtacttcttcctccccttagggagatttccgatgccttaggaggcattaccacttttctgtaagaattcacggataaggtagtcaggtaatgaatttgaggtgcccttgatgtattctatgtcaaaatcaaagacacttagaattgcttgccatcttgcaaaaatttgttttgaggcaaggtttttaacatctttttgtaaaatatctttggctgatttacaatcaactctgattaaaaaattttggtttaataaatccgattgaaatatggaaatgcacaacacaattgttaaaacttcctttttaacagttgaatattttaattatgcagaattccaatgttttgatgtatatgcaatgacatgatcttggccatggactctttgtttgaggatgccaccatagcctatgtctgaagcatcagtttcgacaattttaaatgcctgtggaataggaagatacagacattttatggattggactttgattttgatttctttaactgtttgtgtatggaggtcagaccaaggaggcggatttttcttcagcctatcatgcaatggcttgacaatattgtttaaataggggacaaattctcctacgtaatttagaatacctagaaatctttgtaactgggttttgtctaagatttggttgggaaatttgctagcaaactcaattgacctttctattggaatgattgtaccttgatatatattgtgaccaaggaatcgaattcgagtttggaaaagattgatttttgatttggagactgccaaaccattctgtttgatgatatggatgaaagtctggagatgtttgaaatgttggtcaatgttttgggaaaagattaaa

SEQ ID NO: 12171 - DNA, 1207 bp, Glycine max
  Gm_smallRNAprecursor_5004
ggaaatttggttagacccatgtcttgaagggcctgaagggtttcaattggccatgcatagtcggccgatgtttggttggcagttgctggtttgggagattcctgagtggatggcttaggtttgattgaggcaatttgggttgatgacccttctaaattggttttctgggtagatgacctagcctgggttggtgacccagaagaggttgatgatttcttaatggttggctctggaagagccagtctggctcctttgcctgtacttcttcctccccttagggagatttccgatgccttaggaggcattaccacttttctgtaagaattcacggataaggtagtcaggtaatgaatttgaggtgcccttgatgtattctatgtcaaaatcaaagacacttagaattgcttgccatcttgcaaaaatttgttttgaggcaaggtttttaacatctttttgtaaaatatctttggctgatttacaatcaactctgattaaaaaattttggtttaataaatccgattgaaatatggaaatgcacaacacaattgttaaaacttcctttttaacagttgaatattttaattatgcagaattccaatgttttgatgtatatgcaatgacatgatcttggccatggactctttgtttgaggatgccaccatagcctatgtctgaagcatcagtttcgacaattttaaatgcctgtggaataggaagatacagacattttatggattggactttgattttgatttctttaactgtttgtgtatggaggtcagaccaaggaggcggatttttcttcagcctatcatgcaatggcttgacaatattgtttaaataggggacaaattctcctacgtaatttagaatacctagaaatctttgtaactgggttttgtctaagatttggttgggaaatttgctagcaaactcaattgacctttctattggaatgattgtaccttgatatatattgtgaccaaggaatcgaattcgagtttggaaaagattgatttttgatttggagactgccaaaccattctgtttgatgatatggatgaaagtctggagatgtttgaaatgttggtcaatgttttgggaaaagattaaaacatcatctatgtagacaatgacaaattttgaatagggattaaaaatatcattcataactttttgaaattctgaaggggcattcttcagtccg

SEQ ID NO: 12172 - DNA, 1247 bp, Glycine max
  Gm_smallRNAprecursor_5005
tgatgatttcttaatggttggctctggaagagccagtctggctcctttgcctgtacttcttcctccccttagggagatttccgatgccttaggaggcattaccacttttctgtaagaattcacggataaggtagtcaggtaatgaatttgaggtgcccttgatgtattctatgtcaaaatcaaagacacttagaattgcttgccatcttgcaaaaatttgttttgaggcaaggtttttaacatctttttgtaaaatatctttggctgatttacaatcaactctgattaaaaaattttggtttaataaatccgattgaaatatggaaatgcacaacacaattgttaaaacttcctttttaacagttgaatattttaattatgcagaattccaatgttttgatgtatatgcaatgacatgatcttggccatggactctttgtttgaggatgccaccatagcctatgtctgaagcatcagtttcgacaattttaaatgcctgtggaataggaagatacagacattttatggattggactttgattttgatttctttaactgtttgtgtatggaggtcagaccaaggaggcggatttttcttcagcctatcatgcaatggcttgacaatattgtttaaataggggacaaattctcctacgtaatttagaatacctagaaatctttgtaactgggttttgtctaagatttggttgggaaatttgctagcaaactcaattgacctttctattggaatgattgtaccttgatatatattgtgaccaaggaatcgaattcgagtttggaaaagattgatttttgatttggagactgccaaaccattctgtttgatgatatggatgaaagtctggagatgtttgaaatgttggtcaatgttttgggaaaagattaaaacatcatctatgtagacaatgacaaattttgaatagggattaaaaatatcattcataactttttgaaattctgaaggggcattcttcagtccgaatggcatcacattccattcatattgcccgaaaggtatagtaaacgccgttttgtacctatctgattcttggatttggatttgccagaatccagatttcatatcaaattttgaaaatatctttgcagaatttaatctattaagtaagtcttttttgtttggaataggatacctaatccattgtaatgcttgatttagtggtttgtaatttatgactaagcgaggtgttccacgctcaatctcagat

SEQ ID NO: 12173 - DNA, 1246 bp, Glycine max
  Gm_smallRNAprecursor_5006
gatgatttcttaatggttggctctggaagagccagtctggctcctttgcctgtacttcttcctccccttagggagatttccgatgccttaggaggcattaccacttttctgtaagaattcacggataaggtagtcaggtaatgaatttgaggtgcccttgatgtattctatgtcaaaatcaaagacacttagaattgcttgccatcttgcaaaaatttgttttgaggcaaggtttttaacatctttttgtaaaatatctttggctgatttacaatcaactctgattaaaaaattttggtttaataaatccgattgaaatatggaaatgcacaacacaattgttaaaacttcctttttaacagttgaatattttaattatgcagaattccaatgttttgatgtatatgcaatgacatgatcttggccatggactctttgtttgaggatgccaccatagcctatgtctgaagcatcagtttcgacaattttaaatgcctgtggaataggaagatacagacattttatggattggactttgattttgatttctttaactgtttgtgtatggaggtcagaccaaggaggcggatttttcttcagcctatcatgcaatggcttgacaatattgtttaaataggggacaaattctcctacgtaatttagaatacctagaaatctttgtaactgggttttgtctaagatttggttgggaaatttgctagcaaactcaattgacctttctattggaatgattgtaccttgatatatattgtgaccaaggaatcgaattcgagtttggaaaagattgatttttgatttggagactgccaaaccattctgtttgatgatatggatgaaagtctggagatgtttgaaatgttggtcaatgttttgggaaaagattaaaacatcatctatgtagacaatgacaaattttgaatagggattaaaaatatcattcataactttttgaaattctgaaggggcattcttcagtccgaatggcatcacattccattcatattgcccgaaaggtatagtaaacgccgttttgtacctatctgattcttggatttggatttgccagaatccagatttcatatcaaattttgaaaatatctttgcagaatttaatctattaagtaagtcttttttgtttggaataggatacctaatccattgtaatgcttgatttagtggtttgtaatttatgactaagcgaggtgttccacgctcaatctcagat

SEQ ID NO: 12174 - DNA, 1153 bp, Glycine max
  Gm_smallRNAprecursor_5007
ggaggcattaccacttttctgtaagaattcacggataaggtagtcaggtaatgaatttgaggtgcccttgatgtattctatgtcaaaatcaaagacacttagaattgcttgccatcttgcaaaaatttgttttgaggcaaggtttttaacatctttttgtaaaatatctttggctgatttacaatcaactctgattaaaaaattttggtttaataaatccgattgaaatatggaaatgcacaacacaattgttaaaacttcctttttaacagttgaatattttaattatgcagaattccaatgttttgatgtatatgcaatgacatgatcttggccatggactctttgtttgaggatgccaccatagcctatgtctgaagcatcagtttcgacaattttaaatgcctgtggaataggaagatacagacattttatggattggactttgattttgatttctttaactgtttgtgtatggaggtcagaccaaggaggcggatttttcttcagcctatcatgcaatggcttgacaatattgtttaaataggggacaaattctcctacgtaatttagaatacctagaaatctttgtaactgggttttgtctaagatttggttgggaaatttgctagcaaactcaattgacctttctattggaatgattgtaccttgatatatattgtgaccaaggaatcgaattcgagtttggaaaagattgatttttgatttggagactgccaaaccattctgtttgatgatatggatgaaagtctggagatgtttgaaatgttggtcaatgttttgggaaaagattaaaacatcatctatgtagacaatgacaaattttgaatagggattaaaaatatcattcataactttttgaaattctgaaggggcattcttcagtccgaatggcatcacattccattcatattgcccgaaaggtatagtaaacgccgttttgtacctatctgattcttggatttggatttgccagaatccagatttcatatcaaattttgaaaatatctttgcagaatttaatctattaagtaagtcttttttgtttggaataggatacctaatccattgtaatgcttgatttagtggtttgtaatttatgactaagcgaggtgttccacgctcaatctca

SEQ ID NO: 12175 - DNA, 1168 bp, Glycine max
  Gm_smallRNAprecursor_5008
ggaggcattaccacttttctgtaagaattcacggataaggtagtcaggtaatgaatttgaggtgcccttgatgtattctatgtcaaaatcaaagacacttagaattgcttgccatcttgcaaaaatttgttttgaggcaaggtttttaacatctttttgtaaaatatctttggctgatttacaatcaactctgattaaaaaattttggtttaataaatccgattgaaatatggaaatgcacaacacaattgttaaaacttcctttttaacagttgaatattttaattatgcagaattccaatgttttgatgtatatgcaatgacatgatcttggccatggactctttgtttgaggatgccaccatagcctatgtctgaagcatcagtttcgacaattttaaatgcctgtggaataggaagatacagacattttatggattggactttgattttgatttctttaactgtttgtgtatggaggtcagaccaaggaggcggatttttcttcagcctatcatgcaatggcttgacaatattgtttaaataggggacaaattctcctacgtaatttagaatacctagaaatctttgtaactgggttttgtctaagatttggttgggaaatttgctagcaaactcaattgacctttctattggaatgattgtaccttgatatatattgtgaccaaggaatcgaattcgagtttggaaaagattgatttttgatttggagactgccaaaccattctgtttgatgatatggatgaaagtctggagatgtttgaaatgttggtcaatgttttgggaaaagattaaaacatcatctatgtagacaatgacaaattttgaatagggattaaaaatatcattcataactttttgaaattctgaaggggcattcttcagtccgaatggcatcacattccattcatattgcccgaaaggtatagtaaacgccgttttgtacctatctgattcttggatttggatttgccagaatccagatttcatatcaaattttgaaaatatctttgcagaatttaatctattaagtaagtcttttttgtttggaataggatacctaatccattgtaatgcttgatttagtggtttgtaatttatgactaagcgaggtgttccacgctcaatctcagattgtttgttgaca

SEQ ID NO: 12176 - DNA, 1031 bp, Glycine max
  Gm_smallRNAprecursor_5009
ctttttgtaaaatatctttggctgatttacaatcaactctgattaaaaaattttggtttaataaatccgattgaaatatggaaatgcacaacacaattgttaaaacttcctttttaacagttgaatattttaattatgcagaattccaatgttttgatgtatatgcaatgacatgatcttggccatggactctttgtttgaggatgccaccatagcctatgtctgaagcatcagtttcgacaattttaaatgcctgtggaataggaagatacagacattttatggattggactttgattttgatttctttaactgtttgtgtatggaggtcagaccaaggaggcggatttttcttcagcctatcatgcaatggcttgacaatattgtttaaataggggacaaattctcctacgtaatttagaatacctagaaatctttgtaactgggttttgtctaagatttggttgggaaatttgctagcaaactcaattgacctttctattggaatgattgtaccttgatatatattgtgaccaaggaatcgaattcgagtttggaaaagattgatttttgatttggagactgccaaaccattctgtttgatgatatggatgaaagtctggagatgtttgaaatgttggtcaatgttttgggaaaagattaaaacatcatctatgtagacaatgacaaattttgaatagggattaaaaatatcattcataactttttgaaattctgaaggggcattcttcagtccgaatggcatcacattccattcatattgcccgaaaggtatagtaaacgccgttttgtacctatctgattcttggatttggatttgccagaatccagatttcatatcaaattttgaaaatatctttgcagaatttaatctattaagtaagtcttttttgtttggaataggatacctaatccattgtaatgcttgatttagtggtttgtaatttatgactaagcgaggtgttccacgctcaatctcagattgtttgttgacataaaaagccacacaa

SEQ ID NO: 12177 - DNA, 1045 bp, Glycine max
  Gm_smallRNAprecursor_5010
aatgttgggctattgtaaaaattaatgtgttaacagtgtcaggaatctctttatcatcgtcattagtaatgacttttccattgagatccgtcttaactgcgctgtaaattttttattgctcttcactagtgagataattatcccaccatcctttcagttgtccagaaaatcctgccactaagatatctataatggtctcttttgaacattcatgggaggtttggtaagttgtagctaccatggtcatatgttggagtgtattcatgatgttatacttcactacaaaccaaccaccatcctgaagacaagaactttttatgaattgattttgatagattcaaattcagtatctatcaaacatttcaaagaccaaaaagaccaaacattaaacacccactccacaatccaaatactaaaagttcttcaaccaagacactttggttcggacttgaacaaaggaaagagattttcagttccattagatccggtaggttatacctattgggattatgttgatgcttggactaaggtgttttggcaccaaaatacccgcttcaagcattcatggctgatatatttcaagaccaatacaatttacaattttcccaattggttttttgcaatgatgggacttctttggaccaatccctgagatattcccagaaagagtccaacaaggatttgctcaatttgagagacaatacaattcgcaggaatcatgaattctagcagatcttaaatacttttcaagctttgcactgtcatggatcttctcatggcaatatccttacaacaagactgaaaagacaaactaatatccatcactacaaagacacgcatttgtaaaatggtggacacaatttgactcatccaaagcagatccagaacaagtaaaagtctggttccaatcccatccagaattcctcaaagcagctgatccagaaacttctgtgtttttgaaccaaaagtctcatctggcagcatttttagcaggatcgaaatcaaaggaggtcctagctaaaaatctaaaggaagttctgcaaat

SEQ ID NO: 12178 - DNA, 1060 bp, Glycine max
  Gm_smallRNAprecursor_5011
gccactaagatatctataatggtctcttttgaacattcatgggaggtttggtaagttgtagctaccatggtcatatgttggagtgtattcatgatgttatacttcactacaaaccaaccaccatcctgaagacaagaactttttatgaattgattttgatagattcaaattcagtatctatcaaacatttcaaagaccaaaaagaccaaacattaaacacccactccacaatccaaatactaaaagttcttcaaccaagacactttggttcggacttgaacaaaggaaagagattttcagttccattagatccggtaggttatacctattgggattatgttgatgcttggactaaggtgttttggcaccaaaatacccgcttcaagcattcatggctgatatatttcaagaccaatacaatttacaattttcccaattggttttttgcaatgatgggacttctttggaccaatccctgagatattcccagaaagagtccaacaaggatttgctcaatttgagagacaatacaattcgcaggaatcatgaattctagcagatcttaaatacttttcaagctttgcactgtcatggatcttctcatggcaatatccttacaacaagactgaaaagacaaactaatatccatcactacaaagacacgcatttgtaaaatggtggacacaatttgactcatccaaagcagatccagaacaagtaaaagtctggttccaatcccatccagaattcctcaaagcagctgatccagaaacttctgtgtttttgaaccaaaagtctcatctggcagcatttttagcaggatcgaaatcaaaggaggtcctagctaaaaatctaaaggaagttctgcaaatgttacaacaggaagaaaaaggttcatcctcaaagaaggaagaaacaagttctgctgaagaagaagaagaagaccccttttaccaaaatgaagatgattgttttggtatctgtttagattaaatttaatttcggtcacaaaaccgtctgtttgtaattaatgtgtaattaatgctggaaaatacaacct

SEQ ID NO: 12179 - DNA, 1080 bp, Glycine max
  Gm_smallRNAprecursor_5012
gccactaagatatctataatggtctcttttgaacattcatgggaggtttggtaagttgtagctaccatggtcatatgttggagtgtattcatgatgttatacttcactacaaaccaaccaccatcctgaagacaagaactttttatgaattgattttgatagattcaaattcagtatctatcaaacatttcaaagaccaaaaagaccaaacattaaacacccactccacaatccaaatactaaaagttcttcaaccaagacactttggttcggacttgaacaaaggaaagagattttcagttccattagatccggtaggttatacctattgggattatgttgatgcttggactaaggtgttttggcaccaaaatacccgcttcaagcattcatggctgatatatttcaagaccaatacaatttacaattttcccaattggttttttgcaatgatgggacttctttggaccaatccctgagatattcccagaaagagtccaacaaggatttgctcaatttgagagacaatacaattcgcaggaatcatgaattctagcagatcttaaatacttttcaagctttgcactgtcatggatcttctcatggcaatatccttacaacaagactgaaaagacaaactaatatccatcactacaaagacacgcatttgtaaaatggtggacacaatttgactcatccaaagcagatccagaacaagtaaaagtctggttccaatcccatccagaattcctcaaagcagctgatccagaaacttctgtgtttttgaaccaaaagtctcatctggcagcatttttagcaggatcgaaatcaaaggaggtcctagctaaaaatctaaaggaagttctgcaaatgttacaacaggaagaaaaaggttcatcctcaaagaaggaagaaacaagttctgctgaagaagaagaagaagaccccttttaccaaaatgaagatgattgttttggtatctgtttagattaaatttaatttcggtcacaaaaccgtctgtttgtaattaatgtgtaattaatgctggaaaatacaacctgtcctgtagccattaaagtc

SEQ ID NO: 12180 - DNA, 1189 bp, Glycine max
  Gm_smallRNAprecursor_5013
acaatccaaatactaaaagttcttcaaccaagacactttggttcggacttgaacaaaggaaagagattttcagttccattagatccggtaggttatacctattgggattatgttgatgcttggactaaggtgttttggcaccaaaatacccgcttcaagcattcatggctgatatatttcaagaccaatacaatttacaattttcccaattggttttttgcaatgatgggacttctttggaccaatccctgagatattcccagaaagagtccaacaaggatttgctcaatttgagagacaatacaattcgcaggaatcatgaattctagcagatcttaaatacttttcaagctttgcactgtcatggatcttctcatggcaatatccttacaacaagactgaaaagacaaactaatatccatcactacaaagacacgcatttgtaaaatggtggacacaatttgactcatccaaagcagatccagaacaagtaaaagtctggttccaatcccatccagaattcctcaaagcagctgatccagaaacttctgtgtttttgaaccaaaagtctcatctggcagcatttttagcaggatcgaaatcaaaggaggtcctagctaaaaatctaaaggaagttctgcaaatgttacaacaggaagaaaaaggttcatcctcaaagaaggaagaaacaagttctgctgaagaagaagaagaagaccccttttaccaaaatgaagatgattgttttggtatctgtttagattaaatttaatttcggtcacaaaaccgtctgtttgtaattaatgtgtaattaatgctggaaaatacaacctgtcctgtagccattaaagtcccggtcaaaactacttgtcttgtaacaaatagtcaaatagtcccggtcaaaactactggcaactaccggtcttaggtttttggctatataaggagtcctcaagtatgttgtgaggcaccctttcatttggccattttcatgtttctgaagagagttgctctgaaacaagatttttgtaagtgcttctttcaagtttcaataaatttctattttttcatccctcttctctctctttaccaatcctgtgcggctctgccgccgcttcggtttctttgtttatgaaaacctgggatttgtaaaccggtctccggtgtgcccttgatatctgttttacaa

SEQ ID NO: 12181 - DNA, 1040 bp, Glycine max
  Gm_smallRNAprecursor_5014
attcgcacgaatatccctaagatgtcgccagtgcatcttctccgtgtatgcgtaccttgtaaatatttaatcaatgtattatgttataaaatttgattgaaagaaaattataacgaataaataaaatagattctcactagccaacataagtggtttctttaaatgtttgcagtttgagttacgacgaagaaagttttgtgcaatgtggcgcaggcaaaagaaatgggatgtgtcctggacccataagttacttgggttgttgtaggcacttataattgaggggtgtcggtctgaaataagagaaatgttaatttgcggagtaacatgtcttttcaaattctttagaaaaaaccctcaagctgaagttgtctccccttctacaatgacataggcaatcgggaagatatggttagctccatcttgtgcggtagctatcaacagtgtgccagtatactttccgtaaagccatgtaccatctacttgtataatgggtttgcaatatgcaaaaccattaatgcatggaccaaatgaccaaaagacacgtttaaacaatcttttgcccggtactatttctcccctctcataagtcccgggaacacaagattgcaaagctccgaaaagttttggcagtttgacatatgatttcaatacaccaaattcagtggcatcatatttagctactttacaacaattcgatgcaccgcattcgtttggagaacaaggtcaaagttcttcagctgcaacaaccaacattgaaaatactaacatagaacaacaacatgatcatgacgtggaagaaccagacatactgcaaagaagaaatccgcgacgtaatcggcgtccaccaccttgtgggactagtcatcgtcttggtcattgaagtataaaatgttgtgataatgggatcaaatatgtttaagtacccctgtaacggcatcatcaaatatgatttggacccttgcaactatggttaagtacccatgttctgcatttctttaaaattatgtcgaacacattaatgatctttgtgactcattttt

SEQ ID NO: 12182 - DNA, 1104 bp, Glycine max
  Gm_smallRNAprecursor_5015
acctaacaggattgtccagctcaaaactaggtggcaaacactcaaaaggatattcattccaagtaagatatcctaattcattggaaagattaccaagtcttcctgaaaaattcattttttcaagtacgagcaacttaaggtgaatcatttttgatagagcatctgcccttattgttgtttgaggaaagttgctttatttttaataaccatggcttcaagataatctgctgcctacaaaattgcaaaggggaaagaaaatgttagatcttttgaagtatttaccccaattctagaaaaatggtaactaggattttataatcaaaaactattttaccatattgtctaacatacctttgtggagatctttttgaaatcccataatctactccattttcttggcttcttaggtgatttttctcgaacaatatacctgcctaaatctctcaacaagtcacgcatatgaatcaattcatatttaatggttatgagtgatctatcaattagaacttgaaggccatatttaggatgaaatccacgaaaatcaataactttcatcaaatattgcacagggtatatgtagaataagcaagcaagcaatatccaaaaatattcccttctcggtatcctccaactcatcaaaacttatttgcagtacatccataatattttttagcaaaacatctcaaccaaacaaagatgagcccaatacttcattgctaagggatggccttgggcatgtgatagtatgtcataagccaactttttataatcggtcataacataattacttttgaaagcatttctgcaaaccaactgaacagcatgttcgtgatccaatgcttggacttggtaaacatcatctactccatgtctcatcaatatatgcttatccctagaaattatgatgattctgcccccttcacctaggcattcacgtaacaaagtatctctactccttggaaacatctttaggagtccaacttgatcaacattatcaagaactatcaattcccttgctagcatagcctagtcaataacaaacatgttcccttaaatagatggtaaatctctaaacttttttcattctgagattgacaaggtaat

SEQ ID NO: 12183 - DNA, 1124 bp, Glycine max
  Gm_smallRNAprecursor_5016
taataaccatggcttcaagataatctgctgcctacaaaattgcaaaggggaaagaaaatgttagatcttttgaagtatttaccccaattctagaaaaatggtaactaggattttataatcaaaaactattttaccatattgtctaacatacctttgtggagatctttttgaaatcccataatctactccattttcttggcttcttaggtgatttttctcgaacaatatacctgcctaaatctctcaacaagtcacgcatatgaatcaattcatatttaatggttatgagtgatctatcaattagaacttgaaggccatatttaggatgaaatccacgaaaatcaataactttcatcaaatattgcacagggtatatgtagaataagcaagcaagcaatatccaaaaatattcccttctcggtatcctccaactcatcaaaacttatttgcagtacatccataatattttttagcaaaacatctcaaccaaacaaagatgagcccaatacttcattgctaagggatggccttgggcatgtgatagtatgtcataagccaactttttataatcggtcataacataattacttttgaaagcatttctgcaaaccaactgaacagcatgttcgtgatccaatgcttggacttggtaaacatcatctactccatgtctcatcaatatatgcttatccctagaaattatgatgattctgcccccttcacctaggcattcacgtaacaaagtatctctactccttggaaacatctttaggagtccaacttgatcaacattatcaagaactatcaattcccttgctagcatagcctagtcaataacaaacatgttcccttaaatagatggtaaatctctaaacttttttcattctgagattgacaaggtaattgtttttgtaaacctgatacactagaattctgatcaattttgcttacatcatcaatgaaacaacgaaaatcatattaatgagagatttctacataaaaaccatgaccaagagttgtttttcctattccacctatcccactcatccccacaacttgaatgtcattaacggaccccaaacgtaaaagctttgctaattctttaacacaagattccatcccaa

SEQ ID NO: 12184 - DNA, 1035 bp, Glycine max
  Gm_smallRNAprecursor_5017
atcaaaaactattttaccatattgtctaacatacctttgtggagatctttttgaaatcccataatctactccattttcttggcttcttaggtgatttttctcgaacaatatacctgcctaaatctctcaacaagtcacgcatatgaatcaattcatatttaatggttatgagtgatctatcaattagaacttgaaggccatatttaggatgaaatccacgaaaatcaataactttcatcaaatattgcacagggtatatgtagaataagcaagcaagcaatatccaaaaatattcccttctcggtatcctccaactcatcaaaacttatttgcagtacatccataatattttttagcaaaacatctcaaccaaacaaagatgagcccaatacttcattgctaagggatggccttgggcatgtgatagtatgtcataagccaactttttataatcggtcataacataattacttttgaaagcatttctgcaaaccaactgaacagcatgttcgtgatccaatgcttggacttggtaaacatcatctactccatgtctcatcaatatatgcttatccctagaaattatgatgattctgcccccttcacctaggcattcacgtaacaaagtatctctactccttggaaacatctttaggagtccaacttgatcaacattatcaagaactatcaattcccttgctagcatagcctagtcaataacaaacatgttcccttaaatagatggtaaatctctaaacttttttcattctgagattgacaaggtaattgtttttgtaaacctgatacactagaattctgatcaattttgcttacatcatcaatgaaacaacgaaaatcatattaatgagagatttctacataaaaaccatgaccaagagttgtttttcctattccacctatcccactcatccccacaacttgaatgtcattaacggaccccaaacgtaaaagctttgctaattctttaacacaagattccatcccaaccagatcatcatttggaagacttgaaaa

SEQ ID NO: 12185 - DNA, 1036 bp, Glycine max
  Gm_smallRNAprecursor_5018
atcaaaaactattttaccatattgtctaacatacctttgtggagatctttttgaaatcccataatctactccattttcttggcttcttaggtgatttttctcgaacaatatacctgcctaaatctctcaacaagtcacgcatatgaatcaattcatatttaatggttatgagtgatctatcaattagaacttgaaggccatatttaggatgaaatccacgaaaatcaataactttcatcaaatattgcacagggtatatgtagaataagcaagcaagcaatatccaaaaatattcccttctcggtatcctccaactcatcaaaacttatttgcagtacatccataatattttttagcaaaacatctcaaccaaacaaagatgagcccaatacttcattgctaagggatggccttgggcatgtgatagtatgtcataagccaactttttataatcggtcataacataattacttttgaaagcatttctgcaaaccaactgaacagcatgttcgtgatccaatgcttggacttggtaaacatcatctactccatgtctcatcaatatatgcttatccctagaaattatgatgattctgcccccttcacctaggcattcacgtaacaaagtatctctactccttggaaacatctttaggagtccaacttgatcaacattatcaagaactatcaattcccttgctagcatagcctagtcaataacaaacatgttcccttaaatagatggtaaatctctaaacttttttcattctgagattgacaaggtaattgtttttgtaaacctgatacactagaattctgatcaattttgcttacatcatcaatgaaacaacgaaaatcatattaatgagagatttctacataaaaaccatgaccaagagttgtttttcctattccacctatcccactcatccccacaacttgaatgtcattaacggaccccaaacgtaaaagctttgctaattctttaacacaagattccatcccaaccagatcatcatttggaagacttgaaaat

SEQ ID NO: 12186 - DNA, 1152 bp, Glycine max
  Gm_smallRNAprecursor_5019
aactattttaccatattgtctaacatacctttgtggagatctttttgaaatcccataatctactccattttcttggcttcttaggtgatttttctcgaacaatatacctgcctaaatctctcaacaagtcacgcatatgaatcaattcatatttaatggttatgagtgatctatcaattagaacttgaaggccatatttaggatgaaatccacgaaaatcaataactttcatcaaatattgcacagggtatatgtagaataagcaagcaagcaatatccaaaaatattcccttctcggtatcctccaactcatcaaaacttatttgcagtacatccataatattttttagcaaaacatctcaaccaaacaaagatgagcccaatacttcattgctaagggatggccttgggcatgtgatagtatgtcataagccaactttttataatcggtcataacataattacttttgaaagcatttctgcaaaccaactgaacagcatgttcgtgatccaatgcttggacttggtaaacatcatctactccatgtctcatcaatatatgcttatccctagaaattatgatgattctgcccccttcacctaggcattcacgtaacaaagtatctctactccttggaaacatctttaggagtccaacttgatcaacattatcaagaactatcaattcccttgctagcatagcctagtcaataacaaacatgttcccttaaatagatggtaaatctctaaacttttttcattctgagattgacaaggtaattgtttttgtaaacctgatacactagaattctgatcaattttgcttacatcatcaatgaaacaacgaaaatcatattaatgagagatttctacataaaaaccatgaccaagagttgtttttcctattccacctatcccactcatccccacaacttgaatgtcattaacggaccccaaacgtaaaagctttgctaattctttaacacaagattccatcccaaccagatcatcatttggaagacttgaaaatttgtgacccagtatatttgttatcttttcaagatcttcaatctctgcatattgtagcctatatgaacatttatagaaaatgaagaatgtcaaataatcacccaactcaagagaaccaaaata

SEQ ID NO: 12187 - DNA, 1064 bp, Glycine max
  Gm_smallRNAprecursor_5020
tttaatggttatgagtgatctatcaattagaacttgaaggccatatttaggatgaaatccacgaaaatcaataactttcatcaaatattgcacagggtatatgtagaataagcaagcaagcaatatccaaaaatattcccttctcggtatcctccaactcatcaaaacttatttgcagtacatccataatattttttagcaaaacatctcaaccaaacaaagatgagcccaatacttcattgctaagggatggccttgggcatgtgatagtatgtcataagccaactttttataatcggtcataacataattacttttgaaagcatttctgcaaaccaactgaacagcatgttcgtgatccaatgcttggacttggtaaacatcatctactccatgtctcatcaatatatgcttatccctagaaattatgatgattctgcccccttcacctaggcattcacgtaacaaagtatctctactccttggaaacatctttaggagtccaacttgatcaacattatcaagaactatcaattcccttgctagcatagcctagtcaataacaaacatgttcccttaaatagatggtaaatctctaaacttttttcattctgagattgacaaggtaattgtttttgtaaacctgatacactagaattctgatcaattttgcttacatcatcaatgaaacaacgaaaatcatattaatgagagatttctacataaaaaccatgaccaagagttgtttttcctattccacctatcccactcatccccacaacttgaatgtcattaacggaccccaaacgtaaaagctttgctaattctttaacacaagattccatcccaaccagatcatcatttggaagacttgaaaatttgtgacccagtatatttgttatcttttcaagatcttcaatctctgcatattgtagcctatatgaacatttatagaaaatgaagaatgtcaaataatcacccaactcaagagaaccaaaataaatgtacatgcatataaagaagataagaacagagtactttttccccttttaaatactatttgc

SEQ ID NO: 12188 - DNA, 1152 bp, Glycine max
  Gm_smallRNAprecursor_5021
tttaatggttatgagtgatctatcaattagaacttgaaggccatatttaggatgaaatccacgaaaatcaataactttcatcaaatattgcacagggtatatgtagaataagcaagcaagcaatatccaaaaatattcccttctcggtatcctccaactcatcaaaacttatttgcagtacatccataatattttttagcaaaacatctcaaccaaacaaagatgagcccaatacttcattgctaagggatggccttgggcatgtgatagtatgtcataagccaactttttataatcggtcataacataattacttttgaaagcatttctgcaaaccaactgaacagcatgttcgtgatccaatgcttggacttggtaaacatcatctactccatgtctcatcaatatatgcttatccctagaaattatgatgattctgcccccttcacctaggcattcacgtaacaaagtatctctactccttggaaacatctttaggagtccaacttgatcaacattatcaagaactatcaattcccttgctagcatagcctagtcaataacaaacatgttcccttaaatagatggtaaatctctaaacttttttcattctgagattgacaaggtaattgtttttgtaaacctgatacactagaattctgatcaattttgcttacatcatcaatgaaacaacgaaaatcatattaatgagagatttctacataaaaaccatgaccaagagttgtttttcctattccacctatcccactcatccccacaacttgaatgtcattaacggaccccaaacgtaaaagctttgctaattctttaacacaagattccatcccaaccagatcatcatttggaagacttgaaaatttgtgacccagtatatttgttatcttttcaagatcttcaatctctgcatattgtagcctatatgaacatttatagaaaatgaagaatgtcaaataatcacccaactcaagagaaccaaaataaatgtacatgcatataaagaagataagaacagagtactttttccccttttaaatactatttgcattaaatatgtataaatttcccacccaatttacatgttagattttcaaccaacctctctcaagttttaaaaaggggtaataaattgga

SEQ ID NO: 12189 - DNA, 1116 bp, Glycine max
  Gm_smallRNAprecursor_5022
tagaacttgaaggccatatttaggatgaaatccacgaaaatcaataactttcatcaaatattgcacagggtatatgtagaataagcaagcaagcaatatccaaaaatattcccttctcggtatcctccaactcatcaaaacttatttgcagtacatccataatattttttagcaaaacatctcaaccaaacaaagatgagcccaatacttcattgctaagggatggccttgggcatgtgatagtatgtcataagccaactttttataatcggtcataacataattacttttgaaagcatttctgcaaaccaactgaacagcatgttcgtgatccaatgcttggacttggtaaacatcatctactccatgtctcatcaatatatgcttatccctagaaattatgatgattctgcccccttcacctaggcattcacgtaacaaagtatctctactccttggaaacatctttaggagtccaacttgatcaacattatcaagaactatcaattcccttgctagcatagcctagtcaataacaaacatgttcccttaaatagatggtaaatctctaaacttttttcattctgagattgacaaggtaattgtttttgtaaacctgatacactagaattctgatcaattttgcttacatcatcaatgaaacaacgaaaatcatattaatgagagatttctacataaaaaccatgaccaagagttgtttttcctattccacctatcccactcatccccacaacttgaatgtcattaacggaccccaaacgtaaaagctttgctaattctttaacacaagattccatcccaaccagatcatcatttggaagacttgaaaatttgtgacccagtatatttgttatcttttcaagatcttcaatctctgcatattgtagcctatatgaacatttatagaaaatgaagaatgtcaaataatcacccaactcaagagaaccaaaataaatgtacatgcatataaagaagataagaacagagtactttttccccttttaaatactatttgcattaaatatgtataaatttcccacccaatttacatgttagattttcaaccaacctctctcaagttttaaaaaggggtaa

SEQ ID NO: 12190 - DNA, 1099 bp, Glycine max
  Gm_smallRNAprecursor_5023
aaaatcaataactttcatcaaatattgcacagggtatatgtagaataagcaagcaagcaatatccaaaaatattcccttctcggtatcctccaactcatcaaaacttatttgcagtacatccataatattttttagcaaaacatctcaaccaaacaaagatgagcccaatacttcattgctaagggatggccttgggcatgtgatagtatgtcataagccaactttttataatcggtcataacataattacttttgaaagcatttctgcaaaccaactgaacagcatgttcgtgatccaatgcttggacttggtaaacatcatctactccatgtctcatcaatatatgcttatccctagaaattatgatgattctgcccccttcacctaggcattcacgtaacaaagtatctctactccttggaaacatctttaggagtccaacttgatcaacattatcaagaactatcaattcccttgctagcatagcctagtcaataacaaacatgttcccttaaatagatggtaaatctctaaacttttttcattctgagattgacaaggtaattgtttttgtaaacctgatacactagaattctgatcaattttgcttacatcatcaatgaaacaacgaaaatcatattaatgagagatttctacataaaaaccatgaccaagagttgtttttcctattccacctatcccactcatccccacaacttgaatgtcattaacggaccccaaacgtaaaagctttgctaattctttaacacaagattccatcccaaccagatcatcatttggaagacttgaaaatttgtgacccagtatatttgttatcttttcaagatcttcaatctctgcatattgtagcctatatgaacatttatagaaaatgaagaatgtcaaataatcacccaactcaagagaaccaaaataaatgtacatgcatataaagaagataagaacagagtactttttccccttttaaatactatttgcattaaatatgtataaatttcccacccaatttacatgttagattttcaaccaacctctctcaagttttaaaaaggggtaataaattggaggaaactacg

SEQ ID NO: 12191 - DNA, 1247 bp, Glycine max
  Gm_smallRNAprecursor_5024
tgttttcttgattactggctctggtagagccaagagaacttcttttcctttactacttgttctacctcctctccgggaggagctggacaccttaagaggcatcagtatttttctgtaaaaattcacatgtgaggtggtcaggtagagaatttgaggtgcccttgatctattctgtgtcaaaatcaaagacacttaaaattgcttgccatctagcaaaaatttttgaggcaaggcttttaacatctttttgtaaaatatctttggctgatttacaatcaaccctgattaaaaatttttgttttaataaatccgattgaattttggaaatgcacaaaacaattgctaaaacttcttttttaacagttgaatattttaattgtgcaggattccaatgttttgatgtacatgcaatgacatgttcttgaccatgtactctttgtttgaggatgccaccataacctatgtctaatgcatcggtttcgacaattttaaatgcctgtggaataggaagatacagacattttatggattggaccttaagtttggtctctttaactgtttgtgtatggaggtcagaccagggaggcggatttttcttcagcctatcatgtaacggcttgacaatattgtttaaataggggacaaattctcctacataatttacacaacctaggaatctttgtaactgggttttgtctaagatttggttgggaaatctgctagcaaactctattgacctttctattggaatgattgtaccttgatataaatggtgaccaaggaatcggattcgagtttggaagagatttatttttgatttggagactgccaaaccattctgtttgataatatggattaaagtctggagatgtttgaaatgttggtcaatgttttgggaaaagattaaaacatcatctatgtggacaatgataaattttgaataaggattaaaaatatcattcataattttttgaaactctgaaggggcattcttcagtccgaatggcatcacattccatttgtattgcccgaaaggtacagtaaacaccgttttgtacctatctggctcttggatttggatttgccaaaatccagatttcatgtcaaattttgaaaatatttttgcagaatttaatctattaagtaaatctcttttgtttggaatagggtacctaatccattgtaatgcttggtttagtggtttgtaatttatgactaagcggggtgttccacgctcaagctcagat

SEQ ID NO: 12192 - DNA, 1246 bp, Glycine max
  Gm_smallRNAprecursor_5025
gttttcttgattactggctctggtagagccaagagaacttcttttcctttactacttgttctacctcctctccgggaggagctggacaccttaagaggcatcagtatttttctgtaaaaattcacatgtgaggtggtcaggtagagaatttgaggtgcccttgatctattctgtgtcaaaatcaaagacacttaaaattgcttgccatctagcaaaaatttttgaggcaaggcttttaacatctttttgtaaaatatctttggctgatttacaatcaaccctgattaaaaatttttgttttaataaatccgattgaattttggaaatgcacaaaacaattgctaaaacttcttttttaacagttgaatattttaattgtgcaggattccaatgttttgatgtacatgcaatgacatgttcttgaccatgtactctttgtttgaggatgccaccataacctatgtctaatgcatcggtttcgacaattttaaatgcctgtggaataggaagatacagacattttatggattggaccttaagtttggtctctttaactgtttgtgtatggaggtcagaccagggaggcggatttttcttcagcctatcatgtaacggcttgacaatattgtttaaataggggacaaattctcctacataatttacacaacctaggaatctttgtaactgggttttgtctaagatttggttgggaaatctgctagcaaactctattgacctttctattggaatgattgtaccttgatataaatggtgaccaaggaatcggattcgagtttggaagagatttatttttgatttggagactgccaaaccattctgtttgataatatggattaaagtctggagatgtttgaaatgttggtcaatgttttgggaaaagattaaaacatcatctatgtggacaatgataaattttgaataaggattaaaaatatcattcataattttttgaaactctgaaggggcattcttcagtccgaatggcatcacattccatttgtattgcccgaaaggtacagtaaacaccgttttgtacctatctggctcttggatttggatttgccaaaatccagatttcatgtcaaattttgaaaatatttttgcagaatttaatctattaagtaaatctcttttgtttggaatagggtacctaatccattgtaatgcttggtttagtggtttgtaatttatgactaagcggggtgttccacgctcaagctcagat

SEQ ID NO: 12193 - DNA, 1032 bp, Glycine max
  Gm_smallRNAprecursor_5026
ttactgtttcaacagtatcggtaatgtttaccagaactgttacaaaaactttttcaaattacattattatcgggaaccgaataattagttacaataattcatgattactacaactaactaatcatcgtctaacgatataccaaaatagtcatcctcattctagtagaatggatcatcttcttggtcatcattattctcggatgattcggcttccttcttggggggttcttcttcttcttcttcctgttgaagtagttggagaacttccttaagattctgagcaagactctttttagattttgagcttgctaagaatgctgcaagttgagacttttgattcagaaacaaagatgtctctggatcagcaggcttgagaaactcagggttgctctgaaaccagttcttgacttgttctggagtagcctttgaggtatcaaattgtgaccaccactttacaaaggcatgtctctgcaatgatggatattgtttgttgttttcggtttttccatatctgtattgccatgaaaaaatccatgacaaggcaaaactggaaaagtactttaaatctgccagaattcttgtttccttgatattgaagagcttggtgaattgttggaatccctgctggacttcttctggaaatatctgcgaaattggtccgaagtagttccaccattggaggaaccaatttggaaaattatacacagtgttattcttgaagtaaattagccacgaatgcttaaatttactattttgatgccagaacacattggtccaggcgtcaatgtagtcccaataattatatcctgcaggatcaaaaggtgcaggaaattttttgggttggtttaagtttgagccataatgtcgtggctacataacctttaggatttggattgtggtatgggtatttagatttggatctttggggtctttgaagtgtttaatagatactgagtttgtatctattagaatgaattcgtagaattttctggttttatttgtggccgttggcctataatggaatcctggggg

SEQ ID NO: 12194 - DNA, 1033 bp, Glycine max
  Gm_smallRNAprecursor_5027
ttactgtttcaacagtatcggtaatgtttaccagaactgttacaaaaactttttcaaattacattattatcgggaaccgaataattagttacaataattcatgattactacaactaactaatcatcgtctaacgatataccaaaatagtcatcctcattctagtagaatggatcatcttcttggtcatcattattctcggatgattcggcttccttcttggggggttcttcttcttcttcttcctgttgaagtagttggagaacttccttaagattctgagcaagactctttttagattttgagcttgctaagaatgctgcaagttgagacttttgattcagaaacaaagatgtctctggatcagcaggcttgagaaactcagggttgctctgaaaccagttcttgacttgttctggagtagcctttgaggtatcaaattgtgaccaccactttacaaaggcatgtctctgcaatgatggatattgtttgttgttttcggtttttccatatctgtattgccatgaaaaaatccatgacaaggcaaaactggaaaagtactttaaatctgccagaattcttgtttccttgatattgaagagcttggtgaattgttggaatccctgctggacttcttctggaaatatctgcgaaattggtccgaagtagttccaccattggaggaaccaatttggaaaattatacacagtgttattcttgaagtaaattagccacgaatgcttaaatttactattttgatgccagaacacattggtccaggcgtcaatgtagtcccaataattatatcctgcaggatcaaaaggtgcaggaaattttttgggttggtttaagtttgagccataatgtcgtggctacataacctttaggatttggattgtggtatgggtatttagatttggatctttggggtctttgaagtgtttaatagatactgagtttgtatctattagaatgaattcgtagaattttctggttttatttgtggccgttggcctataatggaatcctgggggg

SEQ ID NO: 12195 - DNA, 1031 bp, Glycine max
  Gm_smallRNAprecursor_5028
tactgtttcaacagtatcggtaatgtttaccagaactgttacaaaaactttttcaaattacattattatcgggaaccgaataattagttacaataattcatgattactacaactaactaatcatcgtctaacgatataccaaaatagtcatcctcattctagtagaatggatcatcttcttggtcatcattattctcggatgattcggcttccttcttggggggttcttcttcttcttcttcctgttgaagtagttggagaacttccttaagattctgagcaagactctttttagattttgagcttgctaagaatgctgcaagttgagacttttgattcagaaacaaagatgtctctggatcagcaggcttgagaaactcagggttgctctgaaaccagttcttgacttgttctggagtagcctttgaggtatcaaattgtgaccaccactttacaaaggcatgtctctgcaatgatggatattgtttgttgttttcggtttttccatatctgtattgccatgaaaaaatccatgacaaggcaaaactggaaaagtactttaaatctgccagaattcttgtttccttgatattgaagagcttggtgaattgttggaatccctgctggacttcttctggaaatatctgcgaaattggtccgaagtagttccaccattggaggaaccaatttggaaaattatacacagtgttattcttgaagtaaattagccacgaatgcttaaatttactattttgatgccagaacacattggtccaggcgtcaatgtagtcccaataattatatcctgcaggatcaaaaggtgcaggaaattttttgggttggtttaagtttgagccataatgtcgtggctacataacctttaggatttggattgtggtatgggtatttagatttggatctttggggtctttgaagtgtttaatagatactgagtttgtatctattagaatgaattcgtagaattttctggttttatttgtggccgttggcctataatggaatcctggggg

SEQ ID NO: 12196 - DNA, 1213 bp, Glycine max
  Gm_smallRNAprecursor_5029
cagaactgttacaaaaactttttcaaattacattattatcgggaaccgaataattagttacaataattcatgattactacaactaactaatcatcgtctaacgatataccaaaatagtcatcctcattctagtagaatggatcatcttcttggtcatcattattctcggatgattcggcttccttcttggggggttcttcttcttcttcttcctgttgaagtagttggagaacttccttaagattctgagcaagactctttttagattttgagcttgctaagaatgctgcaagttgagacttttgattcagaaacaaagatgtctctggatcagcaggcttgagaaactcagggttgctctgaaaccagttcttgacttgttctggagtagcctttgaggtatcaaattgtgaccaccactttacaaaggcatgtctctgcaatgatggatattgtttgttgttttcggtttttccatatctgtattgccatgaaaaaatccatgacaaggcaaaactggaaaagtactttaaatctgccagaattcttgtttccttgatattgaagagcttggtgaattgttggaatccctgctggacttcttctggaaatatctgcgaaattggtccgaagtagttccaccattggaggaaccaatttggaaaattatacacagtgttattcttgaagtaaattagccacgaatgcttaaatttactattttgatgccagaacacattggtccaggcgtcaatgtagtcccaataattatatcctgcaggatcaaaaggtgcaggaaattttttgggttggtttaagtttgagccataatgtcgtggctacataacctttaggatttggattgtggtatgggtatttagatttggatctttggggtctttgaagtgtttaatagatactgagtttgtatctattagaatgaattcgtagaattttctggttttatttgtggccgttggcctataatggaatcctggggggaatactttggcggttgccttgaaaggattcttgtcccagtattctggttccatttgtaaaacattgaagaatttgttttttgaaatatagctattgctgggttgtggtgttgattcttgttgagtcaatgattggcttggtttttggttacagacatttttggtctgtttggccttttggatttgtttttgtaggtctgtttcagaatcat

SEQ ID NO: 12197 - DNA, 1111 bp, Glycine max
  Gm_smallRNAprecursor_5030
tcctttgatttatgtaaatcaatttatgcatgtaaatgtttcaggatgtctttattacatctttaattaacaatacttcactagatagtaaataaccattttacttcccgaaaacataagttagtaacaaattatttgttaaaagaagaaaaaattaaatttaatttttgaatgtgtaaaaagtgtaatagattgatcttgttattaaatttgtgaaatgattttatcattaaattataatgtttaataattaatttaacaataaattatattttttaaaaattagtttaacattaattaagtaatttataagatcaatatatctcactttttatacatttaaaaattaaatttaaatttttcatctttttatacatttaaaaattaaatttaaatttttcatcttttaacaattgatctattagcggctcacacttttatcagaaatcgtatgttgtgtcttttgcaaaacacactaccaaaaaagaagcattttacgacgcacattctaagacggttatttgcgaccgtcttagaatgtgacgcggcgacaaacttgtaattaagtaacaaaaaattattttctacgacgtacatactaagacggtcgttaataaccgtcttagaatgtgcttggttggcattttcattattcttgacaaaataacaagacgggttttaatgaaaaccgccttcgttgcatttaatctttttgcacaccagcccaataggtttatgcattattgaacgtttgtcttgcgcatgctctctactcacctttgtagtccctgccgtcaaaatattcattcccatcgtttatgcgttttgcagggagagaaactctcaatcatggtttcagaagaggatacttaccctcttctggttcatatgtgatttatatgagttgattgaattccaagataaatagatgacaacaaagacgcgaacttttgaaattaatttggcactaatagaattccatgtggggatctaagctctaactattttttttattttttttggttggtaggatatagccgggtttatgggatccgcttaggattaatgtgttctgtctccacttgtctcccgctttgctctcaagacatct

SEQ ID NO: 12198 - DNA, 1076 bp, Glycine max
  Gm_smallRNAprecursor_5031
ttggggatgcgaacaaatgccctacacccaaacaccttgagatgattgtatgaagctttcttgcccgtccaaacttcctctggaatagccccttccaaaggaatttgacggtgtaaggttgacaatgtcaaccacggccattatagcttctccccaaaatgatttaggtaatttagcatgagaaagcacgcatcgaactctttcttcaattgttcgttttattctctcagctagcccattcaactgtggtgtcttgggtggagtcttctctagcctaatgccatatttcttgcaataggcttcaaagggacctctatactcacctccattgtcagatcgtatgttcttgatctttcttccagtctcacgctccactagagcatggaattctttgaaggcgtcaagcacttgatcttttgattttaacagatgcagccacaccttccttgaatgatcatcaatgaaggtgacaaagtacaatgcaccaccaatggatctctcggacattgaacacacatcggtgtgtacaaggtcaagaatgttctttctccttgtgggcggagaagatcttttgaaaacaactctgtgttgttttccagctaaacagtgagcacaaggatcaagtgacttacctttcatgttagggaggagttgtttccgagctagcatgtgaagacccttctcactgatatgcccaagtcgtttatgccatacttccatatcatcactggttatgtttacctctcctttgcagagcttagcttgcatcacatataatgatccttccttctttcctcgagccatgactagacttcctttggtgagcttccactttccttcaccaaagtagttcattagactagcatcgtctagcttcccaacagagataagattgaggcgcatagccgggacatgccttacatcttttaggacaagcttgcatccggtgcttgttgtcagggtgatgtttcctatcccaacagtcttgctcctatcttgatttcccatttgcatcgtaccaaagtcaccgctttggtaggatgagaagaaacttccatgtggagtaacatggaagg

SEQ ID NO: 12199 - DNA, 1110 bp, Glycine max
  Gm_smallRNAprecursor_5032
tgatcaacatttggcaaagggactgcttcgatccattttgtaaagtaatcgacaccaactatgatataacgctggttcttagaagaagcaggcttgatttcaccaattaggtccaaagcccatcctctgaaaggccaaggtttgattatggagtgtaactcactagcaggtacatgctgtatccctgcatgcctttggcattcctgacagcctttagcaaattctatgcagtcttttaacatcgaaggccaatacaaaccttgccgaaataaaaaccatttcattttatggcctgcttgatgtgatccacaggccccactgtgaacatgggaaactgccaagtatgcttctgattcacttagacattttagcaacactccttctgcagtctttttaaacaaatcatttcccatcaccacgtaatttaaagccctatatttgacctttcgagccacattgcctattggatttttcaaatattcaacaatggactttctccaatcattatctaacatattgtcaatggctaaaatgtgaattttttcctggagatcatccatgctttcatcttcattattttgtgatgtacttgcccccacaagttttggcattggcaatttagtgcttaatggctctggtaacaccagtttatcttttatttcgatcaactgagttaacttttctttcgacattttgtaccctgaagctatttgggctaaatcatttgcttcttggttttctagtcgaggtatatgttcaatgttaatataatcgaaatgattcagaagagaacttgccataccaaaatattttgctaagtgttcattaacacatttgtattcttgtgttaattgcctcaacactaattctgaatcaccccttatgttaacatttcttgcccccaagctaattaaaatttcaaggcctgcaattagagcctcatactcagcctcattattagaacaaagccctttgattttatatttgaatttagttggaactttattgggggatattattaaaactccaattccagttccgtgtttgtgtttcgaaccatcgaaatacaaaatccaaggctctgtatcgacatagtcttgcggcatttcg

SEQ ID NO: 12200 - DNA, 1114 bp, Glycine max
  Gm_smallRNAprecursor_5033
tatctaacatattgtcaatggctaaaatgtgaattttttcctggagatcatccatgctttcatcttcattattttgtgatgtacttgcccccacaagttttggcattggcaatttagtgcttaatggctctggtaacaccagtttatcttttatttcgatcaactgagttaacttttctttcgacattttgtaccctgaagctatttgggctaaatcatttgcttcttggttttctagtcgaggtatatgttcaatgttaatataatcgaaatgattcagaagagaacttgccataccaaaatattttgctaagtgttcattaacacatttgtattcttgtgttaattgcctcaacactaattctgaatcaccccttatgttaacatttcttgcccccaagctaattaaaatttcaaggcctgcaattagagcctcatactcagcctcattattagaacaaagccctttgattttatatttgaatttagttggaactttattgggggatattattaaaactccaattccagttccgtgtttgtgtttcgaaccatcgaaatacaaaatccaaggctctgtatcgacatagtcttgcggcatttcgatcactgagtgatctacaataaaatctgccacaatttgacccttaaccgatttcaaaggcttgtacgttaaagaatattctgttaatgctaaagcccattttccaattctactgtgtaaaataggttttgacaacatgtgcttaataatatcataatgagaatacacataaacatcaacaggctttatatattgcttaagttttgcacaagagaaatacaaacaaagacaaagtttttctatgacagtatatctagtttctgcatcatttagtacacgactaagataataaattgcatgctctacgccatcatcatcttcctgagccaacatgctaccaatggtcttgtcagacgcagcaatatacaacttcatagtcttgtttcgactaggaggcattaacacaggaggcttgatcagatattctttaatttcatcgaaagccttttgatgctcttcattccatttgaatggttcatctttcttgagtcgaagtaatggcgaaaaagt

SEQ ID NO: 12201 - DNA, 1196 bp, Glycine max
  Gm_smallRNAprecursor_5034
ttgttcatcagcaacataatgtacaaccaccagtcggtgtactcgaggttggcatgatcttcgatgacaaatcacaatgtattcgagcaatcaaagaatacaacatcagaaatcattttgattgcagaacaatttactctgaccaaagaaggctacacttcgtctgcaagttacatgaaaatggttgtacatggagcttgggcgcatgcaattcaaagaggcataacaaatggattatcaagagtatcagaggtcatcacacttgtctcgtgccgatgcttagacaaaatcatcgccaactcgacaaacacgtcatagcacagatcatccaaccaattgtcaaaacaaacccaactgtctccatcaagacattgattgcagagatcaaaacgttcatgaattataccccatcctacaagaagacatggttagcaaagcaaaaagaattggagatgattcatggaaactgggaagaatcatatgccaaactgccaaaacttttcggagctttgcaatcttgtgttcccgggactgtggtcgctgctcaaacagaatccttgtatgaggggggagaaatagtaccgggcaaaagattgtttaaacgtgtcttttgatcatttggtccatgcatggttttgcatattgcaaacccattgtacaagtagatggtacatggctttacggaaagtatactggcacactgttgatagctaccgcacaagatggagctaaccatatcttcccgattgcctatgccattgtagaaggggagacaacttcagcttggggttttttctaaagaatttgagaagacatgttactccgcaaattaacatttctcttatttcagaccgacacccctcaattataagtgcctacaacaacccaagtaacttatgggtccaggacacatcccatttcttttgcctgcgccacattgcacaaaactttcttcgtggtaactcaaactgcaaacatttaaagaaaccacttatgttggctggtgagaatctattttatttattcgttataattttctttcaatcaaattttataacataatacattgattaaatatttacagggtacgcatacacggagaagatgcactggcgacatcttggggatattcgtgcgaataagccaagtgcagctgaatggcttgatcaattacccaaacaaaaatgggtacaatg

SEQ ID NO: 12202 - DNA, 1076 bp, Glycine max
  Gm_smallRNAprecursor_5035
catcagcaacataatgtacaaccaccagtcggtgtactcgaggttggcatgatcttcgatgacaaatcacaatgtattcgagcaatcaaagaatacaacatcagaaatcattttgattgcagaacaatttactctgaccaaagaaggctacacttcgtctgcaagttacatgaaaatggttgtacatggagcttgggcgcatgcaattcaaagaggcataacaaatggattatcaagagtatcagaggtcatcacacttgtctcgtgccgatgcttagacaaaatcatcgccaactcgacaaacacgtcatagcacagatcatccaaccaattgtcaaaacaaacccaactgtctccatcaagacattgattgcagagatcaaaacgttcatgaattataccccatcctacaagaagacatggttagcaaagcaaaaagaattggagatgattcatggaaactgggaagaatcatatgccaaactgccaaaacttttcggagctttgcaatcttgtgttcccgggactgtggtcgctgctcaaacagaatccttgtatgaggggggagaaatagtaccgggcaaaagattgtttaaacgtgtcttttgatcatttggtccatgcatggttttgcatattgcaaacccattgtacaagtagatggtacatggctttacggaaagtatactggcacactgttgatagctaccgcacaagatggagctaaccatatcttcccgattgcctatgccattgtagaaggggagacaacttcagcttggggttttttctaaagaatttgagaagacatgttactccgcaaattaacatttctcttatttcagaccgacacccctcaattataagtgcctacaacaacccaagtaacttatgggtccaggacacatcccatttcttttgcctgcgccacattgcacaaaactttcttcgtggtaactcaaactgcaaacatttaaagaaaccacttatgttggctggtgagaatctattttatttattcgttataattttctttcaatcaaattttataacataatacattgattaaatattta

SEQ ID NO: 12203 - DNA, 1075 bp, Glycine max
  Gm_smallRNAprecursor_5036
atcagcaacataatgtacaaccaccagtcggtgtactcgaggttggcatgatcttcgatgacaaatcacaatgtattcgagcaatcaaagaatacaacatcagaaatcattttgattgcagaacaatttactctgaccaaagaaggctacacttcgtctgcaagttacatgaaaatggttgtacatggagcttgggcgcatgcaattcaaagaggcataacaaatggattatcaagagtatcagaggtcatcacacttgtctcgtgccgatgcttagacaaaatcatcgccaactcgacaaacacgtcatagcacagatcatccaaccaattgtcaaaacaaacccaactgtctccatcaagacattgattgcagagatcaaaacgttcatgaattataccccatcctacaagaagacatggttagcaaagcaaaaagaattggagatgattcatggaaactgggaagaatcatatgccaaactgccaaaacttttcggagctttgcaatcttgtgttcccgggactgtggtcgctgctcaaacagaatccttgtatgaggggggagaaatagtaccgggcaaaagattgtttaaacgtgtcttttgatcatttggtccatgcatggttttgcatattgcaaacccattgtacaagtagatggtacatggctttacggaaagtatactggcacactgttgatagctaccgcacaagatggagctaaccatatcttcccgattgcctatgccattgtagaaggggagacaacttcagcttggggttttttctaaagaatttgagaagacatgttactccgcaaattaacatttctcttatttcagaccgacacccctcaattataagtgcctacaacaacccaagtaacttatgggtccaggacacatcccatttcttttgcctgcgccacattgcacaaaactttcttcgtggtaactcaaactgcaaacatttaaagaaaccacttatgttggctggtgagaatctattttatttattcgttataattttctttcaatcaaattttataacataatacattgattaaatattta

SEQ ID NO: 12204 - DNA, 1066 bp, Glycine max
  Gm_smallRNAprecursor_5037
gcaacataatgtacaaccaccagtcggtgtactcgaggttggcatgatcttcgatgacaaatcacaatgtattcgagcaatcaaagaatacaacatcagaaatcattttgattgcagaacaatttactctgaccaaagaaggctacacttcgtctgcaagttacatgaaaatggttgtacatggagcttgggcgcatgcaattcaaagaggcataacaaatggattatcaagagtatcagaggtcatcacacttgtctcgtgccgatgcttagacaaaatcatcgccaactcgacaaacacgtcatagcacagatcatccaaccaattgtcaaaacaaacccaactgtctccatcaagacattgattgcagagatcaaaacgttcatgaattataccccatcctacaagaagacatggttagcaaagcaaaaagaattggagatgattcatggaaactgggaagaatcatatgccaaactgccaaaacttttcggagctttgcaatcttgtgttcccgggactgtggtcgctgctcaaacagaatccttgtatgaggggggagaaatagtaccgggcaaaagattgtttaaacgtgtcttttgatcatttggtccatgcatggttttgcatattgcaaacccattgtacaagtagatggtacatggctttacggaaagtatactggcacactgttgatagctaccgcacaagatggagctaaccatatcttcccgattgcctatgccattgtagaaggggagacaacttcagcttggggttttttctaaagaatttgagaagacatgttactccgcaaattaacatttctcttatttcagaccgacacccctcaattataagtgcctacaacaacccaagtaacttatgggtccaggacacatcccatttcttttgcctgcgccacattgcacaaaactttcttcgtggtaactcaaactgcaaacatttaaagaaaccacttatgttggctggtgagaatctattttatttattcgttataattttctttcaatcaaattttataacataatacattgattaaat

SEQ ID NO: 12205 - DNA, 1067 bp, Glycine max
  Gm_smallRNAprecursor_5038
gcaacataatgtacaaccaccagtcggtgtactcgaggttggcatgatcttcgatgacaaatcacaatgtattcgagcaatcaaagaatacaacatcagaaatcattttgattgcagaacaatttactctgaccaaagaaggctacacttcgtctgcaagttacatgaaaatggttgtacatggagcttgggcgcatgcaattcaaagaggcataacaaatggattatcaagagtatcagaggtcatcacacttgtctcgtgccgatgcttagacaaaatcatcgccaactcgacaaacacgtcatagcacagatcatccaaccaattgtcaaaacaaacccaactgtctccatcaagacattgattgcagagatcaaaacgttcatgaattataccccatcctacaagaagacatggttagcaaagcaaaaagaattggagatgattcatggaaactgggaagaatcatatgccaaactgccaaaacttttcggagctttgcaatcttgtgttcccgggactgtggtcgctgctcaaacagaatccttgtatgaggggggagaaatagtaccgggcaaaagattgtttaaacgtgtcttttgatcatttggtccatgcatggttttgcatattgcaaacccattgtacaagtagatggtacatggctttacggaaagtatactggcacactgttgatagctaccgcacaagatggagctaaccatatcttcccgattgcctatgccattgtagaaggggagacaacttcagcttggggttttttctaaagaatttgagaagacatgttactccgcaaattaacatttctcttatttcagaccgacacccctcaattataagtgcctacaacaacccaagtaacttatgggtccaggacacatcccatttcttttgcctgcgccacattgcacaaaactttcttcgtggtaactcaaactgcaaacatttaaagaaaccacttatgttggctggtgagaatctattttatttattcgttataattttctttcaatcaaattttataacataatacattgattaaata

SEQ ID NO: 12206 - DNA, 1065 bp, Glycine max
  Gm_smallRNAprecursor_5039
caacataatgtacaaccaccagtcggtgtactcgaggttggcatgatcttcgatgacaaatcacaatgtattcgagcaatcaaagaatacaacatcagaaatcattttgattgcagaacaatttactctgaccaaagaaggctacacttcgtctgcaagttacatgaaaatggttgtacatggagcttgggcgcatgcaattcaaagaggcataacaaatggattatcaagagtatcagaggtcatcacacttgtctcgtgccgatgcttagacaaaatcatcgccaactcgacaaacacgtcatagcacagatcatccaaccaattgtcaaaacaaacccaactgtctccatcaagacattgattgcagagatcaaaacgttcatgaattataccccatcctacaagaagacatggttagcaaagcaaaaagaattggagatgattcatggaaactgggaagaatcatatgccaaactgccaaaacttttcggagctttgcaatcttgtgttcccgggactgtggtcgctgctcaaacagaatccttgtatgaggggggagaaatagtaccgggcaaaagattgtttaaacgtgtcttttgatcatttggtccatgcatggttttgcatattgcaaacccattgtacaagtagatggtacatggctttacggaaagtatactggcacactgttgatagctaccgcacaagatggagctaaccatatcttcccgattgcctatgccattgtagaaggggagacaacttcagcttggggttttttctaaagaatttgagaagacatgttactccgcaaattaacatttctcttatttcagaccgacacccctcaattataagtgcctacaacaacccaagtaacttatgggtccaggacacatcccatttcttttgcctgcgccacattgcacaaaactttcttcgtggtaactcaaactgcaaacatttaaagaaaccacttatgttggctggtgagaatctattttatttattcgttataattttctttcaatcaaattttataacataatacattgattaaat

SEQ ID NO: 12207 - DNA, 1130 bp, Glycine max
  Gm_smallRNAprecursor_5040
attaatgcattacaagatcctaattggaaaatggccatgaccgacgaatataatgctcttattgaaaataagacgtgggacttagtgccccgtccaactgatgctaatgttatccgaagtttgtggcttttcaggcataaaaagaaagctgatggttcatttgaaaggtacaaggctcggctagtaggtaatggttcgaatcaacagactggtgtcgattgcggagaaacctttagtcccgtagttaaatcagcaactattcgaacggttctcagtattgctctttccaaatcatggggtcttcatcagttggatgtcaaaaatgctttcctacatggtaatctcaatgaaaccgtgtacatgtaccaacctgctggcttccgcaatccgcaataccctgattatgtatgcttgttgaagaagtctctctatggtcttaaacaagcacctcgtgcttggtaccaacgcttcactgattttgttgctaccttgggcttttctcatagtatatgtgataactcattattcacctaccacaatggcaatgacacggcctacatccttctttatgtagatgatatcattctcactgcatcctctgacactctacgccaatctatcatgtctaaactgagttccgaatttgctatgaaagatttgggtcctcttagttattttctaggtatctcagttaccaggcattccagtggtatgtttctctctcaacataaatatgctgaagaaatcattgagagagcttccatgtcctcctgcaaaccggtttcaactccagtggatacaaaagcaaaactcagtggaacctctggcaacccatatcatgatccatctgaatatagaagtcttgctggtgctttgcaataccttactttcacaagacctgatatttcttatgtcgttcagcaagtatgtcttttcatgcatgatccaagaacacaacacatgaatgccttgaagcgaatcattcgatacatcaaaggcaccatcactcacggtttacatctctctccctcctcagctgacaaactcaccacatatactgatgctgactgggggggatgtccggacacccgcaggtccacgtccggttattgtgtttatcttggagataa

SEQ ID NO: 12208 - DNA, 1044 bp, Glycine max
  Gm_smallRNAprecursor_5041
gccccgtccaactgatgctaatgttatccgaagtttgtggcttttcaggcataaaaagaaagctgatggttcatttgaaaggtacaaggctcggctagtaggtaatggttcgaatcaacagactggtgtcgattgcggagaaacctttagtcccgtagttaaatcagcaactattcgaacggttctcagtattgctctttccaaatcatggggtcttcatcagttggatgtcaaaaatgctttcctacatggtaatctcaatgaaaccgtgtacatgtaccaacctgctggcttccgcaatccgcaataccctgattatgtatgcttgttgaagaagtctctctatggtcttaaacaagcacctcgtgcttggtaccaacgcttcactgattttgttgctaccttgggcttttctcatagtatatgtgataactcattattcacctaccacaatggcaatgacacggcctacatccttctttatgtagatgatatcattctcactgcatcctctgacactctacgccaatctatcatgtctaaactgagttccgaatttgctatgaaagatttgggtcctcttagttattttctaggtatctcagttaccaggcattccagtggtatgtttctctctcaacataaatatgctgaagaaatcattgagagagcttccatgtcctcctgcaaaccggtttcaactccagtggatacaaaagcaaaactcagtggaacctctggcaacccatatcatgatccatctgaatatagaagtcttgctggtgctttgcaataccttactttcacaagacctgatatttcttatgtcgttcagcaagtatgtcttttcatgcatgatccaagaacacaacacatgaatgccttgaagcgaatcattcgatacatcaaaggcaccatcactcacggtttacatctctctccctcctcagctgacaaactcaccacatatactgatgctgactgggggggatgtccggacacccgcaggtccacgtccggttattgtgtttatcttggagataa

SEQ ID NO: 12209 - DNA, 1111 bp, Glycine max
  Gm_smallRNAprecursor_5042
atgcctgcagggagtggtggtattgcccatgccttgtttgtctccaaagatcgcagaattcccaagattcgaatccaaacccgtcaagttgagaaccttttggataagaggattattgtggatgttgattcttgggattgtcagtctcgatatccatcaggccattgtgtgcgaactataggggagataggtgatagagatactgaaagcgaggtatggaatattggattttgtacgatttctctctttgtatcaatagtgggaaaaattagtataatcatcagtcactagagcaagtcattaggaacttggcaacttgcttgtgctctctgcaacttactcagcttgtttaaaaactgggggggttgagggtcagttccgtcagcaacaaataactgtcaagagagaacaaaatccaaaaccctttcaattctgaagatttcgctctctttcttcttgagaaacaaactctccttcgcttcagaagcttcttcctctgatttctgaccatgaattcccaaaccactgagtttcccatgaatgaagctcgacttggaagcaatatcttatagcttcaagctccctttcatcaggcatggggaactcagtggtttgggaattcatggtcagaaataagaggaagaagcttctgaagttagagggaaagtgaaggagggtttgtttctcaagaaaaaggaagagagcgaaatctgcagaatcgaaagggttttggatttttttctctcttgattgttgtttgttgctgactgaactggctctcaatcccgccagtttttaaactttcatatatacgacgtcgtgtggatagaactaagaagcggcatcgttttgtctccgatttatgtttactttactttttcctagatttattttttaactataataatacaattaattaataactattgacaaattgtgaatagttcaatttaatttgtaatgcacaaacatgaaaacaaatattaagattaaatgattttctctaataggacaacactggtcatgtaataataattatttaattttaaggtcttaattagatgcatgaaaatagtttattttagttattgcagcagtaatcttttaacta

SEQ ID NO: 12210 - DNA, 1190 bp, Glycine max
  Gm_smallRNAprecursor_5043
cttaaataattgttatgcaaaatatttttggtttctccataacatattaacattaacccatgttattggtttgttttctacttcagatactattcatctgctgcttgtattgttaattgaaactcacacttctttgttcatggagctggacttggagcttgtatattaggtacaggtacactgttgtctcttcttctctgtctaccttttttctctgcttgtcaaattaatattccgaactttatattgagtaccctaagcacagtatgtatttctagattgcaattcattaatgaagactagtgtgactatcagtaatgactgcaccaactgagtgttggctctgattttcttctcatttctttccttgtgcattcaaacacatgcgttcatgtatacagtttcattgaactcccgctagtacttaagcaaaatccctttgcttccttgtgaatatctgtagtttgcttttcctggattcacataaacagcaaattttgggccttgaagtcatgatctcagataaatgagaaaaaaatttatggtcaatccaaggccaatgtttttttagttctagatgatgtagtttccagttcatgaactaactaacactcttgtgctggaaaagatcatcatctagaactaaaaacacattggccttggattgaccataaaaatttttctcatttatctgagatcatgacttcaaggcccaaaatttgctgtttatgtgaatccaggaaaagcaaactacagatattcactgtttccaatcgcaaccattctttacaaatctatatttgatgtttactaaggtaaacttttaatttcagctacatccaacaagtacagtattaaggaaaagaaggcagatatagggtttaagaaatggaagctagaagagaagagaggtacctggagagcacagaaaccttctttctctggggtcttaatctgagacacaatgttatcatccacccaaagcacagtaattggaattctagcaccccatttatcccatagcgcgctcattccacacttcaccgcaataagcccagttcgcttggaattaggggtcatcgcactgggcttcggttcaattatccgagaccgaatcgccgccgcatcggagctcagaaatcggagcgacaactgcgaatcgacggcgacacgttgcagacgagaaacga

SEQ ID NO: 12211 - DNA, 1036 bp, Glycine max
  Gm_smallRNAprecursor_5044
cttttatcagggaagcacacaaggatgtccctttattatagttattattattttgagtgtttttatggcactggttaataatataaaattgttaaacaaaaaagtaaaacttttattgtcttcaggttataaaaataaaatcatccttaaataattaataacactttatagaagatattgaatacttcttaacaaccacaccttttagcatctttattaattggtcaggaagtatgaattctcttgtagagctaaaatgcacttgaactttatgatccaacatgatttacattgaagaaaataaaaatattgattgacaatggagtctctttgaaaggcttaggacaaactgaagctaaataattccgcaatattacataattcattttaattcttataagttgaatggatatgaataaagttctacagagaaacataaatgcctgaaaagtaaaatggttggagcagttagattctatgaagcatggacactccattcccttgtcgtgtccggtgtccgacacgcgttcgtgtcagtgtccgacaccgatatgacactcgtattacgttctatattttgagacattacaggtgtccacgtgtccatgttcgtgtcgtgtccggtgtccgtatcggtgtcggtgcttcataggttagattacaacaatcactaaatcacactttgtgttgacaatgtagaaattttttcataaaatgaaaaatgttacaaccagaggaacaattcattcatgaaagggagatcagaatcggggaactagttatgatgtacaaagtagtgccttgtagtctttatactaccaatatcccaagaacatggttttaaattgcggctgcagtgtggttgcgatgaataaaaaacccttgcgatgcagggaatagcgggaaaatgtgattgatgtggccacaattacgatcaccgcaatacggttgcagtgagtcgaaaagctttacattgccaaccataatttaaaactatgacccagaataaacgtaaacttccacaagcaactgtatg

SEQ ID NO: 12212 - DNA, 1038 bp, Glycine max
  Gm_smallRNAprecursor_5045
cttttatcagggaagcacacaaggatgtccctttattatagttattattattttgagtgtttttatggcactggttaataatataaaattgttaaacaaaaaagtaaaacttttattgtcttcaggttataaaaataaaatcatccttaaataattaataacactttatagaagatattgaatacttcttaacaaccacaccttttagcatctttattaattggtcaggaagtatgaattctcttgtagagctaaaatgcacttgaactttatgatccaacatgatttacattgaagaaaataaaaatattgattgacaatggagtctctttgaaaggcttaggacaaactgaagctaaataattccgcaatattacataattcattttaattcttataagttgaatggatatgaataaagttctacagagaaacataaatgcctgaaaagtaaaatggttggagcagttagattctatgaagcatggacactccattcccttgtcgtgtccggtgtccgacacgcgttcgtgtcagtgtccgacaccgatatgacactcgtattacgttctatattttgagacattacaggtgtccacgtgtccatgttcgtgtcgtgtccggtgtccgtatcggtgtcggtgcttcataggttagattacaacaatcactaaatcacactttgtgttgacaatgtagaaattttttcataaaatgaaaaatgttacaaccagaggaacaattcattcatgaaagggagatcagaatcggggaactagttatgatgtacaaagtagtgccttgtagtctttatactaccaatatcccaagaacatggttttaaattgcggctgcagtgtggttgcgatgaataaaaaacccttgcgatgcagggaatagcgggaaaatgtgattgatgtggccacaattacgatcaccgcaatacggttgcagtgagtcgaaaagctttacattgccaaccataatttaaaactatgacccagaataaacgtaaacttccacaagcaactgtatgaa

SEQ ID NO: 12213 - DNA, 1034 bp, Glycine max
  Gm_smallRNAprecursor_5046
tttatcagggaagcacacaaggatgtccctttattatagttattattattttgagtgtttttatggcactggttaataatataaaattgttaaacaaaaaagtaaaacttttattgtcttcaggttataaaaataaaatcatccttaaataattaataacactttatagaagatattgaatacttcttaacaaccacaccttttagcatctttattaattggtcaggaagtatgaattctcttgtagagctaaaatgcacttgaactttatgatccaacatgatttacattgaagaaaataaaaatattgattgacaatggagtctctttgaaaggcttaggacaaactgaagctaaataattccgcaatattacataattcattttaattcttataagttgaatggatatgaataaagttctacagagaaacataaatgcctgaaaagtaaaatggttggagcagttagattctatgaagcatggacactccattcccttgtcgtgtccggtgtccgacacgcgttcgtgtcagtgtccgacaccgatatgacactcgtattacgttctatattttgagacattacaggtgtccacgtgtccatgttcgtgtcgtgtccggtgtccgtatcggtgtcggtgcttcataggttagattacaacaatcactaaatcacactttgtgttgacaatgtagaaattttttcataaaatgaaaaatgttacaaccagaggaacaattcattcatgaaagggagatcagaatcggggaactagttatgatgtacaaagtagtgccttgtagtctttatactaccaatatcccaagaacatggttttaaattgcggctgcagtgtggttgcgatgaataaaaaacccttgcgatgcagggaatagcgggaaaatgtgattgatgtggccacaattacgatcaccgcaatacggttgcagtgagtcgaaaagctttacattgccaaccataatttaaaactatgacccagaataaacgtaaacttccacaagcaactgtatg

SEQ ID NO: 12214 - DNA, 1112 bp, Glycine max
  Gm_smallRNAprecursor_5047
tttatcagggaagcacacaaggatgtccctttattatagttattattattttgagtgtttttatggcactggttaataatataaaattgttaaacaaaaaagtaaaacttttattgtcttcaggttataaaaataaaatcatccttaaataattaataacactttatagaagatattgaatacttcttaacaaccacaccttttagcatctttattaattggtcaggaagtatgaattctcttgtagagctaaaatgcacttgaactttatgatccaacatgatttacattgaagaaaataaaaatattgattgacaatggagtctctttgaaaggcttaggacaaactgaagctaaataattccgcaatattacataattcattttaattcttataagttgaatggatatgaataaagttctacagagaaacataaatgcctgaaaagtaaaatggttggagcagttagattctatgaagcatggacactccattcccttgtcgtgtccggtgtccgacacgcgttcgtgtcagtgtccgacaccgatatgacactcgtattacgttctatattttgagacattacaggtgtccacgtgtccatgttcgtgtcgtgtccggtgtccgtatcggtgtcggtgcttcataggttagattacaacaatcactaaatcacactttgtgttgacaatgtagaaattttttcataaaatgaaaaatgttacaaccagaggaacaattcattcatgaaagggagatcagaatcggggaactagttatgatgtacaaagtagtgccttgtagtctttatactaccaatatcccaagaacatggttttaaattgcggctgcagtgtggttgcgatgaataaaaaacccttgcgatgcagggaatagcgggaaaatgtgattgatgtggccacaattacgatcaccgcaatacggttgcagtgagtcgaaaagctttacattgccaaccataatttaaaactatgacccagaataaacgtaaacttccacaagcaactgtatgaaaaatgaagccttagtctagggtactatttcaaatcataaatcagtgctccatttttattaatacacatgttaatta

SEQ ID NO: 12215 - DNA, 1113 bp, Glycine max
  Gm_smallRNAprecursor_5048
tttatcagggaagcacacaaggatgtccctttattatagttattattattttgagtgtttttatggcactggttaataatataaaattgttaaacaaaaaagtaaaacttttattgtcttcaggttataaaaataaaatcatccttaaataattaataacactttatagaagatattgaatacttcttaacaaccacaccttttagcatctttattaattggtcaggaagtatgaattctcttgtagagctaaaatgcacttgaactttatgatccaacatgatttacattgaagaaaataaaaatattgattgacaatggagtctctttgaaaggcttaggacaaactgaagctaaataattccgcaatattacataattcattttaattcttataagttgaatggatatgaataaagttctacagagaaacataaatgcctgaaaagtaaaatggttggagcagttagattctatgaagcatggacactccattcccttgtcgtgtccggtgtccgacacgcgttcgtgtcagtgtccgacaccgatatgacactcgtattacgttctatattttgagacattacaggtgtccacgtgtccatgttcgtgtcgtgtccggtgtccgtatcggtgtcggtgcttcataggttagattacaacaatcactaaatcacactttgtgttgacaatgtagaaattttttcataaaatgaaaaatgttacaaccagaggaacaattcattcatgaaagggagatcagaatcggggaactagttatgatgtacaaagtagtgccttgtagtctttatactaccaatatcccaagaacatggttttaaattgcggctgcagtgtggttgcgatgaataaaaaacccttgcgatgcagggaatagcgggaaaatgtgattgatgtggccacaattacgatcaccgcaatacggttgcagtgagtcgaaaagctttacattgccaaccataatttaaaactatgacccagaataaacgtaaacttccacaagcaactgtatgaaaaatgaagccttagtctagggtactatttcaaatcataaatcagtgctccatttttattaatacacatgttaattaa

SEQ ID NO: 12216 - DNA, 1073 bp, Glycine max
  Gm_smallRNAprecursor_5049
atagttattattattttgagtgtttttatggcactggttaataatataaaattgttaaacaaaaaagtaaaacttttattgtcttcaggttataaaaataaaatcatccttaaataattaataacactttatagaagatattgaatacttcttaacaaccacaccttttagcatctttattaattggtcaggaagtatgaattctcttgtagagctaaaatgcacttgaactttatgatccaacatgatttacattgaagaaaataaaaatattgattgacaatggagtctctttgaaaggcttaggacaaactgaagctaaataattccgcaatattacataattcattttaattcttataagttgaatggatatgaataaagttctacagagaaacataaatgcctgaaaagtaaaatggttggagcagttagattctatgaagcatggacactccattcccttgtcgtgtccggtgtccgacacgcgttcgtgtcagtgtccgacaccgatatgacactcgtattacgttctatattttgagacattacaggtgtccacgtgtccatgttcgtgtcgtgtccggtgtccgtatcggtgtcggtgcttcataggttagattacaacaatcactaaatcacactttgtgttgacaatgtagaaattttttcataaaatgaaaaatgttacaaccagaggaacaattcattcatgaaagggagatcagaatcggggaactagttatgatgtacaaagtagtgccttgtagtctttatactaccaatatcccaagaacatggttttaaattgcggctgcagtgtggttgcgatgaataaaaaacccttgcgatgcagggaatagcgggaaaatgtgattgatgtggccacaattacgatcaccgcaatacggttgcagtgagtcgaaaagctttacattgccaaccataatttaaaactatgacccagaataaacgtaaacttccacaagcaactgtatgaaaaatgaagccttagtctagggtactatttcaaatcataaatcagtgctccatttttattaatacacatgtta

SEQ ID NO: 12217 - DNA, 1081 bp, Glycine max
  Gm_smallRNAprecursor_5050
agttattattattttgagtgtttttatggcactggttaataatataaaattgttaaacaaaaaagtaaaacttttattgtcttcaggttataaaaataaaatcatccttaaataattaataacactttatagaagatattgaatacttcttaacaaccacaccttttagcatctttattaattggtcaggaagtatgaattctcttgtagagctaaaatgcacttgaactttatgatccaacatgatttacattgaagaaaataaaaatattgattgacaatggagtctctttgaaaggcttaggacaaactgaagctaaataattccgcaatattacataattcattttaattcttataagttgaatggatatgaataaagttctacagagaaacataaatgcctgaaaagtaaaatggttggagcagttagattctatgaagcatggacactccattcccttgtcgtgtccggtgtccgacacgcgttcgtgtcagtgtccgacaccgatatgacactcgtattacgttctatattttgagacattacaggtgtccacgtgtccatgttcgtgtcgtgtccggtgtccgtatcggtgtcggtgcttcataggttagattacaacaatcactaaatcacactttgtgttgacaatgtagaaattttttcataaaatgaaaaatgttacaaccagaggaacaattcattcatgaaagggagatcagaatcggggaactagttatgatgtacaaagtagtgccttgtagtctttatactaccaatatcccaagaacatggttttaaattgcggctgcagtgtggttgcgatgaataaaaaacccttgcgatgcagggaatagcgggaaaatgtgattgatgtggccacaattacgatcaccgcaatacggttgcagtgagtcgaaaagctttacattgccaaccataatttaaaactatgacccagaataaacgtaaacttccacaagcaactgtatgaaaaatgaagccttagtctagggtactatttcaaatcataaatcagtgctccatttttattaatacacatgttaattaattaac

SEQ ID NO: 12218 - DNA, 1078 bp, Glycine max
  Gm_smallRNAprecursor_5051
tttgatattgaaagggaaaaattactcgatttcaactgtaactgaatgatcaagaaagttatgcaaattccaactgaatgggcctacaaaatatctcttctctcacttttatgtttttatgattttgtttctccccatatggcgacagattttatcattttgtaggcgtgcttatcatttttttgtagactttgataaaataaatatgattgctttgctaccggtatctttctattctaaatcaataaaaaaaaatatttgtatgttaaaatcacattataaatgagttagaatttaattttaatggtattttaaattttatagttgtcaaattaaggttcatttcattttttttacaaattaaatattaaacatgaaaaaaaatatgcaactatagatggaattggcaacaaaaataatctaaaggtctgttaagaatagtcccacatcgggtaattcatgaatatgataagtgcttatatagctgggtagaccacattcttatgaaccggtttttaaggggacctttcggggtaattcatgaatatgataagtgcttatataactgggtagaccacccccttatgaacccctttttaaggggacctattctaaacaaataattcatattactcaaagtaaatatttcaaatgcattttataatttagccatttaggtgtcgttgaactttccttaaatgaaatgtaaaattttagtactagtttataatgatcacgggtggagcagtgagctacaatacaatacttaactaccttatcagagatttccctgaaacgggaatatggctctgtcctcttaggatgggtctatttttcgaacaatttttgctatcctttgaccctgatctttgatagcagccatttttggttccagtcaatacttgctctaatctaactacgccaatttgagtggcagcccttcctagagtgaaagagcaatgtccttcacacactcattgtcaccgaaaagctctcactaactggccaattaaaattaaattaaaaaaaaaaaagcaaagtgcttactcctatcgtgcttctagtcaataatagatca

SEQ ID NO: 12219 - DNA, 1096 bp, Glycine max
  Gm_smallRNAprecursor_5052
cgatggtacaaattcttttttaataaagcaaaaagtttgtacatgtcctgcttgcttcctctttgttaattaatttgtttggcaatttgagtcttattactattaccattaactcttcccccttcgtgaaaaaaaaaattgaaggcaacatagtcttttgattctttactccctgtttaagtttaaattttgacttttaattatttttactcatcacattagatctatgggtccttggctccttgccacttaaatggtgctcaacatgtcatctttatcccatgtgaaacattatgctcacacttgcgggcaaattaggtcatgagtcatgattgaactacgtaagtgaacttgatattgtatccaactcaaaatcttaaagatattaggtgtatgagtccttgcggctaatgtattactcaacatgtccatttctactcatacttgcactccaatactatgtttctttcaaactcatgaatcgtcactgttagaccagtcagctgaatcctcttatgatcaagagctgtaatgcatatcagttttgttatcagtttgaaccgtattttctttgaattaccgtaacagcccttcatcataggaggaatcaactggctggtctaacaatcactctatgcagttttatgttaagattagatttattcgtccaaaaatgaaatctgtttgttccttcctcaaaaaaccttattttccatcctttttttatgttctggtgatgttttcttccacaaataagagcaaattcttaatgaaattaatgttgcagacttgcagttatagttactttttttaaaaaaagcattcatttatgggaattttgatctttagcagttggatctatgttagctaattttccttgaaaaatttattgcttggtgatcttatttttgctgttccacctatgtgcagtattacaatttttttctttctattcatttatagctgatttcagggattcagtaagtaccttggagaaggagttatgctgtcttaaagtgaagcgggatgagatcgttagtaaaatggatgaaaaccggtattgaaaaactctcaatatatggatgcagatgtagtt

SEQ ID NO: 12220 - DNA, 1033 bp, Glycine max
  Gm_smallRNAprecursor_5053
cacttaccaattaatacaatgattttaattttgaaccaaaacaacaacagtaataacaatacatgactcttagatagctataaaatcctaataggaatcctgaagaaaaataaaaacaaaaataaaggagagtagtaaaaagacatggctaagtgagagtaatgtgataaactgataattcaaagaaacaaatgcatattactcccaaagtaacttccaaataagttgagttcatagaaaaaccagtaactgatgcagtatccaaatcagaaaggagttaactgaccatcttaagacccatgggtgggcctacccaccatattaactaacttgtctattcaattgttccaaagctaaaagattttaagcttttaaacagggatttataaattgtgatcctcccaaaaaaaatccctctatgcaaaaacagagcattttgagcacacgacacggacacagacacgtgaacacctgtaatgtccaaaatatagaatgtaatacgggtgtcgtgtcggtgtcggacactgacacggacgcgtgtcggacaccggacacggcaaggggctgaagtgtccgtgcttcatagcacacaacactaatcatctccattgtgatgtaattcactgatctacttagaattgtctagttcagaattacatacttgtggggaaattaaaaactagttttaattggatatcagtcactaccaactctgccaatatctactactcctttatagtgtataatttaattcattgcagttactaaaatccatcaaagatgcctgcggcaggttgaggtcaatgagtacacttagcttgctgaccttctgttggaagccactaaaaagagagcataagcaatatcatcatctaagatgtcaacatttaataattggatccaattactccaaaacatggtctcaacaaggaaaaaagttaattcagaaaaattaacattccccacaaccatatattcaagtttaaacatacctctgaaacatcagcagtaagtttttcccaactctcaatca

SEQ ID NO: 12221 - DNA, 1038 bp, Glycine max
  Gm_smallRNAprecursor_5054
taccaattaatacaatgattttaattttgaaccaaaacaacaacagtaataacaatacatgactcttagatagctataaaatcctaataggaatcctgaagaaaaataaaaacaaaaataaaggagagtagtaaaaagacatggctaagtgagagtaatgtgataaactgataattcaaagaaacaaatgcatattactcccaaagtaacttccaaataagttgagttcatagaaaaaccagtaactgatgcagtatccaaatcagaaaggagttaactgaccatcttaagacccatgggtgggcctacccaccatattaactaacttgtctattcaattgttccaaagctaaaagattttaagcttttaaacagggatttataaattgtgatcctcccaaaaaaaatccctctatgcaaaaacagagcattttgagcacacgacacggacacagacacgtgaacacctgtaatgtccaaaatatagaatgtaatacgggtgtcgtgtcggtgtcggacactgacacggacgcgtgtcggacaccggacacggcaaggggctgaagtgtccgtgcttcatagcacacaacactaatcatctccattgtgatgtaattcactgatctacttagaattgtctagttcagaattacatacttgtggggaaattaaaaactagttttaattggatatcagtcactaccaactctgccaatatctactactcctttatagtgtataatttaattcattgcagttactaaaatccatcaaagatgcctgcggcaggttgaggtcaatgagtacacttagcttgctgaccttctgttggaagccactaaaaagagagcataagcaatatcatcatctaagatgtcaacatttaataattggatccaattactccaaaacatggtctcaacaaggaaaaaagttaattcagaaaaattaacattccccacaaccatatattcaagtttaaacatacctctgaaacatcagcagtaagtttttcccaactctcaatcaactgatata

SEQ ID NO: 12222 - DNA, 1034 bp, Glycine max
  Gm_smallRNAprecursor_5055
accaattaatacaatgattttaattttgaaccaaaacaacaacagtaataacaatacatgactcttagatagctataaaatcctaataggaatcctgaagaaaaataaaaacaaaaataaaggagagtagtaaaaagacatggctaagtgagagtaatgtgataaactgataattcaaagaaacaaatgcatattactcccaaagtaacttccaaataagttgagttcatagaaaaaccagtaactgatgcagtatccaaatcagaaaggagttaactgaccatcttaagacccatgggtgggcctacccaccatattaactaacttgtctattcaattgttccaaagctaaaagattttaagcttttaaacagggatttataaattgtgatcctcccaaaaaaaatccctctatgcaaaaacagagcattttgagcacacgacacggacacagacacgtgaacacctgtaatgtccaaaatatagaatgtaatacgggtgtcgtgtcggtgtcggacactgacacggacgcgtgtcggacaccggacacggcaaggggctgaagtgtccgtgcttcatagcacacaacactaatcatctccattgtgatgtaattcactgatctacttagaattgtctagttcagaattacatacttgtggggaaattaaaaactagttttaattggatatcagtcactaccaactctgccaatatctactactcctttatagtgtataatttaattcattgcagttactaaaatccatcaaagatgcctgcggcaggttgaggtcaatgagtacacttagcttgctgaccttctgttggaagccactaaaaagagagcataagcaatatcatcatctaagatgtcaacatttaataattggatccaattactccaaaacatggtctcaacaaggaaaaaagttaattcagaaaaattaacattccccacaaccatatattcaagtttaaacatacctctgaaacatcagcagtaagtttttcccaactctcaatcaactgat

SEQ ID NO: 12223 - DNA, 1036 bp, Glycine max
  Gm_smallRNAprecursor_5056
accaattaatacaatgattttaattttgaaccaaaacaacaacagtaataacaatacatgactcttagatagctataaaatcctaataggaatcctgaagaaaaataaaaacaaaaataaaggagagtagtaaaaagacatggctaagtgagagtaatgtgataaactgataattcaaagaaacaaatgcatattactcccaaagtaacttccaaataagttgagttcatagaaaaaccagtaactgatgcagtatccaaatcagaaaggagttaactgaccatcttaagacccatgggtgggcctacccaccatattaactaacttgtctattcaattgttccaaagctaaaagattttaagcttttaaacagggatttataaattgtgatcctcccaaaaaaaatccctctatgcaaaaacagagcattttgagcacacgacacggacacagacacgtgaacacctgtaatgtccaaaatatagaatgtaatacgggtgtcgtgtcggtgtcggacactgacacggacgcgtgtcggacaccggacacggcaaggggctgaagtgtccgtgcttcatagcacacaacactaatcatctccattgtgatgtaattcactgatctacttagaattgtctagttcagaattacatacttgtggggaaattaaaaactagttttaattggatatcagtcactaccaactctgccaatatctactactcctttatagtgtataatttaattcattgcagttactaaaatccatcaaagatgcctgcggcaggttgaggtcaatgagtacacttagcttgctgaccttctgttggaagccactaaaaagagagcataagcaatatcatcatctaagatgtcaacatttaataattggatccaattactccaaaacatggtctcaacaaggaaaaaagttaattcagaaaaattaacattccccacaaccatatattcaagtttaaacatacctctgaaacatcagcagtaagtttttcccaactctcaatcaactgatat

SEQ ID NO: 12224 - DNA, 1037 bp, Glycine max
  Gm_smallRNAprecursor_5057
accaattaatacaatgattttaattttgaaccaaaacaacaacagtaataacaatacatgactcttagatagctataaaatcctaataggaatcctgaagaaaaataaaaacaaaaataaaggagagtagtaaaaagacatggctaagtgagagtaatgtgataaactgataattcaaagaaacaaatgcatattactcccaaagtaacttccaaataagttgagttcatagaaaaaccagtaactgatgcagtatccaaatcagaaaggagttaactgaccatcttaagacccatgggtgggcctacccaccatattaactaacttgtctattcaattgttccaaagctaaaagattttaagcttttaaacagggatttataaattgtgatcctcccaaaaaaaatccctctatgcaaaaacagagcattttgagcacacgacacggacacagacacgtgaacacctgtaatgtccaaaatatagaatgtaatacgggtgtcgtgtcggtgtcggacactgacacggacgcgtgtcggacaccggacacggcaaggggctgaagtgtccgtgcttcatagcacacaacactaatcatctccattgtgatgtaattcactgatctacttagaattgtctagttcagaattacatacttgtggggaaattaaaaactagttttaattggatatcagtcactaccaactctgccaatatctactactcctttatagtgtataatttaattcattgcagttactaaaatccatcaaagatgcctgcggcaggttgaggtcaatgagtacacttagcttgctgaccttctgttggaagccactaaaaagagagcataagcaatatcatcatctaagatgtcaacatttaataattggatccaattactccaaaacatggtctcaacaaggaaaaaagttaattcagaaaaattaacattccccacaaccatatattcaagtttaaacatacctctgaaacatcagcagtaagtttttcccaactctcaatcaactgatata

SEQ ID NO: 12225 - DNA, 1037 bp, Glycine max
  Gm_smallRNAprecursor_5058
tttgcaactgctgcgtataccactagcagtttgcttctacaaaatctggattttcattacctctttcgttaagtttaagttttacaccactagtgtctgtacatgcgttaaactatggttctttgaaatgctaacaacgtttagaaacatgtaactacgtaagctatatttagttttctatttggggtgttttaaattcagttcgaaaagtaaactcaattttatgccacgtatggttgctttcaatattatatgtttgcacattaaatcttttgcttgaaaacccaaataagcttgcaaattttaattcaaagatgcactaaatctctagtacctttgagggttatgaaaggatgtgaattgtggcatttggcagcatagtaaaatctctattccagtgatttggtgatacctatgaagcaccaacaccgacacggacaccaaacacgacacggacacgtgaacacctgtaatgtccaaaatatagaacgttgtacgggtgtcgtgtcggtgtcggacactgacacggacgcatgtcggacaccggacacgacaagggactggagtgtccgtgcttcatagggtgatacaatgagcataggattctggagggagctggtcgacaacttgatcagatcacatttttttttcttggggttaaatgccatatatataacagctcccggacccataaagttgtagcccatcgacttcttcgttggagggaatatcaaaatataaaaaaacacttatgccaataaggaaaatgtattcaagtagtattggatcaatttctttgtcatgcaacaagtcgcttatctttatggcagttatccctgattggttgaggtgtcttgcagtggcactctgttgggcactataattaattctctaagtaaaatatctcgggtttgtgctgtctcttgtgtgtgcaagtgtttaattaatttcgtgcaattttggccgtgtaataattcagattatgacacttcatgaggacctttatgaatatcttgattttcacaattttatcacct

SEQ ID NO: 12226 - DNA, 1036 bp, Glycine max
  Gm_smallRNAprecursor_5059
ttgcaactgctgcgtataccactagcagtttgcttctacaaaatctggattttcattacctctttcgttaagtttaagttttacaccactagtgtctgtacatgcgttaaactatggttctttgaaatgctaacaacgtttagaaacatgtaactacgtaagctatatttagttttctatttggggtgttttaaattcagttcgaaaagtaaactcaattttatgccacgtatggttgctttcaatattatatgtttgcacattaaatcttttgcttgaaaacccaaataagcttgcaaattttaattcaaagatgcactaaatctctagtacctttgagggttatgaaaggatgtgaattgtggcatttggcagcatagtaaaatctctattccagtgatttggtgatacctatgaagcaccaacaccgacacggacaccaaacacgacacggacacgtgaacacctgtaatgtccaaaatatagaacgttgtacgggtgtcgtgtcggtgtcggacactgacacggacgcatgtcggacaccggacacgacaagggactggagtgtccgtgcttcatagggtgatacaatgagcataggattctggagggagctggtcgacaacttgatcagatcacatttttttttcttggggttaaatgccatatatataacagctcccggacccataaagttgtagcccatcgacttcttcgttggagggaatatcaaaatataaaaaaacacttatgccaataaggaaaatgtattcaagtagtattggatcaatttctttgtcatgcaacaagtcgcttatctttatggcagttatccctgattggttgaggtgtcttgcagtggcactctgttgggcactataattaattctctaagtaaaatatctcgggtttgtgctgtctcttgtgtgtgcaagtgtttaattaatttcgtgcaattttggccgtgtaataattcagattatgacacttcatgaggacctttatgaatatcttgattttcacaattttatcacct

SEQ ID NO: 12227 - DNA, 1104 bp, Glycine max
  Gm_smallRNAprecursor_5060
ttacttcactcacaccccgccacgtgttccaatcgaacggtcacttctgcatcacgcgccactataaatatctctctctcgtcatccgcaaccccaagcaaaaccctaatccctctttcttcctcttcctcagtagtgcgattttcgattctcttctctgcaactatgcctaaccctaaggtcttcttcgacatgaccatcggcggtcaacctgccggccgcatcgtgatggagctctacgccgacgtgactccgagcaccgccgagaacttccgcgcgctctgcaccggcgagaagggcgccgggcggagcggcaagcccctccactacaaaggctcgtccttccaccgcgtgatcccgaacttcatgtgccagggcggcgacttcaccgccggaaacggcaccggaggcgagtcgatctacggcgccaagttcgccgacgagaacttcgtgaagaagcacactggtcccggcatcctctccatggcgaacgccggtcccggaaccaacggatctcagttcttcatctgcacgacgaagacggagtggctcgacggaaagcacgtcgtgttcggacaggtcgtcgaggggatggacgtcgtcaaggagatagagaaggtcggatccagctccggcaggaccgccaagcctgtcgtcgtcgccgactgtggtcaactctcttagatagacgacgttgaccctaggcttttatctctgtgtcggtggctctgaatgtgtcgtttctttcggtgtcgtttttgccttttttttctctttcccatgtcgtttaggggattgcggtgttatggatatcatttcgaaacccttcccctttgaatccttcctttcctttctaaaatatcagtatcatgtggttcgttcatagagtgaatggagtctgttatgagaaacataaaaaaatatgatgagctaccttcaataaaaattaggacctctattattcgcctagtaattctctttaatcttcgattattttttttatatacgtttagttgtttctgattataaattgtggaaaattggcgtttattaaataccatagtttacgataattagaacctacaactaggaacgttcattggt

SEQ ID NO: 12228 - DNA, 1074 bp, Glycine max
  Gm_smallRNAprecursor_5061
aataattgattaaattctctttttaaaataaataaataaataaatttgatcccgtggttgtgttttttctattcaaaattatcgacatattattttcaatctaaatatgagatataagatattttttttttaacagcaaagattaaggtttgacaagaaaatcaaaataataaaaatatatatattaaaaggaaatttaaaaaatatattacataagttttaaacgaataggagcagtaaattataaacacataataataataataataataataataataattaatcacaatctattattaacgttccggatatatttgtcgcatttttcatacttttagggactaaattttgtattttcatctgttaacgtatttgtcagcggtgtgggaagacaaaaagtcaaaaaaatattatgacaaatatgcacatgtgcttgcaatctgacaatcatttcagacaaatttgtccctggatgcctattttatcaacggtaacggaaagaagttaacgacaacatatatttatcctatcgcacttttttcactttcaggaattaaattctatattttcatctttcaggaacgcatttgttaacgaattacacattaagggacaaaaatgactatttatcccaaatatatatatatatatatatatatatatatatatatatatataaatttaaattttcattaatgatggtgattaaaaactcattaatggtcttgtagaagtaaaactaattcataaatttaaataaataagattgtaaaataatttatatagttaaattcctaaatataatgttacaaaactttaaaaaaaacaagagaatatattttaatattttttaagacatattaattttaagaattttattttatattccattatttaaagacatcagtaagattgataaattaattacaacagcttctaaattaaaataaattataaaattatgaaaaatttaattaaccattattttaaatgtcttacttttaattttgatataaaactaacttttacattttgagcattatcagaacaattaaacgccacctaacagaa

SEQ ID NO: 12229 - DNA, 1213 bp, Glycine max
  Gm_smallRNAprecursor_5062
caataacaagtacagtttagaactcaatccgaattataaccactgacaaagggtccatcgaagaaaatttagccagcgttggccccacttggagagtccaagaaattgacagtttaaactaatgattgcaaccttcctccatggaaaatggaatttccacaattcaacattaagagagttgagagaaattaaaagagaagaggagattgagattgagattgagaaaatcaatattattcaaagctgttaggcactaaccgactaaactatcaactaataacagactaactactaactacagtagttagaatatcagttagctgacagaaacaaaaaagaaacactgcaagtaatgtatacactcttgtactccctcacaagctcatgaggggttggaagaatgtctttcaactactctgagcttgaacctgaatgaaagaaatgaagaaggggatagtattaaattttatagtgcaaccaaggcatccgaaaggtccccttaaaaaccggttcataagggggtggtctacccagctatataagcacttatcatgttcatgaattacccgatgtgggactattcttaacacgccccctcgagccagggctcgtcaccacaaagcgagggctggcggcacccactggacagaagtagaagatggctctgataccatattaaattttatagtgcaaccaaggcatccgaaaggtccccttaaaaatcggttcataagggggtggtctacccagctatataagcacttatcatgttcatgaattacccgatgtgggactattcttaacagatagagccttggtcagaatatcagccagttgatccatggcaggaacatgaacaacattgaattgtttggtgagaactttctctccgacaaaaagagatccaggtctatatgcttggttcttgtgtgaagaacaggatgatgagctaatgaaacagtgctggtgttgtcacacagaataatagaagtagtgtaagctactgagagttcagaaagaagagactgaatctaggtaacttctgctgcaataagagccatgcttcaatgttctacctcagtactagaccttgcaacaactaattacttcttagaccaccaagagatgagattaggtccaagaaaaatagcaactccagaagtagcctgataactgctaaataagagttgttttttttttatgaaaatagaat

SEQ ID NO: 12230 - DNA, 1142 bp, Glycine max
  Gm_smallRNAprecursor_5063
tgtaacattggtgaggaatcaaaatcccacgtgggtgtcatggtttagttcacgtgatgaaagaccagcttgttgtgtggcagacatgcgggtgcacggctctttcttactttggacatcaaaacaaaaacatataatggagatcttcatcaaatccttatccctttataatcaaacgaataatcactcttttcaatggcataagtctttagatctgacggaaaaataataaaataaaaataaaaatattgagaaagtatttaaaataataaagtgttgaaatattatctcccttagcgtaattaggatgcatcatgtcttgtcaaatttggtcccaaaatatggattttttctaccgttgaaacgctcctaaatttactctccctctccctttaaatccttatcataaaatgatttggctacgcgtactaaaattctcaaccccatgtagaaagaatataagaaggccattattttcgttccaatatgctgcctttgcctgcatttgcacctgcactttacttggttttctctgttcaacaacttagacgtacgtcttagttgccacaaaagcatgtcaatgaagaaggaaagagattacataatatgtgtgggaattaatggacgagaaaccaagcacgaggtgcaggtgcatctgcaggtgaatgacatcttggctaaatatatcaacaattcaccaactttagttttgtgtgggttgctcctgagcaagaagggtaagaaatattgacatgatatagaatggttgaccaataactatgtttcttaagtaagtatagtaaaggtttgatttttaggtttgtgtgtatgaaaaaattaatatttgttaaagatatcttatcggtctcttaaaatagatcttaatatgttgttacttaattaccgtacgtacttgtgcagatccagatctgaatatgggagtgaagttctctctatttttatttatgtcaaaattttgttttaaaaaaggttcaatttgaggacatgacctataaattctagccacccttttgaaacaatgaatagttttgaagagcttaattatcaaaatctgaccagagatggtgtatatgcattaggaatttggttaatttagtctgagggtatgaaactatccacat

SEQ ID NO: 12231 - DNA, 1062 bp, Glycine max
  Gm_smallRNAprecursor_5064
caaaaaatatttaaagaaaaatatataagaaaaataataattaatgtagttaaaaattaaaaaaatgatcttaaaaaaaatttctgaaaaaatcttgtaactagagaccgagaaattactatatagttttttcaactcaaaaacaattatgctccaatctccaaatgaatcaagtagtaggctcaccaagccaattccatgagatcttcttcgatcccctacatacacaagcaacttgattccatcctcaagaagagcaggaatccccacttcaaggtttgtcatccaatcttgcagcagagcattgtgcattgttgtactgcataaaacatactgcaagtcatccctcacacctaaagcactcttcactttctgctggtttaacaacgtctccacgttactaaagtcatagcacaattctccctcacacttctttatgtcatagtattgcactttgtgtatcagcacctatgaagcaccgacacggacacagacacggacaccggacacgacacggatacggacacgtggacacctgtaatgttcaaaatatagaacttaatacgggtgtcgtgtcggtgtcggacactgacacggacgcgtgtcggacaccggacacggcaaagagctgaagtgtccgtacttcatagatcagcacaatgcaataagtaaactggacttcaccattttatcctatccaacacttaagtaggaacaaaaaggcattttttttcattattacttactaagtatgttttgacaaataactaacgcagtcgcgcaactttgtccaccttgattttctataaaataaaacacaaacaacatcacacagtgaaacaatatacattagtaaaaaagggatgtgtgagtgataaagggaaaaagaacttgtaccgcaagtttttgcggcttgttcacaccctgggattaacttgctgatattgtcgtacgcagcctttgtaattattccgttgtctaacgcaaaatctgggtatgctgggtattgaattgcaggatttgttaacccattaccaatagcaaaaccctggtgttatatca

SEQ ID NO: 12232 - DNA, 1059 bp, Glycine max
  Gm_smallRNAprecursor_5065
aaaatatttaaagaaaaatatataagaaaaataataattaatgtagttaaaaattaaaaaaatgatcttaaaaaaaatttctgaaaaaatcttgtaactagagaccgagaaattactatatagttttttcaactcaaaaacaattatgctccaatctccaaatgaatcaagtagtaggctcaccaagccaattccatgagatcttcttcgatcccctacatacacaagcaacttgattccatcctcaagaagagcaggaatccccacttcaaggtttgtcatccaatcttgcagcagagcattgtgcattgttgtactgcataaaacatactgcaagtcatccctcacacctaaagcactcttcactttctgctggtttaacaacgtctccacgttactaaagtcatagcacaattctccctcacacttctttatgtcatagtattgcactttgtgtatcagcacctatgaagcaccgacacggacacagacacggacaccggacacgacacggatacggacacgtggacacctgtaatgttcaaaatatagaacttaatacgggtgtcgtgtcggtgtcggacactgacacggacgcgtgtcggacaccggacacggcaaagagctgaagtgtccgtacttcatagatcagcacaatgcaataagtaaactggacttcaccattttatcctatccaacacttaagtaggaacaaaaaggcattttttttcattattacttactaagtatgttttgacaaataactaacgcagtcgcgcaactttgtccaccttgattttctataaaataaaacacaaacaacatcacacagtgaaacaatatacattagtaaaaaagggatgtgtgagtgataaagggaaaaagaacttgtaccgcaagtttttgcggcttgttcacaccctgggattaacttgctgatattgtcgtacgcagcctttgtaattattccgttgtctaacgcaaaatctgggtatgctgggtattgaattgcaggatttgttaacccattaccaatagcaaaaccctggtgttatatca

SEQ ID NO: 12233 - DNA, 1064 bp, Glycine max
  Gm_smallRNAprecursor_5066
aaaatatttaaagaaaaatatataagaaaaataataattaatgtagttaaaaattaaaaaaatgatcttaaaaaaaatttctgaaaaaatcttgtaactagagaccgagaaattactatatagttttttcaactcaaaaacaattatgctccaatctccaaatgaatcaagtagtaggctcaccaagccaattccatgagatcttcttcgatcccctacatacacaagcaacttgattccatcctcaagaagagcaggaatccccacttcaaggtttgtcatccaatcttgcagcagagcattgtgcattgttgtactgcataaaacatactgcaagtcatccctcacacctaaagcactcttcactttctgctggtttaacaacgtctccacgttactaaagtcatagcacaattctccctcacacttctttatgtcatagtattgcactttgtgtatcagcacctatgaagcaccgacacggacacagacacggacaccggacacgacacggatacggacacgtggacacctgtaatgttcaaaatatagaacttaatacgggtgtcgtgtcggtgtcggacactgacacggacgcgtgtcggacaccggacacggcaaagagctgaagtgtccgtacttcatagatcagcacaatgcaataagtaaactggacttcaccattttatcctatccaacacttaagtaggaacaaaaaggcattttttttcattattacttactaagtatgttttgacaaataactaacgcagtcgcgcaactttgtccaccttgattttctataaaataaaacacaaacaacatcacacagtgaaacaatatacattagtaaaaaagggatgtgtgagtgataaagggaaaaagaacttgtaccgcaagtttttgcggcttgttcacaccctgggattaacttgctgatattgtcgtacgcagcctttgtaattattccgttgtctaacgcaaaatctgggtatgctgggtattgaattgcaggatttgttaacccattaccaatagcaaaaccctggtgttatatcatatga

SEQ ID NO: 12234 - DNA, 1065 bp, Glycine max
  Gm_smallRNAprecursor_5067
aaaatatttaaagaaaaatatataagaaaaataataattaatgtagttaaaaattaaaaaaatgatcttaaaaaaaatttctgaaaaaatcttgtaactagagaccgagaaattactatatagttttttcaactcaaaaacaattatgctccaatctccaaatgaatcaagtagtaggctcaccaagccaattccatgagatcttcttcgatcccctacatacacaagcaacttgattccatcctcaagaagagcaggaatccccacttcaaggtttgtcatccaatcttgcagcagagcattgtgcattgttgtactgcataaaacatactgcaagtcatccctcacacctaaagcactcttcactttctgctggtttaacaacgtctccacgttactaaagtcatagcacaattctccctcacacttctttatgtcatagtattgcactttgtgtatcagcacctatgaagcaccgacacggacacagacacggacaccggacacgacacggatacggacacgtggacacctgtaatgttcaaaatatagaacttaatacgggtgtcgtgtcggtgtcggacactgacacggacgcgtgtcggacaccggacacggcaaagagctgaagtgtccgtacttcatagatcagcacaatgcaataagtaaactggacttcaccattttatcctatccaacacttaagtaggaacaaaaaggcattttttttcattattacttactaagtatgttttgacaaataactaacgcagtcgcgcaactttgtccaccttgattttctataaaataaaacacaaacaacatcacacagtgaaacaatatacattagtaaaaaagggatgtgtgagtgataaagggaaaaagaacttgtaccgcaagtttttgcggcttgttcacaccctgggattaacttgctgatattgtcgtacgcagcctttgtaattattccgttgtctaacgcaaaatctgggtatgctgggtattgaattgcaggatttgttaacccattaccaatagcaaaaccctggtgttatatcatatgaa

SEQ ID NO: 12235 - DNA, 1066 bp, Glycine max
  Gm_smallRNAprecursor_5068
aaaatatttaaagaaaaatatataagaaaaataataattaatgtagttaaaaattaaaaaaatgatcttaaaaaaaatttctgaaaaaatcttgtaactagagaccgagaaattactatatagttttttcaactcaaaaacaattatgctccaatctccaaatgaatcaagtagtaggctcaccaagccaattccatgagatcttcttcgatcccctacatacacaagcaacttgattccatcctcaagaagagcaggaatccccacttcaaggtttgtcatccaatcttgcagcagagcattgtgcattgttgtactgcataaaacatactgcaagtcatccctcacacctaaagcactcttcactttctgctggtttaacaacgtctccacgttactaaagtcatagcacaattctccctcacacttctttatgtcatagtattgcactttgtgtatcagcacctatgaagcaccgacacggacacagacacggacaccggacacgacacggatacggacacgtggacacctgtaatgttcaaaatatagaacttaatacgggtgtcgtgtcggtgtcggacactgacacggacgcgtgtcggacaccggacacggcaaagagctgaagtgtccgtacttcatagatcagcacaatgcaataagtaaactggacttcaccattttatcctatccaacacttaagtaggaacaaaaaggcattttttttcattattacttactaagtatgttttgacaaataactaacgcagtcgcgcaactttgtccaccttgattttctataaaataaaacacaaacaacatcacacagtgaaacaatatacattagtaaaaaagggatgtgtgagtgataaagggaaaaagaacttgtaccgcaagtttttgcggcttgttcacaccctgggattaacttgctgatattgtcgtacgcagcctttgtaattattccgttgtctaacgcaaaatctgggtatgctgggtattgaattgcaggatttgttaacccattaccaatagcaaaaccctggtgttatatcatatgaat

SEQ ID NO: 12236 - DNA, 1093 bp, Glycine max
  Gm_smallRNAprecursor_5069
aaaatatttaaagaaaaatatataagaaaaataataattaatgtagttaaaaattaaaaaaatgatcttaaaaaaaatttctgaaaaaatcttgtaactagagaccgagaaattactatatagttttttcaactcaaaaacaattatgctccaatctccaaatgaatcaagtagtaggctcaccaagccaattccatgagatcttcttcgatcccctacatacacaagcaacttgattccatcctcaagaagagcaggaatccccacttcaaggtttgtcatccaatcttgcagcagagcattgtgcattgttgtactgcataaaacatactgcaagtcatccctcacacctaaagcactcttcactttctgctggtttaacaacgtctccacgttactaaagtcatagcacaattctccctcacacttctttatgtcatagtattgcactttgtgtatcagcacctatgaagcaccgacacggacacagacacggacaccggacacgacacggatacggacacgtggacacctgtaatgttcaaaatatagaacttaatacgggtgtcgtgtcggtgtcggacactgacacggacgcgtgtcggacaccggacacggcaaagagctgaagtgtccgtacttcatagatcagcacaatgcaataagtaaactggacttcaccattttatcctatccaacacttaagtaggaacaaaaaggcattttttttcattattacttactaagtatgttttgacaaataactaacgcagtcgcgcaactttgtccaccttgattttctataaaataaaacacaaacaacatcacacagtgaaacaatatacattagtaaaaaagggatgtgtgagtgataaagggaaaaagaacttgtaccgcaagtttttgcggcttgttcacaccctgggattaacttgctgatattgtcgtacgcagcctttgtaattattccgttgtctaacgcaaaatctgggtatgctgggtattgaattgcaggatttgttaacccattaccaatagcaaaaccctggtgttatatcatatgaatcaatacaggcaaaagcaagaaaaaata

SEQ ID NO: 12237 - DNA, 1094 bp, Glycine max
  Gm_smallRNAprecursor_5070
aaaatatttaaagaaaaatatataagaaaaataataattaatgtagttaaaaattaaaaaaatgatcttaaaaaaaatttctgaaaaaatcttgtaactagagaccgagaaattactatatagttttttcaactcaaaaacaattatgctccaatctccaaatgaatcaagtagtaggctcaccaagccaattccatgagatcttcttcgatcccctacatacacaagcaacttgattccatcctcaagaagagcaggaatccccacttcaaggtttgtcatccaatcttgcagcagagcattgtgcattgttgtactgcataaaacatactgcaagtcatccctcacacctaaagcactcttcactttctgctggtttaacaacgtctccacgttactaaagtcatagcacaattctccctcacacttctttatgtcatagtattgcactttgtgtatcagcacctatgaagcaccgacacggacacagacacggacaccggacacgacacggatacggacacgtggacacctgtaatgttcaaaatatagaacttaatacgggtgtcgtgtcggtgtcggacactgacacggacgcgtgtcggacaccggacacggcaaagagctgaagtgtccgtacttcatagatcagcacaatgcaataagtaaactggacttcaccattttatcctatccaacacttaagtaggaacaaaaaggcattttttttcattattacttactaagtatgttttgacaaataactaacgcagtcgcgcaactttgtccaccttgattttctataaaataaaacacaaacaacatcacacagtgaaacaatatacattagtaaaaaagggatgtgtgagtgataaagggaaaaagaacttgtaccgcaagtttttgcggcttgttcacaccctgggattaacttgctgatattgtcgtacgcagcctttgtaattattccgttgtctaacgcaaaatctgggtatgctgggtattgaattgcaggatttgttaacccattaccaatagcaaaaccctggtgttatatcatatgaatcaatacaggcaaaagcaagaaaaaataa

SEQ ID NO: 12238 - DNA, 1094 bp, Glycine max; identical to SEQ ID NO: 12237
  Gm_smallRNAprecursor_5071

SEQ ID NO: 12239 - DNA, 1053 bp, Glycine max
  Gm_smallRNAprecursor_5072
agaaaaatatataagaaaaataataattaatgtagttaaaaattaaaaaaatgatcttaaaaaaaatttctgaaaaaatcttgtaactagagaccgagaaattactatatagttttttcaactcaaaaacaattatgctccaatctccaaatgaatcaagtagtaggctcaccaagccaattccatgagatcttcttcgatcccctacatacacaagcaacttgattccatcctcaagaagagcaggaatccccacttcaaggtttgtcatccaatcttgcagcagagcattgtgcattgttgtactgcataaaacatactgcaagtcatccctcacacctaaagcactcttcactttctgctggtttaacaacgtctccacgttactaaagtcatagcacaattctccctcacacttctttatgtcatagtattgcactttgtgtatcagcacctatgaagcaccgacacggacacagacacggacaccggacacgacacggatacggacacgtggacacctgtaatgttcaaaatatagaacttaatacgggtgtcgtgtcggtgtcggacactgacacggacgcgtgtcggacaccggacacggcaaagagctgaagtgtccgtacttcatagatcagcacaatgcaataagtaaactggacttcaccattttatcctatccaacacttaagtaggaacaaaaaggcattttttttcattattacttactaagtatgttttgacaaataactaacgcagtcgcgcaactttgtccaccttgattttctataaaataaaacacaaacaacatcacacagtgaaacaatatacattagtaaaaaagggatgtgtgagtgataaagggaaaaagaacttgtaccgcaagtttttgcggcttgttcacaccctgggattaacttgctgatattgtcgtacgcagcctttgtaattattccgttgtctaacgcaaaatctgggtatgctgggtattgaattgcaggatttgttaacccattaccaatagcaaaaccctggtgttatatcatatga

SEQ ID NO: 12240 - DNA, 1054 bp, Glycine max
  Gm_smallRNAprecursor_5073
agaaaaatatataagaaaaataataattaatgtagttaaaaattaaaaaaatgatcttaaaaaaaatttctgaaaaaatcttgtaactagagaccgagaaattactatatagttttttcaactcaaaaacaattatgctccaatctccaaatgaatcaagtagtaggctcaccaagccaattccatgagatcttcttcgatcccctacatacacaagcaacttgattccatcctcaagaagagcaggaatccccacttcaaggtttgtcatccaatcttgcagcagagcattgtgcattgttgtactgcataaaacatactgcaagtcatccctcacacctaaagcactcttcactttctgctggtttaacaacgtctccacgttactaaagtcatagcacaattctccctcacacttctttatgtcatagtattgcactttgtgtatcagcacctatgaagcaccgacacggacacagacacggacaccggacacgacacggatacggacacgtggacacctgtaatgttcaaaatatagaacttaatacgggtgtcgtgtcggtgtcggacactgacacggacgcgtgtcggacaccggacacggcaaagagctgaagtgtccgtacttcatagatcagcacaatgcaataagtaaactggacttcaccattttatcctatccaacacttaagtaggaacaaaaaggcattttttttcattattacttactaagtatgttttgacaaataactaacgcagtcgcgcaactttgtccaccttgattttctataaaataaaacacaaacaacatcacacagtgaaacaatatacattagtaaaaaagggatgtgtgagtgataaagggaaaaagaacttgtaccgcaagtttttgcggcttgttcacaccctgggattaacttgctgatattgtcgtacgcagcctttgtaattattccgttgtctaacgcaaaatctgggtatgctgggtattgaattgcaggatttgttaacccattaccaatagcaaaaccctggtgttatatcatatgaa

SEQ ID NO: 12241 - DNA, 1055 bp, Glycine max
  Gm_smallRNAprecursor_5074
agaaaaatatataagaaaaataataattaatgtagttaaaaattaaaaaaatgatcttaaaaaaaatttctgaaaaaatcttgtaactagagaccgagaaattactatatagttttttcaactcaaaaacaattatgctccaatctccaaatgaatcaagtagtaggctcaccaagccaattccatgagatcttcttcgatcccctacatacacaagcaacttgattccatcctcaagaagagcaggaatccccacttcaaggtttgtcatccaatcttgcagcagagcattgtgcattgttgtactgcataaaacatactgcaagtcatccctcacacctaaagcactcttcactttctgctggtttaacaacgtctccacgttactaaagtcatagcacaattctccctcacacttctttatgtcatagtattgcactttgtgtatcagcacctatgaagcaccgacacggacacagacacggacaccggacacgacacggatacggacacgtggacacctgtaatgttcaaaatatagaacttaatacgggtgtcgtgtcggtgtcggacactgacacggacgcgtgtcggacaccggacacggcaaagagctgaagtgtccgtacttcatagatcagcacaatgcaataagtaaactggacttcaccattttatcctatccaacacttaagtaggaacaaaaaggcattttttttcattattacttactaagtatgttttgacaaataactaacgcagtcgcgcaactttgtccaccttgattttctataaaataaaacacaaacaacatcacacagtgaaacaatatacattagtaaaaaagggatgtgtgagtgataaagggaaaaagaacttgtaccgcaagtttttgcggcttgttcacaccctgggattaacttgctgatattgtcgtacgcagcctttgtaattattccgttgtctaacgcaaaatctgggtatgctgggtattgaattgcaggatttgttaacccattaccaatagcaaaaccctggtgttatatcatatgaat

SEQ ID NO: 12242 - DNA, 1082 bp, Glycine max
  Gm_smallRNAprecursor_5075
agaaaaatatataagaaaaataataattaatgtagttaaaaattaaaaaaatgatcttaaaaaaaatttctgaaaaaatcttgtaactagagaccgagaaattactatatagttttttcaactcaaaaacaattatgctccaatctccaaatgaatcaagtagtaggctcaccaagccaattccatgagatcttcttcgatcccctacatacacaagcaacttgattccatcctcaagaagagcaggaatccccacttcaaggtttgtcatccaatcttgcagcagagcattgtgcattgttgtactgcataaaacatactgcaagtcatccctcacacctaaagcactcttcactttctgctggtttaacaacgtctccacgttactaaagtcatagcacaattctccctcacacttctttatgtcatagtattgcactttgtgtatcagcacctatgaagcaccgacacggacacagacacggacaccggacacgacacggatacggacacgtggacacctgtaatgttcaaaatatagaacttaatacgggtgtcgtgtcggtgtcggacactgacacggacgcgtgtcggacaccggacacggcaaagagctgaagtgtccgtacttcatagatcagcacaatgcaataagtaaactggacttcaccattttatcctatccaacacttaagtaggaacaaaaaggcattttttttcattattacttactaagtatgttttgacaaataactaacgcagtcgcgcaactttgtccaccttgattttctataaaataaaacacaaacaacatcacacagtgaaacaatatacattagtaaaaaagggatgtgtgagtgataaagggaaaaagaacttgtaccgcaagtttttgcggcttgttcacaccctgggattaacttgctgatattgtcgtacgcagcctttgtaattattccgttgtctaacgcaaaatctgggtatgctgggtattgaattgcaggatttgttaacccattaccaatagcaaaaccctggtgttatatcatatgaatcaatacaggcaaaagcaagaaaaaata

SEQ ID NO: 12243 - DNA, 1088 bp, Glycine max
  Gm_smallRNAprecursor_5076
agaaaaatatataagaaaaataataattaatgtagttaaaaattaaaaaaatgatcttaaaaaaaatttctgaaaaaatcttgtaactagagaccgagaaattactatatagttttttcaactcaaaaacaattatgctccaatctccaaatgaatcaagtagtaggctcaccaagccaattccatgagatcttcttcgatcccctacatacacaagcaacttgattccatcctcaagaagagcaggaatccccacttcaaggtttgtcatccaatcttgcagcagagcattgtgcattgttgtactgcataaaacatactgcaagtcatccctcacacctaaagcactcttcactttctgctggtttaacaacgtctccacgttactaaagtcatagcacaattctccctcacacttctttatgtcatagtattgcactttgtgtatcagcacctatgaagcaccgacacggacacagacacggacaccggacacgacacggatacggacacgtggacacctgtaatgttcaaaatatagaacttaatacgggtgtcgtgtcggtgtcggacactgacacggacgcgtgtcggacaccggacacggcaaagagctgaagtgtccgtacttcatagatcagcacaatgcaataagtaaactggacttcaccattttatcctatccaacacttaagtaggaacaaaaaggcattttttttcattattacttactaagtatgttttgacaaataactaacgcagtcgcgcaactttgtccaccttgattttctataaaataaaacacaaacaacatcacacagtgaaacaatatacattagtaaaaaagggatgtgtgagtgataaagggaaaaagaacttgtaccgcaagtttttgcggcttgttcacaccctgggattaacttgctgatattgtcgtacgcagcctttgtaattattccgttgtctaacgcaaaatctgggtatgctgggtattgaattgcaggatttgttaacccattaccaatagcaaaaccctggtgttatatcatatgaatcaatacaggcaaaagcaagaaaaaataattcat

SEQ ID NO: 12244 - DNA, 1088 bp, Glycine max; identical to SEQ ID NO: 12243
  Gm_smallRNAprecursor_5077

SEQ ID NO: 12245 - DNA, 1089 bp, Glycine max
  Gm_smallRNAprecursor_5078
agaaaaatatataagaaaaataataattaatgtagttaaaaattaaaaaaatgatcttaaaaaaaatttctgaaaaaatcttgtaactagagaccgagaaattactatatagttttttcaactcaaaaacaattatgctccaatctccaaatgaatcaagtagtaggctcaccaagccaattccatgagatcttcttcgatcccctacatacacaagcaacttgattccatcctcaagaagagcaggaatccccacttcaaggtttgtcatccaatcttgcagcagagcattgtgcattgttgtactgcataaaacatactgcaagtcatccctcacacctaaagcactcttcactttctgctggtttaacaacgtctccacgttactaaagtcatagcacaattctccctcacacttctttatgtcatagtattgcactttgtgtatcagcacctatgaagcaccgacacggacacagacacggacaccggacacgacacggatacggacacgtggacacctgtaatgttcaaaatatagaacttaatacgggtgtcgtgtcggtgtcggacactgacacggacgcgtgtcggacaccggacacggcaaagagctgaagtgtccgtacttcatagatcagcacaatgcaataagtaaactggacttcaccattttatcctatccaacacttaagtaggaacaaaaaggcattttttttcattattacttactaagtatgttttgacaaataactaacgcagtcgcgcaactttgtccaccttgattttctataaaataaaacacaaacaacatcacacagtgaaacaatatacattagtaaaaaagggatgtgtgagtgataaagggaaaaagaacttgtaccgcaagtttttgcggcttgttcacaccctgggattaacttgctgatattgtcgtacgcagcctttgtaattattccgttgtctaacgcaaaatctgggtatgctgggtattgaattgcaggatttgttaacccattaccaatagcaaaaccctggtgttatatcatatgaatcaatacaggcaaaagcaagaaaaaataattcatt

SEQ ID NO: 12246 - DNA, 1089 bp, Glycine max; identical to SEQ ID NO: 12245
  Gm_smallRNAprecursor_5079

SEQ ID NO: 12247 - DNA, 1090 bp, Glycine max
  Gm_smallRNAprecursor_5080
agaaaaatatataagaaaaataataattaatgtagttaaaaattaaaaaaatgatcttaaaaaaaatttctgaaaaaatcttgtaactagagaccgagaaattactatatagttttttcaactcaaaaacaattatgctccaatctccaaatgaatcaagtagtaggctcaccaagccaattccatgagatcttcttcgatcccctacatacacaagcaacttgattccatcctcaagaagagcaggaatccccacttcaaggtttgtcatccaatcttgcagcagagcattgtgcattgttgtactgcataaaacatactgcaagtcatccctcacacctaaagcactcttcactttctgctggtttaacaacgtctccacgttactaaagtcatagcacaattctccctcacacttctttatgtcatagtattgcactttgtgtatcagcacctatgaagcaccgacacggacacagacacggacaccggacacgacacggatacggacacgtggacacctgtaatgttcaaaatatagaacttaatacgggtgtcgtgtcggtgtcggacactgacacggacgcgtgtcggacaccggacacggcaaagagctgaagtgtccgtacttcatagatcagcacaatgcaataagtaaactggacttcaccattttatcctatccaacacttaagtaggaacaaaaaggcattttttttcattattacttactaagtatgttttgacaaataactaacgcagtcgcgcaactttgtccaccttgattttctataaaataaaacacaaacaacatcacacagtgaaacaatatacattagtaaaaaagggatgtgtgagtgataaagggaaaaagaacttgtaccgcaagtttttgcggcttgttcacaccctgggattaacttgctgatattgtcgtacgcagcctttgtaattattccgttgtctaacgcaaaatctgggtatgctgggtattgaattgcaggatttgttaacccattaccaatagcaaaaccctggtgttatatcatatgaatcaatacaggcaaaagcaagaaaaaataattcatta

SEQ ID NO: 12248 - DNA, 1033 bp, Glycine max
  Gm_smallRNAprecursor_5081
atgatcttaaaaaaaatttctgaaaaaatcttgtaactagagaccgagaaattactatatagttttttcaactcaaaaacaattatgctccaatctccaaatgaatcaagtagtaggctcaccaagccaattccatgagatcttcttcgatcccctacatacacaagcaacttgattccatcctcaagaagagcaggaatccccacttcaaggtttgtcatccaatcttgcagcagagcattgtgcattgttgtactgcataaaacatactgcaagtcatccctcacacctaaagcactcttcactttctgctggtttaacaacgtctccacgttactaaagtcatagcacaattctccctcacacttctttatgtcatagtattgcactttgtgtatcagcacctatgaagcaccgacacggacacagacacggacaccggacacgacacggatacggacacgtggacacctgtaatgttcaaaatatagaacttaatacgggtgtcgtgtcggtgtcggacactgacacggacgcgtgtcggacaccggacacggcaaagagctgaagtgtccgtacttcatagatcagcacaatgcaataagtaaactggacttcaccattttatcctatccaacacttaagtaggaacaaaaaggcattttttttcattattacttactaagtatgttttgacaaataactaacgcagtcgcgcaactttgtccaccttgattttctataaaataaaacacaaacaacatcacacagtgaaacaatatacattagtaaaaaagggatgtgtgagtgataaagggaaaaagaacttgtaccgcaagtttttgcggcttgttcacaccctgggattaacttgctgatattgtcgtacgcagcctttgtaattattccgttgtctaacgcaaaatctgggtatgctgggtattgaattgcaggatttgttaacccattaccaatagcaaaaccctggtgttatatcatatgaatcaatacaggcaaaagcaagaaaaaataa

SEQ ID NO: 12249 - DNA, 1038 bp, Glycine max
  Gm_smallRNAprecursor_5082
tcttaaaaaaaatttctgaaaaaatcttgtaactagagaccgagaaattactatatagttttttcaactcaaaaacaattatgctccaatctccaaatgaatcaagtagtaggctcaccaagccaattccatgagatcttcttcgatcccctacatacacaagcaacttgattccatcctcaagaagagcaggaatccccacttcaaggtttgtcatccaatcttgcagcagagcattgtgcattgttgtactgcataaaacatactgcaagtcatccctcacacctaaagcactcttcactttctgctggtttaacaacgtctccacgttactaaagtcatagcacaattctccctcacacttctttatgtcatagtattgcactttgtgtatcagcacctatgaagcaccgacacggacacagacacggacaccggacacgacacggatacggacacgtggacacctgtaatgttcaaaatatagaacttaatacgggtgtcgtgtcggtgtcggacactgacacggacgcgtgtcggacaccggacacggcaaagagctgaagtgtccgtacttcatagatcagcacaatgcaataagtaaactggacttcaccattttatcctatccaacacttaagtaggaacaaaaaggcattttttttcattattacttactaagtatgttttgacaaataactaacgcagtcgcgcaactttgtccaccttgattttctataaaataaaacacaaacaacatcacacagtgaaacaatatacattagtaaaaaagggatgtgtgagtgataaagggaaaaagaacttgtaccgcaagtttttgcggcttgttcacaccctgggattaacttgctgatattgtcgtacgcagcctttgtaattattccgttgtctaacgcaaaatctgggtatgctgggtattgaattgcaggatttgttaacccattaccaatagcaaaaccctggtgttatatcatatgaatcaatacaggcaaaagcaagaaaaaataattcattata

SEQ ID NO: 12250 - DNA, 1034 bp, Glycine max
  Gm_smallRNAprecursor_5083
cttaaaaaaaatttctgaaaaaatcttgtaactagagaccgagaaattactatatagttttttcaactcaaaaacaattatgctccaatctccaaatgaatcaagtagtaggctcaccaagccaattccatgagatcttcttcgatcccctacatacacaagcaacttgattccatcctcaagaagagcaggaatccccacttcaaggtttgtcatccaatcttgcagcagagcattgtgcattgttgtactgcataaaacatactgcaagtcatccctcacacctaaagcactcttcactttctgctggtttaacaacgtctccacgttactaaagtcatagcacaattctccctcacacttctttatgtcatagtattgcactttgtgtatcagcacctatgaagcaccgacacggacacagacacggacaccggacacgacacggatacggacacgtggacacctgtaatgttcaaaatatagaacttaatacgggtgtcgtgtcggtgtcggacactgacacggacgcgtgtcggacaccggacacggcaaagagctgaagtgtccgtacttcatagatcagcacaatgcaataagtaaactggacttcaccattttatcctatccaacacttaagtaggaacaaaaaggcattttttttcattattacttactaagtatgttttgacaaataactaacgcagtcgcgcaactttgtccaccttgattttctataaaataaaacacaaacaacatcacacagtgaaacaatatacattagtaaaaaagggatgtgtgagtgataaagggaaaaagaacttgtaccgcaagtttttgcggcttgttcacaccctgggattaacttgctgatattgtcgtacgcagcctttgtaattattccgttgtctaacgcaaaatctgggtatgctgggtattgaattgcaggatttgttaacccattaccaatagcaaaaccctggtgttatatcatatgaatcaatacaggcaaaagcaagaaaaaataattcatt

SEQ ID NO: 12251 - DNA, 1036 bp, Glycine max
  Gm_smallRNAprecursor_5084
cttaaaaaaaatttctgaaaaaatcttgtaactagagaccgagaaattactatatagttttttcaactcaaaaacaattatgctccaatctccaaatgaatcaagtagtaggctcaccaagccaattccatgagatcttcttcgatcccctacatacacaagcaacttgattccatcctcaagaagagcaggaatccccacttcaaggtttgtcatccaatcttgcagcagagcattgtgcattgttgtactgcataaaacatactgcaagtcatccctcacacctaaagcactcttcactttctgctggtttaacaacgtctccacgttactaaagtcatagcacaattctccctcacacttctttatgtcatagtattgcactttgtgtatcagcacctatgaagcaccgacacggacacagacacggacaccggacacgacacggatacggacacgtggacacctgtaatgttcaaaatatagaacttaatacgggtgtcgtgtcggtgtcggacactgacacggacgcgtgtcggacaccggacacggcaaagagctgaagtgtccgtacttcatagatcagcacaatgcaataagtaaactggacttcaccattttatcctatccaacacttaagtaggaacaaaaaggcattttttttcattattacttactaagtatgttttgacaaataactaacgcagtcgcgcaactttgtccaccttgattttctataaaataaaacacaaacaacatcacacagtgaaacaatatacattagtaaaaaagggatgtgtgagtgataaagggaaaaagaacttgtaccgcaagtttttgcggcttgttcacaccctgggattaacttgctgatattgtcgtacgcagcctttgtaattattccgttgtctaacgcaaaatctgggtatgctgggtattgaattgcaggatttgttaacccattaccaatagcaaaaccctggtgttatatcatatgaatcaatacaggcaaaagcaagaaaaaataattcattat

SEQ ID NO: 12252 - DNA, 1037 bp, Glycine max
  Gm_smallRNAprecursor_5085
cttaaaaaaaatttctgaaaaaatcttgtaactagagaccgagaaattactatatagttttttcaactcaaaaacaattatgctccaatctccaaatgaatcaagtagtaggctcaccaagccaattccatgagatcttcttcgatcccctacatacacaagcaacttgattccatcctcaagaagagcaggaatccccacttcaaggtttgtcatccaatcttgcagcagagcattgtgcattgttgtactgcataaaacatactgcaagtcatccctcacacctaaagcactcttcactttctgctggtttaacaacgtctccacgttactaaagtcatagcacaattctccctcacacttctttatgtcatagtattgcactttgtgtatcagcacctatgaagcaccgacacggacacagacacggacaccggacacgacacggatacggacacgtggacacctgtaatgttcaaaatatagaacttaatacgggtgtcgtgtcggtgtcggacactgacacggacgcgtgtcggacaccggacacggcaaagagctgaagtgtccgtacttcatagatcagcacaatgcaataagtaaactggacttcaccattttatcctatccaacacttaagtaggaacaaaaaggcattttttttcattattacttactaagtatgttttgacaaataactaacgcagtcgcgcaactttgtccaccttgattttctataaaataaaacacaaacaacatcacacagtgaaacaatatacattagtaaaaaagggatgtgtgagtgataaagggaaaaagaacttgtaccgcaagtttttgcggcttgttcacaccctgggattaacttgctgatattgtcgtacgcagcctttgtaattattccgttgtctaacgcaaaatctgggtatgctgggtattgaattgcaggatttgttaacccattaccaatagcaaaaccctggtgttatatcatatgaatcaatacaggcaaaagcaagaaaaaataattcattata

SEQ ID NO: 12253 - DNA, 1045 bp, Glycine max
  Gm_smallRNAprecursor_5086
taaacggagacaagcaaatcattcattttggtgtctgtgatgtcgtgaggatgtgccacatggtcgatcccatcttcgtgcttagcgatcaggattttttctgccccgatgcctctccgcttcttcttcgccagcctccgcagaaaatgcatgacgcaaatcaacaccgaataagtcacccgtattaggtatttttcccgatacattccattgtgttcctaatgccgcattaggtgttggaattgggccatgatattgctgtgaaggggtcatagtgggccatgaaaaatgagcttgtgtttccgcaacaccaccgaacgaatgctggcttgcagaagtatcagtgtgatgaccctaaaaaggatactgatacatctgtgtcagatactgagcaaatgtttgtgacgtgtaatacattccatggccacgctccgccatttgttgggaatattcttccgcttcaacagcctcccttcgtctgtctatgccctgagtttcaacacttgactgaagcatgtgaaactgttgtgcaggaaattgacgctctgatgcaggaccatgtgacactggctcagtgactctctcttgctcttcggataaaattataattttttccacataaggcacaagatcatcaactgtccatgtattcctcccttgaggagacaccatgtattgtaatgtctccgcaacttcagcctacaattattagggtcagaaaattaatggccatcattaataaaatgttcaagttaaatattcaaaaaattaaaaaaataccaatgtagccgtgtttgcattttgtgggtcaacaaacatctttgtctttcgcctataccagaccatgtagtccgagttaaagctcaataggccatcttgtcggggataagcgtcgaccctaaaagcttggagattattccactgatgaatcattggggcgaacaattgcccccaatttttgtcatgtttcccttttaatgttatgccatgaatgtttaagggttgcgaaggagactctggaattggttgctgcatcccaaattgt

SEQ ID NO: 12254 - DNA, 1157 bp, Glycine max
  Gm_smallRNAprecursor_5087
ctgacttatggatctgaagcatgtacagtaattttaatttaaacagtatgtgtttgaacagtattttctggaagcacagcagtctgatattttagttgaatgatactgtagcagtaagtcccgtggatgagaaagggcagtaaggctaaggtgtattgttcaaataaaatattgagacataatatactggtggctataggagtaatgttcaaactatattgtctgtaaaaaaaataaaaaaataaaaaaaaaaaaaaaaaaaaaatcttctttttcatttattcagatccaagaagttctgtaacatatagccttatggaaagattcctatggaaccaaatgaaggcaaagatattagagaatgtttaaatcatgtctagattattgcgatccttttcccgtatctcttttcgctcaaattcctccactacatcttcttcaagaaacaccaatctcttaaatgatcaagataaccagacccaagaggtcgccccaaaacacaatctcttcgatgaggaagtccgattcgaagatattaatcaaaacatggatgattggaacattccagaaatccctcaggatcaactatacgttcctgaaacaattaaagacaaacacaactttgattacataatcaaaacagtagaaaacaatattcctctaggacaagatataggggaagaatttcatctactttcaaaaaattcaatttatgaacatagccgtaagtataaatatctacacatcggttgtgtacaagtagccatcaagcccttaattgatatgggcatagatgcagcagttttaatgtgtctaagagatattaggcataatcaatttgaagactccctaattggaacagtcgaaaccagcctaggacaaggtccaatatattttaattgttatccaaacaaaacagtgagtctgatggacagaaacattcttgactctctgttcttaaacatccactttcatggccttgacatgaaagaaggatcaatcccagcagccttaatttataggatccagtacaaggtcatgaatacttgtgcatctagagtcctgttaaaacctcaaaaaggagaaacaaccttgtttatcactgatatgacaaaggctaacgtgtctctcccaagaaaaataaaatgggatgaagt

SEQ ID NO: 12255 - DNA, 1047 bp, Glycine max
  Gm_smallRNAprecursor_5088
aatgttcaaactatattgtctgtaaaaaaaataaaaaaataaaaaaaaaaaaaaaaaaaaaatcttctttttcatttattcagatccaagaagttctgtaacatatagccttatggaaagattcctatggaaccaaatgaaggcaaagatattagagaatgtttaaatcatgtctagattattgcgatccttttcccgtatctcttttcgctcaaattcctccactacatcttcttcaagaaacaccaatctcttaaatgatcaagataaccagacccaagaggtcgccccaaaacacaatctcttcgatgaggaagtccgattcgaagatattaatcaaaacatggatgattggaacattccagaaatccctcaggatcaactatacgttcctgaaacaattaaagacaaacacaactttgattacataatcaaaacagtagaaaacaatattcctctaggacaagatataggggaagaatttcatctactttcaaaaaattcaatttatgaacatagccgtaagtataaatatctacacatcggttgtgtacaagtagccatcaagcccttaattgatatgggcatagatgcagcagttttaatgtgtctaagagatattaggcataatcaatttgaagactccctaattggaacagtcgaaaccagcctaggacaaggtccaatatattttaattgttatccaaacaaaacagtgagtctgatggacagaaacattcttgactctctgttcttaaacatccactttcatggccttgacatgaaagaaggatcaatcccagcagccttaatttataggatccagtacaaggtcatgaatacttgtgcatctagagtcctgttaaaacctcaaaaaggagaaacaaccttgtttatcactgatatgacaaaggctaacgtgtctctcccaagaaaaataaaatgggatgaagtaactcttcccgaaagatgggttatggataaggccacaccgtctattccccgacccgctccaaccatagagcatattaagcaagataactccgg

SEQ ID NO: 12256 - DNA, 1126 bp, Glycine max
  Gm_smallRNAprecursor_5089
aagattaacacaaactttcttctggtaaaaaaccttaagaatgaagtaatcttaggaacgcccttcattagagccctgtttcccatccaaatatctaatgaaggaataaccacaaatcatttaggaagaaaaattatatttaatttttctactaaaccaatttccagaaatataaatcttatagaaaataagattaatcaaattaacttcttaaaagaagaagtatcttttaataatattcagatacaactgggaaaaccccaagtaaaagaaagaattcaatctttattaaatcatattgaatcgaccgtttgttctgaattgccacatgcattttgggacagaaagaaacatattgtcgatctcccttatgagaaagactttagggaaaaacaaattcccacaaaagccagaccaatccaaatgaatgaagaacttcttcaatattgtcaaaaggaaatcaaggatttgcttgataaaggcctaatccggaaaagcaaaagcccatggtcttgtgcggctttttatgttaacaaacaatctgagattgagcgtggaacaccccgcttagtcataaattacaaaccattaaatcaagcattacaatggattagatatcctattccaaacaaaaaagatttgcttaacagattaaattctgcaaagatattttcaaaatttgatatgaaatctggattttggcaaatccaaatccaagaatcagataggtacaaaacatcgtttactgtacctttcgggcaatatgaatggaacgtgatgccattcggactgaagaatgccccttcagaatttcaaaaaattatgaacgatatttttaatccttattcaaaatttgtcattgtctacatagatgatgttttaatcttttcccaaaacattgaccaacatttcaaacacctccaaaccttcatacatatcatcaaacaaaatggtttggcagtctccaaagcaaaaatcaatcttttccaaactcgaattcgattccttggtcacaatatatatcaaggtacaatcattccaatcgaaaggtcaatagagtttgctagcaaattccccaaccaaatcttagacaaaacccagttacaaagatttctaggttgtctaa

SEQ ID NO: 12257 - DNA, 1063 bp, Glycine max
  Gm_smallRNAprecursor_5090
gtttcccatccaaatatctaatgaaggaataaccacaaatcatttaggaagaaaaattatatttaatttttctactaaaccaatttccagaaatataaatcttatagaaaataagattaatcaaattaacttcttaaaagaagaagtatcttttaataatattcagatacaactgggaaaaccccaagtaaaagaaagaattcaatctttattaaatcatattgaatcgaccgtttgttctgaattgccacatgcattttgggacagaaagaaacatattgtcgatctcccttatgagaaagactttagggaaaaacaaattcccacaaaagccagaccaatccaaatgaatgaagaacttcttcaatattgtcaaaaggaaatcaaggatttgcttgataaaggcctaatccggaaaagcaaaagcccatggtcttgtgcggctttttatgttaacaaacaatctgagattgagcgtggaacaccccgcttagtcataaattacaaaccattaaatcaagcattacaatggattagatatcctattccaaacaaaaaagatttgcttaacagattaaattctgcaaagatattttcaaaatttgatatgaaatctggattttggcaaatccaaatccaagaatcagataggtacaaaacatcgtttactgtacctttcgggcaatatgaatggaacgtgatgccattcggactgaagaatgccccttcagaatttcaaaaaattatgaacgatatttttaatccttattcaaaatttgtcattgtctacatagatgatgttttaatcttttcccaaaacattgaccaacatttcaaacacctccaaaccttcatacatatcatcaaacaaaatggtttggcagtctccaaagcaaaaatcaatcttttccaaactcgaattcgattccttggtcacaatatatatcaaggtacaatcattccaatcgaaaggtcaatagagtttgctagcaaattccccaaccaaatcttagacaaaacccagttacaaagatttctaggttgtctaaattacgtaggagaa

SEQ ID NO: 12258 - DNA, 1234 bp, Glycine max
  Gm_smallRNAprecursor_5091
cccaagtaaaagaaagaattcaatctttattaaatcatattgaatcgaccgtttgttctgaattgccacatgcattttgggacagaaagaaacatattgtcgatctcccttatgagaaagactttagggaaaaacaaattcccacaaaagccagaccaatccaaatgaatgaagaacttcttcaatattgtcaaaaggaaatcaaggatttgcttgataaaggcctaatccggaaaagcaaaagcccatggtcttgtgcggctttttatgttaacaaacaatctgagattgagcgtggaacaccccgcttagtcataaattacaaaccattaaatcaagcattacaatggattagatatcctattccaaacaaaaaagatttgcttaacagattaaattctgcaaagatattttcaaaatttgatatgaaatctggattttggcaaatccaaatccaagaatcagataggtacaaaacatcgtttactgtacctttcgggcaatatgaatggaacgtgatgccattcggactgaagaatgccccttcagaatttcaaaaaattatgaacgatatttttaatccttattcaaaatttgtcattgtctacatagatgatgttttaatcttttcccaaaacattgaccaacatttcaaacacctccaaaccttcatacatatcatcaaacaaaatggtttggcagtctccaaagcaaaaatcaatcttttccaaactcgaattcgattccttggtcacaatatatatcaaggtacaatcattccaatcgaaaggtcaatagagtttgctagcaaattccccaaccaaatcttagacaaaacccagttacaaagatttctaggttgtctaaattacgtaggagaatttgtctcctatttaaataatattgtcaagccattacatgataggctggagaaaaatccgcctccttggtctgacctccatacacaaacagttaaagaaatcaaagtcaaagtccaatccattaaatgtctgtatcttcctattccacaggcatttaaaattgtcgaaactgatgcttcagacataggttatggtggcatcctcaaacaaagagtccatggccaagatcatgtcattgcatatacatcaaaacattggaatcctgcacaattaaaatattcaactgttaaaaaagaggttttagcaattgttttgtgcatttccaaatttcaatcggatttattaaaccaaaa

SEQ ID NO: 12259 - DNA, 1080 bp, Glycine max
  Gm_smallRNAprecursor_5092
aaaagcaaaagcccatggtcttgtgcggctttttatgttaacaaacaatctgagattgagcgtggaacaccccgcttagtcataaattacaaaccattaaatcaagcattacaatggattagatatcctattccaaacaaaaaagatttgcttaacagattaaattctgcaaagatattttcaaaatttgatatgaaatctggattttggcaaatccaaatccaagaatcagataggtacaaaacatcgtttactgtacctttcgggcaatatgaatggaacgtgatgccattcggactgaagaatgccccttcagaatttcaaaaaattatgaacgatatttttaatccttattcaaaatttgtcattgtctacatagatgatgttttaatcttttcccaaaacattgaccaacatttcaaacacctccaaaccttcatacatatcatcaaacaaaatggtttggcagtctccaaagcaaaaatcaatcttttccaaactcgaattcgattccttggtcacaatatatatcaaggtacaatcattccaatcgaaaggtcaatagagtttgctagcaaattccccaaccaaatcttagacaaaacccagttacaaagatttctaggttgtctaaattacgtaggagaatttgtctcctatttaaataatattgtcaagccattacatgataggctggagaaaaatccgcctccttggtctgacctccatacacaaacagttaaagaaatcaaagtcaaagtccaatccattaaatgtctgtatcttcctattccacaggcatttaaaattgtcgaaactgatgcttcagacataggttatggtggcatcctcaaacaaagagtccatggccaagatcatgtcattgcatatacatcaaaacattggaatcctgcacaattaaaatattcaactgttaaaaaagaggttttagcaattgttttgtgcatttccaaatttcaatcggatttattaaaccaaaaatttttaatcagggttgattgtaaatcagccaaaagatattttacaaaaagatgttaaaaaccttgcctcaaaacaaat

SEQ ID NO: 12260 - DNA, 1095 bp, Glycine max
  Gm_smallRNAprecursor_5093
tgaatggaacgtgatgccattcggactgaagaatgccccttcagaatttcaaaaaattatgaacgatatttttaatccttattcaaaatttgtcattgtctacatagatgatgttttaatcttttcccaaaacattgaccaacatttcaaacacctccaaaccttcatacatatcatcaaacaaaatggtttggcagtctccaaagcaaaaatcaatcttttccaaactcgaattcgattccttggtcacaatatatatcaaggtacaatcattccaatcgaaaggtcaatagagtttgctagcaaattccccaaccaaatcttagacaaaacccagttacaaagatttctaggttgtctaaattacgtaggagaatttgtctcctatttaaataatattgtcaagccattacatgataggctggagaaaaatccgcctccttggtctgacctccatacacaaacagttaaagaaatcaaagtcaaagtccaatccattaaatgtctgtatcttcctattccacaggcatttaaaattgtcgaaactgatgcttcagacataggttatggtggcatcctcaaacaaagagtccatggccaagatcatgtcattgcatatacatcaaaacattggaatcctgcacaattaaaatattcaactgttaaaaaagaggttttagcaattgttttgtgcatttccaaatttcaatcggatttattaaaccaaaaatttttaatcagggttgattgtaaatcagccaaaagatattttacaaaaagatgttaaaaaccttgcctcaaaacaaatttttgcacgatggcaagcaattttaagtgtctttgattttgacatagaatacatcaagggcacctcaaattcactacctgactaccttacccgtgaattcttacagaaaaagtagtaatgcctcctaaggcatcgggaatctccctacggggaggaaggagtacaggcaaaggagccaggctggctcttccagagccaaccatcaagaaatcatctaccacttctgggtcaccaacccaagctgggtcatctacccagaaaaccaatttagaagggtcatcaaccca

SEQ ID NO: 12261 - DNA, 1095 bp, Glycine max; identical to SEQ ID NO: 12260
  Gm_smallRNAprecursor_5094

SEQ ID NO: 12262 - DNA, 1095 bp, Glycine max; identical to SEQ ID NO: 12260
  Gm_smallRNAprecursor_5095

SEQ ID NO: 12263 - DNA, 1095 bp, Glycine max; identical to SEQ ID NO: 12260
  Gm_smallRNAprecursor_5096

SEQ ID NO: 12264 - DNA, 1035 bp, Glycine max
  Gm_smallRNAprecursor_5097
attgtctacatagatgatgttttaatcttttcccaaaacattgaccaacatttcaaacacctccaaaccttcatacatatcatcaaacaaaatggtttggcagtctccaaagcaaaaatcaatcttttccaaactcgaattcgattccttggtcacaatatatatcaaggtacaatcattccaatcgaaaggtcaatagagtttgctagcaaattccccaaccaaatcttagacaaaacccagttacaaagatttctaggttgtctaaattacgtaggagaatttgtctcctatttaaataatattgtcaagccattacatgataggctggagaaaaatccgcctccttggtctgacctccatacacaaacagttaaagaaatcaaagtcaaagtccaatccattaaatgtctgtatcttcctattccacaggcatttaaaattgtcgaaactgatgcttcagacataggttatggtggcatcctcaaacaaagagtccatggccaagatcatgtcattgcatatacatcaaaacattggaatcctgcacaattaaaatattcaactgttaaaaaagaggttttagcaattgttttgtgcatttccaaatttcaatcggatttattaaaccaaaaatttttaatcagggttgattgtaaatcagccaaaagatattttacaaaaagatgttaaaaaccttgcctcaaaacaaatttttgcacgatggcaagcaattttaagtgtctttgattttgacatagaatacatcaagggcacctcaaattcactacctgactaccttacccgtgaattcttacagaaaaagtagtaatgcctcctaaggcatcgggaatctccctacggggaggaaggagtacaggcaaaggagccaggctggctcttccagagccaaccatcaagaaatcatctaccacttctgggtcaccaacccaagctgggtcatctacccagaaaaccaatttagaagggtcatcaacccagattgcctcaatcaaacctgagccatccactcag

SEQ ID NO: 12265 - DNA, 1035 bp, Glycine max; identical to SEQ ID NO: 12264
  Gm_smallRNAprecursor_5098

SEQ ID NO: 12266 - DNA, 1113 bp, Glycine max
  Gm_smallRNAprecursor_5099
attgtctacatagatgatgttttaatcttttcccaaaacattgaccaacatttcaaacacctccaaaccttcatacatatcatcaaacaaaatggtttggcagtctccaaagcaaaaatcaatcttttccaaactcgaattcgattccttggtcacaatatatatcaaggtacaatcattccaatcgaaaggtcaatagagtttgctagcaaattccccaaccaaatcttagacaaaacccagttacaaagatttctaggttgtctaaattacgtaggagaatttgtctcctatttaaataatattgtcaagccattacatgataggctggagaaaaatccgcctccttggtctgacctccatacacaaacagttaaagaaatcaaagtcaaagtccaatccattaaatgtctgtatcttcctattccacaggcatttaaaattgtcgaaactgatgcttcagacataggttatggtggcatcctcaaacaaagagtccatggccaagatcatgtcattgcatatacatcaaaacattggaatcctgcacaattaaaatattcaactgttaaaaaagaggttttagcaattgttttgtgcatttccaaatttcaatcggatttattaaaccaaaaatttttaatcagggttgattgtaaatcagccaaaagatattttacaaaaagatgttaaaaaccttgcctcaaaacaaatttttgcacgatggcaagcaattttaagtgtctttgattttgacatagaatacatcaagggcacctcaaattcactacctgactaccttacccgtgaattcttacagaaaaagtagtaatgcctcctaaggcatcgggaatctccctacggggaggaaggagtacaggcaaaggagccaggctggctcttccagagccaaccatcaagaaatcatctaccacttctgggtcaccaacccaagctgggtcatctacccagaaaaccaatttagaagggtcatcaacccagattgcctcaatcaaacctgagccatccactcaggaatctcccaaaccggcaaccgccaaacaaacatcggccgactatgcatggccaattgaaacccttcaggcccttcaa

SEQ ID NO: 12267 - DNA, 1113 bp, Glycine max; identical to SEQ ID NO: 12266
  Gm_smallRNAprecursor_5100

SEQ ID NO: 12268 - DNA, 1114 bp, Glycine max
  Gm_smallRNAprecursor_5101
attgtctacatagatgatgttttaatcttttcccaaaacattgaccaacatttcaaacacctccaaaccttcatacatatcatcaaacaaaatggtttggcagtctccaaagcaaaaatcaatcttttccaaactcgaattcgattccttggtcacaatatatatcaaggtacaatcattccaatcgaaaggtcaatagagtttgctagcaaattccccaaccaaatcttagacaaaacccagttacaaagatttctaggttgtctaaattacgtaggagaatttgtctcctatttaaataatattgtcaagccattacatgataggctggagaaaaatccgcctccttggtctgacctccatacacaaacagttaaagaaatcaaagtcaaagtccaatccattaaatgtctgtatcttcctattccacaggcatttaaaattgtcgaaactgatgcttcagacataggttatggtggcatcctcaaacaaagagtccatggccaagatcatgtcattgcatatacatcaaaacattggaatcctgcacaattaaaatattcaactgttaaaaaagaggttttagcaattgttttgtgcatttccaaatttcaatcggatttattaaaccaaaaatttttaatcagggttgattgtaaatcagccaaaagatattttacaaaaagatgttaaaaaccttgcctcaaaacaaatttttgcacgatggcaagcaattttaagtgtctttgattttgacatagaatacatcaagggcacctcaaattcactacctgactaccttacccgtgaattcttacagaaaaagtagtaatgcctcctaaggcatcgggaatctccctacggggaggaaggagtacaggcaaaggagccaggctggctcttccagagccaaccatcaagaaatcatctaccacttctgggtcaccaacccaagctgggtcatctacccagaaaaccaatttagaagggtcatcaacccagattgcctcaatcaaacctgagccatccactcaggaatctcccaaaccggcaaccgccaaacaaacatcggccgactatgcatggccaattgaaacccttcaggcccttcaag

SEQ ID NO: 12269 - DNA, 1114 bp, Glycine max; identical to SEQ ID NO: 12268
  Gm_smallRNAprecursor_5102

SEQ ID NO: 12270 - DNA, 1142 bp, Glycine max
  Gm_smallRNAprecursor_5103
aaaccttcatacatatcatcaaacaaaatggtttggcagtctccaaagcaaaaatcaatcttttccaaactcgaattcgattccttggtcacaatatatatcaaggtacaatcattccaatcgaaaggtcaatagagtttgctagcaaattccccaaccaaatcttagacaaaacccagttacaaagatttctaggttgtctaaattacgtaggagaatttgtctcctatttaaataatattgtcaagccattacatgataggctggagaaaaatccgcctccttggtctgacctccatacacaaacagttaaagaaatcaaagtcaaagtccaatccattaaatgtctgtatcttcctattccacaggcatttaaaattgtcgaaactgatgcttcagacataggttatggtggcatcctcaaacaaagagtccatggccaagatcatgtcattgcatatacatcaaaacattggaatcctgcacaattaaaatattcaactgttaaaaaagaggttttagcaattgttttgtgcatttccaaatttcaatcggatttattaaaccaaaaatttttaatcagggttgattgtaaatcagccaaaagatattttacaaaaagatgttaaaaaccttgcctcaaaacaaatttttgcacgatggcaagcaattttaagtgtctttgattttgacatagaatacatcaagggcacctcaaattcactacctgactaccttacccgtgaattcttacagaaaaagtagtaatgcctcctaaggcatcgggaatctccctacggggaggaaggagtacaggcaaaggagccaggctggctcttccagagccaaccatcaagaaatcatctaccacttctgggtcaccaacccaagctgggtcatctacccagaaaaccaatttagaagggtcatcaacccagattgcctcaatcaaacctgagccatccactcaggaatctcccaaaccggcaaccgccaaacaaacatcggccgactatgcatggccaattgaaacccttcaggcccttcaagacatgggtctgaccaaatttccaaaaataatcaaaaaatcttgggcagacattgcctcagaatctgatgatgaatctgaatcaaatttacaa

SEQ ID NO: 12271 - DNA, 1098 bp, Glycine max
  Gm_smallRNAprecursor_5104
ggaatctccctacggggaggaaggagtacaggcaaaggagccaggctggctcttccagagccaaccatcaagaaatcatctaccacttctgggtcaccaacccaagctgggtcatctacccagaaaaccaatttagaagggtcatcaacccagattgcctcaatcaaacctgagccatccactcaggaatctcccaaaccggcaaccgccaaacaaacatcggccgactatgcatggccaattgaaacccttcaggcccttcaagacatgggtctgaccaaatttccaaaaataatcaaaaaatcttgggcagacattgcctcagaatctgatgatgaatctgaatcaaatttacaaacaatgatccaaaatgcgtcaatgaccaaaacagccaccaatactaaaggaaaactacctttagccaaagctcaaacaccacctaccaaacaaactaacaattatatttataaaaataaattgttaactattttgtagatggaacctgaattttgggacaaaaatcccttcaaggcgacggccaaggctttcccaccaggatttcactacaaaccaaccaccatcctgaagacaagaactttttatgaattgattttggtagattcaaactcagtatctatcaaacatttcaaagatccaaaagaccaaaccttaaacacccactcaaccatccaaatactaaaagttcttcaaccaagacactttggttcggacttgaacaaaggaaagagattttcagttccatttgatccggtaggttatacctattgggattacgttgatgcttggactaaggtgttttggcaccaaaatacccgcttcaagcattcatggctgatatatttcaagaccaacacaatttacaattttcccaattggtttttgcaatggtgggacttctttggaccaatcccagagatattcccagaaacggtccaacaaggattttcccaatttaagaaacaatacaattcgcaggaatcacgaattccagcagatcttaaatacttttcaagctttgcactgtcatggatattctcatggcaatatcgttacagcaagactgaaaagacaaaccaa

SEQ ID NO: 12272 - DNA, 1190 bp, Glycine max
  Gm_smallRNAprecursor_5105
acaggcaaaggagccaggctggctcttccagagccaaccatcaagaaatcatctaccacttctgggtcaccaacccaagctgggtcatctacccagaaaaccaatttagaagggtcatcaacccagattgcctcaatcaaacctgagccatccactcaggaatctcccaaaccggcaaccgccaaacaaacatcggccgactatgcatggccaattgaaacccttcaggcccttcaagacatgggtctgaccaaatttccaaaaataatcaaaaaatcttgggcagacattgcctcagaatctgatgatgaatctgaatcaaatttacaaacaatgatccaaaatgcgtcaatgaccaaaacagccaccaatactaaaggaaaactacctttagccaaagctcaaacaccacctaccaaacaaactaacaattatatttataaaaataaattgttaactattttgtagatggaacctgaattttgggacaaaaatcccttcaaggcgacggccaaggctttcccaccaggatttcactacaaaccaaccaccatcctgaagacaagaactttttatgaattgattttggtagattcaaactcagtatctatcaaacatttcaaagatccaaaagaccaaaccttaaacacccactcaaccatccaaatactaaaagttcttcaaccaagacactttggttcggacttgaacaaaggaaagagattttcagttccatttgatccggtaggttatacctattgggattacgttgatgcttggactaaggtgttttggcaccaaaatacccgcttcaagcattcatggctgatatatttcaagaccaacacaatttacaattttcccaattggtttttgcaatggtgggacttctttggaccaatcccagagatattcccagaaacggtccaacaaggattttcccaatttaagaaacaatacaattcgcaggaatcacgaattccagcagatcttaaatacttttcaagctttgcactgtcatggatattctcatggcaatatcgttacagcaagactgaaaagacaaaccaatatccatcactacaaagacacgcatttgtaaaatggtggacacaatttgactcatccaaagcggatccagaacaagtaaaactatggttccaatcccatccagaagtcctcaaagcagc

SEQ ID NO: 12273 - DNA, 1148 bp, Glycine max
  Gm_smallRNAprecursor_5106
tgcctcaatcaaacctgagccatccactcaggaatctcccaaaccggcaaccgccaaacaaacatcggccgactatgcatggccaattgaaacccttcaggcccttcaagacatgggtctgaccaaatttccaaaaataatcaaaaaatcttgggcagacattgcctcagaatctgatgatgaatctgaatcaaatttacaaacaatgatccaaaatgcgtcaatgaccaaaacagccaccaatactaaaggaaaactacctttagccaaagctcaaacaccacctaccaaacaaactaacaattatatttataaaaataaattgttaactattttgtagatggaacctgaattttgggacaaaaatcccttcaaggcgacggccaaggctttcccaccaggatttcactacaaaccaaccaccatcctgaagacaagaactttttatgaattgattttggtagattcaaactcagtatctatcaaacatttcaaagatccaaaagaccaaaccttaaacacccactcaaccatccaaatactaaaagttcttcaaccaagacactttggttcggacttgaacaaaggaaagagattttcagttccatttgatccggtaggttatacctattgggattacgttgatgcttggactaaggtgttttggcaccaaaatacccgcttcaagcattcatggctgatatatttcaagaccaacacaatttacaattttcccaattggtttttgcaatggtgggacttctttggaccaatcccagagatattcccagaaacggtccaacaaggattttcccaatttaagaaacaatacaattcgcaggaatcacgaattccagcagatcttaaatacttttcaagctttgcactgtcatggatattctcatggcaatatcgttacagcaagactgaaaagacaaaccaatatccatcactacaaagacacgcatttgtaaaatggtggacacaatttgactcatccaaagcggatccagaacaagtaaaactatggttccaatcccatccagaagtcctcaaagcagctgatccagagacttctgtgtttttgaaccaaaagtctcatctggcagcatttttagcaggatcgacatcaaaggaggtcttagcta

SEQ ID NO: 12274 - DNA, 1149 bp, Glycine max
  Gm_smallRNAprecursor_5107
tgcctcaatcaaacctgagccatccactcaggaatctcccaaaccggcaaccgccaaacaaacatcggccgactatgcatggccaattgaaacccttcaggcccttcaagacatgggtctgaccaaatttccaaaaataatcaaaaaatcttgggcagacattgcctcagaatctgatgatgaatctgaatcaaatttacaaacaatgatccaaaatgcgtcaatgaccaaaacagccaccaatactaaaggaaaactacctttagccaaagctcaaacaccacctaccaaacaaactaacaattatatttataaaaataaattgttaactattttgtagatggaacctgaattttgggacaaaaatcccttcaaggcgacggccaaggctttcccaccaggatttcactacaaaccaaccaccatcctgaagacaagaactttttatgaattgattttggtagattcaaactcagtatctatcaaacatttcaaagatccaaaagaccaaaccttaaacacccactcaaccatccaaatactaaaagttcttcaaccaagacactttggttcggacttgaacaaaggaaagagattttcagttccatttgatccggtaggttatacctattgggattacgttgatgcttggactaaggtgttttggcaccaaaatacccgcttcaagcattcatggctgatatatttcaagaccaacacaatttacaattttcccaattggtttttgcaatggtgggacttctttggaccaatcccagagatattcccagaaacggtccaacaaggattttcccaatttaagaaacaatacaattcgcaggaatcacgaattccagcagatcttaaatacttttcaagctttgcactgtcatggatattctcatggcaatatcgttacagcaagactgaaaagacaaaccaatatccatcactacaaagacacgcatttgtaaaatggtggacacaatttgactcatccaaagcggatccagaacaagtaaaactatggttccaatcccatccagaagtcctcaaagcagctgatccagagacttctgtgtttttgaaccaaaagtctcatctggcagcatttttagcaggatcgacatcaaaggaggtcttagctaa

SEQ ID NO: 12275 - DNA, 1249 bp, Glycine max
  Gm_smallRNAprecursor_5108
tgcctcaatcaaacctgagccatccactcaggaatctcccaaaccggcaaccgccaaacaaacatcggccgactatgcatggccaattgaaacccttcaggcccttcaagacatgggtctgaccaaatttccaaaaataatcaaaaaatcttgggcagacattgcctcagaatctgatgatgaatctgaatcaaatttacaaacaatgatccaaaatgcgtcaatgaccaaaacagccaccaatactaaaggaaaactacctttagccaaagctcaaacaccacctaccaaacaaactaacaattatatttataaaaataaattgttaactattttgtagatggaacctgaattttgggacaaaaatcccttcaaggcgacggccaaggctttcccaccaggatttcactacaaaccaaccaccatcctgaagacaagaactttttatgaattgattttggtagattcaaactcagtatctatcaaacatttcaaagatccaaaagaccaaaccttaaacacccactcaaccatccaaatactaaaagttcttcaaccaagacactttggttcggacttgaacaaaggaaagagattttcagttccatttgatccggtaggttatacctattgggattacgttgatgcttggactaaggtgttttggcaccaaaatacccgcttcaagcattcatggctgatatatttcaagaccaacacaatttacaattttcccaattggtttttgcaatggtgggacttctttggaccaatcccagagatattcccagaaacggtccaacaaggattttcccaatttaagaaacaatacaattcgcaggaatcacgaattccagcagatcttaaatacttttcaagctttgcactgtcatggatattctcatggcaatatcgttacagcaagactgaaaagacaaaccaatatccatcactacaaagacacgcatttgtaaaatggtggacacaatttgactcatccaaagcggatccagaacaagtaaaactatggttccaatcccatccagaagtcctcaaagcagctgatccagagacttctgtgtttttgaaccaaaagtctcatctggcagcatttttagcaggatcgacatcaaaggaggtcttagctaaaaatctgaaggaagttctacaaatgttacaacaggaagaagaagcttcatcctcaaagaaggaagaaacaagttctgctgaagaagacgaagaagatccc

SEQ ID NO: 12276 - DNA, 1134 bp, Glycine max
  Gm_smallRNAprecursor_5109
caaacctgagccatccactcaggaatctcccaaaccggcaaccgccaaacaaacatcggccgactatgcatggccaattgaaacccttcaggcccttcaagacatgggtctgaccaaatttccaaaaataatcaaaaaatcttgggcagacattgcctcagaatctgatgatgaatctgaatcaaatttacaaacaatgatccaaaatgcgtcaatgaccaaaacagccaccaatactaaaggaaaactacctttagccaaagctcaaacaccacctaccaaacaaactaacaattatatttataaaaataaattgttaactattttgtagatggaacctgaattttgggacaaaaatcccttcaaggcgacggccaaggctttcccaccaggatttcactacaaaccaaccaccatcctgaagacaagaactttttatgaattgattttggtagattcaaactcagtatctatcaaacatttcaaagatccaaaagaccaaaccttaaacacccactcaaccatccaaatactaaaagttcttcaaccaagacactttggttcggacttgaacaaaggaaagagattttcagttccatttgatccggtaggttatacctattgggattacgttgatgcttggactaaggtgttttggcaccaaaatacccgcttcaagcattcatggctgatatatttcaagaccaacacaatttacaattttcccaattggtttttgcaatggtgggacttctttggaccaatcccagagatattcccagaaacggtccaacaaggattttcccaatttaagaaacaatacaattcgcaggaatcacgaattccagcagatcttaaatacttttcaagctttgcactgtcatggatattctcatggcaatatcgttacagcaagactgaaaagacaaaccaatatccatcactacaaagacacgcatttgtaaaatggtggacacaatttgactcatccaaagcggatccagaacaagtaaaactatggttccaatcccatccagaagtcctcaaagcagctgatccagagacttctgtgtttttgaaccaaaagtctcatctggcagcatttttagcaggatcgacatcaaaggaggtctt

SEQ ID NO: 12277 - DNA, 1087 bp, Glycine max
  Gm_smallRNAprecursor_5110
agccatccactcaggaatctcccaaaccggcaaccgccaaacaaacatcggccgactatgcatggccaattgaaacccttcaggcccttcaagacatgggtctgaccaaatttccaaaaataatcaaaaaatcttgggcagacattgcctcagaatctgatgatgaatctgaatcaaatttacaaacaatgatccaaaatgcgtcaatgaccaaaacagccaccaatactaaaggaaaactacctttagccaaagctcaaacaccacctaccaaacaaactaacaattatatttataaaaataaattgttaactattttgtagatggaacctgaattttgggacaaaaatcccttcaaggcgacggccaaggctttcccaccaggatttcactacaaaccaaccaccatcctgaagacaagaactttttatgaattgattttggtagattcaaactcagtatctatcaaacatttcaaagatccaaaagaccaaaccttaaacacccactcaaccatccaaatactaaaagttcttcaaccaagacactttggttcggacttgaacaaaggaaagagattttcagttccatttgatccggtaggttatacctattgggattacgttgatgcttggactaaggtgttttggcaccaaaatacccgcttcaagcattcatggctgatatatttcaagaccaacacaatttacaattttcccaattggtttttgcaatggtgggacttctttggaccaatcccagagatattcccagaaacggtccaacaaggattttcccaatttaagaaacaatacaattcgcaggaatcacgaattccagcagatcttaaatacttttcaagctttgcactgtcatggatattctcatggcaatatcgttacagcaagactgaaaagacaaaccaatatccatcactacaaagacacgcatttgtaaaatggtggacacaatttgactcatccaaagcggatccagaacaagtaaaactatggttccaatcccatccagaagtcctcaaagcagctgatccagagacttctgtgtttttgaaccaaaagtctcatct

SEQ ID NO: 12278 - DNA, 1090 bp, Glycine max
  Gm_smallRNAprecursor_5111
agccatccactcaggaatctcccaaaccggcaaccgccaaacaaacatcggccgactatgcatggccaattgaaacccttcaggcccttcaagacatgggtctgaccaaatttccaaaaataatcaaaaaatcttgggcagacattgcctcagaatctgatgatgaatctgaatcaaatttacaaacaatgatccaaaatgcgtcaatgaccaaaacagccaccaatactaaaggaaaactacctttagccaaagctcaaacaccacctaccaaacaaactaacaattatatttataaaaataaattgttaactattttgtagatggaacctgaattttgggacaaaaatcccttcaaggcgacggccaaggctttcccaccaggatttcactacaaaccaaccaccatcctgaagacaagaactttttatgaattgattttggtagattcaaactcagtatctatcaaacatttcaaagatccaaaagaccaaaccttaaacacccactcaaccatccaaatactaaaagttcttcaaccaagacactttggttcggacttgaacaaaggaaagagattttcagttccatttgatccggtaggttatacctattgggattacgttgatgcttggactaaggtgttttggcaccaaaatacccgcttcaagcattcatggctgatatatttcaagaccaacacaatttacaattttcccaattggtttttgcaatggtgggacttctttggaccaatcccagagatattcccagaaacggtccaacaaggattttcccaatttaagaaacaatacaattcgcaggaatcacgaattccagcagatcttaaatacttttcaagctttgcactgtcatggatattctcatggcaatatcgttacagcaagactgaaaagacaaaccaatatccatcactacaaagacacgcatttgtaaaatggtggacacaatttgactcatccaaagcggatccagaacaagtaaaactatggttccaatcccatccagaagtcctcaaagcagctgatccagagacttctgtgtttttgaaccaaaagtctcatctggc

SEQ ID NO: 12279 - DNA, 1129 bp, Glycine max
  Gm_smallRNAprecursor_5112
agccatccactcaggaatctcccaaaccggcaaccgccaaacaaacatcggccgactatgcatggccaattgaaacccttcaggcccttcaagacatgggtctgaccaaatttccaaaaataatcaaaaaatcttgggcagacattgcctcagaatctgatgatgaatctgaatcaaatttacaaacaatgatccaaaatgcgtcaatgaccaaaacagccaccaatactaaaggaaaactacctttagccaaagctcaaacaccacctaccaaacaaactaacaattatatttataaaaataaattgttaactattttgtagatggaacctgaattttgggacaaaaatcccttcaaggcgacggccaaggctttcccaccaggatttcactacaaaccaaccaccatcctgaagacaagaactttttatgaattgattttggtagattcaaactcagtatctatcaaacatttcaaagatccaaaagaccaaaccttaaacacccactcaaccatccaaatactaaaagttcttcaaccaagacactttggttcggacttgaacaaaggaaagagattttcagttccatttgatccggtaggttatacctattgggattacgttgatgcttggactaaggtgttttggcaccaaaatacccgcttcaagcattcatggctgatatatttcaagaccaacacaatttacaattttcccaattggtttttgcaatggtgggacttctttggaccaatcccagagatattcccagaaacggtccaacaaggattttcccaatttaagaaacaatacaattcgcaggaatcacgaattccagcagatcttaaatacttttcaagctttgcactgtcatggatattctcatggcaatatcgttacagcaagactgaaaagacaaaccaatatccatcactacaaagacacgcatttgtaaaatggtggacacaatttgactcatccaaagcggatccagaacaagtaaaactatggttccaatcccatccagaagtcctcaaagcagctgatccagagacttctgtgtttttgaaccaaaagtctcatctggcagcatttttagcaggatcgacatcaaaggaggtcttagc

SEQ ID NO: 12280 - DNA, 1107 bp, Glycine max
  Gm_smallRNAprecursor_5113
aaccggcaaccgccaaacaaacatcggccgactatgcatggccaattgaaacccttcaggcccttcaagacatgggtctgaccaaatttccaaaaataatcaaaaaatcttgggcagacattgcctcagaatctgatgatgaatctgaatcaaatttacaaacaatgatccaaaatgcgtcaatgaccaaaacagccaccaatactaaaggaaaactacctttagccaaagctcaaacaccacctaccaaacaaactaacaattatatttataaaaataaattgttaactattttgtagatggaacctgaattttgggacaaaaatcccttcaaggcgacggccaaggctttcccaccaggatttcactacaaaccaaccaccatcctgaagacaagaactttttatgaattgattttggtagattcaaactcagtatctatcaaacatttcaaagatccaaaagaccaaaccttaaacacccactcaaccatccaaatactaaaagttcttcaaccaagacactttggttcggacttgaacaaaggaaagagattttcagttccatttgatccggtaggttatacctattgggattacgttgatgcttggactaaggtgttttggcaccaaaatacccgcttcaagcattcatggctgatatatttcaagaccaacacaatttacaattttcccaattggtttttgcaatggtgggacttctttggaccaatcccagagatattcccagaaacggtccaacaaggattttcccaatttaagaaacaatacaattcgcaggaatcacgaattccagcagatcttaaatacttttcaagctttgcactgtcatggatattctcatggcaatatcgttacagcaagactgaaaagacaaaccaatatccatcactacaaagacacgcatttgtaaaatggtggacacaatttgactcatccaaagcggatccagaacaagtaaaactatggttccaatcccatccagaagtcctcaaagcagctgatccagagacttctgtgtttttgaaccaaaagtctcatctggcagcatttttagcaggatcgacatcaaaggaggtcttagcta

SEQ ID NO: 12281 - DNA, 1107 bp, Glycine max; identical to SEQ ID NO: 12280
  Gm_smallRNAprecursor_5114

SEQ ID NO: 12282 - DNA, 1108 bp, Glycine max
  Gm_smallRNAprecursor_5115
aaccggcaaccgccaaacaaacatcggccgactatgcatggccaattgaaacccttcaggcccttcaagacatgggtctgaccaaatttccaaaaataatcaaaaaatcttgggcagacattgcctcagaatctgatgatgaatctgaatcaaatttacaaacaatgatccaaaatgcgtcaatgaccaaaacagccaccaatactaaaggaaaactacctttagccaaagctcaaacaccacctaccaaacaaactaacaattatatttataaaaataaattgttaactattttgtagatggaacctgaattttgggacaaaaatcccttcaaggcgacggccaaggctttcccaccaggatttcactacaaaccaaccaccatcctgaagacaagaactttttatgaattgattttggtagattcaaactcagtatctatcaaacatttcaaagatccaaaagaccaaaccttaaacacccactcaaccatccaaatactaaaagttcttcaaccaagacactttggttcggacttgaacaaaggaaagagattttcagttccatttgatccggtaggttatacctattgggattacgttgatgcttggactaaggtgttttggcaccaaaatacccgcttcaagcattcatggctgatatatttcaagaccaacacaatttacaattttcccaattggtttttgcaatggtgggacttctttggaccaatcccagagatattcccagaaacggtccaacaaggattttcccaatttaagaaacaatacaattcgcaggaatcacgaattccagcagatcttaaatacttttcaagctttgcactgtcatggatattctcatggcaatatcgttacagcaagactgaaaagacaaaccaatatccatcactacaaagacacgcatttgtaaaatggtggacacaatttgactcatccaaagcggatccagaacaagtaaaactatggttccaatcccatccagaagtcctcaaagcagctgatccagagacttctgtgtttttgaaccaaaagtctcatctggcagcatttttagcaggatcgacatcaaaggaggtcttagctaa

SEQ ID NO: 12283 - DNA, 1108 bp, Glycine max; identical to SEQ ID NO: 12282
  Gm_smallRNAprecursor_5116

SEQ ID NO: 12284 - DNA, 1102 bp, Glycine max
  Gm_smallRNAprecursor_5117
cggcaaccgccaaacaaacatcggccgactatgcatggccaattgaaacccttcaggcccttcaagacatgggtctgaccaaatttccaaaaataatcaaaaaatcttgggcagacattgcctcagaatctgatgatgaatctgaatcaaatttacaaacaatgatccaaaatgcgtcaatgaccaaaacagccaccaatactaaaggaaaactacctttagccaaagctcaaacaccacctaccaaacaaactaacaattatatttataaaaataaattgttaactattttgtagatggaacctgaattttgggacaaaaatcccttcaaggcgacggccaaggctttcccaccaggatttcactacaaaccaaccaccatcctgaagacaagaactttttatgaattgattttggtagattcaaactcagtatctatcaaacatttcaaagatccaaaagaccaaaccttaaacacccactcaaccatccaaatactaaaagttcttcaaccaagacactttggttcggacttgaacaaaggaaagagattttcagttccatttgatccggtaggttatacctattgggattacgttgatgcttggactaaggtgttttggcaccaaaatacccgcttcaagcattcatggctgatatatttcaagaccaacacaatttacaattttcccaattggtttttgcaatggtgggacttctttggaccaatcccagagatattcccagaaacggtccaacaaggattttcccaatttaagaaacaatacaattcgcaggaatcacgaattccagcagatcttaaatacttttcaagctttgcactgtcatggatattctcatggcaatatcgttacagcaagactgaaaagacaaaccaatatccatcactacaaagacacgcatttgtaaaatggtggacacaatttgactcatccaaagcggatccagaacaagtaaaactatggttccaatcccatccagaagtcctcaaagcagctgatccagagacttctgtgtttttgaaccaaaagtctcatctggcagcatttttagcaggatcgacatcaaaggaggtcttagc

SEQ ID NO: 12285 - DNA, 1244 bp, Glycine max
  Gm_smallRNAprecursor_5118
caagacatgggtctgaccaaatttccaaaaataatcaaaaaatcttgggcagacattgcctcagaatctgatgatgaatctgaatcaaatttacaaacaatgatccaaaatgcgtcaatgaccaaaacagccaccaatactaaaggaaaactacctttagccaaagctcaaacaccacctaccaaacaaactaacaattatatttataaaaataaattgttaactattttgtagatggaacctgaattttgggacaaaaatcccttcaaggcgacggccaaggctttcccaccaggatttcactacaaaccaaccaccatcctgaagacaagaactttttatgaattgattttggtagattcaaactcagtatctatcaaacatttcaaagatccaaaagaccaaaccttaaacacccactcaaccatccaaatactaaaagttcttcaaccaagacactttggttcggacttgaacaaaggaaagagattttcagttccatttgatccggtaggttatacctattgggattacgttgatgcttggactaaggtgttttggcaccaaaatacccgcttcaagcattcatggctgatatatttcaagaccaacacaatttacaattttcccaattggtttttgcaatggtgggacttctttggaccaatcccagagatattcccagaaacggtccaacaaggattttcccaatttaagaaacaatacaattcgcaggaatcacgaattccagcagatcttaaatacttttcaagctttgcactgtcatggatattctcatggcaatatcgttacagcaagactgaaaagacaaaccaatatccatcactacaaagacacgcatttgtaaaatggtggacacaatttgactcatccaaagcggatccagaacaagtaaaactatggttccaatcccatccagaagtcctcaaagcagctgatccagagacttctgtgtttttgaaccaaaagtctcatctggcagcatttttagcaggatcgacatcaaaggaggtcttagctaaaaatctgaaggaagttctacaaatgttacaacaggaagaagaagcttcatcctcaaagaaggaagaaacaagttctgctgaagaagacgaagaagatcccttttaccaaaacgaagatgattgttttggtatctgtttagattaaatttaatttcggtcacaaaaccgtctgtttgtaattgatgtgtaattaatgctgga

SEQ ID NO: 12286 - DNA, 1080 bp, Glycine max
  Gm_smallRNAprecursor_5119
ccaaaaataatcaaaaaatcttgggcagacattgcctcagaatctgatgatgaatctgaatcaaatttacaaacaatgatccaaaatgcgtcaatgaccaaaacagccaccaatactaaaggaaaactacctttagccaaagctcaaacaccacctaccaaacaaactaacaattatatttataaaaataaattgttaactattttgtagatggaacctgaattttgggacaaaaatcccttcaaggcgacggccaaggctttcccaccaggatttcactacaaaccaaccaccatcctgaagacaagaactttttatgaattgattttggtagattcaaactcagtatctatcaaacatttcaaagatccaaaagaccaaaccttaaacacccactcaaccatccaaatactaaaagttcttcaaccaagacactttggttcggacttgaacaaaggaaagagattttcagttccatttgatccggtaggttatacctattgggattacgttgatgcttggactaaggtgttttggcaccaaaatacccgcttcaagcattcatggctgatatatttcaagaccaacacaatttacaattttcccaattggtttttgcaatggtgggacttctttggaccaatcccagagatattcccagaaacggtccaacaaggattttcccaatttaagaaacaatacaattcgcaggaatcacgaattccagcagatcttaaatacttttcaagctttgcactgtcatggatattctcatggcaatatcgttacagcaagactgaaaagacaaaccaatatccatcactacaaagacacgcatttgtaaaatggtggacacaatttgactcatccaaagcggatccagaacaagtaaaactatggttccaatcccatccagaagtcctcaaagcagctgatccagagacttctgtgtttttgaaccaaaagtctcatctggcagcatttttagcaggatcgacatcaaaggaggtcttagctaaaaatctgaaggaagttctacaaatgttacaacaggaagaagaagcttcatcctcaaagaag

SEQ ID NO: 12287 - DNA, 1062 bp, Glycine max
  Gm_smallRNAprecursor_5120
tcttgggcagacattgcctcagaatctgatgatgaatctgaatcaaatttacaaacaatgatccaaaatgcgtcaatgaccaaaacagccaccaatactaaaggaaaactacctttagccaaagctcaaacaccacctaccaaacaaactaacaattatatttataaaaataaattgttaactattttgtagatggaacctgaattttgggacaaaaatcccttcaaggcgacggccaaggctttcccaccaggatttcactacaaaccaaccaccatcctgaagacaagaactttttatgaattgattttggtagattcaaactcagtatctatcaaacatttcaaagatccaaaagaccaaaccttaaacacccactcaaccatccaaatactaaaagttcttcaaccaagacactttggttcggacttgaacaaaggaaagagattttcagttccatttgatccggtaggttatacctattgggattacgttgatgcttggactaaggtgttttggcaccaaaatacccgcttcaagcattcatggctgatatatttcaagaccaacacaatttacaattttcccaattggtttttgcaatggtgggacttctttggaccaatcccagagatattcccagaaacggtccaacaaggattttcccaatttaagaaacaatacaattcgcaggaatcacgaattccagcagatcttaaatacttttcaagctttgcactgtcatggatattctcatggcaatatcgttacagcaagactgaaaagacaaaccaatatccatcactacaaagacacgcatttgtaaaatggtggacacaatttgactcatccaaagcggatccagaacaagtaaaactatggttccaatcccatccagaagtcctcaaagcagctgatccagagacttctgtgtttttgaaccaaaagtctcatctggcagcatttttagcaggatcgacatcaaaggaggtcttagctaaaaatctgaaggaagttctacaaatgttacaacaggaagaagaagcttcatcctcaaagaag

SEQ ID NO: 12288 - DNA, 1146 bp, Glycine max
  Gm_smallRNAprecursor_5121
aatgatccaaaatgcgtcaatgaccaaaacagccaccaatactaaaggaaaactacctttagccaaagctcaaacaccacctaccaaacaaactaacaattatatttataaaaataaattgttaactattttgtagatggaacctgaattttgggacaaaaatcccttcaaggcgacggccaaggctttcccaccaggatttcactacaaaccaaccaccatcctgaagacaagaactttttatgaattgattttggtagattcaaactcagtatctatcaaacatttcaaagatccaaaagaccaaaccttaaacacccactcaaccatccaaatactaaaagttcttcaaccaagacactttggttcggacttgaacaaaggaaagagattttcagttccatttgatccggtaggttatacctattgggattacgttgatgcttggactaaggtgttttggcaccaaaatacccgcttcaagcattcatggctgatatatttcaagaccaacacaatttacaattttcccaattggtttttgcaatggtgggacttctttggaccaatcccagagatattcccagaaacggtccaacaaggattttcccaatttaagaaacaatacaattcgcaggaatcacgaattccagcagatcttaaatacttttcaagctttgcactgtcatggatattctcatggcaatatcgttacagcaagactgaaaagacaaaccaatatccatcactacaaagacacgcatttgtaaaatggtggacacaatttgactcatccaaagcggatccagaacaagtaaaactatggttccaatcccatccagaagtcctcaaagcagctgatccagagacttctgtgtttttgaaccaaaagtctcatctggcagcatttttagcaggatcgacatcaaaggaggtcttagctaaaaatctgaaggaagttctacaaatgttacaacaggaagaagaagcttcatcctcaaagaaggaagaaacaagttctgctgaagaagacgaagaagatcccttttaccaaaacgaagatgattgttttggtatctgtttagattaaatttaatttcggtcacaaaaccgtctgtttgtaattgatgtgtaattaatgctgga

SEQ ID NO: 12289 - DNA, 1173 bp, Glycine max
  Gm_smallRNAprecursor_5122
cgacggccaaggctttcccaccaggatttcactacaaaccaaccaccatcctgaagacaagaactttttatgaattgattttggtagattcaaactcagtatctatcaaacatttcaaagatccaaaagaccaaaccttaaacacccactcaaccatccaaatactaaaagttcttcaaccaagacactttggttcggacttgaacaaaggaaagagattttcagttccatttgatccggtaggttatacctattgggattacgttgatgcttggactaaggtgttttggcaccaaaatacccgcttcaagcattcatggctgatatatttcaagaccaacacaatttacaattttcccaattggtttttgcaatggtgggacttctttggaccaatcccagagatattcccagaaacggtccaacaaggattttcccaatttaagaaacaatacaattcgcaggaatcacgaattccagcagatcttaaatacttttcaagctttgcactgtcatggatattctcatggcaatatcgttacagcaagactgaaaagacaaaccaatatccatcactacaaagacacgcatttgtaaaatggtggacacaatttgactcatccaaagcggatccagaacaagtaaaactatggttccaatcccatccagaagtcctcaaagcagctgatccagagacttctgtgtttttgaaccaaaagtctcatctggcagcatttttagcaggatcgacatcaaaggaggtcttagctaaaaatctgaaggaagttctacaaatgttacaacaggaagaagaagcttcatcctcaaagaaggaagaaacaagttctgctgaagaagacgaagaagatcccttttaccaaaacgaagatgattgttttggtatctgtttagattaaatttaatttcggtcacaaaaccgtctgtttgtaattgatgtgtaattaatgctggacaatactacctgtcctgtagccattaaagtcccggtcaaaactacttgtcttgtaacaaacagtcaaatagtcccggtcaaaactaccggcaactaccggtcttagatttttggctatataaggagtcctcaagcatgttgtgaggcaccctttcatttagccatttttcaggtttcggaagagaggtgctctgaaacaa

SEQ ID NO: 12290 - DNA, 1058 bp, Glycine max
  Gm_smallRNAprecursor_5123
accttaaacacccactcaaccatccaaatactaaaagttcttcaaccaagacactttggttcggacttgaacaaaggaaagagattttcagttccatttgatccggtaggttatacctattgggattacgttgatgcttggactaaggtgttttggcaccaaaatacccgcttcaagcattcatggctgatatatttcaagaccaacacaatttacaattttcccaattggtttttgcaatggtgggacttctttggaccaatcccagagatattcccagaaacggtccaacaaggattttcccaatttaagaaacaatacaattcgcaggaatcacgaattccagcagatcttaaatacttttcaagctttgcactgtcatggatattctcatggcaatatcgttacagcaagactgaaaagacaaaccaatatccatcactacaaagacacgcatttgtaaaatggtggacacaatttgactcatccaaagcggatccagaacaagtaaaactatggttccaatcccatccagaagtcctcaaagcagctgatccagagacttctgtgtttttgaaccaaaagtctcatctggcagcatttttagcaggatcgacatcaaaggaggtcttagctaaaaatctgaaggaagttctacaaatgttacaacaggaagaagaagcttcatcctcaaagaaggaagaaacaagttctgctgaagaagacgaagaagatcccttttaccaaaacgaagatgattgttttggtatctgtttagattaaatttaatttcggtcacaaaaccgtctgtttgtaattgatgtgtaattaatgctggacaatactacctgtcctgtagccattaaagtcccggtcaaaactacttgtcttgtaacaaacagtcaaatagtcccggtcaaaactaccggcaactaccggtcttagatttttggctatataaggagtcctcaagcatgttgtgaggcaccctttcatttagccatttttcaggtttcggaagagaggtgctctgaaacaagattttgtaagcgcttctt

SEQ ID NO: 12291 - DNA, 1055 bp, Glycine max
  Gm_smallRNAprecursor_5124
tcttcaaccaagacactttggttcggacttgaacaaaggaaagagattttcagttccatttgatccggtaggttatacctattgggattacgttgatgcttggactaaggtgttttggcaccaaaatacccgcttcaagcattcatggctgatatatttcaagaccaacacaatttacaattttcccaattggtttttgcaatggtgggacttctttggaccaatcccagagatattcccagaaacggtccaacaaggattttcccaatttaagaaacaatacaattcgcaggaatcacgaattccagcagatcttaaatacttttcaagctttgcactgtcatggatattctcatggcaatatcgttacagcaagactgaaaagacaaaccaatatccatcactacaaagacacgcatttgtaaaatggtggacacaatttgactcatccaaagcggatccagaacaagtaaaactatggttccaatcccatccagaagtcctcaaagcagctgatccagagacttctgtgtttttgaaccaaaagtctcatctggcagcatttttagcaggatcgacatcaaaggaggtcttagctaaaaatctgaaggaagttctacaaatgttacaacaggaagaagaagcttcatcctcaaagaaggaagaaacaagttctgctgaagaagacgaagaagatcccttttaccaaaacgaagatgattgttttggtatctgtttagattaaatttaatttcggtcacaaaaccgtctgtttgtaattgatgtgtaattaatgctggacaatactacctgtcctgtagccattaaagtcccggtcaaaactacttgtcttgtaacaaacagtcaaatagtcccggtcaaaactaccggcaactaccggtcttagatttttggctatataaggagtcctcaagcatgttgtgaggcaccctttcatttagccatttttcaggtttcggaagagaggtgctctgaaacaagattttgtaagcgcttctttctagattcaataaatttctatttttcatctttct

SEQ ID NO: 12292 - DNA, 1215 bp, Glycine max
  Gm_smallRNAprecursor_5125
tcttcaaccaagacactttggttcggacttgaacaaaggaaagagattttcagttccatttgatccggtaggttatacctattgggattacgttgatgcttggactaaggtgttttggcaccaaaatacccgcttcaagcattcatggctgatatatttcaagaccaacacaatttacaattttcccaattggtttttgcaatggtgggacttctttggaccaatcccagagatattcccagaaacggtccaacaaggattttcccaatttaagaaacaatacaattcgcaggaatcacgaattccagcagatcttaaatacttttcaagctttgcactgtcatggatattctcatggcaatatcgttacagcaagactgaaaagacaaaccaatatccatcactacaaagacacgcatttgtaaaatggtggacacaatttgactcatccaaagcggatccagaacaagtaaaactatggttccaatcccatccagaagtcctcaaagcagctgatccagagacttctgtgtttttgaaccaaaagtctcatctggcagcatttttagcaggatcgacatcaaaggaggtcttagctaaaaatctgaaggaagttctacaaatgttacaacaggaagaagaagcttcatcctcaaagaaggaagaaacaagttctgctgaagaagacgaagaagatcccttttaccaaaacgaagatgattgttttggtatctgtttagattaaatttaatttcggtcacaaaaccgtctgtttgtaattgatgtgtaattaatgctggacaatactacctgtcctgtagccattaaagtcccggtcaaaactacttgtcttgtaacaaacagtcaaatagtcccggtcaaaactaccggcaactaccggtcttagatttttggctatataaggagtcctcaagcatgttgtgaggcaccctttcatttagccatttttcaggtttcggaagagaggtgctctgaaacaagattttgtaagcgcttctttctagattcaataaatttctatttttcatctttctctcttctcccttcaccgatcctgtgcggctctgccgccgcttcggtttctttgtttatgaaaacctgggatttgtaagccggtctccggtgtgcccttgatatctgttttcaagtttatattttagattcatcaatcatacatcaatcatactgcattct

SEQ ID NO: 12293 - DNA, 1216 bp, Glycine max
  Gm_smallRNAprecursor_5126
tcttcaaccaagacactttggttcggacttgaacaaaggaaagagattttcagttccatttgatccggtaggttatacctattgggattacgttgatgcttggactaaggtgttttggcaccaaaatacccgcttcaagcattcatggctgatatatttcaagaccaacacaatttacaattttcccaattggtttttgcaatggtgggacttctttggaccaatcccagagatattcccagaaacggtccaacaaggattttcccaatttaagaaacaatacaattcgcaggaatcacgaattccagcagatcttaaatacttttcaagctttgcactgtcatggatattctcatggcaatatcgttacagcaagactgaaaagacaaaccaatatccatcactacaaagacacgcatttgtaaaatggtggacacaatttgactcatccaaagcggatccagaacaagtaaaactatggttccaatcccatccagaagtcctcaaagcagctgatccagagacttctgtgtttttgaaccaaaagtctcatctggcagcatttttagcaggatcgacatcaaaggaggtcttagctaaaaatctgaaggaagttctacaaatgttacaacaggaagaagaagcttcatcctcaaagaaggaagaaacaagttctgctgaagaagacgaagaagatcccttttaccaaaacgaagatgattgttttggtatctgtttagattaaatttaatttcggtcacaaaaccgtctgtttgtaattgatgtgtaattaatgctggacaatactacctgtcctgtagccattaaagtcccggtcaaaactacttgtcttgtaacaaacagtcaaatagtcccggtcaaaactaccggcaactaccggtcttagatttttggctatataaggagtcctcaagcatgttgtgaggcaccctttcatttagccatttttcaggtttcggaagagaggtgctctgaaacaagattttgtaagcgcttctttctagattcaataaatttctatttttcatctttctctcttctcccttcaccgatcctgtgcggctctgccgccgcttcggtttctttgtttatgaaaacctgggatttgtaagccggtctccggtgtgcccttgatatctgttttcaagtttatattttagattcatcaatcatacatcaatcatactgcattctt

SEQ ID NO: 12294 - DNA, 1053 bp, Glycine max
  Gm_smallRNAprecursor_5127
cttcaaccaagacactttggttcggacttgaacaaaggaaagagattttcagttccatttgatccggtaggttatacctattgggattacgttgatgcttggactaaggtgttttggcaccaaaatacccgcttcaagcattcatggctgatatatttcaagaccaacacaatttacaattttcccaattggtttttgcaatggtgggacttctttggaccaatcccagagatattcccagaaacggtccaacaaggattttcccaatttaagaaacaatacaattcgcaggaatcacgaattccagcagatcttaaatacttttcaagctttgcactgtcatggatattctcatggcaatatcgttacagcaagactgaaaagacaaaccaatatccatcactacaaagacacgcatttgtaaaatggtggacacaatttgactcatccaaagcggatccagaacaagtaaaactatggttccaatcccatccagaagtcctcaaagcagctgatccagagacttctgtgtttttgaaccaaaagtctcatctggcagcatttttagcaggatcgacatcaaaggaggtcttagctaaaaatctgaaggaagttctacaaatgttacaacaggaagaagaagcttcatcctcaaagaaggaagaaacaagttctgctgaagaagacgaagaagatcccttttaccaaaacgaagatgattgttttggtatctgtttagattaaatttaatttcggtcacaaaaccgtctgtttgtaattgatgtgtaattaatgctggacaatactacctgtcctgtagccattaaagtcccggtcaaaactacttgtcttgtaacaaacagtcaaatagtcccggtcaaaactaccggcaactaccggtcttagatttttggctatataaggagtcctcaagcatgttgtgaggcaccctttcatttagccatttttcaggtttcggaagagaggtgctctgaaacaagattttgtaagcgcttctttctagattcaataaatttctatttttcatctttc

SEQ ID NO: 12295 - DNA, 1054 bp, Glycine max
  Gm_smallRNAprecursor_5128
cttcaaccaagacactttggttcggacttgaacaaaggaaagagattttcagttccatttgatccggtaggttatacctattgggattacgttgatgcttggactaaggtgttttggcaccaaaatacccgcttcaagcattcatggctgatatatttcaagaccaacacaatttacaattttcccaattggtttttgcaatggtgggacttctttggaccaatcccagagatattcccagaaacggtccaacaaggattttcccaatttaagaaacaatacaattcgcaggaatcacgaattccagcagatcttaaatacttttcaagctttgcactgtcatggatattctcatggcaatatcgttacagcaagactgaaaagacaaaccaatatccatcactacaaagacacgcatttgtaaaatggtggacacaatttgactcatccaaagcggatccagaacaagtaaaactatggttccaatcccatccagaagtcctcaaagcagctgatccagagacttctgtgtttttgaaccaaaagtctcatctggcagcatttttagcaggatcgacatcaaaggaggtcttagctaaaaatctgaaggaagttctacaaatgttacaacaggaagaagaagcttcatcctcaaagaaggaagaaacaagttctgctgaagaagacgaagaagatcccttttaccaaaacgaagatgattgttttggtatctgtttagattaaatttaatttcggtcacaaaaccgtctgtttgtaattgatgtgtaattaatgctggacaatactacctgtcctgtagccattaaagtcccggtcaaaactacttgtcttgtaacaaacagtcaaatagtcccggtcaaaactaccggcaactaccggtcttagatttttggctatataaggagtcctcaagcatgttgtgaggcaccctttcatttagccatttttcaggtttcggaagagaggtgctctgaaacaagattttgtaagcgcttctttctagattcaataaatttctatttttcatctttct

SEQ ID NO: 12296 - DNA, 1041 bp, Glycine max
  Gm_smallRNAprecursor_5129
accaagacactttggttcggacttgaacaaaggaaagagattttcagttccatttgatccggtaggttatacctattgggattacgttgatgcttggactaaggtgttttggcaccaaaatacccgcttcaagcattcatggctgatatatttcaagaccaacacaatttacaattttcccaattggtttttgcaatggtgggacttctttggaccaatcccagagatattcccagaaacggtccaacaaggattttcccaatttaagaaacaatacaattcgcaggaatcacgaattccagcagatcttaaatacttttcaagctttgcactgtcatggatattctcatggcaatatcgttacagcaagactgaaaagacaaaccaatatccatcactacaaagacacgcatttgtaaaatggtggacacaatttgactcatccaaagcggatccagaacaagtaaaactatggttccaatcccatccagaagtcctcaaagcagctgatccagagacttctgtgtttttgaaccaaaagtctcatctggcagcatttttagcaggatcgacatcaaaggaggtcttagctaaaaatctgaaggaagttctacaaatgttacaacaggaagaagaagcttcatcctcaaagaaggaagaaacaagttctgctgaagaagacgaagaagatcccttttaccaaaacgaagatgattgttttggtatctgtttagattaaatttaatttcggtcacaaaaccgtctgtttgtaattgatgtgtaattaatgctggacaatactacctgtcctgtagccattaaagtcccggtcaaaactacttgtcttgtaacaaacagtcaaatagtcccggtcaaaactaccggcaactaccggtcttagatttttggctatataaggagtcctcaagcatgttgtgaggcaccctttcatttagccatttttcaggtttcggaagagaggtgctctgaaacaagattttgtaagcgcttctttctagattcaataaatttctatttttc

SEQ ID NO: 12297 - DNA, 1031 bp, Glycine max
  Gm_smallRNAprecursor_5130
gacactttggttcggacttgaacaaaggaaagagattttcagttccatttgatccggtaggttatacctattgggattacgttgatgcttggactaaggtgttttggcaccaaaatacccgcttcaagcattcatggctgatatatttcaagaccaacacaatttacaattttcccaattggtttttgcaatggtgggacttctttggaccaatcccagagatattcccagaaacggtccaacaaggattttcccaatttaagaaacaatacaattcgcaggaatcacgaattccagcagatcttaaatacttttcaagctttgcactgtcatggatattctcatggcaatatcgttacagcaagactgaaaagacaaaccaatatccatcactacaaagacacgcatttgtaaaatggtggacacaatttgactcatccaaagcggatccagaacaagtaaaactatggttccaatcccatccagaagtcctcaaagcagctgatccagagacttctgtgtttttgaaccaaaagtctcatctggcagcatttttagcaggatcgacatcaaaggaggtcttagctaaaaatctgaaggaagttctacaaatgttacaacaggaagaagaagcttcatcctcaaagaaggaagaaacaagttctgctgaagaagacgaagaagatcccttttaccaaaacgaagatgattgttttggtatctgtttagattaaatttaatttcggtcacaaaaccgtctgtttgtaattgatgtgtaattaatgctggacaatactacctgtcctgtagccattaaagtcccggtcaaaactacttgtcttgtaacaaacagtcaaatagtcccggtcaaaactaccggcaactaccggtcttagatttttggctatataaggagtcctcaagcatgttgtgaggcaccctttcatttagccatttttcaggtttcggaagagaggtgctctgaaacaagattttgtaagcgcttctttctagattcaataaatttctat

SEQ ID NO: 12298 - DNA, 1138 bp, Glycine max
  Gm_smallRNAprecursor_5131
ggttcggacttgaacaaaggaaagagattttcagttccatttgatccggtaggttatacctattgggattacgttgatgcttggactaaggtgttttggcaccaaaatacccgcttcaagcattcatggctgatatatttcaagaccaacacaatttacaattttcccaattggtttttgcaatggtgggacttctttggaccaatcccagagatattcccagaaacggtccaacaaggattttcccaatttaagaaacaatacaattcgcaggaatcacgaattccagcagatcttaaatacttttcaagctttgcactgtcatggatattctcatggcaatatcgttacagcaagactgaaaagacaaaccaatatccatcactacaaagacacgcatttgtaaaatggtggacacaatttgactcatccaaagcggatccagaacaagtaaaactatggttccaatcccatccagaagtcctcaaagcagctgatccagagacttctgtgtttttgaaccaaaagtctcatctggcagcatttttagcaggatcgacatcaaaggaggtcttagctaaaaatctgaaggaagttctacaaatgttacaacaggaagaagaagcttcatcctcaaagaaggaagaaacaagttctgctgaagaagacgaagaagatcccttttaccaaaacgaagatgattgttttggtatctgtttagattaaatttaatttcggtcacaaaaccgtctgtttgtaattgatgtgtaattaatgctggacaatactacctgtcctgtagccattaaagtcccggtcaaaactacttgtcttgtaacaaacagtcaaatagtcccggtcaaaactaccggcaactaccggtcttagatttttggctatataaggagtcctcaagcatgttgtgaggcaccctttcatttagccatttttcaggtttcggaagagaggtgctctgaaacaagattttgtaagcgcttctttctagattcaataaatttctatttttcatctttctctcttctcccttcaccgatcctgtgcggctctgccgccgcttcggtttctttgtttatgaaaacctgggatttgtaagccggtctccggtgtgcccttgata

SEQ ID NO: 12299 - DNA, 1139 bp, Glycine max
  Gm_smallRNAprecursor_5132
ggttcggacttgaacaaaggaaagagattttcagttccatttgatccggtaggttatacctattgggattacgttgatgcttggactaaggtgttttggcaccaaaatacccgcttcaagcattcatggctgatatatttcaagaccaacacaatttacaattttcccaattggtttttgcaatggtgggacttctttggaccaatcccagagatattcccagaaacggtccaacaaggattttcccaatttaagaaacaatacaattcgcaggaatcacgaattccagcagatcttaaatacttttcaagctttgcactgtcatggatattctcatggcaatatcgttacagcaagactgaaaagacaaaccaatatccatcactacaaagacacgcatttgtaaaatggtggacacaatttgactcatccaaagcggatccagaacaagtaaaactatggttccaatcccatccagaagtcctcaaagcagctgatccagagacttctgtgtttttgaaccaaaagtctcatctggcagcatttttagcaggatcgacatcaaaggaggtcttagctaaaaatctgaaggaagttctacaaatgttacaacaggaagaagaagcttcatcctcaaagaaggaagaaacaagttctgctgaagaagacgaagaagatcccttttaccaaaacgaagatgattgttttggtatctgtttagattaaatttaatttcggtcacaaaaccgtctgtttgtaattgatgtgtaattaatgctggacaatactacctgtcctgtagccattaaagtcccggtcaaaactacttgtcttgtaacaaacagtcaaatagtcccggtcaaaactaccggcaactaccggtcttagatttttggctatataaggagtcctcaagcatgttgtgaggcaccctttcatttagccatttttcaggtttcggaagagaggtgctctgaaacaagattttgtaagcgcttctttctagattcaataaatttctatttttcatctttctctcttctcccttcaccgatcctgtgcggctctgccgccgcttcggtttctttgtttatgaaaacctgggatttgtaagccggtctccggtgtgcccttgatat

SEQ ID NO: 12300 - DNA, 1141 bp, Glycine max
  Gm_smallRNAprecursor_5133
ggttcggacttgaacaaaggaaagagattttcagttccatttgatccggtaggttatacctattgggattacgttgatgcttggactaaggtgttttggcaccaaaatacccgcttcaagcattcatggctgatatatttcaagaccaacacaatttacaattttcccaattggtttttgcaatggtgggacttctttggaccaatcccagagatattcccagaaacggtccaacaaggattttcccaatttaagaaacaatacaattcgcaggaatcacgaattccagcagatcttaaatacttttcaagctttgcactgtcatggatattctcatggcaatatcgttacagcaagactgaaaagacaaaccaatatccatcactacaaagacacgcatttgtaaaatggtggacacaatttgactcatccaaagcggatccagaacaagtaaaactatggttccaatcccatccagaagtcctcaaagcagctgatccagagacttctgtgtttttgaaccaaaagtctcatctggcagcatttttagcaggatcgacatcaaaggaggtcttagctaaaaatctgaaggaagttctacaaatgttacaacaggaagaagaagcttcatcctcaaagaaggaagaaacaagttctgctgaagaagacgaagaagatcccttttaccaaaacgaagatgattgttttggtatctgtttagattaaatttaatttcggtcacaaaaccgtctgtttgtaattgatgtgtaattaatgctggacaatactacctgtcctgtagccattaaagtcccggtcaaaactacttgtcttgtaacaaacagtcaaatagtcccggtcaaaactaccggcaactaccggtcttagatttttggctatataaggagtcctcaagcatgttgtgaggcaccctttcatttagccatttttcaggtttcggaagagaggtgctctgaaacaagattttgtaagcgcttctttctagattcaataaatttctatttttcatctttctctcttctcccttcaccgatcctgtgcggctctgccgccgcttcggtttctttgtttatgaaaacctgggatttgtaagccggtctccggtgtgcccttgatatct

SEQ ID NO: 12301 - DNA, 1187 bp, Glycine max
  Gm_smallRNAprecursor_5134
ggttcggacttgaacaaaggaaagagattttcagttccatttgatccggtaggttatacctattgggattacgttgatgcttggactaaggtgttttggcaccaaaatacccgcttcaagcattcatggctgatatatttcaagaccaacacaatttacaattttcccaattggtttttgcaatggtgggacttctttggaccaatcccagagatattcccagaaacggtccaacaaggattttcccaatttaagaaacaatacaattcgcaggaatcacgaattccagcagatcttaaatacttttcaagctttgcactgtcatggatattctcatggcaatatcgttacagcaagactgaaaagacaaaccaatatccatcactacaaagacacgcatttgtaaaatggtggacacaatttgactcatccaaagcggatccagaacaagtaaaactatggttccaatcccatccagaagtcctcaaagcagctgatccagagacttctgtgtttttgaaccaaaagtctcatctggcagcatttttagcaggatcgacatcaaaggaggtcttagctaaaaatctgaaggaagttctacaaatgttacaacaggaagaagaagcttcatcctcaaagaaggaagaaacaagttctgctgaagaagacgaagaagatcccttttaccaaaacgaagatgattgttttggtatctgtttagattaaatttaatttcggtcacaaaaccgtctgtttgtaattgatgtgtaattaatgctggacaatactacctgtcctgtagccattaaagtcccggtcaaaactacttgtcttgtaacaaacagtcaaatagtcccggtcaaaactaccggcaactaccggtcttagatttttggctatataaggagtcctcaagcatgttgtgaggcaccctttcatttagccatttttcaggtttcggaagagaggtgctctgaaacaagattttgtaagcgcttctttctagattcaataaatttctatttttcatctttctctcttctcccttcaccgatcctgtgcggctctgccgccgcttcggtttctttgtttatgaaaacctgggatttgtaagccggtctccggtgtgcccttgatatctgttttcaagtttatattttagattcatcaatcatacatcaatcata

SEQ ID NO: 12302 - DNA, 1080 bp, Glycine max
  Gm_smallRNAprecursor_5135
tcaagcattcatggctgatatatttcaagaccaacacaatttacaattttcccaattggtttttgcaatggtgggacttctttggaccaatcccagagatattcccagaaacggtccaacaaggattttcccaatttaagaaacaatacaattcgcaggaatcacgaattccagcagatcttaaatacttttcaagctttgcactgtcatggatattctcatggcaatatcgttacagcaagactgaaaagacaaaccaatatccatcactacaaagacacgcatttgtaaaatggtggacacaatttgactcatccaaagcggatccagaacaagtaaaactatggttccaatcccatccagaagtcctcaaagcagctgatccagagacttctgtgtttttgaaccaaaagtctcatctggcagcatttttagcaggatcgacatcaaaggaggtcttagctaaaaatctgaaggaagttctacaaatgttacaacaggaagaagaagcttcatcctcaaagaaggaagaaacaagttctgctgaagaagacgaagaagatcccttttaccaaaacgaagatgattgttttggtatctgtttagattaaatttaatttcggtcacaaaaccgtctgtttgtaattgatgtgtaattaatgctggacaatactacctgtcctgtagccattaaagtcccggtcaaaactacttgtcttgtaacaaacagtcaaatagtcccggtcaaaactaccggcaactaccggtcttagatttttggctatataaggagtcctcaagcatgttgtgaggcaccctttcatttagccatttttcaggtttcggaagagaggtgctctgaaacaagattttgtaagcgcttctttctagattcaataaatttctatttttcatctttctctcttctcccttcaccgatcctgtgcggctctgccgccgcttcggtttctttgtttatgaaaacctgggatttgtaagccggtctccggtgtgcccttgatatctgttttcaagtttatattttagattcatcaatcatacatcaatcatactgcattc

SEQ ID NO: 12303 - DNA, 1081 bp, Glycine max
  Gm_smallRNAprecursor_5136
tcaagcattcatggctgatatatttcaagaccaacacaatttacaattttcccaattggtttttgcaatggtgggacttctttggaccaatcccagagatattcccagaaacggtccaacaaggattttcccaatttaagaaacaatacaattcgcaggaatcacgaattccagcagatcttaaatacttttcaagctttgcactgtcatggatattctcatggcaatatcgttacagcaagactgaaaagacaaaccaatatccatcactacaaagacacgcatttgtaaaatggtggacacaatttgactcatccaaagcggatccagaacaagtaaaactatggttccaatcccatccagaagtcctcaaagcagctgatccagagacttctgtgtttttgaaccaaaagtctcatctggcagcatttttagcaggatcgacatcaaaggaggtcttagctaaaaatctgaaggaagttctacaaatgttacaacaggaagaagaagcttcatcctcaaagaaggaagaaacaagttctgctgaagaagacgaagaagatcccttttaccaaaacgaagatgattgttttggtatctgtttagattaaatttaatttcggtcacaaaaccgtctgtttgtaattgatgtgtaattaatgctggacaatactacctgtcctgtagccattaaagtcccggtcaaaactacttgtcttgtaacaaacagtcaaatagtcccggtcaaaactaccggcaactaccggtcttagatttttggctatataaggagtcctcaagcatgttgtgaggcaccctttcatttagccatttttcaggtttcggaagagaggtgctctgaaacaagattttgtaagcgcttctttctagattcaataaatttctatttttcatctttctctcttctcccttcaccgatcctgtgcggctctgccgccgcttcggtttctttgtttatgaaaacctgggatttgtaagccggtctccggtgtgcccttgatatctgttttcaagtttatattttagattcatcaatcatacatcaatcatactgcattct

SEQ ID NO: 12304 - DNA, 1082 bp, Glycine max
  Gm_smallRNAprecursor_5137
tcaagcattcatggctgatatatttcaagaccaacacaatttacaattttcccaattggtttttgcaatggtgggacttctttggaccaatcccagagatattcccagaaacggtccaacaaggattttcccaatttaagaaacaatacaattcgcaggaatcacgaattccagcagatcttaaatacttttcaagctttgcactgtcatggatattctcatggcaatatcgttacagcaagactgaaaagacaaaccaatatccatcactacaaagacacgcatttgtaaaatggtggacacaatttgactcatccaaagcggatccagaacaagtaaaactatggttccaatcccatccagaagtcctcaaagcagctgatccagagacttctgtgtttttgaaccaaaagtctcatctggcagcatttttagcaggatcgacatcaaaggaggtcttagctaaaaatctgaaggaagttctacaaatgttacaacaggaagaagaagcttcatcctcaaagaaggaagaaacaagttctgctgaagaagacgaagaagatcccttttaccaaaacgaagatgattgttttggtatctgtttagattaaatttaatttcggtcacaaaaccgtctgtttgtaattgatgtgtaattaatgctggacaatactacctgtcctgtagccattaaagtcccggtcaaaactacttgtcttgtaacaaacagtcaaatagtcccggtcaaaactaccggcaactaccggtcttagatttttggctatataaggagtcctcaagcatgttgtgaggcaccctttcatttagccatttttcaggtttcggaagagaggtgctctgaaacaagattttgtaagcgcttctttctagattcaataaatttctatttttcatctttctctcttctcccttcaccgatcctgtgcggctctgccgccgcttcggtttctttgtttatgaaaacctgggatttgtaagccggtctccggtgtgcccttgatatctgttttcaagtttatattttagattcatcaatcatacatcaatcatactgcattctt

SEQ ID NO: 12305 - DNA, 1057 bp, Glycine max
  Gm_smallRNAprecursor_5138
atttcaagaccaacacaatttacaattttcccaattggtttttgcaatggtgggacttctttggaccaatcccagagatattcccagaaacggtccaacaaggattttcccaatttaagaaacaatacaattcgcaggaatcacgaattccagcagatcttaaatacttttcaagctttgcactgtcatggatattctcatggcaatatcgttacagcaagactgaaaagacaaaccaatatccatcactacaaagacacgcatttgtaaaatggtggacacaatttgactcatccaaagcggatccagaacaagtaaaactatggttccaatcccatccagaagtcctcaaagcagctgatccagagacttctgtgtttttgaaccaaaagtctcatctggcagcatttttagcaggatcgacatcaaaggaggtcttagctaaaaatctgaaggaagttctacaaatgttacaacaggaagaagaagcttcatcctcaaagaaggaagaaacaagttctgctgaagaagacgaagaagatcccttttaccaaaacgaagatgattgttttggtatctgtttagattaaatttaatttcggtcacaaaaccgtctgtttgtaattgatgtgtaattaatgctggacaatactacctgtcctgtagccattaaagtcccggtcaaaactacttgtcttgtaacaaacagtcaaatagtcccggtcaaaactaccggcaactaccggtcttagatttttggctatataaggagtcctcaagcatgttgtgaggcaccctttcatttagccatttttcaggtttcggaagagaggtgctctgaaacaagattttgtaagcgcttctttctagattcaataaatttctatttttcatctttctctcttctcccttcaccgatcctgtgcggctctgccgccgcttcggtttctttgtttatgaaaacctgggatttgtaagccggtctccggtgtgcccttgatatctgttttcaagtttatattttagattcatcaatcatacatcaatcatactgcat

SEQ ID NO: 12306 - DNA, 1064 bp, Glycine max
  Gm_smallRNAprecursor_5139
atttcaagaccaacacaatttacaattttcccaattggtttttgcaatggtgggacttctttggaccaatcccagagatattcccagaaacggtccaacaaggattttcccaatttaagaaacaatacaattcgcaggaatcacgaattccagcagatcttaaatacttttcaagctttgcactgtcatggatattctcatggcaatatcgttacagcaagactgaaaagacaaaccaatatccatcactacaaagacacgcatttgtaaaatggtggacacaatttgactcatccaaagcggatccagaacaagtaaaactatggttccaatcccatccagaagtcctcaaagcagctgatccagagacttctgtgtttttgaaccaaaagtctcatctggcagcatttttagcaggatcgacatcaaaggaggtcttagctaaaaatctgaaggaagttctacaaatgttacaacaggaagaagaagcttcatcctcaaagaaggaagaaacaagttctgctgaagaagacgaagaagatcccttttaccaaaacgaagatgattgttttggtatctgtttagattaaatttaatttcggtcacaaaaccgtctgtttgtaattgatgtgtaattaatgctggacaatactacctgtcctgtagccattaaagtcccggtcaaaactacttgtcttgtaacaaacagtcaaatagtcccggtcaaaactaccggcaactaccggtcttagatttttggctatataaggagtcctcaagcatgttgtgaggcaccctttcatttagccatttttcaggtttcggaagagaggtgctctgaaacaagattttgtaagcgcttctttctagattcaataaatttctatttttcatctttctctcttctcccttcaccgatcctgtgcggctctgccgccgcttcggtttctttgtttatgaaaacctgggatttgtaagccggtctccggtgtgcccttgatatctgttttcaagtttatattttagattcatcaatcatacatcaatcatactgcattcttact

SEQ ID NO: 12307 - DNA, 1059 bp, Glycine max
  Gm_smallRNAprecursor_5140
tttcaagaccaacacaatttacaattttcccaattggtttttgcaatggtgggacttctttggaccaatcccagagatattcccagaaacggtccaacaaggattttcccaatttaagaaacaatacaattcgcaggaatcacgaattccagcagatcttaaatacttttcaagctttgcactgtcatggatattctcatggcaatatcgttacagcaagactgaaaagacaaaccaatatccatcactacaaagacacgcatttgtaaaatggtggacacaatttgactcatccaaagcggatccagaacaagtaaaactatggttccaatcccatccagaagtcctcaaagcagctgatccagagacttctgtgtttttgaaccaaaagtctcatctggcagcatttttagcaggatcgacatcaaaggaggtcttagctaaaaatctgaaggaagttctacaaatgttacaacaggaagaagaagcttcatcctcaaagaaggaagaaacaagttctgctgaagaagacgaagaagatcccttttaccaaaacgaagatgattgttttggtatctgtttagattaaatttaatttcggtcacaaaaccgtctgtttgtaattgatgtgtaattaatgctggacaatactacctgtcctgtagccattaaagtcccggtcaaaactacttgtcttgtaacaaacagtcaaatagtcccggtcaaaactaccggcaactaccggtcttagatttttggctatataaggagtcctcaagcatgttgtgaggcaccctttcatttagccatttttcaggtttcggaagagaggtgctctgaaacaagattttgtaagcgcttctttctagattcaataaatttctatttttcatctttctctcttctcccttcaccgatcctgtgcggctctgccgccgcttcggtttctttgtttatgaaaacctgggatttgtaagccggtctccggtgtgcccttgatatctgttttcaagtttatattttagattcatcaatcatacatcaatcatactgcattct

SEQ ID NO: 12308 - DNA, 1060 bp, Glycine max
  Gm_smallRNAprecursor_5141
tttcaagaccaacacaatttacaattttcccaattggtttttgcaatggtgggacttctttggaccaatcccagagatattcccagaaacggtccaacaaggattttcccaatttaagaaacaatacaattcgcaggaatcacgaattccagcagatcttaaatacttttcaagctttgcactgtcatggatattctcatggcaatatcgttacagcaagactgaaaagacaaaccaatatccatcactacaaagacacgcatttgtaaaatggtggacacaatttgactcatccaaagcggatccagaacaagtaaaactatggttccaatcccatccagaagtcctcaaagcagctgatccagagacttctgtgtttttgaaccaaaagtctcatctggcagcatttttagcaggatcgacatcaaaggaggtcttagctaaaaatctgaaggaagttctacaaatgttacaacaggaagaagaagcttcatcctcaaagaaggaagaaacaagttctgctgaagaagacgaagaagatcccttttaccaaaacgaagatgattgttttggtatctgtttagattaaatttaatttcggtcacaaaaccgtctgtttgtaattgatgtgtaattaatgctggacaatactacctgtcctgtagccattaaagtcccggtcaaaactacttgtcttgtaacaaacagtcaaatagtcccggtcaaaactaccggcaactaccggtcttagatttttggctatataaggagtcctcaagcatgttgtgaggcaccctttcatttagccatttttcaggtttcggaagagaggtgctctgaaacaagattttgtaagcgcttctttctagattcaataaatttctatttttcatctttctctcttctcccttcaccgatcctgtgcggctctgccgccgcttcggtttctttgtttatgaaaacctgggatttgtaagccggtctccggtgtgcccttgatatctgttttcaagtttatattttagattcatcaatcatacatcaatcatactgcattctt

SEQ ID NO: 12309 - DNA, 1060 bp, Glycine max; identical to SEQ ID NO: 12308
  Gm_smallRNAprecursor_5142

SEQ ID NO: 12310 - DNA, 1063 bp, Glycine max
  Gm_smallRNAprecursor_5143
tttcaagaccaacacaatttacaattttcccaattggtttttgcaatggtgggacttctttggaccaatcccagagatattcccagaaacggtccaacaaggattttcccaatttaagaaacaatacaattcgcaggaatcacgaattccagcagatcttaaatacttttcaagctttgcactgtcatggatattctcatggcaatatcgttacagcaagactgaaaagacaaaccaatatccatcactacaaagacacgcatttgtaaaatggtggacacaatttgactcatccaaagcggatccagaacaagtaaaactatggttccaatcccatccagaagtcctcaaagcagctgatccagagacttctgtgtttttgaaccaaaagtctcatctggcagcatttttagcaggatcgacatcaaaggaggtcttagctaaaaatctgaaggaagttctacaaatgttacaacaggaagaagaagcttcatcctcaaagaaggaagaaacaagttctgctgaagaagacgaagaagatcccttttaccaaaacgaagatgattgttttggtatctgtttagattaaatttaatttcggtcacaaaaccgtctgtttgtaattgatgtgtaattaatgctggacaatactacctgtcctgtagccattaaagtcccggtcaaaactacttgtcttgtaacaaacagtcaaatagtcccggtcaaaactaccggcaactaccggtcttagatttttggctatataaggagtcctcaagcatgttgtgaggcaccctttcatttagccatttttcaggtttcggaagagaggtgctctgaaacaagattttgtaagcgcttctttctagattcaataaatttctatttttcatctttctctcttctcccttcaccgatcctgtgcggctctgccgccgcttcggtttctttgtttatgaaaacctgggatttgtaagccggtctccggtgtgcccttgatatctgttttcaagtttatattttagattcatcaatcatacatcaatcatactgcattcttact

SEQ ID NO: 12311 - DNA, 1056 bp, Glycine max
  Gm_smallRNAprecursor_5144
caagaccaacacaatttacaattttcccaattggtttttgcaatggtgggacttctttggaccaatcccagagatattcccagaaacggtccaacaaggattttcccaatttaagaaacaatacaattcgcaggaatcacgaattccagcagatcttaaatacttttcaagctttgcactgtcatggatattctcatggcaatatcgttacagcaagactgaaaagacaaaccaatatccatcactacaaagacacgcatttgtaaaatggtggacacaatttgactcatccaaagcggatccagaacaagtaaaactatggttccaatcccatccagaagtcctcaaagcagctgatccagagacttctgtgtttttgaaccaaaagtctcatctggcagcatttttagcaggatcgacatcaaaggaggtcttagctaaaaatctgaaggaagttctacaaatgttacaacaggaagaagaagcttcatcctcaaagaaggaagaaacaagttctgctgaagaagacgaagaagatcccttttaccaaaacgaagatgattgttttggtatctgtttagattaaatttaatttcggtcacaaaaccgtctgtttgtaattgatgtgtaattaatgctggacaatactacctgtcctgtagccattaaagtcccggtcaaaactacttgtcttgtaacaaacagtcaaatagtcccggtcaaaactaccggcaactaccggtcttagatttttggctatataaggagtcctcaagcatgttgtgaggcaccctttcatttagccatttttcaggtttcggaagagaggtgctctgaaacaagattttgtaagcgcttctttctagattcaataaatttctatttttcatctttctctcttctcccttcaccgatcctgtgcggctctgccgccgcttcggtttctttgtttatgaaaacctgggatttgtaagccggtctccggtgtgcccttgatatctgttttcaagtttatattttagattcatcaatcatacatcaatcatactgcattct

SEQ ID NO: 12312 - DNA, 1056 bp, Glycine max; identical to SEQ ID NO: 12311
  Gm_smallRNAprecursor_5145

SEQ ID NO: 12313 - DNA, 1057 bp, Glycine max
  Gm_smallRNAprecursor_5146
caagaccaacacaatttacaattttcccaattggtttttgcaatggtgggacttctttggaccaatcccagagatattcccagaaacggtccaacaaggattttcccaatttaagaaacaatacaattcgcaggaatcacgaattccagcagatcttaaatacttttcaagctttgcactgtcatggatattctcatggcaatatcgttacagcaagactgaaaagacaaaccaatatccatcactacaaagacacgcatttgtaaaatggtggacacaatttgactcatccaaagcggatccagaacaagtaaaactatggttccaatcccatccagaagtcctcaaagcagctgatccagagacttctgtgtttttgaaccaaaagtctcatctggcagcatttttagcaggatcgacatcaaaggaggtcttagctaaaaatctgaaggaagttctacaaatgttacaacaggaagaagaagcttcatcctcaaagaaggaagaaacaagttctgctgaagaagacgaagaagatcccttttaccaaaacgaagatgattgttttggtatctgtttagattaaatttaatttcggtcacaaaaccgtctgtttgtaattgatgtgtaattaatgctggacaatactacctgtcctgtagccattaaagtcccggtcaaaactacttgtcttgtaacaaacagtcaaatagtcccggtcaaaactaccggcaactaccggtcttagatttttggctatataaggagtcctcaagcatgttgtgaggcaccctttcatttagccatttttcaggtttcggaagagaggtgctctgaaacaagattttgtaagcgcttctttctagattcaataaatttctatttttcatctttctctcttctcccttcaccgatcctgtgcggctctgccgccgcttcggtttctttgtttatgaaaacctgggatttgtaagccggtctccggtgtgcccttgatatctgttttcaagtttatattttagattcatcaatcatacatcaatcatactgcattctt

SEQ ID NO: 12314 - DNA, 1057 bp, Glycine max; identical to SEQ ID NO: 12313
  Gm_smallRNAprecursor_5147

SEQ ID NO: 12315 - DNA, 1057 bp, Glycine max; identical to SEQ ID NO: 12313
  Gm_smallRNAprecursor_5148

SEQ ID NO: 12316 - DNA, 1057 bp, Glycine max; identical to SEQ ID NO: 12313
  Gm_smallRNAprecursor_5149

SEQ ID NO: 12317 - DNA, 1155 bp, Glycine max
  Gm_smallRNAprecursor_5150
tgggacttctttggaccaatcccagagatattcccagaaacggtccaacaaggattttcccaatttaagaaacaatacaattcgcaggaatcacgaattccagcagatcttaaatacttttcaagctttgcactgtcatggatattctcatggcaatatcgttacagcaagactgaaaagacaaaccaatatccatcactacaaagacacgcatttgtaaaatggtggacacaatttgactcatccaaagcggatccagaacaagtaaaactatggttccaatcccatccagaagtcctcaaagcagctgatccagagacttctgtgtttttgaaccaaaagtctcatctggcagcatttttagcaggatcgacatcaaaggaggtcttagctaaaaatctgaaggaagttctacaaatgttacaacaggaagaagaagcttcatcctcaaagaaggaagaaacaagttctgctgaagaagacgaagaagatcccttttaccaaaacgaagatgattgttttggtatctgtttagattaaatttaatttcggtcacaaaaccgtctgtttgtaattgatgtgtaattaatgctggacaatactacctgtcctgtagccattaaagtcccggtcaaaactacttgtcttgtaacaaacagtcaaatagtcccggtcaaaactaccggcaactaccggtcttagatttttggctatataaggagtcctcaagcatgttgtgaggcaccctttcatttagccatttttcaggtttcggaagagaggtgctctgaaacaagattttgtaagcgcttctttctagattcaataaatttctatttttcatctttctctcttctcccttcaccgatcctgtgcggctctgccgccgcttcggtttctttgtttatgaaaacctgggatttgtaagccggtctccggtgtgcccttgatatctgttttcaagtttatattttagattcatcaatcatacatcaatcatactgcattcttacttcctatatatatatatatatatatatatatatatatatattatgtgtgtgtgtataagtagataattcaaatgataattcttaaatataaatgtttataaaactattaatgatttttcaaatatgatttggtattgtgtaa

SEQ ID NO: 12318 - DNA, 1142 bp, Glycine max
  Gm_smallRNAprecursor_5151
gaccaatcccagagatattcccagaaacggtccaacaaggattttcccaatttaagaaacaatacaattcgcaggaatcacgaattccagcagatcttaaatacttttcaagctttgcactgtcatggatattctcatggcaatatcgttacagcaagactgaaaagacaaaccaatatccatcactacaaagacacgcatttgtaaaatggtggacacaatttgactcatccaaagcggatccagaacaagtaaaactatggttccaatcccatccagaagtcctcaaagcagctgatccagagacttctgtgtttttgaaccaaaagtctcatctggcagcatttttagcaggatcgacatcaaaggaggtcttagctaaaaatctgaaggaagttctacaaatgttacaacaggaagaagaagcttcatcctcaaagaaggaagaaacaagttctgctgaagaagacgaagaagatcccttttaccaaaacgaagatgattgttttggtatctgtttagattaaatttaatttcggtcacaaaaccgtctgtttgtaattgatgtgtaattaatgctggacaatactacctgtcctgtagccattaaagtcccggtcaaaactacttgtcttgtaacaaacagtcaaatagtcccggtcaaaactaccggcaactaccggtcttagatttttggctatataaggagtcctcaagcatgttgtgaggcaccctttcatttagccatttttcaggtttcggaagagaggtgctctgaaacaagattttgtaagcgcttctttctagattcaataaatttctatttttcatctttctctcttctcccttcaccgatcctgtgcggctctgccgccgcttcggtttctttgtttatgaaaacctgggatttgtaagccggtctccggtgtgcccttgatatctgttttcaagtttatattttagattcatcaatcatacatcaatcatactgcattcttacttcctatatatatatatatatatatatatatatatatatattatgtgtgtgtgtataagtagataattcaaatgataattcttaaatataaatgtttataaaactattaatgatttttcaaatatgatttggtattgtgtaa

SEQ ID NO: 12319 - DNA, 1198 bp, Glycine max
  Gm_smallRNAprecursor_5152
aacggtccaacaaggattttcccaatttaagaaacaatacaattcgcaggaatcacgaattccagcagatcttaaatacttttcaagctttgcactgtcatggatattctcatggcaatatcgttacagcaagactgaaaagacaaaccaatatccatcactacaaagacacgcatttgtaaaatggtggacacaatttgactcatccaaagcggatccagaacaagtaaaactatggttccaatcccatccagaagtcctcaaagcagctgatccagagacttctgtgtttttgaaccaaaagtctcatctggcagcatttttagcaggatcgacatcaaaggaggtcttagctaaaaatctgaaggaagttctacaaatgttacaacaggaagaagaagcttcatcctcaaagaaggaagaaacaagttctgctgaagaagacgaagaagatcccttttaccaaaacgaagatgattgttttggtatctgtttagattaaatttaatttcggtcacaaaaccgtctgtttgtaattgatgtgtaattaatgctggacaatactacctgtcctgtagccattaaagtcccggtcaaaactacttgtcttgtaacaaacagtcaaatagtcccggtcaaaactaccggcaactaccggtcttagatttttggctatataaggagtcctcaagcatgttgtgaggcaccctttcatttagccatttttcaggtttcggaagagaggtgctctgaaacaagattttgtaagcgcttctttctagattcaataaatttctatttttcatctttctctcttctcccttcaccgatcctgtgcggctctgccgccgcttcggtttctttgtttatgaaaacctgggatttgtaagccggtctccggtgtgcccttgatatctgttttcaagtttatattttagattcatcaatcatacatcaatcatactgcattcttacttcctatatatatatatatatatatatatatatatatatattatgtgtgtgtgtataagtagataattcaaatgataattcttaaatataaatgtttataaaactattaatgatttttcaaatatgatttggtattgtgtaaactaaattgttattaggaatgatagtgacatgaggtggtcttaaaaagtaatatctcatctttatcatcatcatcatcatc

SEQ ID NO: 12320 - DNA, 1041 bp, Glycine max
  Gm_smallRNAprecursor_5153
gcagtttaaatctgacttgactaggaaatgggcacttgcagccgacaaggacggtgcggacgacattgtctgtgaaaaatattgcattagcaaggagaaatggacccagttttgtcagacccgcagagacccctcatgggaggtatgtactttatcattttagttgttttccataacaaaatcacttcttataatttattgtaataatcattttcattaatgttaaacttttgcaggatgtgcgaaaaaaggcataggcctcccagaagcaaaacactgccccccatgtattgtctcatgggggttatgaatatttagaagaaaagctcatggctgagaagacaaagaaaagactggaagaagctgcccagtctggaagcactgagggcatcattgaccctccatctcccatcagacgccacgtgaaatggaagatggctcgcacaaagaaaactggacagatgacatctgaggcagcaaaggaaatagctgacaggattgtaagtcatttttaattaataattgtaatcatctttgtgtattctgtgaattccttggacaaatatgtgttcggtacaggattctttggacgagcaggcgtcacagggatcgttcgtcccccatggacgtcaggatatcctgattgctgccattgggcgaccagagcaccctggccgtgttcgtgctgttggagctggtgtcaccataaagcaatactttggatcggcttcacgaacgtcccgcggttcttcctccatgcctcctaaagacctagaacagctgacccaacaaatcagagaccaattggaggagtcaatcacagaaaaagtgactcgaaagatgatggcatccttcagccagatgcagtcccagtttcagtttcagatgcaatcacagggacttgcactacctccagagccagaggttggtccctcagtttcaatttcagtcttatatatattttatgtgtgtgtacactaattgtagttaacgtttaattaatatccaaatttcattatgtatttagtgtaatagacaaaa

SEQ ID NO: 12321 - DNA, 1033 bp, Glycine max
  Gm_smallRNAprecursor_5154
ggatccctacaagagaccaatagtagcatcctttttttcaggttgtcttttaactaatccatacttggaatcaggtttttaaatttttctctatcatttaatcacaactatattttgctttatacaagtaggtttttaatgtttgtgatttttaatttgttcagagttgcttttacatcctttcatcccttcgcaccagagctctaaccaaaactccactatctggtttgtaacttaatttatttaggtaaaattgtatttttagtccctcaatttatctttaatttcagatttagtccctcattaatttaattcacgaattgggtcctcctattttgtaacatcgtgcaatgttgatcccccagaccacaattggacgttgaccgttagcaagtgacgttgactgtcacgtgtcacgttcttattggatgatgactgccacgtgtcatgttctgattgtatgatgaaaacaacaatgtatttcatctttcaaggaattgacatccaatcagaacatgacacgtggcagttatcatccaataagaacgtgacacgtgacagtcaacattcctttgtaatgatcaacgttcaattgtggcttggaggaccaacattgcacgattttacaaaataagaggactcaattcgtgaattaaattaatgtgggaccaaatccaaaactgatgataaactgggggaccaaatttgtaattttgtcatttatttatattgttttttttataagaaatgacctatggttcaattggaggtgatcctaaactagttgtctttctggttgcagctggttactaaattattaagttacttggtgcagctattttacgtttataagtctagctcgctagtactttggagggaaaacatgtctcaggtgcgtttgtagcctagctttttgtcttggtctttcaatttttaacgtgcaaaattgcaaacaggatatattcctatgatcctgtggatattaacatgaaatgattaggccaaaatggaatttagaaaggtgaacatatat

SEQ ID NO: 12322 - DNA, 1040 bp, Glycine max
  Gm_smallRNAprecursor_5155
agttgagaatattggaatcaacaaagtgctcatagatggaggagcggctgttaacttaatgcctcgatctatgctccacaagatcgggaaacatgacactgatctatctgcccacaacattgtgctttcgaattatgagggtaaaactggctattctttgggagccattcaagtagatgttgctgtaggcagtatagttcgaccaactttattcctggtgatacagtctaaggctaattttaacttgctattaggaagggaatggattcatggagttggggctgtgccatctaccctccaccagaaactcattatctggagggaggatgggattgttgaaaatatagaggcagatcaaagcttctataagtcagaggttgataatgttactgcacgaacctttgacaaaaagttggctaacatagcaccttgtggtgacaaggaggctgttgtcgaatcaagtgacaatgttatccactctgtcaaactccatcctacctatgggtttatatgggagagggaggaaattgatgctgttccctctgaagatggagtcattccaccaactgggtggaatatatatgaagattaatatgactgaggccactgcatgggccagaattacggcttatatggccgaaaatagactaaatacgacctttgaggctgaatctcaacaaaatatggcagttgaagccaagatcgaagaacatgaaaacaaagaaacaaaggatcgaagacttgattgtatttatgatgatgagccgctgggttttgagaaaaatcccataagtgaggtgccaaagatgcaggctcaagatcctttggaggaaatcgacattggagatggctcgataaaaaggccaacctatatcagtgccaatatcacctcaagtctaaaagaaaaactggtgcttcttcttagagaatttaaagactgttttgcttgggattaccacgaaatgcctgggttaagcagagaaatggtcgaaatgaaattaccgattaaggagggaaaaagaccagtaaaacaactacca

SEQ ID NO: 12323 - DNA, 1157 bp, Glycine max
  Gm_smallRNAprecursor_5156
aagaccagtaaaacaactaccaagaagattcgcaccagaaatcatgtccaaaattaaggaagagatcgaaaggctgctgaggtgtaaattcatcagatctgccagatatgtcgaatggttagcaaatatagtccctgtcattaaaaagaatggaactcttagagtatgcatagattttagggatttaaataatgctacacctaaagatgaatatgctatgccagtagcggaaatgttggtagattcggcagctggcttcgaatttttaagcatgttagatggttattctggttataaccaaatatttattgctgaaagtgatgtgtcgaaaacagcatttcgatgccctggtgctttaggcacttatgaatgggtggttatgccctttgggttgaaaaatgctggggccacttatcaaagggccatgaattccatgtttcatgattttattgacacatttatgcaaatttatattgatgatataatcatcaaatcctcctcagaagatagccatttggattatcttaggcaatctttcgaacgaatgaggaaacatggattaaaaatgaatccattaaagtgtgctttttgtgtgcgtgcaggagatttccttggttttgtggtgcataaaaaaggcattgagataaatcaaaataagacaaaggctattcttgagacgaagcctccttcgaccaaaaaacagcttcagtctttgctaggaaaaatcaacttcttgaggcgattcatttcgaatctaagtggcaaagctcaaattttttcgccattacttcgacttaagaaagatgaaccattcaaatggaatgaagagcatcaaaaggctttcgatgaaattaaagaatatctgatcaagcctcctgtgttaatgcctcctagtcgaaacaagactatgaagttgtatattgctgcgtctgacaagaccattggtagcatgttggctcaggaagatgatgatggcatagaacatgcaatttattatcttagtcgtgtattaaatgatgcagaaactagatatactgccatagaaaaactttgtctttgtctgtatttctcttgtgcaaaacttaagcaatatataaagcctgttgatgtttatgtgtattctcattatgatattattaagcacatgttgtcaaaac

SEQ ID NO: 12324 - DNA, 1175 bp, Glycine max
  Gm_smallRNAprecursor_5157
aagagatcgaaaggctgctgaggtgtaaattcatcagatctgccagatatgtcgaatggttagcaaatatagtccctgtcattaaaaagaatggaactcttagagtatgcatagattttagggatttaaataatgctacacctaaagatgaatatgctatgccagtagcggaaatgttggtagattcggcagctggcttcgaatttttaagcatgttagatggttattctggttataaccaaatatttattgctgaaagtgatgtgtcgaaaacagcatttcgatgccctggtgctttaggcacttatgaatgggtggttatgccctttgggttgaaaaatgctggggccacttatcaaagggccatgaattccatgtttcatgattttattgacacatttatgcaaatttatattgatgatataatcatcaaatcctcctcagaagatagccatttggattatcttaggcaatctttcgaacgaatgaggaaacatggattaaaaatgaatccattaaagtgtgctttttgtgtgcgtgcaggagatttccttggttttgtggtgcataaaaaaggcattgagataaatcaaaataagacaaaggctattcttgagacgaagcctccttcgaccaaaaaacagcttcagtctttgctaggaaaaatcaacttcttgaggcgattcatttcgaatctaagtggcaaagctcaaattttttcgccattacttcgacttaagaaagatgaaccattcaaatggaatgaagagcatcaaaaggctttcgatgaaattaaagaatatctgatcaagcctcctgtgttaatgcctcctagtcgaaacaagactatgaagttgtatattgctgcgtctgacaagaccattggtagcatgttggctcaggaagatgatgatggcatagaacatgcaatttattatcttagtcgtgtattaaatgatgcagaaactagatatactgccatagaaaaactttgtctttgtctgtatttctcttgtgcaaaacttaagcaatatataaagcctgttgatgtttatgtgtattctcattatgatattattaagcacatgttgtcaaaacctattttacacagtagaattggaaaatgggctttagcattaacagaatattctttaacgtacaagcctttgaaatct

SEQ ID NO: 12325 - DNA, 1114 bp, Glycine max
  Gm_smallRNAprecursor_5158
aatctaagtggcaaagctcaaattttttcgccattacttcgacttaagaaagatgaaccattcaaatggaatgaagagcatcaaaaggctttcgatgaaattaaagaatatctgatcaagcctcctgtgttaatgcctcctagtcgaaacaagactatgaagttgtatattgctgcgtctgacaagaccattggtagcatgttggctcaggaagatgatgatggcatagaacatgcaatttattatcttagtcgtgtattaaatgatgcagaaactagatatactgccatagaaaaactttgtctttgtctgtatttctcttgtgcaaaacttaagcaatatataaagcctgttgatgtttatgtgtattctcattatgatattattaagcacatgttgtcaaaacctattttacacagtagaattggaaaatgggctttagcattaacagaatattctttaacgtacaagcctttgaaatctgttaagggtcaaattgtggcagattttattgtagatcactcagtgatcgagatgccgcaagactatgtcgatacagagccttggattttgtatttcgatggatcgaaacacaaacatggaactggaattggagttttaataatatcccccaataaagttccaactaagttcaaatataaaattaaagggctttgttctaataatgaggctgagtatgaagctctaattacaggccttgaaattttaattagcctgggggcaagaaatgttaacataaggggtgattcagaattagtattgaagcaattaacacaagaatacaaatgtgttaatgaacacttagcaaaatattttgttatggcgagttctcttctgaatcatttcgattacattaacattgagcatataccgcgacaagaaaaccaagaagcaaatgatttagcccaaatagcttcagggtacaaaatgtcgaaggaaaaattaactcagttgatcgaaataaaagataaactggtgataccagagccattaagtactaaattgtcaatgccaaaacttgtgggggcaattacaccacaaagtaatgaagatgatgatctccagggaaaaattcaaattttggccattgaca

SEQ ID NO: 12326 - DNA, 1086 bp, Glycine max
  Gm_smallRNAprecursor_5159
gtttctgaatcgagttagcggccttctcctggagttctttgcgtttggcctgctctgttacaattttctgccttagatcatcaacctgagacagcaaattcgtaatagttgcctcccaggaggagatgttatcatcacaggctttgatctcagaagatccttctttcgcctctttggtgagacgttcgacttcatgttgagcagttcgggctttctcgagcagaaggatatgtgcctgtttctgggcatccagtctggcgtcattttcgcgttttttctgcacagtacttgcaaattggtcaatgatggcctcgatttggataactttgcctagaatctcatcagaggtaagggggttgtgcaatttcttcaaaaagttcaggtgcccaaaggcagcagaagggttctcttcaatggatttaagcacatcttcccgtgcgtattccatggataacttcaagagcagagaatcttggcgtactgaagagtttatttcggcatcagatgaggacgaagcaccaggaattttttcacttgaggtgttggcttgacttgtgttcagcaggagtcgaagggctgcagcagggtcttcgtcttgcatttgaatgaatgtatcttctgcgatccctatgctagcggaaagcttagatgttgaagacgccgggtaaatgtccgaacccccagcttcagcctcttttatggcctcttcatcggaaaagttttcttcggatgaactttgctgactcgatccatgaggactgctggatccaatgccttgaccttcaccctgttcctcaacattcactgtatccgtctcaggagcgggagatgttcgagcatgtgagggtatttcttctacagaaacattttgttgtacctgattcgaattatcatggaaaaaggttaacaaatagtttcgtataagctatgatttaaaacacattaagaggatgatacctcgacggcaggttgttcttgtagtgagtccggttgatcgacagggttgcccatctcagcaatagaaggagtagcctctacttcagtgccgtcaatatcggtcgaaggtggttggacgtcaacaggttg

SEQ ID NO: 12327 - DNA, 1187 bp, Glycine max
  Gm_smallRNAprecursor_5160
ggcagaatgacgaccatttgccagtgtccgctgcagtagagacgaatatgggttattgtagtagtatagattatttaaattcaattattgtgtttaacttacccattcaggtaggctccaaggtaaacatctcattttgaactctgtatccaactcttgatgtaactttcggattcaaattgtgattgcctagatctctgaatggactatggctcgaggaatccatacacatcagaattccccgctcgcacacttggctcagtcagatggctgtgttgttatgccaaagttaattatgtatgaatttaaaataattactttggtaattaacagtaatctaaaatgacttacagaatccacaactgtataacagatatgctgagacattgatcaccgtgtgcaatttcagagagatcttcgtgctttatatataacgggaagttttgattaaacaccccgaatatggtagcatcccacataacctggagaggcttcaaaaacagttgtgggatggtcaatgtcatcaggtacaggggatcctcgacctcttcatccgggctttctggaggttttgctggagacacagcttcctgttgatcaaacatagttaattagcaagttttgattacagtgaacaaattaattgaaaaaaataaacatataatctgcgtaaaatacctattctaataaacgcttcacaagatgtgttggccaagcaaggaaggtgttaagtgcctgccccactaaggtaacctcatcagtgggtacaggaacgagagcctctgcatctttaacctcctcaacaccaaccttgacttggccatgcaacaaagggatgttgtgaactgttttggatccctcataaagtcttcctagggcaactaggcgggaaggattttcttcaatgtatagtctgcatttatttgagtcacccgtccctggatcgttccctgagggagcaacacaactttcctttgtgctgacacgaggacctgagggaccaacttctggctctggaggtagtgcaagtccctgtgattgcatttgagactgaaactgggactgcatctggctgaaggatgccatcatctttcgagtcactttttatgtgattgactcctccagttggtctctaatttgttgggtcagctgttctaggtcttcaggaggtatggaggaagaactgc

SEQ ID NO: 12328 - DNA, 1116 bp, Glycine max
  Gm_smallRNAprecursor_5161
ttcataaaccccacgagacaatacgtgggggcagtgttttgcttctaggaggcctgtgcctttttccgcacatcctgcaaaagtttaacattaatgaaaatgattattacaataaattataagaagtgattttattgtggaaaacaactaaaatgacaaagtacatacctcccatgaggggtctctgcgggtctgacaaaattgggcccatttctccttgctaatgccatatttttcacagacaatgtcgtccacatcgtccttgtcggctgcaagtgcccatttcctagtcaagtcagatttaaactgcctccagcgctcaccgacaatctgaagaattttcttctttgtcctactgtcagaagcttcagggatttcaaattccgcctgacaaacaataaattaggttttattgtaagtaaataacaaatttagactattaaagaaaatcaacgaaaaaaaactcaaatacctaaatatcctcccatatcaaatccttctgagcagtagggacttccttccaggtgtcatatgtgacgtcgaccttatcatgagcgacaatccccaaatatgttcttaatttcttcttgtggggaccgtcggccttgccggtagcaggatcgacgttgaccacaggtctttttgccccaggtggtctagtggccaatgatcgtagccgtgtcgccttgcgtgtccgcttcaatgtagatggagatgctgatgtgtctgcaggaggaggaggaagagaaggaggaggcgaggcaggtggagtagccatgggcctttaaagagaaaaagttgagttagttaatattatcaaaaaacactgtatgagttatgtaaatgaatgtaccgaaataaaatactatattaaaaaattacattacacgatgttaattaattctccttcatcatgatcattacgattagcatgaacgttgtcagcttcttcttctccgacgctgttagaagtcatttgtgtagacaaaggactaacataagtgtccatgtatgaatcatcatcttctacattaacaccaattgttttcccatgtagaaccacataccacctttcatcacaagggtcttgcacataaaatacttgcttagcttgtt

SEQ ID NO: 12329 - DNA, 1082 bp, Glycine max
  Gm_smallRNAprecursor_5162
tttagactaaacaaaagaatttgatagacatgcattgctaaatttttatactattcattgatttaaaatcattttataatgacttttaagaattgttataaaaattaataaatttgttgttccatacatgacaaattatatgctaatgtaaaatttctttactatcattaccaaaaaaatttactaaaaaaaatcctttgaacaaacttatttaacctacattccaacctaatacatagatgtttctggaactaaaagttctaattaggatggttaaaaaaagggtgttgctaggtgcacccagcattattgctagtgcacccagtattttttaaaaataccaaaattatccctgtatttttttcgcctttgtgataggtgtgtgtgagggtggtccgtaaatcgtacggatcaagttgatccatatgttgatattaagcatacggatcaacttgatccataatccttttacggatgaagttgatccgtgttgttccataaaaggcttacggatcaacttgatccataagccttttacggaataacacggatcaacttcatccatagaagtcttacagatcaagttgatctgtaagccttttacgaatcaacttaaaagacttatggatcaaagatattttcgtcatttcattttaagtgctaagtgcaccagcaataatgttggtgcacctagcaacacccttaaaaaaattatccttaaaccaacatatttaacaaaccaatacgtaagcgccataatcaactttatccgaatggattaagtaaactcaaaactcccaccagtcgaattaaagtgtactcaatatataacttgcactttatttgtttattttaaaaagttggagactaggtttaggcccaatcctaagcagagaactatcataacataactcgccccacttcgttgccgtgttttgcctatagacaaacgatggttacaattttcatgcagtcactaggcttgcgctagtatattttccattatgcattgctaggcctcaaaaaaaaaaattatgcattgctaggcatattttactttgaacttgttaaaatttaaaata

SEQ ID NO: 12330 - DNA, 1075 bp, Glycine max
  Gm_smallRNAprecursor_5163
ggatttttgattctggtgcctccttccatgttactccacatggaagtttcttctgatcctaccaaagcggtgactttggtaaggtgcaaatgggaaatcaagataggagcaagatcgtcgggataggaaacatcaccctgacaacatgctccggatgcaagcttgtcctaaaagatgtgaggcatgtcccggctatggcctcaatcttatctccgctgggaagctagacaatgctggtctgatgaactactttggtgaaggaaagtggaagctcaccaaaggaagtctagtcatggctcgaggaaagaaggaatgatcattatacgtgatgcaagctaagcttttcaaatgagaggtaaacataaccactgatgatatggaagtatggcataaatgacttgggcatatcagtgagaagggtcttcacatgctagctcgaaaacatctcatccctaacgtgaaaggtaagccgcttgatccttgtgctcactgtttaactggaaaacaacacagagttgttttcaaaagatcttctccgcccacaaggagaaagaacattcttgaccttgtacacaccgatgtgtgttcaatgtccgagagattcattggtggtgcattgtactttgtccccttcattgatgaccattcaaggaaggtttggttacacctgttaaaatcaaaggatcaagtgcttgacgccttcaaagaattccatgctctagtggagcgtgagactggaagaaagatcaagaacatacgatatgataatggaggtgagtatagaggtccctttgaagcctattgcaagaaatatgacattaggctagagaagactccacccaagacaccacagttgaatggactagctgagagaatgaaccgaacatttgaagaaagagttcgatgcgtgctttctcatgctaaattacctaaatcattttgggaagaagttataatcgtgtgctcccattactacctttaattactaagtgtctatcttaacttcacgaagcaggaaagtctgagtttttccaacagtgattttcaatcacataaaatgctacatcgcattcac

SEQ ID NO: 12331 - DNA, 1155 bp, Glycine max
  Gm_smallRNAprecursor_5164
gagaggtaaacataaccactgatgatatggaagtatggcataaatgacttgggcatatcagtgagaagggtcttcacatgctagctcgaaaacatctcatccctaacgtgaaaggtaagccgcttgatccttgtgctcactgtttaactggaaaacaacacagagttgttttcaaaagatcttctccgcccacaaggagaaagaacattcttgaccttgtacacaccgatgtgtgttcaatgtccgagagattcattggtggtgcattgtactttgtccccttcattgatgaccattcaaggaaggtttggttacacctgttaaaatcaaaggatcaagtgcttgacgccttcaaagaattccatgctctagtggagcgtgagactggaagaaagatcaagaacatacgatatgataatggaggtgagtatagaggtccctttgaagcctattgcaagaaatatgacattaggctagagaagactccacccaagacaccacagttgaatggactagctgagagaatgaaccgaacatttgaagaaagagttcgatgcgtgctttctcatgctaaattacctaaatcattttgggaagaagttataatcgtgtgctcccattactacctttaattactaagtgtctatcttaacttcacgaagcaggaaagtctgagtttttccaacagtgattttcaatcacataaaatgctacatcgcattcacaatgctgcaacaacggggccttaacaccattcctttccacattttttgtaaaaagcaataaaatttagatttcaattttctatttgaacttctaagtgtcaatgattgaacttgaatgagtatgaccatatgggatgttgaaggatacaaaatcttaaaatgaatgaaaaattatgccatcttataaataaaagatataccaataattagaattattataaaattcttttttacatttagtgaaaacataataatttcacatcacaacagccacaatgcctacaactgcggtcgcagcctttgcaattgtgtcacgaccgtaattacaatcacaatttcgaaccatttttagaccaaaaaaatagttatgtcaagtcaaccatactgtattctggaaatttatgaattccagcctccattatttctctcc

SEQ ID NO: 12332 - DNA, 1149 bp, Glycine max
  Gm_smallRNAprecursor_5165
tttatatgtatatcccatataaatagatatgtgtgtgtagagcaatatctgtatattttttatcttttggtatctgagccattccattgcttttattttgttttgttttatatagatgtatatatatataatgtatatatatatatatatatatatatatatatatatatatatatatatatatatatatatatatacatttttttgaccggaataataaatttatgccaaaacagctaccaatcctaaagggaaactacctttagccaaaacacaaacactacctaccaaacaaactaacaactatatttataaaaataaatttttaactgttttgcagatggaacctgaattttgggacaaaaatcccttcaaggtgacggccaaggctttcctatcaggatttcactacaaaccaaccaccatcctgaagacaagaactttttacgaattgattttggtagattcaaattcagtatctatcaaacatttcaaagacccaaaagaccaaaccttaaacacccactccacaatccaaatactaaaagttctttaaccaagacactttggttcggacctgaacaaaggaaagagatttttcagttccatttgatccggtaggttatacctattgggattatgttgatgcttggactaaggtgttttggcaccaaaataggacagtaagactaaggtgtattgttcaaataaaatattgagacataatatactggtggctataggagtagtgttcaaactatattgtccgtaaaaaaaaaaatctttttcattagttcagatccaagaagttctgtaacatatatccttatggaaatatttctatgtaaccaaatgaaggcaaagatattagagaatgttataatcatgtctagactattgcgctctttttcttttgttttggacaggccggtagaccgaattgttcacagaaagaacctaaatccttctttgtttgagccttttctttggctaattgcctctgaattttgttatactgacaaatttttaaggctaccttttggacataagaaattaattgaccatagcttaaaatttcatatggaatatctccattggcagattgactacggattttatctctaaccttgtctcctaatgatctaggaa

SEQ ID NO: 12333 - DNA, 1150 bp, Glycine max
  Gm_smallRNAprecursor_5166
tttatatgtatatcccatataaatagatatgtgtgtgtagagcaatatctgtatattttttatcttttggtatctgagccattccattgcttttattttgttttgttttatatagatgtatatatatataatgtatatatatatatatatatatatatatatatatatatatatatatatatatatatatatatatacatttttttgaccggaataataaatttatgccaaaacagctaccaatcctaaagggaaactacctttagccaaaacacaaacactacctaccaaacaaactaacaactatatttataaaaataaatttttaactgttttgcagatggaacctgaattttgggacaaaaatcccttcaaggtgacggccaaggctttcctatcaggatttcactacaaaccaaccaccatcctgaagacaagaactttttacgaattgattttggtagattcaaattcagtatctatcaaacatttcaaagacccaaaagaccaaaccttaaacacccactccacaatccaaatactaaaagttctttaaccaagacactttggttcggacctgaacaaaggaaagagatttttcagttccatttgatccggtaggttatacctattgggattatgttgatgcttggactaaggtgttttggcaccaaaataggacagtaagactaaggtgtattgttcaaataaaatattgagacataatatactggtggctataggagtagtgttcaaactatattgtccgtaaaaaaaaaaatctttttcattagttcagatccaagaagttctgtaacatatatccttatggaaatatttctatgtaaccaaatgaaggcaaagatattagagaatgttataatcatgtctagactattgcgctctttttcttttgttttggacaggccggtagaccgaattgttcacagaaagaacctaaatccttctttgtttgagccttttctttggctaattgcctctgaattttgttatactgacaaatttttaaggctaccttttggacataagaaattaattgaccatagcttaaaatttcatatggaatatctccattggcagattgactacggattttatctctaaccttgtctcctaatgatctaggaag

SEQ ID NO: 12334 - DNA, 1224 bp, Glycine max
  Gm_smallRNAprecursor_5167
tttatatgtatatcccatataaatagatatgtgtgtgtagagcaatatctgtatattttttatcttttggtatctgagccattccattgcttttattttgttttgttttatatagatgtatatatatataatgtatatatatatatatatatatatatatatatatatatatatatatatatatatatatatatatacatttttttgaccggaataataaatttatgccaaaacagctaccaatcctaaagggaaactacctttagccaaaacacaaacactacctaccaaacaaactaacaactatatttataaaaataaatttttaactgttttgcagatggaacctgaattttgggacaaaaatcccttcaaggtgacggccaaggctttcctatcaggatttcactacaaaccaaccaccatcctgaagacaagaactttttacgaattgattttggtagattcaaattcagtatctatcaaacatttcaaagacccaaaagaccaaaccttaaacacccactccacaatccaaatactaaaagttctttaaccaagacactttggttcggacctgaacaaaggaaagagatttttcagttccatttgatccggtaggttatacctattgggattatgttgatgcttggactaaggtgttttggcaccaaaataggacagtaagactaaggtgtattgttcaaataaaatattgagacataatatactggtggctataggagtagtgttcaaactatattgtccgtaaaaaaaaaaatctttttcattagttcagatccaagaagttctgtaacatatatccttatggaaatatttctatgtaaccaaatgaaggcaaagatattagagaatgttataatcatgtctagactattgcgctctttttcttttgttttggacaggccggtagaccgaattgttcacagaaagaacctaaatccttctttgtttgagccttttctttggctaattgcctctgaattttgttatactgacaaatttttaaggctaccttttggacataagaaattaattgaccatagcttaaaatttcatatggaatatctccattggcagattgactacggattttatctctaaccttgtctcctaatgatctaggaagaccggctataaatttttctttccaaaaaggttgttgactatcttctctggtgtaaaccctagttaggaaagtat

SEQ ID NO: 12335 - DNA, 1157 bp, Glycine max
  Gm_smallRNAprecursor_5168
ctctagtataagagcctgaggggaagtagaaatagtgtccgtaagggcatatgttaactgaacttatggatctgaaccatgtacagtagttttaatttaaacagtatatgtttgaacattattttctggaagcacagcagtctgatattttagttgaatgatactgtagcagtaagactaaggtgtattgttcaaataaaatattgagacataatatactggtggctataggagtagtgttcaaactatattgtccataaaaaaaaactctttttcattagttcagatccaagaagttctataacatatagcctgatggaaatatttctatggaaccaaatgaaggcaaagatattagagaatgttataatcatgtctagactattgtgctctttttcccgtatctcttttcgatcaaattcctcctcatcatcttcttcaagaaattccaatttattaagtgatcaagataactagacccaagaggtcgcccccaaacacaatctcttcgatgaggaagtccgattcgaagatatcaatcaaaacatggatgactggaacattccagaaatcccttaggatcaactatacgttcctgaaacaattaaggacaaacacaactttgattacataatcaaaacagtagaaaacaatattcctctaggacaagatataggggaagaatttcatttactttcaaaaaattcaatttatgaacatagtcgtaagtataaatatctacacattggttgtgtacaagtagccatcaagcccttaattgacatggacatagatgcaacagttttaatgtatctaagagatatttggcataataaatttgaagactccttaattggaatagtcgaaactagcctaggacaaggtccagtatattttaattgttatccaaacgagacagtgagtctgatggacataaacattcttgactctctataattaaatatccactttcatggccttgacatgaaagaaggatcaatcccagcggctttgatctataggatccaatacaaggtcatgaatacttgtgcatctagagtcctattgcgaccacaaaagggagaaacaaccttatttatcactgatattgcaaaagccaacatttctttaaaaagaataataaaatgggatgaagt

SEQ ID NO: 12336 - DNA, 1168 bp, Glycine max
  Gm_smallRNAprecursor_5169
atgcccatggtcttgtgcggctttttatgtcaacaaacaatctgagattgagcgtggaacaccccgcttagtcataaattacaaaccagtaaatcaagcattacaatggattaggtatcctatttcaaacaaaaaagatttgcttaacagattaaattctgtaaagatattttcaaaatttgatatgaaatctggattttggcaaatccaagaatcagataggtacaaaacaacgtttattgtacctttcgggcaatatgaatggaatgtgatgccattcggactaaagaatgccccttcagaatttcaaaaaattatgaatgatatttttaatccctgttcaaaatttgtcattgtctacatagatgatgttttaatcttttcccaaaacattgaccaacatttcaaacatctccagactttcatccatatcatcaaacataatggtttggcagtctccaaatcaaaaataaatcttttccaaactcgaattcgattccttggtcacaatatatatcaaggtacactcattccaatagaaaggtcaatagagtttgctgacaaatttcccaaccaaatcttagacaaaaccgagttacaaagatttctaggttgtctaaattatgtaggaaaatttgtcccctatttaaacaatattgtcaagccattgcatgataggctgaagaaaaatccgcctccttggtctgacctccatacacaaacagttaaagaaatcaaactcaaagtccaatccataaaatgtctgtatcttcccattccacaggcatttaaaattgtcgaaactaatgcatcatatataggttatggtggcatcctgaaacaaagagtccatggccaagatcatgtcattgcatatacatcaaaacactggaatccagcacaattaaaatattcaactgttaaaaaggaagttttaacaattgttttgtgcatttccaaatttcaatcggatttattaaaccaaaagtttttaatcagggttgattgtaaatcagccaaagatattttacaaaaagatgttaaaaaccttgcctcaaaacaaatttttgcaagatggcaagcaattctaagtgtctttgattttgacagaatatatcaagggcacctcaaattcattacctgactaccttacctgtgaatttttaca

SEQ ID NO: 12337 - DNA, 1113 bp, Glycine max
  Gm_smallRNAprecursor_5170
attgtctacatagatgatgttttaatcttttcccaaaacattgaccaacatttcaaacatctccagactttcatccatatcatcaaacataatggtttggcagtctccaaatcaaaaataaatcttttccaaactcgaattcgattccttggtcacaatatatatcaaggtacactcattccaatagaaaggtcaatagagtttgctgacaaatttcccaaccaaatcttagacaaaaccgagttacaaagatttctaggttgtctaaattatgtaggaaaatttgtcccctatttaaacaatattgtcaagccattgcatgataggctgaagaaaaatccgcctccttggtctgacctccatacacaaacagttaaagaaatcaaactcaaagtccaatccataaaatgtctgtatcttcccattccacaggcatttaaaattgtcgaaactaatgcatcatatataggttatggtggcatcctgaaacaaagagtccatggccaagatcatgtcattgcatatacatcaaaacactggaatccagcacaattaaaatattcaactgttaaaaaggaagttttaacaattgttttgtgcatttccaaatttcaatcggatttattaaaccaaaagtttttaatcagggttgattgtaaatcagccaaagatattttacaaaaagatgttaaaaaccttgcctcaaaacaaatttttgcaagatggcaagcaattctaagtgtctttgattttgacagaatatatcaagggcacctcaaattcattacctgactaccttacctgtgaatttttacagaaaagtggtaatgcctcctaaggcatcaggaatctccctaaggggaggacgaagtacaggcaaaggatccagactggctcttccagagccaaccactaagaaatcatcaacctcttatgggtcaccaacccaggctggatcatctacccagaaaacatatttagaagggtcatcgacccagattacctcaatcaaacctgagccatccactcaggaatctctcaaaccggcaaccgccaagcaaacatcggtcgactatgcaccaattgaaacctttcaggcccttcaagacatgg

SEQ ID NO: 12338 - DNA, 1113 bp, Glycine max; identical to SEQ ID NO: 12337
  Gm_smallRNAprecursor_5171

SEQ ID NO: 12339 - DNA, 1114 bp, Glycine max
  Gm_smallRNAprecursor_5172
attgtctacatagatgatgttttaatcttttcccaaaacattgaccaacatttcaaacatctccagactttcatccatatcatcaaacataatggtttggcagtctccaaatcaaaaataaatcttttccaaactcgaattcgattccttggtcacaatatatatcaaggtacactcattccaatagaaaggtcaatagagtttgctgacaaatttcccaaccaaatcttagacaaaaccgagttacaaagatttctaggttgtctaaattatgtaggaaaatttgtcccctatttaaacaatattgtcaagccattgcatgataggctgaagaaaaatccgcctccttggtctgacctccatacacaaacagttaaagaaatcaaactcaaagtccaatccataaaatgtctgtatcttcccattccacaggcatttaaaattgtcgaaactaatgcatcatatataggttatggtggcatcctgaaacaaagagtccatggccaagatcatgtcattgcatatacatcaaaacactggaatccagcacaattaaaatattcaactgttaaaaaggaagttttaacaattgttttgtgcatttccaaatttcaatcggatttattaaaccaaaagtttttaatcagggttgattgtaaatcagccaaagatattttacaaaaagatgttaaaaaccttgcctcaaaacaaatttttgcaagatggcaagcaattctaagtgtctttgattttgacagaatatatcaagggcacctcaaattcattacctgactaccttacctgtgaatttttacagaaaagtggtaatgcctcctaaggcatcaggaatctccctaaggggaggacgaagtacaggcaaaggatccagactggctcttccagagccaaccactaagaaatcatcaacctcttatgggtcaccaacccaggctggatcatctacccagaaaacatatttagaagggtcatcgacccagattacctcaatcaaacctgagccatccactcaggaatctctcaaaccggcaaccgccaagcaaacatcggtcgactatgcaccaattgaaacctttcaggcccttcaagacatggg

SEQ ID NO: 12340 - DNA, 1114 bp, Glycine max; identical to SEQ ID NO: 12339
  Gm_smallRNAprecursor_5173

SEQ ID NO: 12341 - DNA, 1065 bp, Glycine max
  Gm_smallRNAprecursor_5174
tgcatgataggctgaagaaaaatccgcctccttggtctgacctccatacacaaacagttaaagaaatcaaactcaaagtccaatccataaaatgtctgtatcttcccattccacaggcatttaaaattgtcgaaactaatgcatcatatataggttatggtggcatcctgaaacaaagagtccatggccaagatcatgtcattgcatatacatcaaaacactggaatccagcacaattaaaatattcaactgttaaaaaggaagttttaacaattgttttgtgcatttccaaatttcaatcggatttattaaaccaaaagtttttaatcagggttgattgtaaatcagccaaagatattttacaaaaagatgttaaaaaccttgcctcaaaacaaatttttgcaagatggcaagcaattctaagtgtctttgattttgacagaatatatcaagggcacctcaaattcattacctgactaccttacctgtgaatttttacagaaaagtggtaatgcctcctaaggcatcaggaatctccctaaggggaggacgaagtacaggcaaaggatccagactggctcttccagagccaaccactaagaaatcatcaacctcttatgggtcaccaacccaggctggatcatctacccagaaaacatatttagaagggtcatcgacccagattacctcaatcaaacctgagccatccactcaggaatctctcaaaccggcaaccgccaagcaaacatcggtcgactatgcaccaattgaaacctttcaggcccttcaagacatgggtctaaccaaatttccaaaaataatcaaaaaatcttgggcagacattgcctcagaatctgatgatgattctgaatcgaatttacaaacaatgatccaaaatgcatcaatgaccaaaacatctaccaatcctaaaggaaaattacctttagccaaagcacaaacaccacctaccaaacaaactaacaattatatttataaaaataaatttttaactattttgcagatggaacctgaattttgggacaagaatcccttcaaggcgacggc

SEQ ID NO: 12342 - DNA, 1171 bp, Glycine max
  Gm_smallRNAprecursor_5175
atctctcaaaccggcaaccgccaagcaaacatcggtcgactatgcaccaattgaaacctttcaggcccttcaagacatgggtctaaccaaatttccaaaaataatcaaaaaatcttgggcagacattgcctcagaatctgatgatgattctgaatcgaatttacaaacaatgatccaaaatgcatcaatgaccaaaacatctaccaatcctaaaggaaaattacctttagccaaagcacaaacaccacctaccaaacaaactaacaattatatttataaaaataaatttttaactattttgcagatggaacctgaattttgggacaagaatcccttcaaggcgacggctaaggctttcccaccaggatttcactacaaaccaaccaccatcctgaagacaagaactttttatgaattgattttggtagattcaaattcagtatctatcaaacatttcaaagacccaaaagaccaaacattaaacgcccactgcataatccaaatactaaaagttcttcaacctagacactttggttcggacttgaacagaggaaagagattttcagttccatttgatccggtaggttatacctattgggattatgttgatgcttggactaaggtgttttggcaccaaaatacccatttcaagcattcatggctgatatatttcaagaccaatacaatttacaattttcccaattggtttttacaatggtgggacttctttggacaaattccagagatattcccataaacagtccaacaaggatttgcccaatttgagagacaatacaattcgcaggaatcacaaattccaacagatcttaaatacttctcaagctttgcactgtcatggatcttctcatggcaatatcgttacagcaagactgaaaagacaaaccaatatccatcactacaaagacacacatttgtaaaatggtggacacaatttgactcatccaaagcagatccagaacaagtaaaactctagttccaatcccaaccataattcctcaaagcagctgatccaaaacttctgtgtttttgaaccaaaagtctcatctgacaacatttttagcaggatcgaaatcaaaggagatcctaactaaaaatctaaaggaagtttagcaaatgttacagcaggaagaagaaggatcatccttaaaga

SEQ ID NO: 12343 - DNA, 1098 bp, Glycine max
  Gm_smallRNAprecursor_5176
caagacatgggtctaaccaaatttccaaaaataatcaaaaaatcttgggcagacattgcctcagaatctgatgatgattctgaatcgaatttacaaacaatgatccaaaatgcatcaatgaccaaaacatctaccaatcctaaaggaaaattacctttagccaaagcacaaacaccacctaccaaacaaactaacaattatatttataaaaataaatttttaactattttgcagatggaacctgaattttgggacaagaatcccttcaaggcgacggctaaggctttcccaccaggatttcactacaaaccaaccaccatcctgaagacaagaactttttatgaattgattttggtagattcaaattcagtatctatcaaacatttcaaagacccaaaagaccaaacattaaacgcccactgcataatccaaatactaaaagttcttcaacctagacactttggttcggacttgaacagaggaaagagattttcagttccatttgatccggtaggttatacctattgggattatgttgatgcttggactaaggtgttttggcaccaaaatacccatttcaagcattcatggctgatatatttcaagaccaatacaatttacaattttcccaattggtttttacaatggtgggacttctttggacaaattccagagatattcccataaacagtccaacaaggatttgcccaatttgagagacaatacaattcgcaggaatcacaaattccaacagatcttaaatacttctcaagctttgcactgtcatggatcttctcatggcaatatcgttacagcaagactgaaaagacaaaccaatatccatcactacaaagacacacatttgtaaaatggtggacacaatttgactcatccaaagcagatccagaacaagtaaaactctagttccaatcccaaccataattcctcaaagcagctgatccaaaacttctgtgtttttgaaccaaaagtctcatctgacaacatttttagcaggatcgaaatcaaaggagatcctaactaaaaatctaaaggaagtttagcaaatgttacagcaggaagaagaaggatcatccttaa

SEQ ID NO: 12344 - DNA, 1099 bp, Glycine max
  Gm_smallRNAprecursor_5177
caagacatgggtctaaccaaatttccaaaaataatcaaaaaatcttgggcagacattgcctcagaatctgatgatgattctgaatcgaatttacaaacaatgatccaaaatgcatcaatgaccaaaacatctaccaatcctaaaggaaaattacctttagccaaagcacaaacaccacctaccaaacaaactaacaattatatttataaaaataaatttttaactattttgcagatggaacctgaattttgggacaagaatcccttcaaggcgacggctaaggctttcccaccaggatttcactacaaaccaaccaccatcctgaagacaagaactttttatgaattgattttggtagattcaaattcagtatctatcaaacatttcaaagacccaaaagaccaaacattaaacgcccactgcataatccaaatactaaaagttcttcaacctagacactttggttcggacttgaacagaggaaagagattttcagttccatttgatccggtaggttatacctattgggattatgttgatgcttggactaaggtgttttggcaccaaaatacccatttcaagcattcatggctgatatatttcaagaccaatacaatttacaattttcccaattggtttttacaatggtgggacttctttggacaaattccagagatattcccataaacagtccaacaaggatttgcccaatttgagagacaatacaattcgcaggaatcacaaattccaacagatcttaaatacttctcaagctttgcactgtcatggatcttctcatggcaatatcgttacagcaagactgaaaagacaaaccaatatccatcactacaaagacacacatttgtaaaatggtggacacaatttgactcatccaaagcagatccagaacaagtaaaactctagttccaatcccaaccataattcctcaaagcagctgatccaaaacttctgtgtttttgaaccaaaagtctcatctgacaacatttttagcaggatcgaaatcaaaggagatcctaactaaaaatctaaaggaagtttagcaaatgttacagcaggaagaagaaggatcatccttaaa

SEQ ID NO: 12345 - DNA, 1131 bp, Glycine max
  Gm_smallRNAprecursor_5178
cgacggctaaggctttcccaccaggatttcactacaaaccaaccaccatcctgaagacaagaactttttatgaattgattttggtagattcaaattcagtatctatcaaacatttcaaagacccaaaagaccaaacattaaacgcccactgcataatccaaatactaaaagttcttcaacctagacactttggttcggacttgaacagaggaaagagattttcagttccatttgatccggtaggttatacctattgggattatgttgatgcttggactaaggtgttttggcaccaaaatacccatttcaagcattcatggctgatatatttcaagaccaatacaatttacaattttcccaattggtttttacaatggtgggacttctttggacaaattccagagatattcccataaacagtccaacaaggatttgcccaatttgagagacaatacaattcgcaggaatcacaaattccaacagatcttaaatacttctcaagctttgcactgtcatggatcttctcatggcaatatcgttacagcaagactgaaaagacaaaccaatatccatcactacaaagacacacatttgtaaaatggtggacacaatttgactcatccaaagcagatccagaacaagtaaaactctagttccaatcccaaccataattcctcaaagcagctgatccaaaacttctgtgtttttgaaccaaaagtctcatctgacaacatttttagcaggatcgaaatcaaaggagatcctaactaaaaatctaaaggaagtttagcaaatgttacagcaggaagaagaaggatcatccttaaagaaggaagagacaagttctgctgaagaagaagaagaagaagaccccttttaccaaaacgaagatgattgttttggtatctgtttagattaaatttatattcggtcacaaaaccgtttgtttgtaattaatgtgtaattaattttggacaatactacctgtcctgtagccattaaagtcccggtcaaaactacttgtcttgtaacaaacagtcaaatagttccggtcaaaactaccggcaactatcggtctcagatttttggctatataagaagtcctcaactatgttgtgaggcaccctttca

SEQ ID NO: 12346 - DNA, 1088 bp, Glycine max
  Gm_smallRNAprecursor_5179
catttcaagcattcatggctgatatatttcaagaccaatacaatttacaattttcccaattggtttttacaatggtgggacttctttggacaaattccagagatattcccataaacagtccaacaaggatttgcccaatttgagagacaatacaattcgcaggaatcacaaattccaacagatcttaaatacttctcaagctttgcactgtcatggatcttctcatggcaatatcgttacagcaagactgaaaagacaaaccaatatccatcactacaaagacacacatttgtaaaatggtggacacaatttgactcatccaaagcagatccagaacaagtaaaactctagttccaatcccaaccataattcctcaaagcagctgatccaaaacttctgtgtttttgaaccaaaagtctcatctgacaacatttttagcaggatcgaaatcaaaggagatcctaactaaaaatctaaaggaagtttagcaaatgttacagcaggaagaagaaggatcatccttaaagaaggaagagacaagttctgctgaagaagaagaagaagaagaccccttttaccaaaacgaagatgattgttttggtatctgtttagattaaatttatattcggtcacaaaaccgtttgtttgtaattaatgtgtaattaattttggacaatactacctgtcctgtagccattaaagtcccggtcaaaactacttgtcttgtaacaaacagtcaaatagttccggtcaaaactaccggcaactatcggtctcagatttttggctatataagaagtcctcaactatgttgtgaggcaccctttcatttggccattttttaggtttctgaagagaggtgctctgaaagaaaacttttgtaagtgcttctttcaagtttcaataaatttctattttccatctattttctctctccctccatcgatcctgtgcggctctaccgccgcttcagtttctttgtttatgaaaacttgggatttgtaagccggtctccggtgtgcccttgatatctgttttgcaagtttatattttcatttccatttatcatactgcatttttacttccta

SEQ ID NO: 12347 - DNA, 1086 bp, Glycine max
  Gm_smallRNAprecursor_5180
atttcaagcattcatggctgatatatttcaagaccaatacaatttacaattttcccaattggtttttacaatggtgggacttctttggacaaattccagagatattcccataaacagtccaacaaggatttgcccaatttgagagacaatacaattcgcaggaatcacaaattccaacagatcttaaatacttctcaagctttgcactgtcatggatcttctcatggcaatatcgttacagcaagactgaaaagacaaaccaatatccatcactacaaagacacacatttgtaaaatggtggacacaatttgactcatccaaagcagatccagaacaagtaaaactctagttccaatcccaaccataattcctcaaagcagctgatccaaaacttctgtgtttttgaaccaaaagtctcatctgacaacatttttagcaggatcgaaatcaaaggagatcctaactaaaaatctaaaggaagtttagcaaatgttacagcaggaagaagaaggatcatccttaaagaaggaagagacaagttctgctgaagaagaagaagaagaagaccccttttaccaaaacgaagatgattgttttggtatctgtttagattaaatttatattcggtcacaaaaccgtttgtttgtaattaatgtgtaattaattttggacaatactacctgtcctgtagccattaaagtcccggtcaaaactacttgtcttgtaacaaacagtcaaatagttccggtcaaaactaccggcaactatcggtctcagatttttggctatataagaagtcctcaactatgttgtgaggcaccctttcatttggccattttttaggtttctgaagagaggtgctctgaaagaaaacttttgtaagtgcttctttcaagtttcaataaatttctattttccatctattttctctctccctccatcgatcctgtgcggctctaccgccgcttcagtttctttgtttatgaaaacttgggatttgtaagccggtctccggtgtgcccttgatatctgttttgcaagtttatattttcatttccatttatcatactgcatttttacttcct

SEQ ID NO: 12348 - DNA, 1087 bp, Glycine max
  Gm_smallRNAprecursor_5181
atttcaagcattcatggctgatatatttcaagaccaatacaatttacaattttcccaattggtttttacaatggtgggacttctttggacaaattccagagatattcccataaacagtccaacaaggatttgcccaatttgagagacaatacaattcgcaggaatcacaaattccaacagatcttaaatacttctcaagctttgcactgtcatggatcttctcatggcaatatcgttacagcaagactgaaaagacaaaccaatatccatcactacaaagacacacatttgtaaaatggtggacacaatttgactcatccaaagcagatccagaacaagtaaaactctagttccaatcccaaccataattcctcaaagcagctgatccaaaacttctgtgtttttgaaccaaaagtctcatctgacaacatttttagcaggatcgaaatcaaaggagatcctaactaaaaatctaaaggaagtttagcaaatgttacagcaggaagaagaaggatcatccttaaagaaggaagagacaagttctgctgaagaagaagaagaagaagaccccttttaccaaaacgaagatgattgttttggtatctgtttagattaaatttatattcggtcacaaaaccgtttgtttgtaattaatgtgtaattaattttggacaatactacctgtcctgtagccattaaagtcccggtcaaaactacttgtcttgtaacaaacagtcaaatagttccggtcaaaactaccggcaactatcggtctcagatttttggctatataagaagtcctcaactatgttgtgaggcaccctttcatttggccattttttaggtttctgaagagaggtgctctgaaagaaaacttttgtaagtgcttctttcaagtttcaataaatttctattttccatctattttctctctccctccatcgatcctgtgcggctctaccgccgcttcagtttctttgtttatgaaaacttgggatttgtaagccggtctccggtgtgcccttgatatctgttttgcaagtttatattttcatttccatttatcatactgcatttttacttccta

SEQ ID NO: 12349 - DNA, 1087 bp, Glycine max; identical to SEQ ID NO: 12348
  Gm_smallRNAprecursor_5182

SEQ ID NO: 12350 - DNA, 1153 bp, Glycine max
  Gm_smallRNAprecursor_5183
gacttctttggacaaattccagagatattcccataaacagtccaacaaggatttgcccaatttgagagacaatacaattcgcaggaatcacaaattccaacagatcttaaatacttctcaagctttgcactgtcatggatcttctcatggcaatatcgttacagcaagactgaaaagacaaaccaatatccatcactacaaagacacacatttgtaaaatggtggacacaatttgactcatccaaagcagatccagaacaagtaaaactctagttccaatcccaaccataattcctcaaagcagctgatccaaaacttctgtgtttttgaaccaaaagtctcatctgacaacatttttagcaggatcgaaatcaaaggagatcctaactaaaaatctaaaggaagtttagcaaatgttacagcaggaagaagaaggatcatccttaaagaaggaagagacaagttctgctgaagaagaagaagaagaagaccccttttaccaaaacgaagatgattgttttggtatctgtttagattaaatttatattcggtcacaaaaccgtttgtttgtaattaatgtgtaattaattttggacaatactacctgtcctgtagccattaaagtcccggtcaaaactacttgtcttgtaacaaacagtcaaatagttccggtcaaaactaccggcaactatcggtctcagatttttggctatataagaagtcctcaactatgttgtgaggcaccctttcatttggccattttttaggtttctgaagagaggtgctctgaaagaaaacttttgtaagtgcttctttcaagtttcaataaatttctattttccatctattttctctctccctccatcgatcctgtgcggctctaccgccgcttcagtttctttgtttatgaaaacttgggatttgtaagccggtctccggtgtgcccttgatatctgttttgcaagtttatattttcatttccatttatcatactgcatttttacttcctacctgtccgtttgatccttttccgctgacctctagtatcggagctagataaatttttgccaaaactgctgcatctatgtccatgtcaattaagggcttgatggctacttgtacacagccgatgtgtagatatttatacttatgt

SEQ ID NO: 12351 - DNA, 1042 bp, Glycine max
  Gm_smallRNAprecursor_5184
taggatcaaacggacaggtaggaagtaagaatgaagtatgataaatggaaatgaaaatataaacttgtaaaatagatatcaagggcacaccggagaccggcttacaaatcccaggttttcataaacaaagaaaccgaagcggcggtatagccgcataggatcagtggtgggagagagaaaagagatggaaaatagaaatttattgaaacttgaaagaagcgcttacaaaagttttctttcagagcacctctctttcagaaacctgaaaaatggccaaatgaaagggtgcatcacaacatagttgaggactccttatatagccaaaaatctgagaccggtagttgtcggtagttttgaccgggactatttgactgtttgttacaagacaagtagttttgaccgagactttaatggctacaggacaggtagtattgtccaaaattaattacacattaattacaaatagacggttttgtgaccgaaattaaatttaatctaaacagataccaaaacaatcatcttcggtatctgtttaccaaaacaatcatcttcggtatctgtttaccaaaacaatcatcttcggtatctgtctaccaaaacaatcatcttcggtatcaatttaccaaagatgattgttttggtaaacagataccgaagatgattgttttggtaaacagatacagaagatgattgttttggtaaacagataccgaagatgattgttttggtatctgtttagattaaatttaatttcggtcacaaaaccgtctgtttgtaattaatgtgtaattaattttggacaatactacctgtcctgtagccattaaagtcccggtcaaaactacttgtcttgtaacaaacagttaaatagtcccggtcaaaactaccggcaactaccggtctcagatttttggctatataaggagtcctcaactatgttgtgagacaccctttcatttggccatttttcaggtttctgaagagaggtgctctgaaagaaaacttttgtaagcgcttctttcaagtttcaataaatttctat

SEQ ID NO: 12352 - DNA, 1215 bp, Glycine max
  Gm_smallRNAprecursor_5185
taggatcaaacggacaggtaggaagtaagaatgaagtatgataaatggaaatgaaaatataaacttgtaaaatagatatcaagggcacaccggagaccggcttacaaatcccaggttttcataaacaaagaaaccgaagcggcggtatagccgcataggatcagtggtgggagagagaaaagagatggaaaatagaaatttattgaaacttgaaagaagcgcttacaaaagttttctttcagagcacctctctttcagaaacctgaaaaatggccaaatgaaagggtgcatcacaacatagttgaggactccttatatagccaaaaatctgagaccggtagttgtcggtagttttgaccgggactatttgactgtttgttacaagacaagtagttttgaccgagactttaatggctacaggacaggtagtattgtccaaaattaattacacattaattacaaatagacggttttgtgaccgaaattaaatttaatctaaacagataccaaaacaatcatcttcggtatctgtttaccaaaacaatcatcttcggtatctgtttaccaaaacaatcatcttcggtatctgtctaccaaaacaatcatcttcggtatcaatttaccaaagatgattgttttggtaaacagataccgaagatgattgttttggtaaacagatacagaagatgattgttttggtaaacagataccgaagatgattgttttggtatctgtttagattaaatttaatttcggtcacaaaaccgtctgtttgtaattaatgtgtaattaattttggacaatactacctgtcctgtagccattaaagtcccggtcaaaactacttgtcttgtaacaaacagttaaatagtcccggtcaaaactaccggcaactaccggtctcagatttttggctatataaggagtcctcaactatgttgtgagacaccctttcatttggccatttttcaggtttctgaagagaggtgctctgaaagaaaacttttgtaagcgcttctttcaagtttcaataaatttctattttccgtctcttttctctctcccaccaccgatcctgtgcggttgtgccgccgtttcggtttctttgtttatgaaaacctgggatttgtaagccggtctccggtgtgcccttgatatctgttttacaagtttatattttcatttccatttatcatactgcattcttacttccta

SEQ ID NO: 12353 - DNA, 1207 bp, Glycine max
  Gm_smallRNAprecursor_5186
atcaaacggacaggtaggaagtaagaatgaagtatgataaatggaaatgaaaatataaacttgtaaaatagatatcaagggcacaccggagaccggcttacaaatcccaggttttcataaacaaagaaaccgaagcggcggtatagccgcataggatcagtggtgggagagagaaaagagatggaaaatagaaatttattgaaacttgaaagaagcgcttacaaaagttttctttcagagcacctctctttcagaaacctgaaaaatggccaaatgaaagggtgcatcacaacatagttgaggactccttatatagccaaaaatctgagaccggtagttgtcggtagttttgaccgggactatttgactgtttgttacaagacaagtagttttgaccgagactttaatggctacaggacaggtagtattgtccaaaattaattacacattaattacaaatagacggttttgtgaccgaaattaaatttaatctaaacagataccaaaacaatcatcttcggtatctgtttaccaaaacaatcatcttcggtatctgtttaccaaaacaatcatcttcggtatctgtctaccaaaacaatcatcttcggtatcaatttaccaaagatgattgttttggtaaacagataccgaagatgattgttttggtaaacagatacagaagatgattgttttggtaaacagataccgaagatgattgttttggtatctgtttagattaaatttaatttcggtcacaaaaccgtctgtttgtaattaatgtgtaattaattttggacaatactacctgtcctgtagccattaaagtcccggtcaaaactacttgtcttgtaacaaacagttaaatagtcccggtcaaaactaccggcaactaccggtctcagatttttggctatataaggagtcctcaactatgttgtgagacaccctttcatttggccatttttcaggtttctgaagagaggtgctctgaaagaaaacttttgtaagcgcttctttcaagtttcaataaatttctattttccgtctcttttctctctcccaccaccgatcctgtgcggttgtgccgccgtttcggtttctttgtttatgaaaacctgggatttgtaagccggtctccggtgtgcccttgatatctgttttacaagtttatattttcatttccatttatcatactgcattcttactt

SEQ ID NO: 12354 - DNA, 1146 bp, Glycine max
  Gm_smallRNAprecursor_5187
caaacggacaggtaggaagtaagaatgaagtatgataaatggaaatgaaaatataaacttgtaaaatagatatcaagggcacaccggagaccggcttacaaatcccaggttttcataaacaaagaaaccgaagcggcggtatagccgcataggatcagtggtgggagagagaaaagagatggaaaatagaaatttattgaaacttgaaagaagcgcttacaaaagttttctttcagagcacctctctttcagaaacctgaaaaatggccaaatgaaagggtgcatcacaacatagttgaggactccttatatagccaaaaatctgagaccggtagttgtcggtagttttgaccgggactatttgactgtttgttacaagacaagtagttttgaccgagactttaatggctacaggacaggtagtattgtccaaaattaattacacattaattacaaatagacggttttgtgaccgaaattaaatttaatctaaacagataccaaaacaatcatcttcggtatctgtttaccaaaacaatcatcttcggtatctgtttaccaaaacaatcatcttcggtatctgtctaccaaaacaatcatcttcggtatcaatttaccaaagatgattgttttggtaaacagataccgaagatgattgttttggtaaacagatacagaagatgattgttttggtaaacagataccgaagatgattgttttggtatctgtttagattaaatttaatttcggtcacaaaaccgtctgtttgtaattaatgtgtaattaattttggacaatactacctgtcctgtagccattaaagtcccggtcaaaactacttgtcttgtaacaaacagttaaatagtcccggtcaaaactaccggcaactaccggtctcagatttttggctatataaggagtcctcaactatgttgtgagacaccctttcatttggccatttttcaggtttctgaagagaggtgctctgaaagaaaacttttgtaagcgcttctttcaagtttcaataaatttctattttccgtctcttttctctctcccaccaccgatcctgtgcggttgtgccgccgtttcggtttctttgtttatgaaaacctgggatttgtaagccggtctccggtgtgccct

SEQ ID NO: 12355 - DNA, 1204 bp, Glycine max
  Gm_smallRNAprecursor_5188
caaacggacaggtaggaagtaagaatgaagtatgataaatggaaatgaaaatataaacttgtaaaatagatatcaagggcacaccggagaccggcttacaaatcccaggttttcataaacaaagaaaccgaagcggcggtatagccgcataggatcagtggtgggagagagaaaagagatggaaaatagaaatttattgaaacttgaaagaagcgcttacaaaagttttctttcagagcacctctctttcagaaacctgaaaaatggccaaatgaaagggtgcatcacaacatagttgaggactccttatatagccaaaaatctgagaccggtagttgtcggtagttttgaccgggactatttgactgtttgttacaagacaagtagttttgaccgagactttaatggctacaggacaggtagtattgtccaaaattaattacacattaattacaaatagacggttttgtgaccgaaattaaatttaatctaaacagataccaaaacaatcatcttcggtatctgtttaccaaaacaatcatcttcggtatctgtttaccaaaacaatcatcttcggtatctgtctaccaaaacaatcatcttcggtatcaatttaccaaagatgattgttttggtaaacagataccgaagatgattgttttggtaaacagatacagaagatgattgttttggtaaacagataccgaagatgattgttttggtatctgtttagattaaatttaatttcggtcacaaaaccgtctgtttgtaattaatgtgtaattaattttggacaatactacctgtcctgtagccattaaagtcccggtcaaaactacttgtcttgtaacaaacagttaaatagtcccggtcaaaactaccggcaactaccggtctcagatttttggctatataaggagtcctcaactatgttgtgagacaccctttcatttggccatttttcaggtttctgaagagaggtgctctgaaagaaaacttttgtaagcgcttctttcaagtttcaataaatttctattttccgtctcttttctctctcccaccaccgatcctgtgcggttgtgccgccgtttcggtttctttgtttatgaaaacctgggatttgtaagccggtctccggtgtgcccttgatatctgttttacaagtttatattttcatttccatttatcatactgcattcttact

SEQ ID NO: 12356 - DNA, 1134 bp, Glycine max
  Gm_smallRNAprecursor_5189
gacaggtaggaagtaagaatgaagtatgataaatggaaatgaaaatataaacttgtaaaatagatatcaagggcacaccggagaccggcttacaaatcccaggttttcataaacaaagaaaccgaagcggcggtatagccgcataggatcagtggtgggagagagaaaagagatggaaaatagaaatttattgaaacttgaaagaagcgcttacaaaagttttctttcagagcacctctctttcagaaacctgaaaaatggccaaatgaaagggtgcatcacaacatagttgaggactccttatatagccaaaaatctgagaccggtagttgtcggtagttttgaccgggactatttgactgtttgttacaagacaagtagttttgaccgagactttaatggctacaggacaggtagtattgtccaaaattaattacacattaattacaaatagacggttttgtgaccgaaattaaatttaatctaaacagataccaaaacaatcatcttcggtatctgtttaccaaaacaatcatcttcggtatctgtttaccaaaacaatcatcttcggtatctgtctaccaaaacaatcatcttcggtatcaatttaccaaagatgattgttttggtaaacagataccgaagatgattgttttggtaaacagatacagaagatgattgttttggtaaacagataccgaagatgattgttttggtatctgtttagattaaatttaatttcggtcacaaaaccgtctgtttgtaattaatgtgtaattaattttggacaatactacctgtcctgtagccattaaagtcccggtcaaaactacttgtcttgtaacaaacagttaaatagtcccggtcaaaactaccggcaactaccggtctcagatttttggctatataaggagtcctcaactatgttgtgagacaccctttcatttggccatttttcaggtttctgaagagaggtgctctgaaagaaaacttttgtaagcgcttctttcaagtttcaataaatttctattttccgtctcttttctctctcccaccaccgatcctgtgcggttgtgccgccgtttcggtttctttgtttatgaaaacctgggatttgtaagccggtctccggtg

SEQ ID NO: 12357 - DNA, 1192 bp, Glycine max
  Gm_smallRNAprecursor_5190
gacaggtaggaagtaagaatgaagtatgataaatggaaatgaaaatataaacttgtaaaatagatatcaagggcacaccggagaccggcttacaaatcccaggttttcataaacaaagaaaccgaagcggcggtatagccgcataggatcagtggtgggagagagaaaagagatggaaaatagaaatttattgaaacttgaaagaagcgcttacaaaagttttctttcagagcacctctctttcagaaacctgaaaaatggccaaatgaaagggtgcatcacaacatagttgaggactccttatatagccaaaaatctgagaccggtagttgtcggtagttttgaccgggactatttgactgtttgttacaagacaagtagttttgaccgagactttaatggctacaggacaggtagtattgtccaaaattaattacacattaattacaaatagacggttttgtgaccgaaattaaatttaatctaaacagataccaaaacaatcatcttcggtatctgtttaccaaaacaatcatcttcggtatctgtttaccaaaacaatcatcttcggtatctgtctaccaaaacaatcatcttcggtatcaatttaccaaagatgattgttttggtaaacagataccgaagatgattgttttggtaaacagatacagaagatgattgttttggtaaacagataccgaagatgattgttttggtatctgtttagattaaatttaatttcggtcacaaaaccgtctgtttgtaattaatgtgtaattaattttggacaatactacctgtcctgtagccattaaagtcccggtcaaaactacttgtcttgtaacaaacagttaaatagtcccggtcaaaactaccggcaactaccggtctcagatttttggctatataaggagtcctcaactatgttgtgagacaccctttcatttggccatttttcaggtttctgaagagaggtgctctgaaagaaaacttttgtaagcgcttctttcaagtttcaataaatttctattttccgtctcttttctctctcccaccaccgatcctgtgcggttgtgccgccgtttcggtttctttgtttatgaaaacctgggatttgtaagccggtctccggtgtgcccttgatatctgttttacaagtttatattttcatttccatttatcatactgcatt

SEQ ID NO: 12358 - DNA, 1178 bp, Glycine max
  Gm_smallRNAprecursor_5191
aagtatgataaatggaaatgaaaatataaacttgtaaaatagatatcaagggcacaccggagaccggcttacaaatcccaggttttcataaacaaagaaaccgaagcggcggtatagccgcataggatcagtggtgggagagagaaaagagatggaaaatagaaatttattgaaacttgaaagaagcgcttacaaaagttttctttcagagcacctctctttcagaaacctgaaaaatggccaaatgaaagggtgcatcacaacatagttgaggactccttatatagccaaaaatctgagaccggtagttgtcggtagttttgaccgggactatttgactgtttgttacaagacaagtagttttgaccgagactttaatggctacaggacaggtagtattgtccaaaattaattacacattaattacaaatagacggttttgtgaccgaaattaaatttaatctaaacagataccaaaacaatcatcttcggtatctgtttaccaaaacaatcatcttcggtatctgtttaccaaaacaatcatcttcggtatctgtctaccaaaacaatcatcttcggtatcaatttaccaaagatgattgttttggtaaacagataccgaagatgattgttttggtaaacagatacagaagatgattgttttggtaaacagataccgaagatgattgttttggtatctgtttagattaaatttaatttcggtcacaaaaccgtctgtttgtaattaatgtgtaattaattttggacaatactacctgtcctgtagccattaaagtcccggtcaaaactacttgtcttgtaacaaacagttaaatagtcccggtcaaaactaccggcaactaccggtctcagatttttggctatataaggagtcctcaactatgttgtgagacaccctttcatttggccatttttcaggtttctgaagagaggtgctctgaaagaaaacttttgtaagcgcttctttcaagtttcaataaatttctattttccgtctcttttctctctcccaccaccgatcctgtgcggttgtgccgccgtttcggtttctttgtttatgaaaacctgggatttgtaagccggtctccggtgtgcccttgatatctgttttacaagtttatattttcatttccatttatcatactgcattcttactt

SEQ ID NO: 12359 - DNA, 1117 bp, Glycine max
  Gm_smallRNAprecursor_5192
gtatgataaatggaaatgaaaatataaacttgtaaaatagatatcaagggcacaccggagaccggcttacaaatcccaggttttcataaacaaagaaaccgaagcggcggtatagccgcataggatcagtggtgggagagagaaaagagatggaaaatagaaatttattgaaacttgaaagaagcgcttacaaaagttttctttcagagcacctctctttcagaaacctgaaaaatggccaaatgaaagggtgcatcacaacatagttgaggactccttatatagccaaaaatctgagaccggtagttgtcggtagttttgaccgggactatttgactgtttgttacaagacaagtagttttgaccgagactttaatggctacaggacaggtagtattgtccaaaattaattacacattaattacaaatagacggttttgtgaccgaaattaaatttaatctaaacagataccaaaacaatcatcttcggtatctgtttaccaaaacaatcatcttcggtatctgtttaccaaaacaatcatcttcggtatctgtctaccaaaacaatcatcttcggtatcaatttaccaaagatgattgttttggtaaacagataccgaagatgattgttttggtaaacagatacagaagatgattgttttggtaaacagataccgaagatgattgttttggtatctgtttagattaaatttaatttcggtcacaaaaccgtctgtttgtaattaatgtgtaattaattttggacaatactacctgtcctgtagccattaaagtcccggtcaaaactacttgtcttgtaacaaacagttaaatagtcccggtcaaaactaccggcaactaccggtctcagatttttggctatataaggagtcctcaactatgttgtgagacaccctttcatttggccatttttcaggtttctgaagagaggtgctctgaaagaaaacttttgtaagcgcttctttcaagtttcaataaatttctattttccgtctcttttctctctcccaccaccgatcctgtgcggttgtgccgccgtttcggtttctttgtttatgaaaacctgggatttgtaagccggtctccggtgtgccct

SEQ ID NO: 12360 - DNA, 1175 bp, Glycine max
  Gm_smallRNAprecursor_5193
gtatgataaatggaaatgaaaatataaacttgtaaaatagatatcaagggcacaccggagaccggcttacaaatcccaggttttcataaacaaagaaaccgaagcggcggtatagccgcataggatcagtggtgggagagagaaaagagatggaaaatagaaatttattgaaacttgaaagaagcgcttacaaaagttttctttcagagcacctctctttcagaaacctgaaaaatggccaaatgaaagggtgcatcacaacatagttgaggactccttatatagccaaaaatctgagaccggtagttgtcggtagttttgaccgggactatttgactgtttgttacaagacaagtagttttgaccgagactttaatggctacaggacaggtagtattgtccaaaattaattacacattaattacaaatagacggttttgtgaccgaaattaaatttaatctaaacagataccaaaacaatcatcttcggtatctgtttaccaaaacaatcatcttcggtatctgtttaccaaaacaatcatcttcggtatctgtctaccaaaacaatcatcttcggtatcaatttaccaaagatgattgttttggtaaacagataccgaagatgattgttttggtaaacagatacagaagatgattgttttggtaaacagataccgaagatgattgttttggtatctgtttagattaaatttaatttcggtcacaaaaccgtctgtttgtaattaatgtgtaattaattttggacaatactacctgtcctgtagccattaaagtcccggtcaaaactacttgtcttgtaacaaacagttaaatagtcccggtcaaaactaccggcaactaccggtctcagatttttggctatataaggagtcctcaactatgttgtgagacaccctttcatttggccatttttcaggtttctgaagagaggtgctctgaaagaaaacttttgtaagcgcttctttcaagtttcaataaatttctattttccgtctcttttctctctcccaccaccgatcctgtgcggttgtgccgccgtttcggtttctttgtttatgaaaacctgggatttgtaagccggtctccggtgtgcccttgatatctgttttacaagtttatattttcatttccatttatcatactgcattcttact

SEQ ID NO: 12361 - DNA, 1105 bp, Glycine max
  Gm_smallRNAprecursor_5194
taaatggaaatgaaaatataaacttgtaaaatagatatcaagggcacaccggagaccggcttacaaatcccaggttttcataaacaaagaaaccgaagcggcggtatagccgcataggatcagtggtgggagagagaaaagagatggaaaatagaaatttattgaaacttgaaagaagcgcttacaaaagttttctttcagagcacctctctttcagaaacctgaaaaatggccaaatgaaagggtgcatcacaacatagttgaggactccttatatagccaaaaatctgagaccggtagttgtcggtagttttgaccgggactatttgactgtttgttacaagacaagtagttttgaccgagactttaatggctacaggacaggtagtattgtccaaaattaattacacattaattacaaatagacggttttgtgaccgaaattaaatttaatctaaacagataccaaaacaatcatcttcggtatctgtttaccaaaacaatcatcttcggtatctgtttaccaaaacaatcatcttcggtatctgtctaccaaaacaatcatcttcggtatcaatttaccaaagatgattgttttggtaaacagataccgaagatgattgttttggtaaacagatacagaagatgattgttttggtaaacagataccgaagatgattgttttggtatctgtttagattaaatttaatttcggtcacaaaaccgtctgtttgtaattaatgtgtaattaattttggacaatactacctgtcctgtagccattaaagtcccggtcaaaactacttgtcttgtaacaaacagttaaatagtcccggtcaaaactaccggcaactaccggtctcagatttttggctatataaggagtcctcaactatgttgtgagacaccctttcatttggccatttttcaggtttctgaagagaggtgctctgaaagaaaacttttgtaagcgcttctttcaagtttcaataaatttctattttccgtctcttttctctctcccaccaccgatcctgtgcggttgtgccgccgtttcggtttctttgtttatgaaaacctgggatttgtaagccggtctccggtg

SEQ ID NO: 12362 - DNA, 1163 bp, Glycine max
  Gm_smallRNAprecursor_5195
taaatggaaatgaaaatataaacttgtaaaatagatatcaagggcacaccggagaccggcttacaaatcccaggttttcataaacaaagaaaccgaagcggcggtatagccgcataggatcagtggtgggagagagaaaagagatggaaaatagaaatttattgaaacttgaaagaagcgcttacaaaagttttctttcagagcacctctctttcagaaacctgaaaaatggccaaatgaaagggtgcatcacaacatagttgaggactccttatatagccaaaaatctgagaccggtagttgtcggtagttttgaccgggactatttgactgtttgttacaagacaagtagttttgaccgagactttaatggctacaggacaggtagtattgtccaaaattaattacacattaattacaaatagacggttttgtgaccgaaattaaatttaatctaaacagataccaaaacaatcatcttcggtatctgtttaccaaaacaatcatcttcggtatctgtttaccaaaacaatcatcttcggtatctgtctaccaaaacaatcatcttcggtatcaatttaccaaagatgattgttttggtaaacagataccgaagatgattgttttggtaaacagatacagaagatgattgttttggtaaacagataccgaagatgattgttttggtatctgtttagattaaatttaatttcggtcacaaaaccgtctgtttgtaattaatgtgtaattaattttggacaatactacctgtcctgtagccattaaagtcccggtcaaaactacttgtcttgtaacaaacagttaaatagtcccggtcaaaactaccggcaactaccggtctcagatttttggctatataaggagtcctcaactatgttgtgagacaccctttcatttggccatttttcaggtttctgaagagaggtgctctgaaagaaaacttttgtaagcgcttctttcaagtttcaataaatttctattttccgtctcttttctctctcccaccaccgatcctgtgcggttgtgccgccgtttcggtttctttgtttatgaaaacctgggatttgtaagccggtctccggtgtgcccttgatatctgttttacaagtttatattttcatttccatttatcatactgcatt

SEQ ID NO: 12363 - DNA, 1149 bp, Glycine max
  Gm_smallRNAprecursor_5196
acttgtaaaatagatatcaagggcacaccggagaccggcttacaaatcccaggttttcataaacaaagaaaccgaagcggcggtatagccgcataggatcagtggtgggagagagaaaagagatggaaaatagaaatttattgaaacttgaaagaagcgcttacaaaagttttctttcagagcacctctctttcagaaacctgaaaaatggccaaatgaaagggtgcatcacaacatagttgaggactccttatatagccaaaaatctgagaccggtagttgtcggtagttttgaccgggactatttgactgtttgttacaagacaagtagttttgaccgagactttaatggctacaggacaggtagtattgtccaaaattaattacacattaattacaaatagacggttttgtgaccgaaattaaatttaatctaaacagataccaaaacaatcatcttcggtatctgtttaccaaaacaatcatcttcggtatctgtttaccaaaacaatcatcttcggtatctgtctaccaaaacaatcatcttcggtatcaatttaccaaagatgattgttttggtaaacagataccgaagatgattgttttggtaaacagatacagaagatgattgttttggtaaacagataccgaagatgattgttttggtatctgtttagattaaatttaatttcggtcacaaaaccgtctgtttgtaattaatgtgtaattaattttggacaatactacctgtcctgtagccattaaagtcccggtcaaaactacttgtcttgtaacaaacagttaaatagtcccggtcaaaactaccggcaactaccggtctcagatttttggctatataaggagtcctcaactatgttgtgagacaccctttcatttggccatttttcaggtttctgaagagaggtgctctgaaagaaaacttttgtaagcgcttctttcaagtttcaataaatttctattttccgtctcttttctctctcccaccaccgatcctgtgcggttgtgccgccgtttcggtttctttgtttatgaaaacctgggatttgtaagccggtctccggtgtgcccttgatatctgttttacaagtttatattttcatttccatttatcatactgcattcttactt

SEQ ID NO: 12364 - DNA, 1088 bp, Glycine max
  Gm_smallRNAprecursor_5197
ttgtaaaatagatatcaagggcacaccggagaccggcttacaaatcccaggttttcataaacaaagaaaccgaagcggcggtatagccgcataggatcagtggtgggagagagaaaagagatggaaaatagaaatttattgaaacttgaaagaagcgcttacaaaagttttctttcagagcacctctctttcagaaacctgaaaaatggccaaatgaaagggtgcatcacaacatagttgaggactccttatatagccaaaaatctgagaccggtagttgtcggtagttttgaccgggactatttgactgtttgttacaagacaagtagttttgaccgagactttaatggctacaggacaggtagtattgtccaaaattaattacacattaattacaaatagacggttttgtgaccgaaattaaatttaatctaaacagataccaaaacaatcatcttcggtatctgtttaccaaaacaatcatcttcggtatctgtttaccaaaacaatcatcttcggtatctgtctaccaaaacaatcatcttcggtatcaatttaccaaagatgattgttttggtaaacagataccgaagatgattgttttggtaaacagatacagaagatgattgttttggtaaacagataccgaagatgattgttttggtatctgtttagattaaatttaatttcggtcacaaaaccgtctgtttgtaattaatgtgtaattaattttggacaatactacctgtcctgtagccattaaagtcccggtcaaaactacttgtcttgtaacaaacagttaaatagtcccggtcaaaactaccggcaactaccggtctcagatttttggctatataaggagtcctcaactatgttgtgagacaccctttcatttggccatttttcaggtttctgaagagaggtgctctgaaagaaaacttttgtaagcgcttctttcaagtttcaataaatttctattttccgtctcttttctctctcccaccaccgatcctgtgcggttgtgccgccgtttcggtttctttgtttatgaaaacctgggatttgtaagccggtctccggtgtgccct

SEQ ID NO: 12365 - DNA, 1146 bp, Glycine max
  Gm_smallRNAprecursor_5198
ttgtaaaatagatatcaagggcacaccggagaccggcttacaaatcccaggttttcataaacaaagaaaccgaagcggcggtatagccgcataggatcagtggtgggagagagaaaagagatggaaaatagaaatttattgaaacttgaaagaagcgcttacaaaagttttctttcagagcacctctctttcagaaacctgaaaaatggccaaatgaaagggtgcatcacaacatagttgaggactccttatatagccaaaaatctgagaccggtagttgtcggtagttttgaccgggactatttgactgtttgttacaagacaagtagttttgaccgagactttaatggctacaggacaggtagtattgtccaaaattaattacacattaattacaaatagacggttttgtgaccgaaattaaatttaatctaaacagataccaaaacaatcatcttcggtatctgtttaccaaaacaatcatcttcggtatctgtttaccaaaacaatcatcttcggtatctgtctaccaaaacaatcatcttcggtatcaatttaccaaagatgattgttttggtaaacagataccgaagatgattgttttggtaaacagatacagaagatgattgttttggtaaacagataccgaagatgattgttttggtatctgtttagattaaatttaatttcggtcacaaaaccgtctgtttgtaattaatgtgtaattaattttggacaatactacctgtcctgtagccattaaagtcccggtcaaaactacttgtcttgtaacaaacagttaaatagtcccggtcaaaactaccggcaactaccggtctcagatttttggctatataaggagtcctcaactatgttgtgagacaccctttcatttggccatttttcaggtttctgaagagaggtgctctgaaagaaaacttttgtaagcgcttctttcaagtttcaataaatttctattttccgtctcttttctctctcccaccaccgatcctgtgcggttgtgccgccgtttcggtttctttgtttatgaaaacctgggatttgtaagccggtctccggtgtgcccttgatatctgttttacaagtttatattttcatttccatttatcatactgcattcttact

SEQ ID NO: 12366 - DNA, 1120 bp, Glycine max
  Gm_smallRNAprecursor_5199
ggagaccggcttacaaatcccaggttttcataaacaaagaaaccgaagcggcggtatagccgcataggatcagtggtgggagagagaaaagagatggaaaatagaaatttattgaaacttgaaagaagcgcttacaaaagttttctttcagagcacctctctttcagaaacctgaaaaatggccaaatgaaagggtgcatcacaacatagttgaggactccttatatagccaaaaatctgagaccggtagttgtcggtagttttgaccgggactatttgactgtttgttacaagacaagtagttttgaccgagactttaatggctacaggacaggtagtattgtccaaaattaattacacattaattacaaatagacggttttgtgaccgaaattaaatttaatctaaacagataccaaaacaatcatcttcggtatctgtttaccaaaacaatcatcttcggtatctgtttaccaaaacaatcatcttcggtatctgtctaccaaaacaatcatcttcggtatcaatttaccaaagatgattgttttggtaaacagataccgaagatgattgttttggtaaacagatacagaagatgattgttttggtaaacagataccgaagatgattgttttggtatctgtttagattaaatttaatttcggtcacaaaaccgtctgtttgtaattaatgtgtaattaattttggacaatactacctgtcctgtagccattaaagtcccggtcaaaactacttgtcttgtaacaaacagttaaatagtcccggtcaaaactaccggcaactaccggtctcagatttttggctatataaggagtcctcaactatgttgtgagacaccctttcatttggccatttttcaggtttctgaagagaggtgctctgaaagaaaacttttgtaagcgcttctttcaagtttcaataaatttctattttccgtctcttttctctctcccaccaccgatcctgtgcggttgtgccgccgtttcggtttctttgtttatgaaaacctgggatttgtaagccggtctccggtgtgcccttgatatctgttttacaagtttatattttcatttccatttatcatactgcattcttactt

SEQ ID NO: 12367 - DNA, 1059 bp, Glycine max
  Gm_smallRNAprecursor_5200
agaccggcttacaaatcccaggttttcataaacaaagaaaccgaagcggcggtatagccgcataggatcagtggtgggagagagaaaagagatggaaaatagaaatttattgaaacttgaaagaagcgcttacaaaagttttctttcagagcacctctctttcagaaacctgaaaaatggccaaatgaaagggtgcatcacaacatagttgaggactccttatatagccaaaaatctgagaccggtagttgtcggtagttttgaccgggactatttgactgtttgttacaagacaagtagttttgaccgagactttaatggctacaggacaggtagtattgtccaaaattaattacacattaattacaaatagacggttttgtgaccgaaattaaatttaatctaaacagataccaaaacaatcatcttcggtatctgtttaccaaaacaatcatcttcggtatctgtttaccaaaacaatcatcttcggtatctgtctaccaaaacaatcatcttcggtatcaatttaccaaagatgattgttttggtaaacagataccgaagatgattgttttggtaaacagatacagaagatgattgttttggtaaacagataccgaagatgattgttttggtatctgtttagattaaatttaatttcggtcacaaaaccgtctgtttgtaattaatgtgtaattaattttggacaatactacctgtcctgtagccattaaagtcccggtcaaaactacttgtcttgtaacaaacagttaaatagtcccggtcaaaactaccggcaactaccggtctcagatttttggctatataaggagtcctcaactatgttgtgagacaccctttcatttggccatttttcaggtttctgaagagaggtgctctgaaagaaaacttttgtaagcgcttctttcaagtttcaataaatttctattttccgtctcttttctctctcccaccaccgatcctgtgcggttgtgccgccgtttcggtttctttgtttatgaaaacctgggatttgtaagccggtctccggtgtgccct

SEQ ID NO: 12368 - DNA, 1117 bp, Glycine max
  Gm_smallRNAprecursor_5201
agaccggcttacaaatcccaggttttcataaacaaagaaaccgaagcggcggtatagccgcataggatcagtggtgggagagagaaaagagatggaaaatagaaatttattgaaacttgaaagaagcgcttacaaaagttttctttcagagcacctctctttcagaaacctgaaaaatggccaaatgaaagggtgcatcacaacatagttgaggactccttatatagccaaaaatctgagaccggtagttgtcggtagttttgaccgggactatttgactgtttgttacaagacaagtagttttgaccgagactttaatggctacaggacaggtagtattgtccaaaattaattacacattaattacaaatagacggttttgtgaccgaaattaaatttaatctaaacagataccaaaacaatcatcttcggtatctgtttaccaaaacaatcatcttcggtatctgtttaccaaaacaatcatcttcggtatctgtctaccaaaacaatcatcttcggtatcaatttaccaaagatgattgttttggtaaacagataccgaagatgattgttttggtaaacagatacagaagatgattgttttggtaaacagataccgaagatgattgttttggtatctgtttagattaaatttaatttcggtcacaaaaccgtctgtttgtaattaatgtgtaattaattttggacaatactacctgtcctgtagccattaaagtcccggtcaaaactacttgtcttgtaacaaacagttaaatagtcccggtcaaaactaccggcaactaccggtctcagatttttggctatataaggagtcctcaactatgttgtgagacaccctttcatttggccatttttcaggtttctgaagagaggtgctctgaaagaaaacttttgtaagcgcttctttcaagtttcaataaatttctattttccgtctcttttctctctcccaccaccgatcctgtgcggttgtgccgccgtttcggtttctttgtttatgaaaacctgggatttgtaagccggtctccggtgtgcccttgatatctgttttacaagtttatattttcatttccatttatcatactgcattcttact

SEQ ID NO: 12369 - DNA, 1070 bp, Glycine max
  Gm_smallRNAprecursor_5202
tatagccgcataggatcagtggtgggagagagaaaagagatggaaaatagaaatttattgaaacttgaaagaagcgcttacaaaagttttctttcagagcacctctctttcagaaacctgaaaaatggccaaatgaaagggtgcatcacaacatagttgaggactccttatatagccaaaaatctgagaccggtagttgtcggtagttttgaccgggactatttgactgtttgttacaagacaagtagttttgaccgagactttaatggctacaggacaggtagtattgtccaaaattaattacacattaattacaaatagacggttttgtgaccgaaattaaatttaatctaaacagataccaaaacaatcatcttcggtatctgtttaccaaaacaatcatcttcggtatctgtttaccaaaacaatcatcttcggtatctgtctaccaaaacaatcatcttcggtatcaatttaccaaagatgattgttttggtaaacagataccgaagatgattgttttggtaaacagatacagaagatgattgttttggtaaacagataccgaagatgattgttttggtatctgtttagattaaatttaatttcggtcacaaaaccgtctgtttgtaattaatgtgtaattaattttggacaatactacctgtcctgtagccattaaagtcccggtcaaaactacttgtcttgtaacaaacagttaaatagtcccggtcaaaactaccggcaactaccggtctcagatttttggctatataaggagtcctcaactatgttgtgagacaccctttcatttggccatttttcaggtttctgaagagaggtgctctgaaagaaaacttttgtaagcgcttctttcaagtttcaataaatttctattttccgtctcttttctctctcccaccaccgatcctgtgcggttgtgccgccgtttcggtttctttgtttatgaaaacctgggatttgtaagccggtctccggtgtgcccttgatatctgttttacaagtttatattttcatttccatttatcatactgcattcttacttccta

SEQ ID NO: 12370 - DNA, 1097 bp, Glycine max
  Gm_smallRNAprecursor_5203
attgttttggtaaacagataccgaagatgattgttttggtatctgtttagattaaatttaatttcggtcacaaaaccgtctgtttgtaattaatgtgtaattaattttggacaatactacctgtcctgtagccattaaagtcccggtcaaaactacttgtcttgtaacaaacagttaaatagtcccggtcaaaactaccggcaactaccggtctcagatttttggctatataaggagtcctcaactatgttgtgagacaccctttcatttggccatttttcaggtttctgaagagaggtgctctgaaagaaaacttttgtaagcgcttctttcaagtttcaataaatttctattttccgtctcttttctctctcccaccaccgatcctgtgcggttgtgccgccgtttcggtttctttgtttatgaaaacctgggatttgtaagccggtctccggtgtgcccttgatatctgttttacaagtttatattttcatttccatttatcatactgcattcttacttcctacctgtccgtttgatcctattccactgacctctagtattagagcctgatggggaagtaggaatagtgtccgtaagggcatatgttaactgaacttatggatctgaaccatgtacaatagttttaatttaaacagtatatgtttgaacagtattttctggaagcagaacagtctgatattttagttgaatgatactgtagcagtaagccctgtggttgagaaagggcagtaagactaaggtgtattgttcaaataaaatattgagacataatatactggaggctataggagtagtgttcaaactatattgtccataaaaaaaaataaaaaaaatttgttcagatccaagaagttttgtaacatatagccttatgaaaacatttctatggaaccaaatgaaggcaaagatattagagaatgttataatcatgtctagactattgtgctctttttcccgtatcactttttgatcaaattcttcttcatcatcttcctcaagaaattccaatttattaagtgatcaagataaccagacccaagaggtcgcccccaaacacaatctcttcgatgagg

SEQ ID NO: 12371 - DNA, 1097 bp, Glycine max; identical to SEQ ID NO: 12370
  Gm_smallRNAprecursor_5204

SEQ ID NO: 12372 - DNA, 1098 bp, Glycine max
  Gm_smallRNAprecursor_5205
attgttttggtaaacagataccgaagatgattgttttggtatctgtttagattaaatttaatttcggtcacaaaaccgtctgtttgtaattaatgtgtaattaattttggacaatactacctgtcctgtagccattaaagtcccggtcaaaactacttgtcttgtaacaaacagttaaatagtcccggtcaaaactaccggcaactaccggtctcagatttttggctatataaggagtcctcaactatgttgtgagacaccctttcatttggccatttttcaggtttctgaagagaggtgctctgaaagaaaacttttgtaagcgcttctttcaagtttcaataaatttctattttccgtctcttttctctctcccaccaccgatcctgtgcggttgtgccgccgtttcggtttctttgtttatgaaaacctgggatttgtaagccggtctccggtgtgcccttgatatctgttttacaagtttatattttcatttccatttatcatactgcattcttacttcctacctgtccgtttgatcctattccactgacctctagtattagagcctgatggggaagtaggaatagtgtccgtaagggcatatgttaactgaacttatggatctgaaccatgtacaatagttttaatttaaacagtatatgtttgaacagtattttctggaagcagaacagtctgatattttagttgaatgatactgtagcagtaagccctgtggttgagaaagggcagtaagactaaggtgtattgttcaaataaaatattgagacataatatactggaggctataggagtagtgttcaaactatattgtccataaaaaaaaataaaaaaaatttgttcagatccaagaagttttgtaacatatagccttatgaaaacatttctatggaaccaaatgaaggcaaagatattagagaatgttataatcatgtctagactattgtgctctttttcccgtatcactttttgatcaaattcttcttcatcatcttcctcaagaaattccaatttattaagtgatcaagataaccagacccaagaggtcgcccccaaacacaatctcttcgatgagga

SEQ ID NO: 12373 - DNA, 1157 bp, Glycine max
  Gm_smallRNAprecursor_5206
gtaggaatagtgtccgtaagggcatatgttaactgaacttatggatctgaaccatgtacaatagttttaatttaaacagtatatgtttgaacagtattttctggaagcagaacagtctgatattttagttgaatgatactgtagcagtaagccctgtggttgagaaagggcagtaagactaaggtgtattgttcaaataaaatattgagacataatatactggaggctataggagtagtgttcaaactatattgtccataaaaaaaaataaaaaaaatttgttcagatccaagaagttttgtaacatatagccttatgaaaacatttctatggaaccaaatgaaggcaaagatattagagaatgttataatcatgtctagactattgtgctctttttcccgtatcactttttgatcaaattcttcttcatcatcttcctcaagaaattccaatttattaagtgatcaagataaccagacccaagaggtcgcccccaaacacaatctcttcgatgaggaagtccgattcgaagatatcaatcaaaacatggatgactggaacattccagaaatccctcaggatcaacaatacgttcctgaaacaattaaggacaaacacaactttgattacataatcaaaacagtagaaaacaatattcctctaggacaagatataggggaagaatttcatttactttcaaaaatttcaatttatgaacatagccgtgagtataaatatctacacatcggctgtatacaagtagccatcaagcctttaattgacatgggcatagatgtaacagttttggcataaatttatctgtctctgatactagaggttggcggaaaaggatcaaacggacaggtaggaagtaagaatgcagtatgataaatggaaatgaaaatataaacttgtaaaacagatatcaagggcagaccgaagaccggcttacaaatcccaggttttcataaacaaagaaaccgaagcggtggcagagtcgcataggatcggtggagggagagagaaaagagatggaaaatagaaatttattgaaacttgaaagaagcacttacaaaagttttctttcagagcacctctcttcagaaacctaaaaaatggccaaatgaaagggtgcctcacaacatagttgaggactc

SEQ ID NO: 12374 - DNA, 1114 bp, Glycine max
  Gm_smallRNAprecursor_5207
ttttagttaggatctcctttgatttcgatcttgctaaaaatgctgccagatgagacttttggttcaaaaacacagaagtttctggattagctgctttgaggaattctggatgggattggaactagagttttacttgttctggatctgctttggatgagtcaaattgtgtccaccattttacaaatgcgtgtctttgtagtgatggatattggtttgtcttttcagtcttgctgtaacgatgttgtcatgagaagatccatgacagtggaaagcttgagaagtatttaagattttctggaattcgtgattcctgcgaattgtattgtttctcaaattgggcaaatccttgttggactgtttctgggaatatctctggaatttgtccaaagaagtcccaccattgtaaaaaccaattgggaaaattgtaaattgtattggtcttgaaatatatcagccatgaatgcttgaagcgggtattttggtgccaaaacaccttagtccaagcatcaacataatcccaataggtataacctaccggatcaaatggaattgaaaatctctttcctttgttcaagtccgaaccaaagtgtcttggttcaagaacttttagtatttggattatggagtgggtgtttaatgtttggtcttttgggtctttgaaatgtttgatagatactgaatttgaatctaccaaaatcaattcataaaaagttcttgtcttcaggatggtggttggtttgtagtgaaatcctggtgggaaagccttggtcgtcgccttgaaggaattcttgtcccaaaattcaggttccatctgcaaaatagttaaaaatttatttttataaatataattgttagtttgtttggtaggtggtgtttgttctttggctaaaggtaattttcctttaggattggtagatgttttggtcattgatgcattttggatcattgtttgtaaattcgattcagaatcatcatcagattttgaggcaatgtctgcccaagattttttgattatttttggaaatttggttagacccatgtcttgaagggcctgaagggtttcaattggccatgcatagtcggccgatgtttgcttggcgtttgccggtttgag

SEQ ID NO: 12375 - DNA, 1129 bp, Glycine max
  Gm_smallRNAprecursor_5208
ctgcaaaatagttaaaaatttatttttataaatataattgttagtttgtttggtaggtggtgtttgttctttggctaaaggtaattttcctttaggattggtagatgttttggtcattgatgcattttggatcattgtttgtaaattcgattcagaatcatcatcagattttgaggcaatgtctgcccaagattttttgattatttttggaaatttggttagacccatgtcttgaagggcctgaagggtttcaattggccatgcatagtcggccgatgtttgcttggcgtttgccggtttgagagattcctgagtggatggctcaggtttgattgaggtaatctaggtcgatgacccttctaaattggttttctggatagatgacccagcctgggttggtgacccataagaggttgatgatttcttagtggttggctctggaagtgccagtctggatcctttgcctgtacttcgtcctccccttagggagattcctaatgccttaggaggcattaccacttttctgtaagaattcacgggtaaggtagtcaggtaatgaatttgaggtgcccttgatatattctatgtcaaaatcaaagacacttagaattgcttgccgtcttgcaaaaatttgttttgaggcaaggtttttaacatctttttgtaaaatatctttggctgatttacaatcaaccctgattaaaaacttttggtttaataaatccgattgaaatttggaaatgcacaaaacaattgctaaaacttcatttttcacagttgaatattttaattgtgcaggattccagtgttttgatgtatatgcaatgacatgatcttggccatggactctttgtttgaggatgccaccataaccaatgtatgatgcatcagtttcgataattttaaatacatgtggaatgggaagatacagacattttatggattggacttttagtttgatttctttaactgtttgtgtatggaggtcagaccaaggaggcagatttttcttcagcctatcatgcaatggcttgacaatattgtttaaataggggaaaaattctcctacataatttagacaacctagaaatctttgtaactgggttttgtctaagatttggttgggaaa

SEQ ID NO: 12376 - DNA, 1115 bp, Glycine max
  Gm_smallRNAprecursor_5209
aaaatttatttttataaatataattgttagtttgtttggtaggtggtgtttgttctttggctaaaggtaattttcctttaggattggtagatgttttggtcattgatgcattttggatcattgtttgtaaattcgattcagaatcatcatcagattttgaggcaatgtctgcccaagattttttgattatttttggaaatttggttagacccatgtcttgaagggcctgaagggtttcaattggccatgcatagtcggccgatgtttgcttggcgtttgccggtttgagagattcctgagtggatggctcaggtttgattgaggtaatctaggtcgatgacccttctaaattggttttctggatagatgacccagcctgggttggtgacccataagaggttgatgatttcttagtggttggctctggaagtgccagtctggatcctttgcctgtacttcgtcctccccttagggagattcctaatgccttaggaggcattaccacttttctgtaagaattcacgggtaaggtagtcaggtaatgaatttgaggtgcccttgatatattctatgtcaaaatcaaagacacttagaattgcttgccgtcttgcaaaaatttgttttgaggcaaggtttttaacatctttttgtaaaatatctttggctgatttacaatcaaccctgattaaaaacttttggtttaataaatccgattgaaatttggaaatgcacaaaacaattgctaaaacttcatttttcacagttgaatattttaattgtgcaggattccagtgttttgatgtatatgcaatgacatgatcttggccatggactctttgtttgaggatgccaccataaccaatgtatgatgcatcagtttcgataattttaaatacatgtggaatgggaagatacagacattttatggattggacttttagtttgatttctttaactgtttgtgtatggaggtcagaccaaggaggcagatttttcttcagcctatcatgcaatggcttgacaatattgtttaaataggggaaaaattctcctacataatttagacaacctagaaatctttgtaactgggttttgtctaagatttggttgggaaa

SEQ ID NO: 12377 - DNA, 1131 bp, Glycine max
  Gm_smallRNAprecursor_5210
gttggctctggaagtgccagtctggatcctttgcctgtacttcgtcctccccttagggagattcctaatgccttaggaggcattaccacttttctgtaagaattcacgggtaaggtagtcaggtaatgaatttgaggtgcccttgatatattctatgtcaaaatcaaagacacttagaattgcttgccgtcttgcaaaaatttgttttgaggcaaggtttttaacatctttttgtaaaatatctttggctgatttacaatcaaccctgattaaaaacttttggtttaataaatccgattgaaatttggaaatgcacaaaacaattgctaaaacttcatttttcacagttgaatattttaattgtgcaggattccagtgttttgatgtatatgcaatgacatgatcttggccatggactctttgtttgaggatgccaccataaccaatgtatgatgcatcagtttcgataattttaaatacatgtggaatgggaagatacagacattttatggattggacttttagtttgatttctttaactgtttgtgtatggaggtcagaccaaggaggcagatttttcttcagcctatcatgcaatggcttgacaatattgtttaaataggggaaaaattctcctacataatttagacaacctagaaatctttgtaactgggttttgtctaagatttggttgggaaatttgccagcaaactctattgacctttctattggaatgattgtaccttgatatatattgtgaccaaggaatcgaattcgagtttggaaaagatttatttttgatttggagactgccaaaccattatgtttgatgatatggatgaaagtctagagatgtttgaaatgttggtcaatgttttgggaaaagattaaaacatcatctatgtagacaatgacaaattttgaacagggattaaaaatatcattcataattttttgaaattctgaaggggcattcttcagtccgaatggcatcacattccattcatattgcccgaaaggtacagtaaatgttgttttgtacctatctgattcttggatttgccaaaatccagatttcatatcaaattttgaaaatatctttgcagaatttaatctgttaagcaaatcttt

SEQ ID NO: 12378 - DNA, 1132 bp, Glycine max
  Gm_smallRNAprecursor_5211
gttggctctggaagtgccagtctggatcctttgcctgtacttcgtcctccccttagggagattcctaatgccttaggaggcattaccacttttctgtaagaattcacgggtaaggtagtcaggtaatgaatttgaggtgcccttgatatattctatgtcaaaatcaaagacacttagaattgcttgccgtcttgcaaaaatttgttttgaggcaaggtttttaacatctttttgtaaaatatctttggctgatttacaatcaaccctgattaaaaacttttggtttaataaatccgattgaaatttggaaatgcacaaaacaattgctaaaacttcatttttcacagttgaatattttaattgtgcaggattccagtgttttgatgtatatgcaatgacatgatcttggccatggactctttgtttgaggatgccaccataaccaatgtatgatgcatcagtttcgataattttaaatacatgtggaatgggaagatacagacattttatggattggacttttagtttgatttctttaactgtttgtgtatggaggtcagaccaaggaggcagatttttcttcagcctatcatgcaatggcttgacaatattgtttaaataggggaaaaattctcctacataatttagacaacctagaaatctttgtaactgggttttgtctaagatttggttgggaaatttgccagcaaactctattgacctttctattggaatgattgtaccttgatatatattgtgaccaaggaatcgaattcgagtttggaaaagatttatttttgatttggagactgccaaaccattatgtttgatgatatggatgaaagtctagagatgtttgaaatgttggtcaatgttttgggaaaagattaaaacatcatctatgtagacaatgacaaattttgaacagggattaaaaatatcattcataattttttgaaattctgaaggggcattcttcagtccgaatggcatcacattccattcatattgcccgaaaggtacagtaaatgttgttttgtacctatctgattcttggatttgccaaaatccagatttcatatcaaattttgaaaatatctttgcagaatttaatctgttaagcaaatctttt

SEQ ID NO: 12379 - DNA, 1049 bp, Glycine max
  Gm_smallRNAprecursor_5212
tttgaggtgcccttgatatattctatgtcaaaatcaaagacacttagaattgcttgccgtcttgcaaaaatttgttttgaggcaaggtttttaacatctttttgtaaaatatctttggctgatttacaatcaaccctgattaaaaacttttggtttaataaatccgattgaaatttggaaatgcacaaaacaattgctaaaacttcatttttcacagttgaatattttaattgtgcaggattccagtgttttgatgtatatgcaatgacatgatcttggccatggactctttgtttgaggatgccaccataaccaatgtatgatgcatcagtttcgataattttaaatacatgtggaatgggaagatacagacattttatggattggacttttagtttgatttctttaactgtttgtgtatggaggtcagaccaaggaggcagatttttcttcagcctatcatgcaatggcttgacaatattgtttaaataggggaaaaattctcctacataatttagacaacctagaaatctttgtaactgggttttgtctaagatttggttgggaaatttgccagcaaactctattgacctttctattggaatgattgtaccttgatatatattgtgaccaaggaatcgaattcgagtttggaaaagatttatttttgatttggagactgccaaaccattatgtttgatgatatggatgaaagtctagagatgtttgaaatgttggtcaatgttttgggaaaagattaaaacatcatctatgtagacaatgacaaattttgaacagggattaaaaatatcattcataattttttgaaattctgaaggggcattcttcagtccgaatggcatcacattccattcatattgcccgaaaggtacagtaaatgttgttttgtacctatctgattcttggatttgccaaaatccagatttcatatcaaattttgaaaatatctttgcagaatttaatctgttaagcaaatcttttttgtttggaataggatacctaatccattgtaatgcttgatttactgg

SEQ ID NO: 12380 - DNA, 1049 bp, Glycine max; identical to SEQ ID NO: 12379
  Gm_smallRNAprecursor_5213

SEQ ID NO: 12381 - DNA, 1050 bp, Glycine max
  Gm_smallRNAprecursor_5214
tttgaggtgcccttgatatattctatgtcaaaatcaaagacacttagaattgcttgccgtcttgcaaaaatttgttttgaggcaaggtttttaacatctttttgtaaaatatctttggctgatttacaatcaaccctgattaaaaacttttggtttaataaatccgattgaaatttggaaatgcacaaaacaattgctaaaacttcatttttcacagttgaatattttaattgtgcaggattccagtgttttgatgtatatgcaatgacatgatcttggccatggactctttgtttgaggatgccaccataaccaatgtatgatgcatcagtttcgataattttaaatacatgtggaatgggaagatacagacattttatggattggacttttagtttgatttctttaactgtttgtgtatggaggtcagaccaaggaggcagatttttcttcagcctatcatgcaatggcttgacaatattgtttaaataggggaaaaattctcctacataatttagacaacctagaaatctttgtaactgggttttgtctaagatttggttgggaaatttgccagcaaactctattgacctttctattggaatgattgtaccttgatatatattgtgaccaaggaatcgaattcgagtttggaaaagatttatttttgatttggagactgccaaaccattatgtttgatgatatggatgaaagtctagagatgtttgaaatgttggtcaatgttttgggaaaagattaaaacatcatctatgtagacaatgacaaattttgaacagggattaaaaatatcattcataattttttgaaattctgaaggggcattcttcagtccgaatggcatcacattccattcatattgcccgaaaggtacagtaaatgttgttttgtacctatctgattcttggatttgccaaaatccagatttcatatcaaattttgaaaatatctttgcagaatttaatctgttaagcaaatcttttttgtttggaataggatacctaatccattgtaatgcttgatttactggt

SEQ ID NO: 12382 - DNA, 1050 bp, Glycine max; identical to SEQ ID NO: 12381
  Gm_smallRNAprecursor_5215

SEQ ID NO: 12383 - DNA, 1047 bp, Glycine max
  Gm_smallRNAprecursor_5216
ttgaggtgcccttgatatattctatgtcaaaatcaaagacacttagaattgcttgccgtcttgcaaaaatttgttttgaggcaaggtttttaacatctttttgtaaaatatctttggctgatttacaatcaaccctgattaaaaacttttggtttaataaatccgattgaaatttggaaatgcacaaaacaattgctaaaacttcatttttcacagttgaatattttaattgtgcaggattccagtgttttgatgtatatgcaatgacatgatcttggccatggactctttgtttgaggatgccaccataaccaatgtatgatgcatcagtttcgataattttaaatacatgtggaatgggaagatacagacattttatggattggacttttagtttgatttctttaactgtttgtgtatggaggtcagaccaaggaggcagatttttcttcagcctatcatgcaatggcttgacaatattgtttaaataggggaaaaattctcctacataatttagacaacctagaaatctttgtaactgggttttgtctaagatttggttgggaaatttgccagcaaactctattgacctttctattggaatgattgtaccttgatatatattgtgaccaaggaatcgaattcgagtttggaaaagatttatttttgatttggagactgccaaaccattatgtttgatgatatggatgaaagtctagagatgtttgaaatgttggtcaatgttttgggaaaagattaaaacatcatctatgtagacaatgacaaattttgaacagggattaaaaatatcattcataattttttgaaattctgaaggggcattcttcagtccgaatggcatcacattccattcatattgcccgaaaggtacagtaaatgttgttttgtacctatctgattcttggatttgccaaaatccagatttcatatcaaattttgaaaatatctttgcagaatttaatctgttaagcaaatcttttttgtttggaataggatacctaatccattgtaatgcttgatttactg

SEQ ID NO: 12384 - DNA, 1048 bp, Glycine max
  Gm_smallRNAprecursor_5217
ttgaggtgcccttgatatattctatgtcaaaatcaaagacacttagaattgcttgccgtcttgcaaaaatttgttttgaggcaaggtttttaacatctttttgtaaaatatctttggctgatttacaatcaaccctgattaaaaacttttggtttaataaatccgattgaaatttggaaatgcacaaaacaattgctaaaacttcatttttcacagttgaatattttaattgtgcaggattccagtgttttgatgtatatgcaatgacatgatcttggccatggactctttgtttgaggatgccaccataaccaatgtatgatgcatcagtttcgataattttaaatacatgtggaatgggaagatacagacattttatggattggacttttagtttgatttctttaactgtttgtgtatggaggtcagaccaaggaggcagatttttcttcagcctatcatgcaatggcttgacaatattgtttaaataggggaaaaattctcctacataatttagacaacctagaaatctttgtaactgggttttgtctaagatttggttgggaaatttgccagcaaactctattgacctttctattggaatgattgtaccttgatatatattgtgaccaaggaatcgaattcgagtttggaaaagatttatttttgatttggagactgccaaaccattatgtttgatgatatggatgaaagtctagagatgtttgaaatgttggtcaatgttttgggaaaagattaaaacatcatctatgtagacaatgacaaattttgaacagggattaaaaatatcattcataattttttgaaattctgaaggggcattcttcagtccgaatggcatcacattccattcatattgcccgaaaggtacagtaaatgttgttttgtacctatctgattcttggatttgccaaaatccagatttcatatcaaattttgaaaatatctttgcagaatttaatctgttaagcaaatcttttttgtttggaataggatacctaatccattgtaatgcttgatttactgg

SEQ ID NO: 12385 - DNA, 1049 bp, Glycine max
  Gm_smallRNAprecursor_5218
ttgaggtgcccttgatatattctatgtcaaaatcaaagacacttagaattgcttgccgtcttgcaaaaatttgttttgaggcaaggtttttaacatctttttgtaaaatatctttggctgatttacaatcaaccctgattaaaaacttttggtttaataaatccgattgaaatttggaaatgcacaaaacaattgctaaaacttcatttttcacagttgaatattttaattgtgcaggattccagtgttttgatgtatatgcaatgacatgatcttggccatggactctttgtttgaggatgccaccataaccaatgtatgatgcatcagtttcgataattttaaatacatgtggaatgggaagatacagacattttatggattggacttttagtttgatttctttaactgtttgtgtatggaggtcagaccaaggaggcagatttttcttcagcctatcatgcaatggcttgacaatattgtttaaataggggaaaaattctcctacataatttagacaacctagaaatctttgtaactgggttttgtctaagatttggttgggaaatttgccagcaaactctattgacctttctattggaatgattgtaccttgatatatattgtgaccaaggaatcgaattcgagtttggaaaagatttatttttgatttggagactgccaaaccattatgtttgatgatatggatgaaagtctagagatgtttgaaatgttggtcaatgttttgggaaaagattaaaacatcatctatgtagacaatgacaaattttgaacagggattaaaaatatcattcataattttttgaaattctgaaggggcattcttcagtccgaatggcatcacattccattcatattgcccgaaaggtacagtaaatgttgttttgtacctatctgattcttggatttgccaaaatccagatttcatatcaaattttgaaaatatctttgcagaatttaatctgttaagcaaatcttttttgtttggaataggatacctaatccattgtaatgcttgatttactggt

SEQ ID NO: 12386 - DNA, 1241 bp, Glycine max
  Gm_smallRNAprecursor_5219
tcatgcaatggcttgacaatattgtttaaataggggaaaaattctcctacataatttagacaacctagaaatctttgtaactgggttttgtctaagatttggttgggaaatttgccagcaaactctattgacctttctattggaatgattgtaccttgatatatattgtgaccaaggaatcgaattcgagtttggaaaagatttatttttgatttggagactgccaaaccattatgtttgatgatatggatgaaagtctagagatgtttgaaatgttggtcaatgttttgggaaaagattaaaacatcatctatgtagacaatgacaaattttgaacagggattaaaaatatcattcataattttttgaaattctgaaggggcattcttcagtccgaatggcatcacattccattcatattgcccgaaaggtacagtaaatgttgttttgtacctatctgattcttggatttgccaaaatccagatttcatatcaaattttgaaaatatctttgcagaatttaatctgttaagcaaatcttttttgtttggaataggatacctaatccattgtaatgcttgatttactggtttgtaatttatgactaagcggggtgttccacgctcaatctcagattgtttgttgacataaaaagccgcacaagaccatgggcttttgcttttccggattaggcctttatcaaggaaatccttgatttccttttggaagtattgaagaagttcttcgttcatttggattggtctggcttttgtggaaatttgtttttccctaaagtctttctcataagggagatcaacaatatgtttctttctgtcccaaaatgcatgtggcaaatcagaacagacagttgattcgatatgatttaataaagattgaattttttcttttacttcgggttttcctagttgtatctgaatattattaaaagatacttcttcttttaagaagttaatttgattaatcttattttctataagatttatatttctggagattggtttagtagaaaaatttaatttttcttcctaaataatttgtggttattccttcattagatatttgaatgggaaacaaggctctaatgaagggggttcctaggattacttcgttcttaaggttttttaccagaagaaagtttgtgttaatcctaagaccttggttctcaatgattgcatttgatagctaaaaattaatttttaattttgagtcgtttgccgtac

SEQ ID NO: 12387 - DNA, 1102 bp, Glycine max
  Gm_smallRNAprecursor_5220
atgatatggatgaaagtctagagatgtttgaaatgttggtcaatgttttgggaaaagattaaaacatcatctatgtagacaatgacaaattttgaacagggattaaaaatatcattcataattttttgaaattctgaaggggcattcttcagtccgaatggcatcacattccattcatattgcccgaaaggtacagtaaatgttgttttgtacctatctgattcttggatttgccaaaatccagatttcatatcaaattttgaaaatatctttgcagaatttaatctgttaagcaaatcttttttgtttggaataggatacctaatccattgtaatgcttgatttactggtttgtaatttatgactaagcggggtgttccacgctcaatctcagattgtttgttgacataaaaagccgcacaagaccatgggcttttgcttttccggattaggcctttatcaaggaaatccttgatttccttttggaagtattgaagaagttcttcgttcatttggattggtctggcttttgtggaaatttgtttttccctaaagtctttctcataagggagatcaacaatatgtttctttctgtcccaaaatgcatgtggcaaatcagaacagacagttgattcgatatgatttaataaagattgaattttttcttttacttcgggttttcctagttgtatctgaatattattaaaagatacttcttcttttaagaagttaatttgattaatcttattttctataagatttatatttctggagattggtttagtagaaaaatttaatttttcttcctaaataatttgtggttattccttcattagatatttgaatgggaaacaaggctctaatgaagggggttcctaggattacttcgttcttaaggttttttaccagaagaaagtttgtgttaatcctaagaccttggttctcaatgattgcatttgatagctaaaaattaatttttaattttgagtcgtttgccgtacttaatttttttgaggttttctcaaagaattttgtaggaattaatccttctaaaatgcagtttgaatcaacccctgtgtcaaatagggccatcgtttctaaa

SEQ ID NO: 12388 - DNA, 1109 bp, Glycine max
  Gm_smallRNAprecursor_5221
aaacaaacacaatccattcaacacaacaatgtcattctcattctcattgttaagaaggttaagctcttctccctctctttccattcccaactttcctccttttcttccaaaccccactttcactctttgctttcactctcagcccccatccactgaaaatgtcgttgatgatgctgtttcccagttcaatcgcatgctccttgttcatcataccccgcccattattgaatttggcaagattttaggatccctgtaaagatgaagcattatcctattgccatttccctttctaaacaaatggaagccaaaggaattgagccaaatcttgttactctgagcatcctcatcaattgtttctgtcacatgggacaaatggccttgtctttttctgtattgggcaaaattctaaaattaggttatcagccgagtaccataaccttgaccacactcatgaaaggtctgtgtctcaagggtgaggtcaagaaatcactgcactttcatgacaaggtcgtagcacaaggatttcagatgaaccaggttagttacgcgaccctactcaatggactatgtaaaataggagaaacgagatgtgccatcaagttgctgagaatgattgaagacagatcaactaggcctgatgtggtaatgtacaacaccatcattgatggcttatgcaaagataaacttgtaaacgaggcttatgatttatagtctgaaatgaatgctagaggaattttttctgatgtcatcacttacaatactctaatgtgtggcttttgccttgtgggtcagttaatgggagcattgagtttattaaatgaaatgacattgaagaacatcaacccggatgtttatacctatagtatattgattgatgcattatgtaatgtaggaaaggtgaaagaagcaaaaaatttattagctgtgatgacgaaagaaggagtaaaacctgatgttgttgcatataatactttaatggatgggtattgtttagttggtggagtgcaagatgcaaaacaaatattacacgctatgattcaaacgggagtaaatcctgatgtttgcagctacactataattattaatggattatgtaagagtaaaagggt

SEQ ID NO: 12389 - DNA, 1186 bp, Glycine max
  Gm_smallRNAprecursor_5222
aaacaaacacaatccattcaacacaacaatgtcattctcattctcattgttaagaaggttaagctcttctccctctctttccattcccaactttcctccttttcttccaaaccccactttcactctttgctttcactctcagcccccatccactgaaaatgtcgttgatgatgctgtttcccagttcaatcgcatgctccttgttcatcataccccgcccattattgaatttggcaagattttaggatccctgtaaagatgaagcattatcctattgccatttccctttctaaacaaatggaagccaaaggaattgagccaaatcttgttactctgagcatcctcatcaattgtttctgtcacatgggacaaatggccttgtctttttctgtattgggcaaaattctaaaattaggttatcagccgagtaccataaccttgaccacactcatgaaaggtctgtgtctcaagggtgaggtcaagaaatcactgcactttcatgacaaggtcgtagcacaaggatttcagatgaaccaggttagttacgcgaccctactcaatggactatgtaaaataggagaaacgagatgtgccatcaagttgctgagaatgattgaagacagatcaactaggcctgatgtggtaatgtacaacaccatcattgatggcttatgcaaagataaacttgtaaacgaggcttatgatttatagtctgaaatgaatgctagaggaattttttctgatgtcatcacttacaatactctaatgtgtggcttttgccttgtgggtcagttaatgggagcattgagtttattaaatgaaatgacattgaagaacatcaacccggatgtttatacctatagtatattgattgatgcattatgtaatgtaggaaaggtgaaagaagcaaaaaatttattagctgtgatgacgaaagaaggagtaaaacctgatgttgttgcatataatactttaatggatgggtattgtttagttggtggagtgcaagatgcaaaacaaatattacacgctatgattcaaacgggagtaaatcctgatgtttgcagctacactataattattaatggattatgtaagagtaaaagggtggatgaggccatgaatctcctaagaggaatgttgcataaaaatatggttcctgatagagtcacgtacagttctctta

SEQ ID NO: 12390 - DNA, 1235 bp, Glycine max
  Gm_smallRNAprecursor_5223
aaacaaacacaatccattcaacacaacaatgtcattctcattctcattgttaagaaggttaagctcttctccctctctttccattcccaactttcctccttttcttccaaaccccactttcactctttgctttcactctcagcccccatccactgaaaatgtcgttgatgatgctgtttcccagttcaatcgcatgctccttgttcatcataccccgcccattattgaatttggcaagattttaggatccctgtaaagatgaagcattatcctattgccatttccctttctaaacaaatggaagccaaaggaattgagccaaatcttgttactctgagcatcctcatcaattgtttctgtcacatgggacaaatggccttgtctttttctgtattgggcaaaattctaaaattaggttatcagccgagtaccataaccttgaccacactcatgaaaggtctgtgtctcaagggtgaggtcaagaaatcactgcactttcatgacaaggtcgtagcacaaggatttcagatgaaccaggttagttacgcgaccctactcaatggactatgtaaaataggagaaacgagatgtgccatcaagttgctgagaatgattgaagacagatcaactaggcctgatgtggtaatgtacaacaccatcattgatggcttatgcaaagataaacttgtaaacgaggcttatgatttatagtctgaaatgaatgctagaggaattttttctgatgtcatcacttacaatactctaatgtgtggcttttgccttgtgggtcagttaatgggagcattgagtttattaaatgaaatgacattgaagaacatcaacccggatgtttatacctatagtatattgattgatgcattatgtaatgtaggaaaggtgaaagaagcaaaaaatttattagctgtgatgacgaaagaaggagtaaaacctgatgttgttgcatataatactttaatggatgggtattgtttagttggtggagtgcaagatgcaaaacaaatattacacgctatgattcaaacgggagtaaatcctgatgtttgcagctacactataattattaatggattatgtaagagtaaaagggtggatgaggccatgaatctcctaagaggaatgttgcataaaaatatggttcctgatagagtcacgtacagttctcttatcgatggtttgtgtaaatcagggagaattacttctgctttgggtcttat

SEQ ID NO: 12391 - DNA, 1127 bp, Glycine max
  Gm_smallRNAprecursor_5224
aaaccccactttcactctttgctttcactctcagcccccatccactgaaaatgtcgttgatgatgctgtttcccagttcaatcgcatgctccttgttcatcataccccgcccattattgaatttggcaagattttaggatccctgtaaagatgaagcattatcctattgccatttccctttctaaacaaatggaagccaaaggaattgagccaaatcttgttactctgagcatcctcatcaattgtttctgtcacatgggacaaatggccttgtctttttctgtattgggcaaaattctaaaattaggttatcagccgagtaccataaccttgaccacactcatgaaaggtctgtgtctcaagggtgaggtcaagaaatcactgcactttcatgacaaggtcgtagcacaaggatttcagatgaaccaggttagttacgcgaccctactcaatggactatgtaaaataggagaaacgagatgtgccatcaagttgctgagaatgattgaagacagatcaactaggcctgatgtggtaatgtacaacaccatcattgatggcttatgcaaagataaacttgtaaacgaggcttatgatttatagtctgaaatgaatgctagaggaattttttctgatgtcatcacttacaatactctaatgtgtggcttttgccttgtgggtcagttaatgggagcattgagtttattaaatgaaatgacattgaagaacatcaacccggatgtttatacctatagtatattgattgatgcattatgtaatgtaggaaaggtgaaagaagcaaaaaatttattagctgtgatgacgaaagaaggagtaaaacctgatgttgttgcatataatactttaatggatgggtattgtttagttggtggagtgcaagatgcaaaacaaatattacacgctatgattcaaacgggagtaaatcctgatgtttgcagctacactataattattaatggattatgtaagagtaaaagggtggatgaggccatgaatctcctaagaggaatgttgcataaaaatatggttcctgatagagtcacgtacagttctcttatcgatggtttgtgtaaatcagggagaattacttctgctttgggtcttat

SEQ ID NO: 12392 - DNA, 1157 bp, Glycine max
  Gm_smallRNAprecursor_5225
gtaggaatagtgtctgtaagggacatatgttaactgaacttatggatctgaaccatgtacagtaattttaatttaaacagtatgtgtttgaacagtattttctggaagcatagcagtctgatattttacttgaatgatactgtagtagtgagtcccgtggttgagaaagggcagtaagactaaggtgtattgttcaaataaaatattgagacataatatactggtggctataggagtagtgctcaaactatattgtctgtaaaaaaaatctttttcatttattcagatccaagaagttctgtaccatatagccttatgaaaatatttctatggaaccaaatgaaggcaaagatattaaataatattataatcatgtctagactattgcgatctttttcccgtatctcttttcgatcaaactcctcctcatcatcttcttcaagaaactccaatttattaaatgatcaagataaccagacccaagaggtcgcccccaaacacaatctcttcgatgaggaagtcttattcgaagatatcaatcaaaacatggatgactgaaacattccagaaatccctcaggatcaactatacgttcctgaaacaattaaggacaaacacaactttgattacataatcaaaacagtagaaaacaatattcctctaggacaagatataggggaagaatttcatttactttcaaaaaattcaatttatgaacatagccgtaagtataaatatctacacatcggttgtgtacaagtagccatcaagcccttaattgacatgggcatagatgcagcagttttaatgtgtctaagagatattaggcataataaatttgaagactccctaattggaacagtcgaaaccagccttggacaaggtccaatatattttaattgttatccaaacaaaacagtgagtctgatggacagaaacattcttgactctctgttcttaaacatccactttcatggccttgacatgaaagaaggatcaatcccagcagccttaatttataggatccagtacaaggtcatgaatacttgtgcatctagagtcctgttaaaacctcaaaaaggagaaacaactttgtttatcactgatatgacaaaggctaacgtttctttcccgagaaaaataaaatgggatgaagt

SEQ ID NO: 12393 - DNA, 1033 bp, Glycine max
  Gm_smallRNAprecursor_5226
cagtaagactaaggtgtattgttcaaataaaatattgagacataatatactggtggctataggagtagtgctcaaactatattgtctgtaaaaaaaatctttttcatttattcagatccaagaagttctgtaccatatagccttatgaaaatatttctatggaaccaaatgaaggcaaagatattaaataatattataatcatgtctagactattgcgatctttttcccgtatctcttttcgatcaaactcctcctcatcatcttcttcaagaaactccaatttattaaatgatcaagataaccagacccaagaggtcgcccccaaacacaatctcttcgatgaggaagtcttattcgaagatatcaatcaaaacatggatgactgaaacattccagaaatccctcaggatcaactatacgttcctgaaacaattaaggacaaacacaactttgattacataatcaaaacagtagaaaacaatattcctctaggacaagatataggggaagaatttcatttactttcaaaaaattcaatttatgaacatagccgtaagtataaatatctacacatcggttgtgtacaagtagccatcaagcccttaattgacatgggcatagatgcagcagttttaatgtgtctaagagatattaggcataataaatttgaagactccctaattggaacagtcgaaaccagccttggacaaggtccaatatattttaattgttatccaaacaaaacagtgagtctgatggacagaaacattcttgactctctgttcttaaacatccactttcatggccttgacatgaaagaaggatcaatcccagcagccttaatttataggatccagtacaaggtcatgaatacttgtgcatctagagtcctgttaaaacctcaaaaaggagaaacaactttgtttatcactgatatgacaaaggctaacgtttctttcccgagaaaaataaaatgggatgaagtaactcttcccgaaagatgggttatggataaggccacaccgtctgctc

SEQ ID NO: 12394 - DNA, 1047 bp, Glycine max
  Gm_smallRNAprecursor_5227
tattgagacataatatactggtggctataggagtagtgctcaaactatattgtctgtaaaaaaaatctttttcatttattcagatccaagaagttctgtaccatatagccttatgaaaatatttctatggaaccaaatgaaggcaaagatattaaataatattataatcatgtctagactattgcgatctttttcccgtatctcttttcgatcaaactcctcctcatcatcttcttcaagaaactccaatttattaaatgatcaagataaccagacccaagaggtcgcccccaaacacaatctcttcgatgaggaagtcttattcgaagatatcaatcaaaacatggatgactgaaacattccagaaatccctcaggatcaactatacgttcctgaaacaattaaggacaaacacaactttgattacataatcaaaacagtagaaaacaatattcctctaggacaagatataggggaagaatttcatttactttcaaaaaattcaatttatgaacatagccgtaagtataaatatctacacatcggttgtgtacaagtagccatcaagcccttaattgacatgggcatagatgcagcagttttaatgtgtctaagagatattaggcataataaatttgaagactccctaattggaacagtcgaaaccagccttggacaaggtccaatatattttaattgttatccaaacaaaacagtgagtctgatggacagaaacattcttgactctctgttcttaaacatccactttcatggccttgacatgaaagaaggatcaatcccagcagccttaatttataggatccagtacaaggtcatgaatacttgtgcatctagagtcctgttaaaacctcaaaaaggagaaacaactttgtttatcactgatatgacaaaggctaacgtttctttcccgagaaaaataaaatgggatgaagtaactcttcccgaaagatgggttatggataaggccacaccgtctgctccccgacccgctccaaccatagagcatattaagcaagataactccgg

SEQ ID NO: 12395 - DNA, 1070 bp, Glycine max
  Gm_smallRNAprecursor_5228
tgaatggaatgtgatgccattcggactaaagaataccccttcagaatttcaaaaaattgtgaatgatatttttaatccctattcaaaatttgtcattgtctacatagatgatgttttaatcttttcccaaaacattgaccaacatttcaaacatctccagaccttcatccatatcagcaaacagaatggtttggtagtctccaaatcaaaaatcaatcttttccaaactcgaattcgattccttggtcacaatatatatcaaggtacaatcattccaataaaaaggtcaatagagtttgctagcaaatttcccaaccaaatcttagacaaaacccagttacaaagatttctaggttgtcgaaattacgtaggagaatttgtctcctatttaaacaatattgtcaagccattgcatgataggctggagaaaaatccgcctccttggtctgacctccatacacaaacagttaaagaaatcaaagtcaaagtccaatccataaaatgtctgtatcttcctattccacaggcatttaaaattgtcgaaactgatgcttcagacatagagtccatggccaagatcatgtcattgcatatacatcaaaacattggaatcctgcacaattaaaatattcaactgttaaaaaggaagttttagcaattgttttgtgcatttccaaattttaatcggatttattaaaccaaaattttttaatcagggttgattgtaaatcagccaaagatattttactaaaagatgttaaaaaccttgcctcaaaacaaatttttgcaagatggcaagcaattctaagtgtctttgattttgacataaaatacatcaagggcacctcaaattcattacctgactaccttacccgtgaattcttacagaaaagtggtaatgcttcctaaggcatcgggaatctccctaaggggaggaagaagtacaggcaaaggagccagactggctcttccagagccaaccattaagaaatcatcaacctcttctgggtcaccaacccaggctgggtcaccaacccaggctgggtcatctacccagaaaaccaatttag

SEQ ID NO: 12396 - DNA, 1070 bp, Glycine max; identical to SEQ ID NO: 12395
  Gm_smallRNAprecursor_5229

SEQ ID NO: 12397 - DNA, 1070 bp, Glycine max; identical to SEQ ID NO: 12395
  Gm_smallRNAprecursor_5230

SEQ ID NO: 12398 - DNA, 1070 bp, Glycine max; identical to SEQ ID NO: 12395
  Gm_smallRNAprecursor_5231

SEQ ID NO: 12399 - DNA, 1141 bp, Glycine max
  Gm_smallRNAprecursor_5232
tgaatggaatgtgatgccattcggactaaagaataccccttcagaatttcaaaaaattgtgaatgatatttttaatccctattcaaaatttgtcattgtctacatagatgatgttttaatcttttcccaaaacattgaccaacatttcaaacatctccagaccttcatccatatcagcaaacagaatggtttggtagtctccaaatcaaaaatcaatcttttccaaactcgaattcgattccttggtcacaatatatatcaaggtacaatcattccaataaaaaggtcaatagagtttgctagcaaatttcccaaccaaatcttagacaaaacccagttacaaagatttctaggttgtcgaaattacgtaggagaatttgtctcctatttaaacaatattgtcaagccattgcatgataggctggagaaaaatccgcctccttggtctgacctccatacacaaacagttaaagaaatcaaagtcaaagtccaatccataaaatgtctgtatcttcctattccacaggcatttaaaattgtcgaaactgatgcttcagacatagagtccatggccaagatcatgtcattgcatatacatcaaaacattggaatcctgcacaattaaaatattcaactgttaaaaaggaagttttagcaattgttttgtgcatttccaaattttaatcggatttattaaaccaaaattttttaatcagggttgattgtaaatcagccaaagatattttactaaaagatgttaaaaaccttgcctcaaaacaaatttttgcaagatggcaagcaattctaagtgtctttgattttgacataaaatacatcaagggcacctcaaattcattacctgactaccttacccgtgaattcttacagaaaagtggtaatgcttcctaaggcatcgggaatctccctaaggggaggaagaagtacaggcaaaggagccagactggctcttccagagccaaccattaagaaatcatcaacctcttctgggtcaccaacccaggctgggtcaccaacccaggctgggtcatctacccagaaaaccaatttagaaggatcatcaacccagattgcctcaatcaaacctgagccatccactcaggaatctcccaaaccggcaacc

SEQ ID NO: 12400 - DNA, 1141 bp, Glycine max; identical to SEQ ID NO: 12399
  Gm_smallRNAprecursor_5233

SEQ ID NO: 12401 - DNA, 1142 bp, Glycine max
  Gm_smallRNAprecursor_5234
tgaatggaatgtgatgccattcggactaaagaataccccttcagaatttcaaaaaattgtgaatgatatttttaatccctattcaaaatttgtcattgtctacatagatgatgttttaatcttttcccaaaacattgaccaacatttcaaacatctccagaccttcatccatatcagcaaacagaatggtttggtagtctccaaatcaaaaatcaatcttttccaaactcgaattcgattccttggtcacaatatatatcaaggtacaatcattccaataaaaaggtcaatagagtttgctagcaaatttcccaaccaaatcttagacaaaacccagttacaaagatttctaggttgtcgaaattacgtaggagaatttgtctcctatttaaacaatattgtcaagccattgcatgataggctggagaaaaatccgcctccttggtctgacctccatacacaaacagttaaagaaatcaaagtcaaagtccaatccataaaatgtctgtatcttcctattccacaggcatttaaaattgtcgaaactgatgcttcagacatagagtccatggccaagatcatgtcattgcatatacatcaaaacattggaatcctgcacaattaaaatattcaactgttaaaaaggaagttttagcaattgttttgtgcatttccaaattttaatcggatttattaaaccaaaattttttaatcagggttgattgtaaatcagccaaagatattttactaaaagatgttaaaaaccttgcctcaaaacaaatttttgcaagatggcaagcaattctaagtgtctttgattttgacataaaatacatcaagggcacctcaaattcattacctgactaccttacccgtgaattcttacagaaaagtggtaatgcttcctaaggcatcgggaatctccctaaggggaggaagaagtacaggcaaaggagccagactggctcttccagagccaaccattaagaaatcatcaacctcttctgggtcaccaacccaggctgggtcaccaacccaggctgggtcatctacccagaaaaccaatttagaaggatcatcaacccagattgcctcaatcaaacctgagccatccactcaggaatctcccaaaccggcaacca

SEQ ID NO: 12402 - DNA, 1142 bp, Glycine max; identical to SEQ ID NO: 12401
  Gm_smallRNAprecursor_5235

SEQ ID NO: 12403 - DNA, 1035 bp, Glycine max
  Gm_smallRNAprecursor_5236
ttttaatccctattcaaaatttgtcattgtctacatagatgatgttttaatcttttcccaaaacattgaccaacatttcaaacatctccagaccttcatccatatcagcaaacagaatggtttggtagtctccaaatcaaaaatcaatcttttccaaactcgaattcgattccttggtcacaatatatatcaaggtacaatcattccaataaaaaggtcaatagagtttgctagcaaatttcccaaccaaatcttagacaaaacccagttacaaagatttctaggttgtcgaaattacgtaggagaatttgtctcctatttaaacaatattgtcaagccattgcatgataggctggagaaaaatccgcctccttggtctgacctccatacacaaacagttaaagaaatcaaagtcaaagtccaatccataaaatgtctgtatcttcctattccacaggcatttaaaattgtcgaaactgatgcttcagacatagagtccatggccaagatcatgtcattgcatatacatcaaaacattggaatcctgcacaattaaaatattcaactgttaaaaaggaagttttagcaattgttttgtgcatttccaaattttaatcggatttattaaaccaaaattttttaatcagggttgattgtaaatcagccaaagatattttactaaaagatgttaaaaaccttgcctcaaaacaaatttttgcaagatggcaagcaattctaagtgtctttgattttgacataaaatacatcaagggcacctcaaattcattacctgactaccttacccgtgaattcttacagaaaagtggtaatgcttcctaaggcatcgggaatctccctaaggggaggaagaagtacaggcaaaggagccagactggctcttccagagccaaccattaagaaatcatcaacctcttctgggtcaccaacccaggctgggtcaccaacccaggctgggtcatctacccagaaaaccaatttagaaggatcatcaacccagattgcctcaatcaaacc

SEQ ID NO: 12404 - DNA, 1035 bp, Glycine max; identical to SEQ ID NO: 12403
  Gm_smallRNAprecursor_5237

SEQ ID NO: 12405 - DNA, 1114 bp, Glycine max
  Gm_smallRNAprecursor_5238
ttttaatccctattcaaaatttgtcattgtctacatagatgatgttttaatcttttcccaaaacattgaccaacatttcaaacatctccagaccttcatccatatcagcaaacagaatggtttggtagtctccaaatcaaaaatcaatcttttccaaactcgaattcgattccttggtcacaatatatatcaaggtacaatcattccaataaaaaggtcaatagagtttgctagcaaatttcccaaccaaatcttagacaaaacccagttacaaagatttctaggttgtcgaaattacgtaggagaatttgtctcctatttaaacaatattgtcaagccattgcatgataggctggagaaaaatccgcctccttggtctgacctccatacacaaacagttaaagaaatcaaagtcaaagtccaatccataaaatgtctgtatcttcctattccacaggcatttaaaattgtcgaaactgatgcttcagacatagagtccatggccaagatcatgtcattgcatatacatcaaaacattggaatcctgcacaattaaaatattcaactgttaaaaaggaagttttagcaattgttttgtgcatttccaaattttaatcggatttattaaaccaaaattttttaatcagggttgattgtaaatcagccaaagatattttactaaaagatgttaaaaaccttgcctcaaaacaaatttttgcaagatggcaagcaattctaagtgtctttgattttgacataaaatacatcaagggcacctcaaattcattacctgactaccttacccgtgaattcttacagaaaagtggtaatgcttcctaaggcatcgggaatctccctaaggggaggaagaagtacaggcaaaggagccagactggctcttccagagccaaccattaagaaatcatcaacctcttctgggtcaccaacccaggctgggtcaccaacccaggctgggtcatctacccagaaaaccaatttagaaggatcatcaacccagattgcctcaatcaaacctgagccatccactcaggaatctcccaaaccggcaaccaccaaacaaacatcggccgactatgcatagccaattgaaacc

SEQ ID NO: 12406 - DNA, 1114 bp, Glycine max; identical to SEQ ID NO: 12405
  Gm_smallRNAprecursor_5239

SEQ ID NO: 12407 - DNA, 1037 bp, Glycine max
  Gm_smallRNAprecursor_5240
tagatgatgttttaatcttttcccaaaacattgaccaacatttcaaacatctccagaccttcatccatatcagcaaacagaatggtttggtagtctccaaatcaaaaatcaatcttttccaaactcgaattcgattccttggtcacaatatatatcaaggtacaatcattccaataaaaaggtcaatagagtttgctagcaaatttcccaaccaaatcttagacaaaacccagttacaaagatttctaggttgtcgaaattacgtaggagaatttgtctcctatttaaacaatattgtcaagccattgcatgataggctggagaaaaatccgcctccttggtctgacctccatacacaaacagttaaagaaatcaaagtcaaagtccaatccataaaatgtctgtatcttcctattccacaggcatttaaaattgtcgaaactgatgcttcagacatagagtccatggccaagatcatgtcattgcatatacatcaaaacattggaatcctgcacaattaaaatattcaactgttaaaaaggaagttttagcaattgttttgtgcatttccaaattttaatcggatttattaaaccaaaattttttaatcagggttgattgtaaatcagccaaagatattttactaaaagatgttaaaaaccttgcctcaaaacaaatttttgcaagatggcaagcaattctaagtgtctttgattttgacataaaatacatcaagggcacctcaaattcattacctgactaccttacccgtgaattcttacagaaaagtggtaatgcttcctaaggcatcgggaatctccctaaggggaggaagaagtacaggcaaaggagccagactggctcttccagagccaaccattaagaaatcatcaacctcttctgggtcaccaacccaggctgggtcaccaacccaggctgggtcatctacccagaaaaccaatttagaaggatcatcaacccagattgcctcaatcaaacctgagccatccactcaggaatctcccaaaccggcaacc

SEQ ID NO: 12408 - DNA, 1208 bp, Glycine max
  Gm_smallRNAprecursor_5241
ccctaaggggaggaagaagtacaggcaaaggagccagactggctcttccagagccaaccattaagaaatcatcaacctcttctgggtcaccaacccaggctgggtcaccaacccaggctgggtcatctacccagaaaaccaatttagaaggatcatcaacccagattgcctcaatcaaacctgagccatccactcaggaatctcccaaaccggcaaccaccaaacaaacatcggccgactatgcatagccaattgaaacccttcaggcccttcaagacatgggtctaaccaaatttccaaaaataatcaaaaaatcttgggcagacattgcctcaaaatctgatgatgaatctgaatcaaatttacaaacaatgatcccaaatgcatcaatgaccaaaacggctaccaatcctaaagggaaactacctttagccaaagctcaaacaccacctaccaaacaaactaacaattatatttataaaaataaatttacaactgttttgcagatggaacctgaattttgggacaaaaatcccttcaaggcgacggccaaggctttcccaccaggatttcactacaaaccaaccaccatcctgaagacaagaactttttatgaattgattttggtagattctaactcagtatctatcaaacatttcaaagacccaaaagaccaaacattaaacacccactcgacaatccaaatactaaaagttcttcaaccaagacactttgattcggacttgaacaaaggaaagagattttcagttccatttgatccggtaggttatacctattgggattatgttgatgcttggactaaggtgttttggcaccaaaatacccgcttcaagcattcatggctgatatatttcaagaccaatacaatttacaattttcccaattggcttttgcaatgatgggacttctttggaccaatcccagtgatattcccagaaacagtccaacaaggatttgctcaatttgagagacaatacaattcgcaggaatcacgaattccaacagatcttaaatacttttcaagctttgcactgtcatggaccttctcatggcaatatcgttacagcaagacagaaaagacaagccaatatccatgactacaaagatatgcatttgtaaaatggtggacacaatttgactcatccaaagcggatccagaacaagtaaaaatctggttccaatcccat

SEQ ID NO: 12409 - DNA, 1208 bp, Glycine max; identical to SEQ ID NO: 12408
  Gm_smallRNAprecursor_5242

SEQ ID NO: 12410 - DNA, 1211 bp, Glycine max
  Gm_smallRNAprecursor_5243
ccctaaggggaggaagaagtacaggcaaaggagccagactggctcttccagagccaaccattaagaaatcatcaacctcttctgggtcaccaacccaggctgggtcaccaacccaggctgggtcatctacccagaaaaccaatttagaaggatcatcaacccagattgcctcaatcaaacctgagccatccactcaggaatctcccaaaccggcaaccaccaaacaaacatcggccgactatgcatagccaattgaaacccttcaggcccttcaagacatgggtctaaccaaatttccaaaaataatcaaaaaatcttgggcagacattgcctcaaaatctgatgatgaatctgaatcaaatttacaaacaatgatcccaaatgcatcaatgaccaaaacggctaccaatcctaaagggaaactacctttagccaaagctcaaacaccacctaccaaacaaactaacaattatatttataaaaataaatttacaactgttttgcagatggaacctgaattttgggacaaaaatcccttcaaggcgacggccaaggctttcccaccaggatttcactacaaaccaaccaccatcctgaagacaagaactttttatgaattgattttggtagattctaactcagtatctatcaaacatttcaaagacccaaaagaccaaacattaaacacccactcgacaatccaaatactaaaagttcttcaaccaagacactttgattcggacttgaacaaaggaaagagattttcagttccatttgatccggtaggttatacctattgggattatgttgatgcttggactaaggtgttttggcaccaaaatacccgcttcaagcattcatggctgatatatttcaagaccaatacaatttacaattttcccaattggcttttgcaatgatgggacttctttggaccaatcccagtgatattcccagaaacagtccaacaaggatttgctcaatttgagagacaatacaattcgcaggaatcacgaattccaacagatcttaaatacttttcaagctttgcactgtcatggaccttctcatggcaatatcgttacagcaagacagaaaagacaagccaatatccatgactacaaagatatgcatttgtaaaatggtggacacaatttgactcatccaaagcggatccagaacaagtaaaaatctggttccaatcccatcca

SEQ ID NO: 12411 - DNA, 1098 bp, Glycine max
  Gm_smallRNAprecursor_5244
ggaagaagtacaggcaaaggagccagactggctcttccagagccaaccattaagaaatcatcaacctcttctgggtcaccaacccaggctgggtcaccaacccaggctgggtcatctacccagaaaaccaatttagaaggatcatcaacccagattgcctcaatcaaacctgagccatccactcaggaatctcccaaaccggcaaccaccaaacaaacatcggccgactatgcatagccaattgaaacccttcaggcccttcaagacatgggtctaaccaaatttccaaaaataatcaaaaaatcttgggcagacattgcctcaaaatctgatgatgaatctgaatcaaatttacaaacaatgatcccaaatgcatcaatgaccaaaacggctaccaatcctaaagggaaactacctttagccaaagctcaaacaccacctaccaaacaaactaacaattatatttataaaaataaatttacaactgttttgcagatggaacctgaattttgggacaaaaatcccttcaaggcgacggccaaggctttcccaccaggatttcactacaaaccaaccaccatcctgaagacaagaactttttatgaattgattttggtagattctaactcagtatctatcaaacatttcaaagacccaaaagaccaaacattaaacacccactcgacaatccaaatactaaaagttcttcaaccaagacactttgattcggacttgaacaaaggaaagagattttcagttccatttgatccggtaggttatacctattgggattatgttgatgcttggactaaggtgttttggcaccaaaatacccgcttcaagcattcatggctgatatatttcaagaccaatacaatttacaattttcccaattggcttttgcaatgatgggacttctttggaccaatcccagtgatattcccagaaacagtccaacaaggatttgctcaatttgagagacaatacaattcgcaggaatcacgaattccaacagatcttaaatacttttcaagctttgcactgtcatggaccttctcatggcaatatcgttacagcaagacagaaaagacaagccaa

SEQ ID NO: 12412 - DNA, 1171 bp, Glycine max
  Gm_smallRNAprecursor_5245
tcccaaaccggcaaccaccaaacaaacatcggccgactatgcatagccaattgaaacccttcaggcccttcaagacatgggtctaaccaaatttccaaaaataatcaaaaaatcttgggcagacattgcctcaaaatctgatgatgaatctgaatcaaatttacaaacaatgatcccaaatgcatcaatgaccaaaacggctaccaatcctaaagggaaactacctttagccaaagctcaaacaccacctaccaaacaaactaacaattatatttataaaaataaatttacaactgttttgcagatggaacctgaattttgggacaaaaatcccttcaaggcgacggccaaggctttcccaccaggatttcactacaaaccaaccaccatcctgaagacaagaactttttatgaattgattttggtagattctaactcagtatctatcaaacatttcaaagacccaaaagaccaaacattaaacacccactcgacaatccaaatactaaaagttcttcaaccaagacactttgattcggacttgaacaaaggaaagagattttcagttccatttgatccggtaggttatacctattgggattatgttgatgcttggactaaggtgttttggcaccaaaatacccgcttcaagcattcatggctgatatatttcaagaccaatacaatttacaattttcccaattggcttttgcaatgatgggacttctttggaccaatcccagtgatattcccagaaacagtccaacaaggatttgctcaatttgagagacaatacaattcgcaggaatcacgaattccaacagatcttaaatacttttcaagctttgcactgtcatggaccttctcatggcaatatcgttacagcaagacagaaaagacaagccaatatccatgactacaaagatatgcatttgtaaaatggtggacacaatttgactcatccaaagcggatccagaacaagtaaaaatctggttccaatcccatccagaattcctcaaagcagctgatccagaaacttctgtgtttttgaaccaaaagtctcatctggtagcatttttagcaggatcgaaatcaaaggaggtcttagctaaaaatctaaaggaagttctgcaaatgttatagcaggaagaagaaggttcatcctcaaag

SEQ ID NO: 12413 - DNA, 1166 bp, Glycine max
  Gm_smallRNAprecursor_5246
ccaaaccggcaaccaccaaacaaacatcggccgactatgcatagccaattgaaacccttcaggcccttcaagacatgggtctaaccaaatttccaaaaataatcaaaaaatcttgggcagacattgcctcaaaatctgatgatgaatctgaatcaaatttacaaacaatgatcccaaatgcatcaatgaccaaaacggctaccaatcctaaagggaaactacctttagccaaagctcaaacaccacctaccaaacaaactaacaattatatttataaaaataaatttacaactgttttgcagatggaacctgaattttgggacaaaaatcccttcaaggcgacggccaaggctttcccaccaggatttcactacaaaccaaccaccatcctgaagacaagaactttttatgaattgattttggtagattctaactcagtatctatcaaacatttcaaagacccaaaagaccaaacattaaacacccactcgacaatccaaatactaaaagttcttcaaccaagacactttgattcggacttgaacaaaggaaagagattttcagttccatttgatccggtaggttatacctattgggattatgttgatgcttggactaaggtgttttggcaccaaaatacccgcttcaagcattcatggctgatatatttcaagaccaatacaatttacaattttcccaattggcttttgcaatgatgggacttctttggaccaatcccagtgatattcccagaaacagtccaacaaggatttgctcaatttgagagacaatacaattcgcaggaatcacgaattccaacagatcttaaatacttttcaagctttgcactgtcatggaccttctcatggcaatatcgttacagcaagacagaaaagacaagccaatatccatgactacaaagatatgcatttgtaaaatggtggacacaatttgactcatccaaagcggatccagaacaagtaaaaatctggttccaatcccatccagaattcctcaaagcagctgatccagaaacttctgtgtttttgaaccaaaagtctcatctggtagcatttttagcaggatcgaaatcaaaggaggtcttagctaaaaatctaaaggaagttctgcaaatgttatagcaggaagaagaaggttcatcctca

SEQ ID NO: 12414 - DNA, 1169 bp, Glycine max
  Gm_smallRNAprecursor_5247
ccaaaccggcaaccaccaaacaaacatcggccgactatgcatagccaattgaaacccttcaggcccttcaagacatgggtctaaccaaatttccaaaaataatcaaaaaatcttgggcagacattgcctcaaaatctgatgatgaatctgaatcaaatttacaaacaatgatcccaaatgcatcaatgaccaaaacggctaccaatcctaaagggaaactacctttagccaaagctcaaacaccacctaccaaacaaactaacaattatatttataaaaataaatttacaactgttttgcagatggaacctgaattttgggacaaaaatcccttcaaggcgacggccaaggctttcccaccaggatttcactacaaaccaaccaccatcctgaagacaagaactttttatgaattgattttggtagattctaactcagtatctatcaaacatttcaaagacccaaaagaccaaacattaaacacccactcgacaatccaaatactaaaagttcttcaaccaagacactttgattcggacttgaacaaaggaaagagattttcagttccatttgatccggtaggttatacctattgggattatgttgatgcttggactaaggtgttttggcaccaaaatacccgcttcaagcattcatggctgatatatttcaagaccaatacaatttacaattttcccaattggcttttgcaatgatgggacttctttggaccaatcccagtgatattcccagaaacagtccaacaaggatttgctcaatttgagagacaatacaattcgcaggaatcacgaattccaacagatcttaaatacttttcaagctttgcactgtcatggaccttctcatggcaatatcgttacagcaagacagaaaagacaagccaatatccatgactacaaagatatgcatttgtaaaatggtggacacaatttgactcatccaaagcggatccagaacaagtaaaaatctggttccaatcccatccagaattcctcaaagcagctgatccagaaacttctgtgtttttgaaccaaaagtctcatctggtagcatttttagcaggatcgaaatcaaaggaggtcttagctaaaaatctaaaggaagttctgcaaatgttatagcaggaagaagaaggttcatcctcaaag

SEQ ID NO: 12415 - DNA, 1107 bp, Glycine max
  Gm_smallRNAprecursor_5248
aaccggcaaccaccaaacaaacatcggccgactatgcatagccaattgaaacccttcaggcccttcaagacatgggtctaaccaaatttccaaaaataatcaaaaaatcttgggcagacattgcctcaaaatctgatgatgaatctgaatcaaatttacaaacaatgatcccaaatgcatcaatgaccaaaacggctaccaatcctaaagggaaactacctttagccaaagctcaaacaccacctaccaaacaaactaacaattatatttataaaaataaatttacaactgttttgcagatggaacctgaattttgggacaaaaatcccttcaaggcgacggccaaggctttcccaccaggatttcactacaaaccaaccaccatcctgaagacaagaactttttatgaattgattttggtagattctaactcagtatctatcaaacatttcaaagacccaaaagaccaaacattaaacacccactcgacaatccaaatactaaaagttcttcaaccaagacactttgattcggacttgaacaaaggaaagagattttcagttccatttgatccggtaggttatacctattgggattatgttgatgcttggactaaggtgttttggcaccaaaatacccgcttcaagcattcatggctgatatatttcaagaccaatacaatttacaattttcccaattggcttttgcaatgatgggacttctttggaccaatcccagtgatattcccagaaacagtccaacaaggatttgctcaatttgagagacaatacaattcgcaggaatcacgaattccaacagatcttaaatacttttcaagctttgcactgtcatggaccttctcatggcaatatcgttacagcaagacagaaaagacaagccaatatccatgactacaaagatatgcatttgtaaaatggtggacacaatttgactcatccaaagcggatccagaacaagtaaaaatctggttccaatcccatccagaattcctcaaagcagctgatccagaaacttctgtgtttttgaaccaaaagtctcatctggtagcatttttagcaggatcgaaatcaaaggaggtcttagcta

SEQ ID NO: 12416 - DNA, 1107 bp, Glycine max; identical to SEQ ID NO: 12415
  Gm_smallRNAprecursor_5249

SEQ ID NO: 12417 - DNA, 1108 bp, Glycine max
  Gm_smallRNAprecursor_5250
aaccggcaaccaccaaacaaacatcggccgactatgcatagccaattgaaacccttcaggcccttcaagacatgggtctaaccaaatttccaaaaataatcaaaaaatcttgggcagacattgcctcaaaatctgatgatgaatctgaatcaaatttacaaacaatgatcccaaatgcatcaatgaccaaaacggctaccaatcctaaagggaaactacctttagccaaagctcaaacaccacctaccaaacaaactaacaattatatttataaaaataaatttacaactgttttgcagatggaacctgaattttgggacaaaaatcccttcaaggcgacggccaaggctttcccaccaggatttcactacaaaccaaccaccatcctgaagacaagaactttttatgaattgattttggtagattctaactcagtatctatcaaacatttcaaagacccaaaagaccaaacattaaacacccactcgacaatccaaatactaaaagttcttcaaccaagacactttgattcggacttgaacaaaggaaagagattttcagttccatttgatccggtaggttatacctattgggattatgttgatgcttggactaaggtgttttggcaccaaaatacccgcttcaagcattcatggctgatatatttcaagaccaatacaatttacaattttcccaattggcttttgcaatgatgggacttctttggaccaatcccagtgatattcccagaaacagtccaacaaggatttgctcaatttgagagacaatacaattcgcaggaatcacgaattccaacagatcttaaatacttttcaagctttgcactgtcatggaccttctcatggcaatatcgttacagcaagacagaaaagacaagccaatatccatgactacaaagatatgcatttgtaaaatggtggacacaatttgactcatccaaagcggatccagaacaagtaaaaatctggttccaatcccatccagaattcctcaaagcagctgatccagaaacttctgtgtttttgaaccaaaagtctcatctggtagcatttttagcaggatcgaaatcaaaggaggtcttagctaa

SEQ ID NO: 12418 - DNA, 1108 bp, Glycine max; identical to SEQ ID NO: 12417
  Gm_smallRNAprecursor_5251

SEQ ID NO: 12419 - DNA, 1102 bp, Glycine max
  Gm_smallRNAprecursor_5252
cggcaaccaccaaacaaacatcggccgactatgcatagccaattgaaacccttcaggcccttcaagacatgggtctaaccaaatttccaaaaataatcaaaaaatcttgggcagacattgcctcaaaatctgatgatgaatctgaatcaaatttacaaacaatgatcccaaatgcatcaatgaccaaaacggctaccaatcctaaagggaaactacctttagccaaagctcaaacaccacctaccaaacaaactaacaattatatttataaaaataaatttacaactgttttgcagatggaacctgaattttgggacaaaaatcccttcaaggcgacggccaaggctttcccaccaggatttcactacaaaccaaccaccatcctgaagacaagaactttttatgaattgattttggtagattctaactcagtatctatcaaacatttcaaagacccaaaagaccaaacattaaacacccactcgacaatccaaatactaaaagttcttcaaccaagacactttgattcggacttgaacaaaggaaagagattttcagttccatttgatccggtaggttatacctattgggattatgttgatgcttggactaaggtgttttggcaccaaaatacccgcttcaagcattcatggctgatatatttcaagaccaatacaatttacaattttcccaattggcttttgcaatgatgggacttctttggaccaatcccagtgatattcccagaaacagtccaacaaggatttgctcaatttgagagacaatacaattcgcaggaatcacgaattccaacagatcttaaatacttttcaagctttgcactgtcatggaccttctcatggcaatatcgttacagcaagacagaaaagacaagccaatatccatgactacaaagatatgcatttgtaaaatggtggacacaatttgactcatccaaagcggatccagaacaagtaaaaatctggttccaatcccatccagaattcctcaaagcagctgatccagaaacttctgtgtttttgaaccaaaagtctcatctggtagcatttttagcaggatcgaaatcaaaggaggtcttagc

SEQ ID NO: 12420 - DNA, 1098 bp, Glycine max
  Gm_smallRNAprecursor_5253
caagacatgggtctaaccaaatttccaaaaataatcaaaaaatcttgggcagacattgcctcaaaatctgatgatgaatctgaatcaaatttacaaacaatgatcccaaatgcatcaatgaccaaaacggctaccaatcctaaagggaaactacctttagccaaagctcaaacaccacctaccaaacaaactaacaattatatttataaaaataaatttacaactgttttgcagatggaacctgaattttgggacaaaaatcccttcaaggcgacggccaaggctttcccaccaggatttcactacaaaccaaccaccatcctgaagacaagaactttttatgaattgattttggtagattctaactcagtatctatcaaacatttcaaagacccaaaagaccaaacattaaacacccactcgacaatccaaatactaaaagttcttcaaccaagacactttgattcggacttgaacaaaggaaagagattttcagttccatttgatccggtaggttatacctattgggattatgttgatgcttggactaaggtgttttggcaccaaaatacccgcttcaagcattcatggctgatatatttcaagaccaatacaatttacaattttcccaattggcttttgcaatgatgggacttctttggaccaatcccagtgatattcccagaaacagtccaacaaggatttgctcaatttgagagacaatacaattcgcaggaatcacgaattccaacagatcttaaatacttttcaagctttgcactgtcatggaccttctcatggcaatatcgttacagcaagacagaaaagacaagccaatatccatgactacaaagatatgcatttgtaaaatggtggacacaatttgactcatccaaagcggatccagaacaagtaaaaatctggttccaatcccatccagaattcctcaaagcagctgatccagaaacttctgtgtttttgaaccaaaagtctcatctggtagcatttttagcaggatcgaaatcaaaggaggtcttagctaaaaatctaaaggaagttctgcaaatgttatagcaggaagaagaaggttcatcctca

SEQ ID NO: 12421 - DNA, 1099 bp, Glycine max
  Gm_smallRNAprecursor_5254
caagacatgggtctaaccaaatttccaaaaataatcaaaaaatcttgggcagacattgcctcaaaatctgatgatgaatctgaatcaaatttacaaacaatgatcccaaatgcatcaatgaccaaaacggctaccaatcctaaagggaaactacctttagccaaagctcaaacaccacctaccaaacaaactaacaattatatttataaaaataaatttacaactgttttgcagatggaacctgaattttgggacaaaaatcccttcaaggcgacggccaaggctttcccaccaggatttcactacaaaccaaccaccatcctgaagacaagaactttttatgaattgattttggtagattctaactcagtatctatcaaacatttcaaagacccaaaagaccaaacattaaacacccactcgacaatccaaatactaaaagttcttcaaccaagacactttgattcggacttgaacaaaggaaagagattttcagttccatttgatccggtaggttatacctattgggattatgttgatgcttggactaaggtgttttggcaccaaaatacccgcttcaagcattcatggctgatatatttcaagaccaatacaatttacaattttcccaattggcttttgcaatgatgggacttctttggaccaatcccagtgatattcccagaaacagtccaacaaggatttgctcaatttgagagacaatacaattcgcaggaatcacgaattccaacagatcttaaatacttttcaagctttgcactgtcatggaccttctcatggcaatatcgttacagcaagacagaaaagacaagccaatatccatgactacaaagatatgcatttgtaaaatggtggacacaatttgactcatccaaagcggatccagaacaagtaaaaatctggttccaatcccatccagaattcctcaaagcagctgatccagaaacttctgtgtttttgaaccaaaagtctcatctggtagcatttttagcaggatcgaaatcaaaggaggtcttagctaaaaatctaaaggaagttctgcaaatgttatagcaggaagaagaaggttcatcctcaa

SEQ ID NO: 12422 - DNA, 1080 bp, Glycine max
  Gm_smallRNAprecursor_5255
gattctaactcagtatctatcaaacatttcaaagacccaaaagaccaaacattaaacacccactcgacaatccaaatactaaaagttcttcaaccaagacactttgattcggacttgaacaaaggaaagagattttcagttccatttgatccggtaggttatacctattgggattatgttgatgcttggactaaggtgttttggcaccaaaatacccgcttcaagcattcatggctgatatatttcaagaccaatacaatttacaattttcccaattggcttttgcaatgatgggacttctttggaccaatcccagtgatattcccagaaacagtccaacaaggatttgctcaatttgagagacaatacaattcgcaggaatcacgaattccaacagatcttaaatacttttcaagctttgcactgtcatggaccttctcatggcaatatcgttacagcaagacagaaaagacaagccaatatccatgactacaaagatatgcatttgtaaaatggtggacacaatttgactcatccaaagcggatccagaacaagtaaaaatctggttccaatcccatccagaattcctcaaagcagctgatccagaaacttctgtgtttttgaaccaaaagtctcatctggtagcatttttagcaggatcgaaatcaaaggaggtcttagctaaaaatctaaaggaagttctgcaaatgttatagcaggaagaagaaggttcatcctcaaagaagaaagaaacaagttctgctgaagaagaagaagaagaccccttttaccaaaacgaagatgattgttttggtatctgtttagattaaatttaatttcggtcacagaaccgtctgtttgtaattaatgtgtaattaatgctggacaatactacctgtcctgtagccattaaagtcctggtcaaaactacttgtcttgtaacaaacagtcaaatagtctcggtcaaaactaccggcaactaccggtcttagatttttggctatataaggagtcctcaagtatgctgtgagacaccctttcatttggccatttttcaggtttctgaagagaggtgctct

SEQ ID NO: 12423 - DNA, 1078 bp, Glycine max
  Gm_smallRNAprecursor_5256
attctaactcagtatctatcaaacatttcaaagacccaaaagaccaaacattaaacacccactcgacaatccaaatactaaaagttcttcaaccaagacactttgattcggacttgaacaaaggaaagagattttcagttccatttgatccggtaggttatacctattgggattatgttgatgcttggactaaggtgttttggcaccaaaatacccgcttcaagcattcatggctgatatatttcaagaccaatacaatttacaattttcccaattggcttttgcaatgatgggacttctttggaccaatcccagtgatattcccagaaacagtccaacaaggatttgctcaatttgagagacaatacaattcgcaggaatcacgaattccaacagatcttaaatacttttcaagctttgcactgtcatggaccttctcatggcaatatcgttacagcaagacagaaaagacaagccaatatccatgactacaaagatatgcatttgtaaaatggtggacacaatttgactcatccaaagcggatccagaacaagtaaaaatctggttccaatcccatccagaattcctcaaagcagctgatccagaaacttctgtgtttttgaaccaaaagtctcatctggtagcatttttagcaggatcgaaatcaaaggaggtcttagctaaaaatctaaaggaagttctgcaaatgttatagcaggaagaagaaggttcatcctcaaagaagaaagaaacaagttctgctgaagaagaagaagaagaccccttttaccaaaacgaagatgattgttttggtatctgtttagattaaatttaatttcggtcacagaaccgtctgtttgtaattaatgtgtaattaatgctggacaatactacctgtcctgtagccattaaagtcctggtcaaaactacttgtcttgtaacaaacagtcaaatagtctcggtcaaaactaccggcaactaccggtcttagatttttggctatataaggagtcctcaagtatgctgtgagacaccctttcatttggccatttttcaggtttctgaagagaggtgctc

SEQ ID NO: 12424 - DNA, 1079 bp, Glycine max
  Gm_smallRNAprecursor_5257
attctaactcagtatctatcaaacatttcaaagacccaaaagaccaaacattaaacacccactcgacaatccaaatactaaaagttcttcaaccaagacactttgattcggacttgaacaaaggaaagagattttcagttccatttgatccggtaggttatacctattgggattatgttgatgcttggactaaggtgttttggcaccaaaatacccgcttcaagcattcatggctgatatatttcaagaccaatacaatttacaattttcccaattggcttttgcaatgatgggacttctttggaccaatcccagtgatattcccagaaacagtccaacaaggatttgctcaatttgagagacaatacaattcgcaggaatcacgaattccaacagatcttaaatacttttcaagctttgcactgtcatggaccttctcatggcaatatcgttacagcaagacagaaaagacaagccaatatccatgactacaaagatatgcatttgtaaaatggtggacacaatttgactcatccaaagcggatccagaacaagtaaaaatctggttccaatcccatccagaattcctcaaagcagctgatccagaaacttctgtgtttttgaaccaaaagtctcatctggtagcatttttagcaggatcgaaatcaaaggaggtcttagctaaaaatctaaaggaagttctgcaaatgttatagcaggaagaagaaggttcatcctcaaagaagaaagaaacaagttctgctgaagaagaagaagaagaccccttttaccaaaacgaagatgattgttttggtatctgtttagattaaatttaatttcggtcacagaaccgtctgtttgtaattaatgtgtaattaatgctggacaatactacctgtcctgtagccattaaagtcctggtcaaaactacttgtcttgtaacaaacagtcaaatagtctcggtcaaaactaccggcaactaccggtcttagatttttggctatataaggagtcctcaagtatgctgtgagacaccctttcatttggccatttttcaggtttctgaagagaggtgctct

SEQ ID NO: 12425 - DNA, 1215 bp, Glycine max
  Gm_smallRNAprecursor_5258
tcttcaaccaagacactttgattcggacttgaacaaaggaaagagattttcagttccatttgatccggtaggttatacctattgggattatgttgatgcttggactaaggtgttttggcaccaaaatacccgcttcaagcattcatggctgatatatttcaagaccaatacaatttacaattttcccaattggcttttgcaatgatgggacttctttggaccaatcccagtgatattcccagaaacagtccaacaaggatttgctcaatttgagagacaatacaattcgcaggaatcacgaattccaacagatcttaaatacttttcaagctttgcactgtcatggaccttctcatggcaatatcgttacagcaagacagaaaagacaagccaatatccatgactacaaagatatgcatttgtaaaatggtggacacaatttgactcatccaaagcggatccagaacaagtaaaaatctggttccaatcccatccagaattcctcaaagcagctgatccagaaacttctgtgtttttgaaccaaaagtctcatctggtagcatttttagcaggatcgaaatcaaaggaggtcttagctaaaaatctaaaggaagttctgcaaatgttatagcaggaagaagaaggttcatcctcaaagaagaaagaaacaagttctgctgaagaagaagaagaagaccccttttaccaaaacgaagatgattgttttggtatctgtttagattaaatttaatttcggtcacagaaccgtctgtttgtaattaatgtgtaattaatgctggacaatactacctgtcctgtagccattaaagtcctggtcaaaactacttgtcttgtaacaaacagtcaaatagtctcggtcaaaactaccggcaactaccggtcttagatttttggctatataaggagtcctcaagtatgctgtgagacaccctttcatttggccatttttcaggtttctgaagagaggtgctctgaaacaagatttttgtaagtgtagatgcaattggctttgatgttttgatgatgatcataatgatgtgttgcaattgatgcaaatgggcttttcaagattaaaattcaagacaatacttcaagattacaagtcacaacatcaagatgatcactagaatattaggaagggaattcctaattgaattagcaaaggtttggccaagtgatttaaaataaaaagtg

SEQ ID NO: 12426 - DNA, 1216 bp, Glycine max
  Gm_smallRNAprecursor_5259
tcttcaaccaagacactttgattcggacttgaacaaaggaaagagattttcagttccatttgatccggtaggttatacctattgggattatgttgatgcttggactaaggtgttttggcaccaaaatacccgcttcaagcattcatggctgatatatttcaagaccaatacaatttacaattttcccaattggcttttgcaatgatgggacttctttggaccaatcccagtgatattcccagaaacagtccaacaaggatttgctcaatttgagagacaatacaattcgcaggaatcacgaattccaacagatcttaaatacttttcaagctttgcactgtcatggaccttctcatggcaatatcgttacagcaagacagaaaagacaagccaatatccatgactacaaagatatgcatttgtaaaatggtggacacaatttgactcatccaaagcggatccagaacaagtaaaaatctggttccaatcccatccagaattcctcaaagcagctgatccagaaacttctgtgtttttgaaccaaaagtctcatctggtagcatttttagcaggatcgaaatcaaaggaggtcttagctaaaaatctaaaggaagttctgcaaatgttatagcaggaagaagaaggttcatcctcaaagaagaaagaaacaagttctgctgaagaagaagaagaagaccccttttaccaaaacgaagatgattgttttggtatctgtttagattaaatttaatttcggtcacagaaccgtctgtttgtaattaatgtgtaattaatgctggacaatactacctgtcctgtagccattaaagtcctggtcaaaactacttgtcttgtaacaaacagtcaaatagtctcggtcaaaactaccggcaactaccggtcttagatttttggctatataaggagtcctcaagtatgctgtgagacaccctttcatttggccatttttcaggtttctgaagagaggtgctctgaaacaagatttttgtaagtgtagatgcaattggctttgatgttttgatgatgatcataatgatgtgttgcaattgatgcaaatgggcttttcaagattaaaattcaagacaatacttcaagattacaagtcacaacatcaagatgatcactagaatattaggaagggaattcctaattgaattagcaaaggtttggccaagtgatttaaaataaaaagtgt

SEQ ID NO: 12427 - DNA, 1085 bp, Glycine max
  Gm_smallRNAprecursor_5260
atgcaataaacattgtcatgaaggtacaagttgatgattcatggctatggcatcgaagatttggccacttcaacacacatgccttgaagttgttacatgagaagaaaatgatgagagatctttcaagcataaaggagaacaatgaagtgtgtgaatgatgtctccttggtaagcaacgccgatttcctttctcaacaagcggagcatggagagcgaaagatctattggagctgatacatacagacgtctgtggaccaatgaggacgccatcacatgagaataacaggtacttcatactcttcattgatgacttctctagaatgacatgggtatattttctaaaagaaaaatcagaagtctttggagtattcaaaaagttcaaggcccttgctgaaaatcaaagtggaaaacggataaaagtactaagaagtgtcatgacaaagagtacacctctcgcgagtttgaaagattttgtgaggatgaaggcattgagcgacaacttacagtcgcatattctcctcaacaaaatggagtgtccgagagaaagaatcgcataattatggaaatggctagatggatgctcaaggagaagggactacctaacacattctgggctaaagcagtctacactgttgtttacatactcaacaggtgtccaactaaatctgtaaaagacaagactccaagtgaagcttggaacgagaagaagccatcaacaaagcacctaagggtctttggatctatatgctacattcatattccagacgtgaaaaggcacaagcttgaagataagactatacgaggtatcttccttgggtatagcaatatctctaagggctaccgtgtctacaacttgcacactaagaaactcgttattagtcgagatgttgaagttgatgagtacgcttcttggaattgggatgaagaaaaagtggagaagaacattcttatacccgctcaactacctcaagaagaagctgaggaagaagacccaggtgaaccaccttcacctccaccacaacaacaagatcaagaactatcattaccagagtctactccaagatgagtaagatctttggtggaca

SEQ ID NO: 12428 - DNA, 1133 bp, Glycine max
  Gm_smallRNAprecursor_5261
ataagaataaattaattaaatttatatatgataaaatatctttaaagttgtacatattcttcatagtcaaagattcttatatcttcacatgccgacgaggacagcctcctggcggtcgtagaggtgacaaaagttgcgaatgagcttgaccttgtagagggagtccacggcgatctccatgtgccgcatcagggccatatcatggaagaagagctccaaggagaaggtgtgctgcatcatgcgactttgaagtcgtaatattaaaaaaaaaacttttgtaaaataaaaaaattacactgaagtcgtaaataattggaaaaattgtaaatttggttccctactttatcttcagtttcagatttggtcccccagtaatttaattcacaaaattgattatcctattttgtaaaatcgtgcactgttggtcccccaggctataattggacgttgaccgttaacaagtgatgttgactgccacatgtcacattcttattggatgatgactgtcacgtgtcatgttctgattggatgtcaactccataaaagatgaaatgcattgttgttttcattgactaatcagaacatgaaacatgacagtcatcatccaataagaacgtgacacgtgatagtcaacatcacttgttaacggtcaacgtccaattgtggcatgggggatcaacattgtatgattttacaaaataggagaaccaaattcatgaattaaattactgggggaccaaatccgaaactggagataaactggaggaccaaaaatgcaattttgcctaaataattttacgacttccattttttttaataaaaaaaataggttacgactttaaagtcgtagaataaaaaaaatgacacagaagtcgtaacaggtgatacaacttaccccctttaggtaaataattcaaaaacaaccccatttagaaaaaatgaaaaaaaaataccccttttcagtaaaaaagctgataattttcaacccctcaccttgacttgtgggcatggagatggagatgcaatagaatttttgaaactcccattggtcccttaattatgtttactatatcaaccatctatttccgaggtagaattttgcttattttatgcacaaatgccacttgcatgta

SEQ ID NO: 12429 - DNA, 1133 bp, Glycine max; identical to SEQ ID NO: 12428
  Gm_smallRNAprecursor_5262

SEQ ID NO: 12430 - DNA, 1033 bp, Glycine max
  Gm_smallRNAprecursor_5263
acagcctcctggcggtcgtagaggtgacaaaagttgcgaatgagcttgaccttgtagagggagtccacggcgatctccatgtgccgcatcagggccatatcatggaagaagagctccaaggagaaggtgtgctgcatcatgcgactttgaagtcgtaatattaaaaaaaaaacttttgtaaaataaaaaaattacactgaagtcgtaaataattggaaaaattgtaaatttggttccctactttatcttcagtttcagatttggtcccccagtaatttaattcacaaaattgattatcctattttgtaaaatcgtgcactgttggtcccccaggctataattggacgttgaccgttaacaagtgatgttgactgccacatgtcacattcttattggatgatgactgtcacgtgtcatgttctgattggatgtcaactccataaaagatgaaatgcattgttgttttcattgactaatcagaacatgaaacatgacagtcatcatccaataagaacgtgacacgtgatagtcaacatcacttgttaacggtcaacgtccaattgtggcatgggggatcaacattgtatgattttacaaaataggagaaccaaattcatgaattaaattactgggggaccaaatccgaaactggagataaactggaggaccaaaaatgcaattttgcctaaataattttacgacttccattttttttaataaaaaaaataggttacgactttaaagtcgtagaataaaaaaaatgacacagaagtcgtaacaggtgatacaacttaccccctttaggtaaataattcaaaaacaaccccatttagaaaaaatgaaaaaaaaataccccttttcagtaaaaaagctgataattttcaacccctcaccttgacttgtgggcatggagatggagatgcaatagaatttttgaaactcccattggtcccttaattatgtttactatatcaaccatctatttccgaggtagaattttgcttattttatgcacaaatgccacttgcatgta

SEQ ID NO: 12431 - DNA, 1046 bp, Glycine max
  Gm_smallRNAprecursor_5264
tgtgtaaaataggttttgacaacatgtgcttaataatatcataatgagaatacacataaacatcaacaggctttatatattgcttaagttttgcacaagagaaatacaaacaaagacaaagtttttctatggcagtatatctagtttctgcatcatttagtacacgactaagataataaattgcatgttctatgccatcatcatcttcctgagccaacatgctaccaatggtcttgtcagacgcagcaatatacaacttcatagtcttgtttcgactaggaggcattaacacaggaggcttgatcagatattctttaatttcatcgaaagccttttgatgctcttcaccccatttgaatggttcatctttcttgagtcgaagtaatggcgaaaaaatttgagctttgccacttagattcgaaatgaatcgcctcaagaagttgatttttcctagcaaagactgaagctgttttttggtcgaaggaggcttcgtctcaagaatagcctttgtcttgttttgatttatctcaatgccttttttatgcaccacaaaaccaaggaaatctcctgcacgcacacaaaaagcacactttaatggattcatttttaatccatgtttcctcattcgttcgaaagattgcctaaggtaatccaaatggctatcttcttaagaggatttgatgattatatcatcaatataaacttgcataaatgtgtcaataaaatcatgaaacatggaattcatggccctttgataagtggccccagcatttttcaacccaaagggcataaccacccattcataagtgcctaaagcaccagggcattgaaatgctgtttttgacacatcactttcagcaataaatatttggttataaccagaataaccatctaacatgcttaaaaactcgaagccagctgctgaatctaccaacatttccgctactggcatagcatattcatctttaggtgtagcattatttaaatccctaaaatctatgcatactctaagagttccattctttttaatgacagggactatattt

SEQ ID NO: 12432 - DNA, 1040 bp, Glycine max
  Gm_smallRNAprecursor_5265
ggttgagaatgttggaatcaacaaagtgctcatagatggaggagcggctgttaacttaatgcctcgatctatgctccacaagattgggaaacatgacactgatctatctgcccacaacattgtgctttcgaattatgagggtaaaactggctattctttgggagccattcaagtagatgttgctgtaggcagtatagttcgaccaactctattcctggtgatacagtctaaggctaattttaacttgttattaggaagggagtggattcatggagttggggctgtgccatctaccctccaccagaaactcattatctggagggaggatgggattgttgaaaatatagaggcagatcaaagcttctataagtcagaggttgataatgttactgcacaaacctttgacaaaaagttggctaacatagcaccttgtggtgacaaggaggctgttgtcgaatcaagtgacaatgttatccactctgtcaaactccatcctacctatgggtttatatgggagagggaggaaattgatgttgttccctctgaagatggagtcattccaccaactgggtggaatatatatgaagattaatatgactgaggccactgcatgggccagaattacggcttatatggccgaaaatagactaaatacggcctttgaggctgaatctcaacaaaatatggcagttgaagccaagatcgaagatcatgaaaacaaagaaacaaaggatcgaagactggattgcatttatgacgatgagccgctgggttttgagaaaaatcccataagtgaggtgccaaagatgcaggctcaagatcctttggaagaggtcgacattggagatggctcgataaaaaggccaacctatatcagtgccaatatcacttcaagtttaaaagaaaagctggtacctcttcttagagaatttaaagactgttttgcttgggattaccacgaaatgcctgggttaagcagagaaatggtcgaaatgaaattacctattaaggagggaaaaagaccagtaaaacaactacca

SEQ ID NO: 12433 - DNA, 1157 bp, Glycine max
  Gm_smallRNAprecursor_5266
aagaccagtaaaacaactaccaagaagattcgcaccagaaatcatgtccaagattaaggaagagatcgaaaggctgctaaggtgtaaattcatcagggctgccaggtatgtcgaatggttagcaaatatagtccctgtcattaaaaagaatggaactcttagagtatgcatagattttagggatttaaataatgctacacctaaagatgaatatgctatgccagtagcagaaatgttggtagattcagcagctggcttcgaatttctaagcatgttagatggttattctggttataaccaaatatttattgctgaaagtgatgtgtcaaaaacagcatttcgatgccctggtgctttaggcacttatgaatgggtggttatgccctttgggttgaaaaatgttggggctacttatcaaagggccatgaattccatgtttcatgattttattgacacatttatgcaagtttatattgatgatataatcatcaaatcctcctcagaagatagccatttggattaccttaggcaatcttttgaacgaatgaggaaacatggattaaaaatgaatccattaaagtgtgctttttgtgtgcgtgcaggagatttccttggttttgtggtgcataaaaaaggcattgagataaatcaaaataagacaaaggctattcttgagacgaagcctccttcgaccaaaaaacagcttcagtctttgctaggaaaaattaacttcttgaggcgattcatttcgaatctaagtggcaaagctcaaattttttcgccattacttcgactcaagaaagatgaaccattcaaatggaatgaagagcatcaaaaggctttcgatgaaattaaagaatatctgatcaagcctcctgtgttaatgcctcctagtcgaaacaagactatgaagttgtatattgctgcatctgacaagaccattggtagcatgttggctcaggaagatgatgatggcgtagagcatgcaatttattatcttagtcgtgtactaaatgatgcagaaactagatatactgccatagaaaaactttgtctttgtctgtatttctcttgtgcaaaacttaagcaatatataaagcctgttgatgtttatgtgtattctcattatgatattattaagcacatgttgtcaaaac

SEQ ID NO: 12434 - DNA, 1175 bp, Glycine max
  Gm_smallRNAprecursor_5267
aagagatcgaaaggctgctaaggtgtaaattcatcagggctgccaggtatgtcgaatggttagcaaatatagtccctgtcattaaaaagaatggaactcttagagtatgcatagattttagggatttaaataatgctacacctaaagatgaatatgctatgccagtagcagaaatgttggtagattcagcagctggcttcgaatttctaagcatgttagatggttattctggttataaccaaatatttattgctgaaagtgatgtgtcaaaaacagcatttcgatgccctggtgctttaggcacttatgaatgggtggttatgccctttgggttgaaaaatgttggggctacttatcaaagggccatgaattccatgtttcatgattttattgacacatttatgcaagtttatattgatgatataatcatcaaatcctcctcagaagatagccatttggattaccttaggcaatcttttgaacgaatgaggaaacatggattaaaaatgaatccattaaagtgtgctttttgtgtgcgtgcaggagatttccttggttttgtggtgcataaaaaaggcattgagataaatcaaaataagacaaaggctattcttgagacgaagcctccttcgaccaaaaaacagcttcagtctttgctaggaaaaattaacttcttgaggcgattcatttcgaatctaagtggcaaagctcaaattttttcgccattacttcgactcaagaaagatgaaccattcaaatggaatgaagagcatcaaaaggctttcgatgaaattaaagaatatctgatcaagcctcctgtgttaatgcctcctagtcgaaacaagactatgaagttgtatattgctgcatctgacaagaccattggtagcatgttggctcaggaagatgatgatggcgtagagcatgcaatttattatcttagtcgtgtactaaatgatgcagaaactagatatactgccatagaaaaactttgtctttgtctgtatttctcttgtgcaaaacttaagcaatatataaagcctgttgatgtttatgtgtattctcattatgatattattaagcacatgttgtcaaaacctattttacacagtagaattggaaaatgggctttagcattaacagaatattctttaacgtacaagcctttgaaatct

SEQ ID NO: 12435 - DNA, 1114 bp, Glycine max
  Gm_smallRNAprecursor_5268
aatctaagtggcaaagctcaaattttttcgccattacttcgactcaagaaagatgaaccattcaaatggaatgaagagcatcaaaaggctttcgatgaaattaaagaatatctgatcaagcctcctgtgttaatgcctcctagtcgaaacaagactatgaagttgtatattgctgcatctgacaagaccattggtagcatgttggctcaggaagatgatgatggcgtagagcatgcaatttattatcttagtcgtgtactaaatgatgcagaaactagatatactgccatagaaaaactttgtctttgtctgtatttctcttgtgcaaaacttaagcaatatataaagcctgttgatgtttatgtgtattctcattatgatattattaagcacatgttgtcaaaacctattttacacagtagaattggaaaatgggctttagcattaacagaatattctttaacgtacaagcctttgaaatctgttaagggtcaaattgtggcagattttattgtagatcactcagtgatcgagatgccgcaagactatgtcgatacagagccttggattttgtatttcgatggatcgaaacacaaacatggaactggaattggagttttaataatatcccccaataaagttccaactaagttcaaatataaaatcaaagggctttgttctaataatgaggctgagtatgaagctctaattacaggccttgaaattttaattagcctggggacaagaaatgttaacataagaggtgattcagaattagtgttgaggcaattaacacaagaatacaaatgtgttaatgaacacttagcgaaatattttgttatagcaagttctcttctgaatcatttcgattatattaacattgagcatatacctcgacaagaaaaccaagaagcaaatgatttagcccaaatagcttcagggtacaaaatgtcgaaggaaaagttaactcagttgatcgaaataaaagataaactggtgttaccagagccattaagcactaaattgccaatgccaaaacttgtgggggcaagtataccacaaaataatgaagatgaaagcatgaatgatctccaggaaaaaattcaaattttgg

SEQ ID NO: 12436 - DNA, 1110 bp, Glycine max
  Gm_smallRNAprecursor_5269
tattgtagatcactcagtgatcgagatgccgcaagactatgtcgatacagagccttggattttgtatttcgatggatcgaaacacaaacatggaactggaattggagttttaataatatcccccaataaagttccaactaagttcaaatataaaatcaaagggctttgttctaataatgaggctgagtatgaagctctaattacaggccttgaaattttaattagcctggggacaagaaatgttaacataagaggtgattcagaattagtgttgaggcaattaacacaagaatacaaatgtgttaatgaacacttagcgaaatattttgttatagcaagttctcttctgaatcatttcgattatattaacattgagcatatacctcgacaagaaaaccaagaagcaaatgatttagcccaaatagcttcagggtacaaaatgtcgaaggaaaagttaactcagttgatcgaaataaaagataaactggtgttaccagagccattaagcactaaattgccaatgccaaaacttgtgggggcaagtataccacaaaataatgaagatgaaagcatgaatgatctccaggaaaaaattcaaattttggccattgacaatatgttagataatgattggagaaagtccattattgaatatttggaaaatccaataggcaatgtggctcgaaagatcaaatatagggctttaaattacgtgattgtgggaaatgatttgtttaaaaagactgcagaaggagtgttgctgaaatgtctaagtgaatcagaagcatacttggcagtttcccatgttcacagtggggcttgtggatcacatcaagcaggccataaaatgaaatggcttttatttcgacaaggtttgtattggccttcgatgttaaaagactgtatagaatttgctaaaggctgtcaggaatgccaaaaacatgcagggatacagcatgtacctgctagtgagttacactccataatcaaaccttggcctttcagaggatgggctttggacttaattggtgaaatcaagcctgcttcttctaagaaccagcgttatatcatagttggtgtcgattactttacaaaatggatcgaagcagt

SEQ ID NO: 12437 - DNA, 1082 bp, Glycine max
  Gm_smallRNAprecursor_5270
cagtgatcgagatgccgcaagactatgtcgatacagagccttggattttgtatttcgatggatcgaaacacaaacatggaactggaattggagttttaataatatcccccaataaagttccaactaagttcaaatataaaatcaaagggctttgttctaataatgaggctgagtatgaagctctaattacaggccttgaaattttaattagcctggggacaagaaatgttaacataagaggtgattcagaattagtgttgaggcaattaacacaagaatacaaatgtgttaatgaacacttagcgaaatattttgttatagcaagttctcttctgaatcatttcgattatattaacattgagcatatacctcgacaagaaaaccaagaagcaaatgatttagcccaaatagcttcagggtacaaaatgtcgaaggaaaagttaactcagttgatcgaaataaaagataaactggtgttaccagagccattaagcactaaattgccaatgccaaaacttgtgggggcaagtataccacaaaataatgaagatgaaagcatgaatgatctccaggaaaaaattcaaattttggccattgacaatatgttagataatgattggagaaagtccattattgaatatttggaaaatccaataggcaatgtggctcgaaagatcaaatatagggctttaaattacgtgattgtgggaaatgatttgtttaaaaagactgcagaaggagtgttgctgaaatgtctaagtgaatcagaagcatacttggcagtttcccatgttcacagtggggcttgtggatcacatcaagcaggccataaaatgaaatggcttttatttcgacaaggtttgtattggccttcgatgttaaaagactgtatagaatttgctaaaggctgtcaggaatgccaaaaacatgcagggatacagcatgtacctgctagtgagttacactccataatcaaaccttggcctttcagaggatgggctttggacttaattggtgaaatcaagcctgcttcttctaagaaccagcgttatatcatagttggtgtcgattactttacaaaa

SEQ ID NO: 12438 - DNA, 1086 bp, Glycine max
  Gm_smallRNAprecursor_5271
gtttctgaatcgagttagcggccttctcctggagttctttgcgtttggcctgctctgttacaattttctgccttagatcatcgacctgagacagcaaattcgtaatagttgcctcccaagaggagatgttatcatcacaggctttgatctcagaagatccttctttcgcctctttggtaagacgttcgacttcatgttgagcagctcgggctttctcgagcagaaggatatgtgcctgtttctgggcatccagtctggcaccattttcgcgttttttctgcacagtacttgcaaattggtcaatgatggcctcgatttggataactttgcctagaatctcatcagaggtaagggggttgtgcaatttcttcaaaaagttcaggtgcccaaaggcagcagaggggttctcttcaatggatttaagcacatcttcccgtgcgtattccatggacaacttcaagagcagagaatcttggcgtactgaagagtttatttcggcatcagatgaggacgaagcaccaggaatcttttcacttgaggtgttggcttgacttgtgttcagcaggagtcgaagggctgcagcagggtcttcgtcttgcatttgaatgaatgtatcttctgcgatccctatgctagcggaaagcttagatgttgaagacgccgggtaaatgtccgaacctccagcttcagcctcttttatggcctcttcatcggaaaagttttcttcggatgaatttttctgactcgatccatgaggactgatggatccaatgcctttaccttcaccctgttcctcaacattcactgcatccgtctcaggagcgggagatgttcgagcatgtgagggtatttcttctacagaaacattttgttgtacctgatttgaattatcatggaaaaaggttaacaaatagtttcgtataagctatgatttaaaacacattaagaggatgatacctcgacggcaggttgttcttgtggtgagtccggttgatcgacagggttgcccatctcggcaatagaaggagtagcctctacttcagtgccgtcaatatcggtcgaaggtggttggacgtcaacaggttg

SEQ ID NO: 12439 - DNA, 1045 bp, Glycine max
  Gm_smallRNAprecursor_5272
ctcttatgtgtttgtctccttcttccctactcttttactttcctctgtgcattttaatttccgcttttactttctgttaagtttctcttctactcctcattctcttaataacatagtaaaagccttagaagagtaaattttttaattagtaaaggtttaggaataattaattcaaccccccccccttcttaattattttgaggccactcgatccaacattttggagtgctctggacttaaaactttttgctacaacaatagaatttctaagtttcctaatctctttgttctgatgagctcaacccctctatggtggctcactctgaccaacatgtagctttctctcactactagaaaaaggagattctacgacggtcaaataggggatgaacgtcgttgaatgtgacatcgtcaaaacttaaaaatatcaacgacaggtcccaaaataccgtctttgaaagtgagaaactttcaaagacgatgcttaccttagcaacgtctttgaaagtaggcattctaagacgttgttgaggtaagcaccgtctttgaatgcctactttcaaagacgttgctgaggtaagcaccgtctttgaaagtacgcattctaagagggtgcttacctcaacaacgtctttgaaagtagacattctaagacgttgctgatgtacgcaccgtctttgaattaaatattatttttaattatttatactttttccggttgatatcccatcagaaaaatataaataattaatgtgggagtgatatagaatgggaagataatgtgggagcgagaaagagtaaaaaatgcatggtatgatagagatgataaattctaatatgaagcagtgaagtgaacaacaacccatattgatccatcgatcccacaaaatacataagccataagttaatataccatatccacaaggaagaacaagaagacaaattaaaacaaacatagaaaaccaaaaatacaaaatcatagtcaaaaatggattttgtaaataacttgaagcataaatgccccttttgcacactctatccagac

SEQ ID NO: 12440 - DNA, 1148 bp, Glycine max
  Gm_smallRNAprecursor_5273
atattgatgttgttgagttatgccaatgaaaatgtattgaaaacaatactgacatgttaattattcccttaaggtagttgtctggcctgttatgtaaagaacaaaaccagacaactaggttttccttaggcagaatgacgaccatttgccagtgtctgctgcagtagagacgaatatgggttattgtagtagtatagattatttaaattcaattgttgtgtttgacttacccattcaggtaggctccaaggtaaacatctcgtttagaactctgtatccaactcttgatgtaactttcggattcaaattgtgattgcccagatctctgaatggactgtggctcgaggaatccatacacatcagaattccccgctcacacacttgtctcagtcagatggttgtgttgttaagccaaagttaattatgtatgaatttaaaacaattactttggtaattaacaataatctaaaatgacttatagaatccacaactgtataacagatatgctgagacattgacaaccatgtgcaatttcagagagatcttcgtgctttatatacaacggaaagttttgattaaacaccccgaatatggtagcatcccacataacctggagaggcatcaaaaacagttgtgggatggtcaatgtcatcaggtacaggggatcatcaacctcttcatccgggcgttctggaggttttgttggagacatagctgcctgttgatcaaacatagttaatttgcaagttttgattacagtgaacaaattaattgaaaaaaataaacatataatcagagtaaaatacatgttatgataaacgcttcacaagatgtgttggccaagcaaggaaggtgttaagtgtttgccccactaaggtaacctcgtcagtgggtacaagaacgagagccgctgcatctttaacctcccaaaaccaaccttgacttggccatgcaacaacagatgttgtgaactgttgtggatccctcataaagtcttcttagggcaaccaggcgggaaggattttcttcaatgtatagcccgcatttgtctaagtcacccatccctggatcgttccctgagggagcaacacaactctcctttgtgctgacacgaggacctgagggagcaacctctggctctagaggta

SEQ ID NO: 12441 - DNA, 1187 bp, Glycine max
  Gm_smallRNAprecursor_5274
ggcagaatgacgaccatttgccagtgtctgctgcagtagagacgaatatgggttattgtagtagtatagattatttaaattcaattgttgtgtttgacttacccattcaggtaggctccaaggtaaacatctcgtttagaactctgtatccaactcttgatgtaactttcggattcaaattgtgattgcccagatctctgaatggactgtggctcgaggaatccatacacatcagaattccccgctcacacacttgtctcagtcagatggttgtgttgttaagccaaagttaattatgtatgaatttaaaacaattactttggtaattaacaataatctaaaatgacttatagaatccacaactgtataacagatatgctgagacattgacaaccatgtgcaatttcagagagatcttcgtgctttatatacaacggaaagttttgattaaacaccccgaatatggtagcatcccacataacctggagaggcatcaaaaacagttgtgggatggtcaatgtcatcaggtacaggggatcatcaacctcttcatccgggcgttctggaggttttgttggagacatagctgcctgttgatcaaacatagttaatttgcaagttttgattacagtgaacaaattaattgaaaaaaataaacatataatcagagtaaaatacatgttatgataaacgcttcacaagatgtgttggccaagcaaggaaggtgttaagtgtttgccccactaaggtaacctcgtcagtgggtacaagaacgagagccgctgcatctttaacctcccaaaaccaaccttgacttggccatgcaacaacagatgttgtgaactgttgtggatccctcataaagtcttcttagggcaaccaggcgggaaggattttcttcaatgtatagcccgcatttgtctaagtcacccatccctggatcgttccctgagggagcaacacaactctcctttgtgctgacacgaggacctgagggagcaacctctggctctagaggtagtgcaagtccctacgattgcatctgagactgaaactgggactgcatctggctgaaggataccatcagctttcgagtcaccttttctgtgattgactcctccagttggtctctgatttgttgggtcagctgttctaggtcttcaggaggcatggaggaagaactgcgg

SEQ ID NO: 12442 - DNA, 1056 bp, Glycine max
  Gm_smallRNAprecursor_5275
aatagaaatgtgtaatttgtatttttaaaattaaattaaaataaaattacttagtagtcttttaatttttgttgatgtaaaagaaaggatgaatgatagtttagtctacataaggtgttagttgttaatatataccttctaatttttgtgtgggtgtatgttagcattcttcatatatataccagagatcagcggaataagatcaaacggacaaataggaagtaagaatgcagtatgataaatgaaagcgaaatataaactgtaaagcagatatcaagggcacaccgaaacgacttacaaacccaggtttttgaaaacaaagaaaccaaagcggcggcagagccgcacgggatcggtgaggggagaagggagatataaaaaacagaacttgaaatttattgaaaccgaaagaaaagcttacaaagagtttttccctaggcagagcttctctctctaaaaacctgattctgagactatctgaagggtgcctcacaaagggaacgaggactcctttaaatagactcaatttttactgtttctacagtgtcggtaatgtttaccggaactgttacaaaacttttaaaaattacattacttaaaagaaattgacaaattagttacaataattcatgattactacaactaattaatcgtcatctaatgatataccgaaacagtcatcttcattctggtagaatggatcatcttcttggtcatcattagtctctgatgattcagcttccttcttggaaggttcttcttccacttcctgttgaagtagttggagaacttctttgagattcttagcaagactctctttagattttgagcttgctaagaatgctgccagttgcgacttctgattcaggaacagagatgtctctgggtcagcaggtttaaggaactcaggattgctctggaaccagttcttgacttgatctggagctgcctttgaagtatcgaattgtgaccaccattttacaaaggcgtgtctctgtaacggtggatattgcttgctgttttcagtttttccgtatctgtattgccatgaaaaaa

SEQ ID NO: 12443 - DNA, 1215 bp, Glycine max
  Gm_smallRNAprecursor_5276
agtcttttaatttttgttgatgtaaaagaaaggatgaatgatagtttagtctacataaggtgttagttgttaatatataccttctaatttttgtgtgggtgtatgttagcattcttcatatatataccagagatcagcggaataagatcaaacggacaaataggaagtaagaatgcagtatgataaatgaaagcgaaatataaactgtaaagcagatatcaagggcacaccgaaacgacttacaaacccaggtttttgaaaacaaagaaaccaaagcggcggcagagccgcacgggatcggtgaggggagaagggagatataaaaaacagaacttgaaatttattgaaaccgaaagaaaagcttacaaagagtttttccctaggcagagcttctctctctaaaaacctgattctgagactatctgaagggtgcctcacaaagggaacgaggactcctttaaatagactcaatttttactgtttctacagtgtcggtaatgtttaccggaactgttacaaaacttttaaaaattacattacttaaaagaaattgacaaattagttacaataattcatgattactacaactaattaatcgtcatctaatgatataccgaaacagtcatcttcattctggtagaatggatcatcttcttggtcatcattagtctctgatgattcagcttccttcttggaaggttcttcttccacttcctgttgaagtagttggagaacttctttgagattcttagcaagactctctttagattttgagcttgctaagaatgctgccagttgcgacttctgattcaggaacagagatgtctctgggtcagcaggtttaaggaactcaggattgctctggaaccagttcttgacttgatctggagctgcctttgaagtatcgaattgtgaccaccattttacaaaggcgtgtctctgtaacggtggatattgcttgctgttttcagtttttccgtatctgtattgccatgaaaaaatccatgacaaggcaaaactggaaaagtattttaaatctgctagaatacgtgattccttgctattatagagcttgttgaattgttggaatccctgttggacttcttctgggaatatctgtggaattggtccgaagtagttccaccattggaggaaccaatttggaaaattatacacagtattatttttgaagtaaattagccatgaatgcttgaa

SEQ ID NO: 12444 - DNA, 1138 bp, Glycine max
  Gm_smallRNAprecursor_5277
gcacaccgaaacgacttacaaacccaggtttttgaaaacaaagaaaccaaagcggcggcagagccgcacgggatcggtgaggggagaagggagatataaaaaacagaacttgaaatttattgaaaccgaaagaaaagcttacaaagagtttttccctaggcagagcttctctctctaaaaacctgattctgagactatctgaagggtgcctcacaaagggaacgaggactcctttaaatagactcaatttttactgtttctacagtgtcggtaatgtttaccggaactgttacaaaacttttaaaaattacattacttaaaagaaattgacaaattagttacaataattcatgattactacaactaattaatcgtcatctaatgatataccgaaacagtcatcttcattctggtagaatggatcatcttcttggtcatcattagtctctgatgattcagcttccttcttggaaggttcttcttccacttcctgttgaagtagttggagaacttctttgagattcttagcaagactctctttagattttgagcttgctaagaatgctgccagttgcgacttctgattcaggaacagagatgtctctgggtcagcaggtttaaggaactcaggattgctctggaaccagttcttgacttgatctggagctgcctttgaagtatcgaattgtgaccaccattttacaaaggcgtgtctctgtaacggtggatattgcttgctgttttcagtttttccgtatctgtattgccatgaaaaaatccatgacaaggcaaaactggaaaagtattttaaatctgctagaatacgtgattccttgctattatagagcttgttgaattgttggaatccctgttggacttcttctgggaatatctgtggaattggtccgaagtagttccaccattggaggaaccaatttggaaaattatacacagtattatttttgaagtaaattagccatgaatgcttgaatttactattttgatgccagaacacattggtccaggcgtcgatgtaatcccaataattatatcctgcggggtcaaatggagcagaaaattttttgggttggtttaggtttgagccataatgtcgtggctgcataacctttaggatttg

SEQ ID NO: 12445 - DNA, 1120 bp, Glycine max
  Gm_smallRNAprecursor_5278
gaaagaaaagcttacaaagagtttttccctaggcagagcttctctctctaaaaacctgattctgagactatctgaagggtgcctcacaaagggaacgaggactcctttaaatagactcaatttttactgtttctacagtgtcggtaatgtttaccggaactgttacaaaacttttaaaaattacattacttaaaagaaattgacaaattagttacaataattcatgattactacaactaattaatcgtcatctaatgatataccgaaacagtcatcttcattctggtagaatggatcatcttcttggtcatcattagtctctgatgattcagcttccttcttggaaggttcttcttccacttcctgttgaagtagttggagaacttctttgagattcttagcaagactctctttagattttgagcttgctaagaatgctgccagttgcgacttctgattcaggaacagagatgtctctgggtcagcaggtttaaggaactcaggattgctctggaaccagttcttgacttgatctggagctgcctttgaagtatcgaattgtgaccaccattttacaaaggcgtgtctctgtaacggtggatattgcttgctgttttcagtttttccgtatctgtattgccatgaaaaaatccatgacaaggcaaaactggaaaagtattttaaatctgctagaatacgtgattccttgctattatagagcttgttgaattgttggaatccctgttggacttcttctgggaatatctgtggaattggtccgaagtagttccaccattggaggaaccaatttggaaaattatacacagtattatttttgaagtaaattagccatgaatgcttgaatttactattttgatgccagaacacattggtccaggcgtcgatgtaatcccaataattatatcctgcggggtcaaatggagcagaaaattttttgggttggtttaggtttgagccataatgtcgtggctgcataacctttaggatttggattgtggaatgagtatttagatttggatctttggggtctttgaagtgtttaatagatactgagttcgtatctattagaatgaattcatagaatttgcgggttttgttt

SEQ ID NO: 12446 - DNA, 1198 bp, Glycine max
  Gm_smallRNAprecursor_5279
aaagaaaagcttacaaagagtttttccctaggcagagcttctctctctaaaaacctgattctgagactatctgaagggtgcctcacaaagggaacgaggactcctttaaatagactcaatttttactgtttctacagtgtcggtaatgtttaccggaactgttacaaaacttttaaaaattacattacttaaaagaaattgacaaattagttacaataattcatgattactacaactaattaatcgtcatctaatgatataccgaaacagtcatcttcattctggtagaatggatcatcttcttggtcatcattagtctctgatgattcagcttccttcttggaaggttcttcttccacttcctgttgaagtagttggagaacttctttgagattcttagcaagactctctttagattttgagcttgctaagaatgctgccagttgcgacttctgattcaggaacagagatgtctctgggtcagcaggtttaaggaactcaggattgctctggaaccagttcttgacttgatctggagctgcctttgaagtatcgaattgtgaccaccattttacaaaggcgtgtctctgtaacggtggatattgcttgctgttttcagtttttccgtatctgtattgccatgaaaaaatccatgacaaggcaaaactggaaaagtattttaaatctgctagaatacgtgattccttgctattatagagcttgttgaattgttggaatccctgttggacttcttctgggaatatctgtggaattggtccgaagtagttccaccattggaggaaccaatttggaaaattatacacagtattatttttgaagtaaattagccatgaatgcttgaatttactattttgatgccagaacacattggtccaggcgtcgatgtaatcccaataattatatcctgcggggtcaaatggagcagaaaattttttgggttggtttaggtttgagccataatgtcgtggctgcataacctttaggatttggattgtggaatgagtatttagatttggatctttggggtctttgaagtgtttaatagatactgagttcgtatctattagaatgaattcatagaatttgcgggttttgtttgtggctattggcctgtaatggaatcctggggggaatactttggcggttgccttgaagggattcttgtccctgtattctg

SEQ ID NO: 12447 - DNA, 1086 bp, Glycine max
  Gm_smallRNAprecursor_5280
ctatctgaagggtgcctcacaaagggaacgaggactcctttaaatagactcaatttttactgtttctacagtgtcggtaatgtttaccggaactgttacaaaacttttaaaaattacattacttaaaagaaattgacaaattagttacaataattcatgattactacaactaattaatcgtcatctaatgatataccgaaacagtcatcttcattctggtagaatggatcatcttcttggtcatcattagtctctgatgattcagcttccttcttggaaggttcttcttccacttcctgttgaagtagttggagaacttctttgagattcttagcaagactctctttagattttgagcttgctaagaatgctgccagttgcgacttctgattcaggaacagagatgtctctgggtcagcaggtttaaggaactcaggattgctctggaaccagttcttgacttgatctggagctgcctttgaagtatcgaattgtgaccaccattttacaaaggcgtgtctctgtaacggtggatattgcttgctgttttcagtttttccgtatctgtattgccatgaaaaaatccatgacaaggcaaaactggaaaagtattttaaatctgctagaatacgtgattccttgctattatagagcttgttgaattgttggaatccctgttggacttcttctgggaatatctgtggaattggtccgaagtagttccaccattggaggaaccaatttggaaaattatacacagtattatttttgaagtaaattagccatgaatgcttgaatttactattttgatgccagaacacattggtccaggcgtcgatgtaatcccaataattatatcctgcggggtcaaatggagcagaaaattttttgggttggtttaggtttgagccataatgtcgtggctgcataacctttaggatttggattgtggaatgagtatttagatttggatctttggggtctttgaagtgtttaatagatactgagttcgtatctattagaatgaattcatagaatttgcgggttttgtttgtggctattggcctgtaatggaatcctgggggg

SEQ ID NO: 12448 - DNA, 1086 bp, Glycine max; identical to SEQ ID NO: 12447
  Gm_smallRNAprecursor_5281

SEQ ID NO: 12449 - DNA, 1085 bp, Glycine max
  Gm_smallRNAprecursor_5282
tatctgaagggtgcctcacaaagggaacgaggactcctttaaatagactcaatttttactgtttctacagtgtcggtaatgtttaccggaactgttacaaaacttttaaaaattacattacttaaaagaaattgacaaattagttacaataattcatgattactacaactaattaatcgtcatctaatgatataccgaaacagtcatcttcattctggtagaatggatcatcttcttggtcatcattagtctctgatgattcagcttccttcttggaaggttcttcttccacttcctgttgaagtagttggagaacttctttgagattcttagcaagactctctttagattttgagcttgctaagaatgctgccagttgcgacttctgattcaggaacagagatgtctctgggtcagcaggtttaaggaactcaggattgctctggaaccagttcttgacttgatctggagctgcctttgaagtatcgaattgtgaccaccattttacaaaggcgtgtctctgtaacggtggatattgcttgctgttttcagtttttccgtatctgtattgccatgaaaaaatccatgacaaggcaaaactggaaaagtattttaaatctgctagaatacgtgattccttgctattatagagcttgttgaattgttggaatccctgttggacttcttctgggaatatctgtggaattggtccgaagtagttccaccattggaggaaccaatttggaaaattatacacagtattatttttgaagtaaattagccatgaatgcttgaatttactattttgatgccagaacacattggtccaggcgtcgatgtaatcccaataattatatcctgcggggtcaaatggagcagaaaattttttgggttggtttaggtttgagccataatgtcgtggctgcataacctttaggatttggattgtggaatgagtatttagatttggatctttggggtctttgaagtgtttaatagatactgagttcgtatctattagaatgaattcatagaatttgcgggttttgtttgtggctattggcctgtaatggaatcctgggggg

SEQ ID NO: 12450 - DNA, 1032 bp, Glycine max
  Gm_smallRNAprecursor_5283
atttttactgtttctacagtgtcggtaatgtttaccggaactgttacaaaacttttaaaaattacattacttaaaagaaattgacaaattagttacaataattcatgattactacaactaattaatcgtcatctaatgatataccgaaacagtcatcttcattctggtagaatggatcatcttcttggtcatcattagtctctgatgattcagcttccttcttggaaggttcttcttccacttcctgttgaagtagttggagaacttctttgagattcttagcaagactctctttagattttgagcttgctaagaatgctgccagttgcgacttctgattcaggaacagagatgtctctgggtcagcaggtttaaggaactcaggattgctctggaaccagttcttgacttgatctggagctgcctttgaagtatcgaattgtgaccaccattttacaaaggcgtgtctctgtaacggtggatattgcttgctgttttcagtttttccgtatctgtattgccatgaaaaaatccatgacaaggcaaaactggaaaagtattttaaatctgctagaatacgtgattccttgctattatagagcttgttgaattgttggaatccctgttggacttcttctgggaatatctgtggaattggtccgaagtagttccaccattggaggaaccaatttggaaaattatacacagtattatttttgaagtaaattagccatgaatgcttgaatttactattttgatgccagaacacattggtccaggcgtcgatgtaatcccaataattatatcctgcggggtcaaatggagcagaaaattttttgggttggtttaggtttgagccataatgtcgtggctgcataacctttaggatttggattgtggaatgagtatttagatttggatctttggggtctttgaagtgtttaatagatactgagttcgtatctattagaatgaattcatagaatttgcgggttttgtttgtggctattggcctgtaatggaatcctgggg

SEQ ID NO: 12451 - DNA, 1069 bp, Glycine max
  Gm_smallRNAprecursor_5284
ttaccggaactgttacaaaacttttaaaaattacattacttaaaagaaattgacaaattagttacaataattcatgattactacaactaattaatcgtcatctaatgatataccgaaacagtcatcttcattctggtagaatggatcatcttcttggtcatcattagtctctgatgattcagcttccttcttggaaggttcttcttccacttcctgttgaagtagttggagaacttctttgagattcttagcaagactctctttagattttgagcttgctaagaatgctgccagttgcgacttctgattcaggaacagagatgtctctgggtcagcaggtttaaggaactcaggattgctctggaaccagttcttgacttgatctggagctgcctttgaagtatcgaattgtgaccaccattttacaaaggcgtgtctctgtaacggtggatattgcttgctgttttcagtttttccgtatctgtattgccatgaaaaaatccatgacaaggcaaaactggaaaagtattttaaatctgctagaatacgtgattccttgctattatagagcttgttgaattgttggaatccctgttggacttcttctgggaatatctgtggaattggtccgaagtagttccaccattggaggaaccaatttggaaaattatacacagtattatttttgaagtaaattagccatgaatgcttgaatttactattttgatgccagaacacattggtccaggcgtcgatgtaatcccaataattatatcctgcggggtcaaatggagcagaaaattttttgggttggtttaggtttgagccataatgtcgtggctgcataacctttaggatttggattgtggaatgagtatttagatttggatctttggggtctttgaagtgtttaatagatactgagttcgtatctattagaatgaattcatagaatttgcgggttttgtttgtggctattggcctgtaatggaatcctggggggaatactttggcggttgccttgaagggattcttgtccctgtattctggttccatttgtaaaacattg

SEQ ID NO: 12452 - DNA, 1067 bp, Glycine max
  Gm_smallRNAprecursor_5285
accggaactgttacaaaacttttaaaaattacattacttaaaagaaattgacaaattagttacaataattcatgattactacaactaattaatcgtcatctaatgatataccgaaacagtcatcttcattctggtagaatggatcatcttcttggtcatcattagtctctgatgattcagcttccttcttggaaggttcttcttccacttcctgttgaagtagttggagaacttctttgagattcttagcaagactctctttagattttgagcttgctaagaatgctgccagttgcgacttctgattcaggaacagagatgtctctgggtcagcaggtttaaggaactcaggattgctctggaaccagttcttgacttgatctggagctgcctttgaagtatcgaattgtgaccaccattttacaaaggcgtgtctctgtaacggtggatattgcttgctgttttcagtttttccgtatctgtattgccatgaaaaaatccatgacaaggcaaaactggaaaagtattttaaatctgctagaatacgtgattccttgctattatagagcttgttgaattgttggaatccctgttggacttcttctgggaatatctgtggaattggtccgaagtagttccaccattggaggaaccaatttggaaaattatacacagtattatttttgaagtaaattagccatgaatgcttgaatttactattttgatgccagaacacattggtccaggcgtcgatgtaatcccaataattatatcctgcggggtcaaatggagcagaaaattttttgggttggtttaggtttgagccataatgtcgtggctgcataacctttaggatttggattgtggaatgagtatttagatttggatctttggggtctttgaagtgtttaatagatactgagttcgtatctattagaatgaattcatagaatttgcgggttttgtttgtggctattggcctgtaatggaatcctggggggaatactttggcggttgccttgaagggattcttgtccctgtattctggttccatttgtaaaacattg

SEQ ID NO: 12453 - DNA, 1067 bp, Glycine max; identical to SEQ ID NO: 12452
  Gm_smallRNAprecursor_5286

SEQ ID NO: 12454 - DNA, 1109 bp, Glycine max
  Gm_smallRNAprecursor_5287
agaaattgacaaattagttacaataattcatgattactacaactaattaatcgtcatctaatgatataccgaaacagtcatcttcattctggtagaatggatcatcttcttggtcatcattagtctctgatgattcagcttccttcttggaaggttcttcttccacttcctgttgaagtagttggagaacttctttgagattcttagcaagactctctttagattttgagcttgctaagaatgctgccagttgcgacttctgattcaggaacagagatgtctctgggtcagcaggtttaaggaactcaggattgctctggaaccagttcttgacttgatctggagctgcctttgaagtatcgaattgtgaccaccattttacaaaggcgtgtctctgtaacggtggatattgcttgctgttttcagtttttccgtatctgtattgccatgaaaaaatccatgacaaggcaaaactggaaaagtattttaaatctgctagaatacgtgattccttgctattatagagcttgttgaattgttggaatccctgttggacttcttctgggaatatctgtggaattggtccgaagtagttccaccattggaggaaccaatttggaaaattatacacagtattatttttgaagtaaattagccatgaatgcttgaatttactattttgatgccagaacacattggtccaggcgtcgatgtaatcccaataattatatcctgcggggtcaaatggagcagaaaattttttgggttggtttaggtttgagccataatgtcgtggctgcataacctttaggatttggattgtggaatgagtatttagatttggatctttggggtctttgaagtgtttaatagatactgagttcgtatctattagaatgaattcatagaatttgcgggttttgtttgtggctattggcctgtaatggaatcctggggggaatactttggcggttgccttgaagggattcttgtccctgtattctggttccatttgtaaaacattgaaaaacttgttttttgaaatataactgttgctgggttgtgatgttgattcttgttgagtcaacgattggcttggtctttggttg

SEQ ID NO: 12455 - DNA, 1070 bp, Glycine max
  Gm_smallRNAprecursor_5288
caactaattaatcgtcatctaatgatataccgaaacagtcatcttcattctggtagaatggatcatcttcttggtcatcattagtctctgatgattcagcttccttcttggaaggttcttcttccacttcctgttgaagtagttggagaacttctttgagattcttagcaagactctctttagattttgagcttgctaagaatgctgccagttgcgacttctgattcaggaacagagatgtctctgggtcagcaggtttaaggaactcaggattgctctggaaccagttcttgacttgatctggagctgcctttgaagtatcgaattgtgaccaccattttacaaaggcgtgtctctgtaacggtggatattgcttgctgttttcagtttttccgtatctgtattgccatgaaaaaatccatgacaaggcaaaactggaaaagtattttaaatctgctagaatacgtgattccttgctattatagagcttgttgaattgttggaatccctgttggacttcttctgggaatatctgtggaattggtccgaagtagttccaccattggaggaaccaatttggaaaattatacacagtattatttttgaagtaaattagccatgaatgcttgaatttactattttgatgccagaacacattggtccaggcgtcgatgtaatcccaataattatatcctgcggggtcaaatggagcagaaaattttttgggttggtttaggtttgagccataatgtcgtggctgcataacctttaggatttggattgtggaatgagtatttagatttggatctttggggtctttgaagtgtttaatagatactgagttcgtatctattagaatgaattcatagaatttgcgggttttgtttgtggctattggcctgtaatggaatcctggggggaatactttggcggttgccttgaagggattcttgtccctgtattctggttccatttgtaaaacattgaaaaacttgttttttgaaatataactgttgctgggttgtgatgttgattcttgttgagtcaacgattggcttggtctttggttg

SEQ ID NO: 12456 - DNA, 1076 bp, Glycine max
  Gm_smallRNAprecursor_5289
ccatctttcgggaagagttacttcatcccattttatttttctcgggagagaaacgttagcctttgtcatatcggtgataaacaaggttgtttctcctttttgaggttttaacaggactctagatgcacaagtattcatgaccttgtactggatcctataaattaaggctgctgggattgatccttctttcatgtcaaggccatgaaagtggatgtttaagaacagagagtcaagaatgtttctgtccatcagactcactgttttgtttggataacagttaaaatatattggaccttgtcctaggctggtttcgactgttccaattagggagtcttcaaattgattatgcctaatgtctcttagacacattaaaactgctgcatctatgcccatatcaattaagggcttgatggctacttgtacacaaccgatgtgtagatatttatacttacggctatgttcataaattgaattttttgaaagtaaatgaaattcttcccctatatcttgtcctagaggaatattgttttctactgttttgattatgtaatcaaagttgtgtttgtcttttattgtttcaggaacgtatagttgatcttgagggatttctagaatgttccagtcatccatgttttgattgatatcttcgaatcagacttcctcatcgaagagattgtgttttggggcgacctcttgggtctggttatcttgatcatttaataaattggagtttcttgaagaagatgatgaggaggagtttgagcgaaaagagatacgggaaaaagatcgtaatagtctagacatgattataatattctctaatatcttcgccctcatttggttccatagaaatatctccgtaagtaaatatgtcacaaaatttttctggatctgaattatttttaagaaaaagtcttttttttttaaaaaaaaaaaaaacagtttgaacggcaatcctatagccaccagtgtattatgtcttgatattttggttaaacagtacaccttagccttaccgccctttatccaacacgggtcttactgctacagtactattcaactaaaatattagactg

SEQ ID NO: 12457 - DNA, 1159 bp, Glycine max
  Gm_smallRNAprecursor_5290
ccatctttcgggaagagttacttcatcccattttatttttctcgggagagaaacgttagcctttgtcatatcggtgataaacaaggttgtttctcctttttgaggttttaacaggactctagatgcacaagtattcatgaccttgtactggatcctataaattaaggctgctgggattgatccttctttcatgtcaaggccatgaaagtggatgtttaagaacagagagtcaagaatgtttctgtccatcagactcactgttttgtttggataacagttaaaatatattggaccttgtcctaggctggtttcgactgttccaattagggagtcttcaaattgattatgcctaatgtctcttagacacattaaaactgctgcatctatgcccatatcaattaagggcttgatggctacttgtacacaaccgatgtgtagatatttatacttacggctatgttcataaattgaattttttgaaagtaaatgaaattcttcccctatatcttgtcctagaggaatattgttttctactgttttgattatgtaatcaaagttgtgtttgtcttttattgtttcaggaacgtatagttgatcttgagggatttctagaatgttccagtcatccatgttttgattgatatcttcgaatcagacttcctcatcgaagagattgtgttttggggcgacctcttgggtctggttatcttgatcatttaataaattggagtttcttgaagaagatgatgaggaggagtttgagcgaaaagagatacgggaaaaagatcgtaatagtctagacatgattataatattctctaatatcttcgccctcatttggttccatagaaatatctccgtaagtaaatatgtcacaaaatttttctggatctgaattatttttaagaaaaagtcttttttttttaaaaaaaaaaaaaacagtttgaacggcaatcctatagccaccagtgtattatgtcttgatattttggttaaacagtacaccttagccttaccgccctttatccaacacgggtcttactgctacagtactattcaactaaaatattagactgctgtacttccagcaagtactgttcaaacacttactgtacaaggaatgttgtccgtaaggacatatgttaacaaattttatgga

SEQ ID NO: 12458 - DNA, 1105 bp, Glycine max
  Gm_smallRNAprecursor_5291
ctgttttgtttggataacagttaaaatatattggaccttgtcctaggctggtttcgactgttccaattagggagtcttcaaattgattatgcctaatgtctcttagacacattaaaactgctgcatctatgcccatatcaattaagggcttgatggctacttgtacacaaccgatgtgtagatatttatacttacggctatgttcataaattgaattttttgaaagtaaatgaaattcttcccctatatcttgtcctagaggaatattgttttctactgttttgattatgtaatcaaagttgtgtttgtcttttattgtttcaggaacgtatagttgatcttgagggatttctagaatgttccagtcatccatgttttgattgatatcttcgaatcagacttcctcatcgaagagattgtgttttggggcgacctcttgggtctggttatcttgatcatttaataaattggagtttcttgaagaagatgatgaggaggagtttgagcgaaaagagatacgggaaaaagatcgtaatagtctagacatgattataatattctctaatatcttcgccctcatttggttccatagaaatatctccgtaagtaaatatgtcacaaaatttttctggatctgaattatttttaagaaaaagtcttttttttttaaaaaaaaaaaaaacagtttgaacggcaatcctatagccaccagtgtattatgtcttgatattttggttaaacagtacaccttagccttaccgccctttatccaacacgggtcttactgctacagtactattcaactaaaatattagactgctgtacttccagcaagtactgttcaaacacttactgtacaaggaatgttgtccgtaaggacatatgttaacaaattttatggatcaattatgtcctcttttcatgatagagaatgctctttccctttcactctttcgatcttgatcgggaatcgtcttccttctctgtctttctttattttcatttttctttttctttctttccatttcttccttttctttcttttcacttttccttccccatccctttctttgggaaatcgggttttagcattctatttgctctc

SEQ ID NO: 12459 - DNA, 1205 bp, Glycine max
  Gm_smallRNAprecursor_5292
agacacattaaaactgctgcatctatgcccatatcaattaagggcttgatggctacttgtacacaaccgatgtgtagatatttatacttacggctatgttcataaattgaattttttgaaagtaaatgaaattcttcccctatatcttgtcctagaggaatattgttttctactgttttgattatgtaatcaaagttgtgtttgtcttttattgtttcaggaacgtatagttgatcttgagggatttctagaatgttccagtcatccatgttttgattgatatcttcgaatcagacttcctcatcgaagagattgtgttttggggcgacctcttgggtctggttatcttgatcatttaataaattggagtttcttgaagaagatgatgaggaggagtttgagcgaaaagagatacgggaaaaagatcgtaatagtctagacatgattataatattctctaatatcttcgccctcatttggttccatagaaatatctccgtaagtaaatatgtcacaaaatttttctggatctgaattatttttaagaaaaagtcttttttttttaaaaaaaaaaaaaacagtttgaacggcaatcctatagccaccagtgtattatgtcttgatattttggttaaacagtacaccttagccttaccgccctttatccaacacgggtcttactgctacagtactattcaactaaaatattagactgctgtacttccagcaagtactgttcaaacacttactgtacaaggaatgttgtccgtaaggacatatgttaacaaattttatggatcaattatgtcctcttttcatgatagagaatgctctttccctttcactctttcgatcttgatcgggaatcgtcttccttctctgtctttctttattttcatttttctttttctttctttccatttcttccttttctttcttttcacttttccttccccatccctttctttgggaaatcgggttttagcattctatttgctctcccttgaggagattccgctgtcctttgcttcgggggaaagaatgaggattccttttttacaggccaaggttcaaaaaggtctaaggttgtgtttcaaaggggtctttcatcgtgggaacccaatcttgatatctggggcaaaacaaatttgggtgtcaaggtgtcggtctcgagccgaacttccacattattccataaggcacgc

SEQ ID NO: 12460 - DNA, 1153 bp, Glycine max
  Gm_smallRNAprecursor_5293
cgatcatacacaacatccaacgtatgaacgtggccaaaagctagtgccaaagaccctgaaaggtcagtgcacagtgccccccacgaacatacacaacatgcacatgctaatgcatttccaacatcaatcaacaaatcgtatttccatgtcattcacaacataaatatcatctcatctcaatgacgttatcaacaacaacaacaacctcatttcatattcacatattcatcaataataacaattcatgttgacatggtctttattaacaatgtcatctcaaattaatatcatcataattatcattatcatcacatatcaattaaaatcctcaatagcaacatcaacagcaattcaaacaaacacaacaatatcatttccacacgcacggtcttcaaacaacacatttcaaacaaccaaaaaaatatcattcatcacaatacatatatatatatatatatatatatatatatataaatatcagactgctgtgcttccagaaaatactgttcaaacacatactgtttaaattaaaattactgtacatgcttcagatccataagtttagttaacatatgcccttacggacactattcctacttctccatcaggctctgataccagaggtcagcggagtaggatcaaacggacagataggaagtaagaatgcagtatgattaatgaaatgaaaatataaacttgaaaacagatatcaaggtcacaccggagaccggcttacaaaacccaggttttcataaacaaagaaaccgaagcgacggcagagccgcacaggattggtggagggagaagagagaaggatgaaaaatagaaatttattggatctagaaagaagcgcttacaaaaatcttgtttcagagcacctctcttccgaaacctgaaaaaatggctaaatgaaagggtgcctcacaacatacttgaggactccttatatagccaaaaatctaagaccggtagttgccggtagttttgaccgggactatttgactgtttgttacaagacaagtagttttgaccgggactttaatggctacaggacaggtagtattgtccatcattaattacacattaattacaaacaaacggttttgtgaccgaaattaaatttaatctaaacagataccaaaacaatcatctt

SEQ ID NO: 12461 - DNA, 1064 bp, Glycine max
  Gm_smallRNAprecursor_5294
catacacaacatccaacgtatgaacgtggccaaaagctagtgccaaagaccctgaaaggtcagtgcacagtgccccccacgaacatacacaacatgcacatgctaatgcatttccaacatcaatcaacaaatcgtatttccatgtcattcacaacataaatatcatctcatctcaatgacgttatcaacaacaacaacaacctcatttcatattcacatattcatcaataataacaattcatgttgacatggtctttattaacaatgtcatctcaaattaatatcatcataattatcattatcatcacatatcaattaaaatcctcaatagcaacatcaacagcaattcaaacaaacacaacaatatcatttccacacgcacggtcttcaaacaacacatttcaaacaaccaaaaaaatatcattcatcacaatacatatatatatatatatatatatatatatatataaatatcagactgctgtgcttccagaaaatactgttcaaacacatactgtttaaattaaaattactgtacatgcttcagatccataagtttagttaacatatgcccttacggacactattcctacttctccatcaggctctgataccagaggtcagcggagtaggatcaaacggacagataggaagtaagaatgcagtatgattaatgaaatgaaaatataaacttgaaaacagatatcaaggtcacaccggagaccggcttacaaaacccaggttttcataaacaaagaaaccgaagcgacggcagagccgcacaggattggtggagggagaagagagaaggatgaaaaatagaaatttattggatctagaaagaagcgcttacaaaaatcttgtttcagagcacctctcttccgaaacctgaaaaaatggctaaatgaaagggtgcctcacaacatacttgaggactccttatatagccaaaaatctaagaccggtagttgccggtagttttgaccgggactatttgactgtttgttacaagacaagtagttttgaccgggactttaatggctacaggacaggtagtattgtcc

SEQ ID NO: 12462 - DNA, 1031 bp, Glycine max
  Gm_smallRNAprecursor_5295
acaagtagttttgaccgggactttaatggctacaggacaggtagtattgtccatcattaattacacattaattacaaacaaacggttttgtgaccgaaattaaatttaatctaaacagataccaaaacaatcatcttcgttttggtaaaagggatcttcttcgtcttcttcggcagaacttgtttcttccttctttgaggatgaagcttcttcttcttgttgtaacatttgtagaacttccttcagatttttagctaagacctcctttgatgtcgatcctgctaaaaatgctgccagatgagacttttggttcaaaaacacagaagtctctggatcagccgctttgaggaattctggatgggatttgaaccatagttttacttgttctggatccgctttggatgagtcaaattgtgtccaccattttacaaatgcgtgtctttgtagtgatggatattgatttgtcttttcagtcttgctgtaacgatattgccatgagaatatccatgacagtgcaaagcttgaaaagtatttaagatctgctggaattcgtcattcctgcgaattgtattgtttcttaaattgggaaaatccttgttggaccgtttctgggaatatctctgggatgggtccaaagaagtcccaccattgcaaaaaccaattgggaaaattgtaaattgtgttggtcttgaaatatatcagccatgaatgcttgaagcgggtattttggtgccaaaacaccttagtccaagcatcaacgtaatcccaataggtataacctaccggatcaaatggaactgagaatctctttcctttgttcaagtccgaaccaaagtgtcttggttgaagaacttttagtatttggatggttgagtgggtgtttaaggtttggtcttttgggtctttgaagtgtttgatagatactgagtttgaatctaccaaaatcaattcataaaaagttcttgtcttcaggatggtggttggtttgtagtgaaatcctggtgggaaagccttggccgtcgccttgaagg

SEQ ID NO: 12463 - DNA, 1031 bp, Glycine max; identical to SEQ ID NO: 12462
  Gm_smallRNAprecursor_5296

SEQ ID NO: 12464 - DNA, 1114 bp, Glycine max
  Gm_smallRNAprecursor_5297
ggactttaatggctacaggacaggtagtattgtccatcattaattacacattaattacaaacaaacggttttgtgaccgaaattaaatttaatctaaacagataccaaaacaatcatcttcgttttggtaaaagggatcttcttcgtcttcttcggcagaacttgtttcttccttctttgaggatgaagcttcttcttcttgttgtaacatttgtagaacttccttcagatttttagctaagacctcctttgatgtcgatcctgctaaaaatgctgccagatgagacttttggttcaaaaacacagaagtctctggatcagccgctttgaggaattctggatgggatttgaaccatagttttacttgttctggatccgctttggatgagtcaaattgtgtccaccattttacaaatgcgtgtctttgtagtgatggatattgatttgtcttttcagtcttgctgtaacgatattgccatgagaatatccatgacagtgcaaagcttgaaaagtatttaagatctgctggaattcgtcattcctgcgaattgtattgtttcttaaattgggaaaatccttgttggaccgtttctgggaatatctctgggatgggtccaaagaagtcccaccattgcaaaaaccaattgggaaaattgtaaattgtgttggtcttgaaatatatcagccatgaatgcttgaagcgggtattttggtgccaaaacaccttagtccaagcatcaacgtaatcccaataggtataacctaccggatcaaatggaactgagaatctctttcctttgttcaagtccgaaccaaagtgtcttggttgaagaacttttagtatttggatggttgagtgggtgtttaaggtttggtcttttgggtctttgaagtgtttgatagatactgagtttgaatctaccaaaatcaattcataaaaagttcttgtcttcaggatggtggttggtttgtagtgaaatcctggtgggaaagccttggccgtcgccttgaagggatttttgtcccaaaattcaggttccatctgcaaaacagttaacaatttatttttataaatataattgttagtttgtttggtaggtggtgtttgggcttt

SEQ ID NO: 12465 - DNA, 1146 bp, Glycine max
  Gm_smallRNAprecursor_5298
tacaggacaggtagtattgtccatcattaattacacattaattacaaacaaacggttttgtgaccgaaattaaatttaatctaaacagataccaaaacaatcatcttcgttttggtaaaagggatcttcttcgtcttcttcggcagaacttgtttcttccttctttgaggatgaagcttcttcttcttgttgtaacatttgtagaacttccttcagatttttagctaagacctcctttgatgtcgatcctgctaaaaatgctgccagatgagacttttggttcaaaaacacagaagtctctggatcagccgctttgaggaattctggatgggatttgaaccatagttttacttgttctggatccgctttggatgagtcaaattgtgtccaccattttacaaatgcgtgtctttgtagtgatggatattgatttgtcttttcagtcttgctgtaacgatattgccatgagaatatccatgacagtgcaaagcttgaaaagtatttaagatctgctggaattcgtcattcctgcgaattgtattgtttcttaaattgggaaaatccttgttggaccgtttctgggaatatctctgggatgggtccaaagaagtcccaccattgcaaaaaccaattgggaaaattgtaaattgtgttggtcttgaaatatatcagccatgaatgcttgaagcgggtattttggtgccaaaacaccttagtccaagcatcaacgtaatcccaataggtataacctaccggatcaaatggaactgagaatctctttcctttgttcaagtccgaaccaaagtgtcttggttgaagaacttttagtatttggatggttgagtgggtgtttaaggtttggtcttttgggtctttgaagtgtttgatagatactgagtttgaatctaccaaaatcaattcataaaaagttcttgtcttcaggatggtggttggtttgtagtgaaatcctggtgggaaagccttggccgtcgccttgaagggatttttgtcccaaaattcaggttccatctgcaaaacagttaacaatttatttttataaatataattgttagtttgtttggtaggtggtgtttgggctttggctaaaggtagttttcctttagtattggtggctgttttggtcat

SEQ ID NO: 12466 - DNA, 1146 bp, Glycine max; identical to SEQ ID NO: 12465
  Gm_smallRNAprecursor_5299

SEQ ID NO: 12467 - DNA, 1147 bp, Glycine max
  Gm_smallRNAprecursor_5300
tacaggacaggtagtattgtccatcattaattacacattaattacaaacaaacggttttgtgaccgaaattaaatttaatctaaacagataccaaaacaatcatcttcgttttggtaaaagggatcttcttcgtcttcttcggcagaacttgtttcttccttctttgaggatgaagcttcttcttcttgttgtaacatttgtagaacttccttcagatttttagctaagacctcctttgatgtcgatcctgctaaaaatgctgccagatgagacttttggttcaaaaacacagaagtctctggatcagccgctttgaggaattctggatgggatttgaaccatagttttacttgttctggatccgctttggatgagtcaaattgtgtccaccattttacaaatgcgtgtctttgtagtgatggatattgatttgtcttttcagtcttgctgtaacgatattgccatgagaatatccatgacagtgcaaagcttgaaaagtatttaagatctgctggaattcgtcattcctgcgaattgtattgtttcttaaattgggaaaatccttgttggaccgtttctgggaatatctctgggatgggtccaaagaagtcccaccattgcaaaaaccaattgggaaaattgtaaattgtgttggtcttgaaatatatcagccatgaatgcttgaagcgggtattttggtgccaaaacaccttagtccaagcatcaacgtaatcccaataggtataacctaccggatcaaatggaactgagaatctctttcctttgttcaagtccgaaccaaagtgtcttggttgaagaacttttagtatttggatggttgagtgggtgtttaaggtttggtcttttgggtctttgaagtgtttgatagatactgagtttgaatctaccaaaatcaattcataaaaagttcttgtcttcaggatggtggttggtttgtagtgaaatcctggtgggaaagccttggccgtcgccttgaagggatttttgtcccaaaattcaggttccatctgcaaaacagttaacaatttatttttataaatataattgttagtttgtttggtaggtggtgtttgggctttggctaaaggtagttttcctttagtattggtggctgttttggtcatt

SEQ ID NO: 12468 - DNA, 1147 bp, Glycine max; identical to SEQ ID NO: 12467
  Gm_smallRNAprecursor_5301

SEQ ID NO: 12469 - DNA, 1247 bp, Glycine max
  Gm_smallRNAprecursor_5302
tacaggacaggtagtattgtccatcattaattacacattaattacaaacaaacggttttgtgaccgaaattaaatttaatctaaacagataccaaaacaatcatcttcgttttggtaaaagggatcttcttcgtcttcttcggcagaacttgtttcttccttctttgaggatgaagcttcttcttcttgttgtaacatttgtagaacttccttcagatttttagctaagacctcctttgatgtcgatcctgctaaaaatgctgccagatgagacttttggttcaaaaacacagaagtctctggatcagccgctttgaggaattctggatgggatttgaaccatagttttacttgttctggatccgctttggatgagtcaaattgtgtccaccattttacaaatgcgtgtctttgtagtgatggatattgatttgtcttttcagtcttgctgtaacgatattgccatgagaatatccatgacagtgcaaagcttgaaaagtatttaagatctgctggaattcgtcattcctgcgaattgtattgtttcttaaattgggaaaatccttgttggaccgtttctgggaatatctctgggatgggtccaaagaagtcccaccattgcaaaaaccaattgggaaaattgtaaattgtgttggtcttgaaatatatcagccatgaatgcttgaagcgggtattttggtgccaaaacaccttagtccaagcatcaacgtaatcccaataggtataacctaccggatcaaatggaactgagaatctctttcctttgttcaagtccgaaccaaagtgtcttggttgaagaacttttagtatttggatggttgagtgggtgtttaaggtttggtcttttgggtctttgaagtgtttgatagatactgagtttgaatctaccaaaatcaattcataaaaagttcttgtcttcaggatggtggttggtttgtagtgaaatcctggtgggaaagccttggccgtcgccttgaagggatttttgtcccaaaattcaggttccatctgcaaaacagttaacaatttatttttataaatataattgttagtttgtttggtaggtggtgtttgggctttggctaaaggtagttttcctttagtattggtggctgttttggtcattgacgcattttggatcattgtttgtaaatttgattcagattcatcatcagattctgaggcaatgtctgcccaagattttttgattatttttggaaatttgg

SEQ ID NO: 12470 - DNA, 1247 bp, Glycine max; identical to SEQ ID NO: 12469
  Gm_smallRNAprecursor_5303

SEQ ID NO: 12471 - DNA, 1072 bp, Glycine max
  Gm_smallRNAprecursor_5304
gcttcttcttcttgttgtaacatttgtagaacttccttcagatttttagctaagacctcctttgatgtcgatcctgctaaaaatgctgccagatgagacttttggttcaaaaacacagaagtctctggatcagccgctttgaggaattctggatgggatttgaaccatagttttacttgttctggatccgctttggatgagtcaaattgtgtccaccattttacaaatgcgtgtctttgtagtgatggatattgatttgtcttttcagtcttgctgtaacgatattgccatgagaatatccatgacagtgcaaagcttgaaaagtatttaagatctgctggaattcgtcattcctgcgaattgtattgtttcttaaattgggaaaatccttgttggaccgtttctgggaatatctctgggatgggtccaaagaagtcccaccattgcaaaaaccaattgggaaaattgtaaattgtgttggtcttgaaatatatcagccatgaatgcttgaagcgggtattttggtgccaaaacaccttagtccaagcatcaacgtaatcccaataggtataacctaccggatcaaatggaactgagaatctctttcctttgttcaagtccgaaccaaagtgtcttggttgaagaacttttagtatttggatggttgagtgggtgtttaaggtttggtcttttgggtctttgaagtgtttgatagatactgagtttgaatctaccaaaatcaattcataaaaagttcttgtcttcaggatggtggttggtttgtagtgaaatcctggtgggaaagccttggccgtcgccttgaagggatttttgtcccaaaattcaggttccatctgcaaaacagttaacaatttatttttataaatataattgttagtttgtttggtaggtggtgtttgggctttggctaaaggtagttttcctttagtattggtggctgttttggtcattgacgcattttggatcattgtttgtaaatttgattcagattcatcatcagattctgaggcaatgtctgcccaagattttttgattatttttggaaatttgg

SEQ ID NO: 12472 - DNA, 1124 bp, Glycine max
  Gm_smallRNAprecursor_5305
ccttcagatttttagctaagacctcctttgatgtcgatcctgctaaaaatgctgccagatgagacttttggttcaaaaacacagaagtctctggatcagccgctttgaggaattctggatgggatttgaaccatagttttacttgttctggatccgctttggatgagtcaaattgtgtccaccattttacaaatgcgtgtctttgtagtgatggatattgatttgtcttttcagtcttgctgtaacgatattgccatgagaatatccatgacagtgcaaagcttgaaaagtatttaagatctgctggaattcgtcattcctgcgaattgtattgtttcttaaattgggaaaatccttgttggaccgtttctgggaatatctctgggatgggtccaaagaagtcccaccattgcaaaaaccaattgggaaaattgtaaattgtgttggtcttgaaatatatcagccatgaatgcttgaagcgggtattttggtgccaaaacaccttagtccaagcatcaacgtaatcccaataggtataacctaccggatcaaatggaactgagaatctctttcctttgttcaagtccgaaccaaagtgtcttggttgaagaacttttagtatttggatggttgagtgggtgtttaaggtttggtcttttgggtctttgaagtgtttgatagatactgagtttgaatctaccaaaatcaattcataaaaagttcttgtcttcaggatggtggttggtttgtagtgaaatcctggtgggaaagccttggccgtcgccttgaagggatttttgtcccaaaattcaggttccatctgcaaaacagttaacaatttatttttataaatataattgttagtttgtttggtaggtggtgtttgggctttggctaaaggtagttttcctttagtattggtggctgttttggtcattgacgcattttggatcattgtttgtaaatttgattcagattcatcatcagattctgaggcaatgtctgcccaagattttttgattatttttggaaatttggtcagacccatgtcttgaagggcctgaagggtttcaattggccaagcatagtcggccgatgtttgtttggcggttgccggtttggga

SEQ ID NO: 12473 - DNA, 1130 bp, Glycine max
  Gm_smallRNAprecursor_5306
ccttcagatttttagctaagacctcctttgatgtcgatcctgctaaaaatgctgccagatgagacttttggttcaaaaacacagaagtctctggatcagccgctttgaggaattctggatgggatttgaaccatagttttacttgttctggatccgctttggatgagtcaaattgtgtccaccattttacaaatgcgtgtctttgtagtgatggatattgatttgtcttttcagtcttgctgtaacgatattgccatgagaatatccatgacagtgcaaagcttgaaaagtatttaagatctgctggaattcgtcattcctgcgaattgtattgtttcttaaattgggaaaatccttgttggaccgtttctgggaatatctctgggatgggtccaaagaagtcccaccattgcaaaaaccaattgggaaaattgtaaattgtgttggtcttgaaatatatcagccatgaatgcttgaagcgggtattttggtgccaaaacaccttagtccaagcatcaacgtaatcccaataggtataacctaccggatcaaatggaactgagaatctctttcctttgttcaagtccgaaccaaagtgtcttggttgaagaacttttagtatttggatggttgagtgggtgtttaaggtttggtcttttgggtctttgaagtgtttgatagatactgagtttgaatctaccaaaatcaattcataaaaagttcttgtcttcaggatggtggttggtttgtagtgaaatcctggtgggaaagccttggccgtcgccttgaagggatttttgtcccaaaattcaggttccatctgcaaaacagttaacaatttatttttataaatataattgttagtttgtttggtaggtggtgtttgggctttggctaaaggtagttttcctttagtattggtggctgttttggtcattgacgcattttggatcattgtttgtaaatttgattcagattcatcatcagattctgaggcaatgtctgcccaagattttttgattatttttggaaatttggtcagacccatgtcttgaagggcctgaagggtttcaattggccaagcatagtcggccgatgtttgtttggcggttgccggtttgggagattcc

SEQ ID NO: 12474 - DNA, 1087 bp, Glycine max
  Gm_smallRNAprecursor_5307
tcctgctaaaaatgctgccagatgagacttttggttcaaaaacacagaagtctctggatcagccgctttgaggaattctggatgggatttgaaccatagttttacttgttctggatccgctttggatgagtcaaattgtgtccaccattttacaaatgcgtgtctttgtagtgatggatattgatttgtcttttcagtcttgctgtaacgatattgccatgagaatatccatgacagtgcaaagcttgaaaagtatttaagatctgctggaattcgtcattcctgcgaattgtattgtttcttaaattgggaaaatccttgttggaccgtttctgggaatatctctgggatgggtccaaagaagtcccaccattgcaaaaaccaattgggaaaattgtaaattgtgttggtcttgaaatatatcagccatgaatgcttgaagcgggtattttggtgccaaaacaccttagtccaagcatcaacgtaatcccaataggtataacctaccggatcaaatggaactgagaatctctttcctttgttcaagtccgaaccaaagtgtcttggttgaagaacttttagtatttggatggttgagtgggtgtttaaggtttggtcttttgggtctttgaagtgtttgatagatactgagtttgaatctaccaaaatcaattcataaaaagttcttgtcttcaggatggtggttggtttgtagtgaaatcctggtgggaaagccttggccgtcgccttgaagggatttttgtcccaaaattcaggttccatctgcaaaacagttaacaatttatttttataaatataattgttagtttgtttggtaggtggtgtttgggctttggctaaaggtagttttcctttagtattggtggctgttttggtcattgacgcattttggatcattgtttgtaaatttgattcagattcatcatcagattctgaggcaatgtctgcccaagattttttgattatttttggaaatttggtcagacccatgtcttgaagggcctgaagggtttcaattggccaagcatagtcggccgatgtttgtttggcggttgccggtttggga

SEQ ID NO: 12475 - DNA, 1174 bp, Glycine max
  Gm_smallRNAprecursor_5308
cgggtattttggtgccaaaacaccttagtccaagcatcaacgtaatcccaataggtataacctaccggatcaaatggaactgagaatctctttcctttgttcaagtccgaaccaaagtgtcttggttgaagaacttttagtatttggatggttgagtgggtgtttaaggtttggtcttttgggtctttgaagtgtttgatagatactgagtttgaatctaccaaaatcaattcataaaaagttcttgtcttcaggatggtggttggtttgtagtgaaatcctggtgggaaagccttggccgtcgccttgaagggatttttgtcccaaaattcaggttccatctgcaaaacagttaacaatttatttttataaatataattgttagtttgtttggtaggtggtgtttgggctttggctaaaggtagttttcctttagtattggtggctgttttggtcattgacgcattttggatcattgtttgtaaatttgattcagattcatcatcagattctgaggcaatgtctgcccaagattttttgattatttttggaaatttggtcagacccatgtcttgaagggcctgaagggtttcaattggccaagcatagtcggccgatgtttgtttggcggttgccggtttgggagattcctgagtggatggctcaggtttgattgaggcaatctgggttgatgacccttctaagttggttttctgggtagatgacccagcctgggttggtgacccagaagaggtagatgatttcttcatggttggttctggaagagccagcctggctcctttgcctgtactccttcctccccgtagggagattcccgatgccttaggaggcattaccacttttctgtaagaattcacgggtaaggtagtcaggtagtgaatttgaggtgcccttgatgtattctatgtcaaaatcaaagacacttaaaattgcttgccatcgtgcaaaaatttgttttgaggcaaggtttttaacatctttttgtaaaatatctttggctgatttacaatcaaccctgattaaaaaattttggtttaataaatctgattggaatttggaaatgcacaaaacaattgctaaaacttcttttttaacagttgaatattttaattgcgcaggattccaatgttttgatgtatatgcaatgacatga

SEQ ID NO: 12476 - DNA, 1173 bp, Glycine max
  Gm_smallRNAprecursor_5309
gggtattttggtgccaaaacaccttagtccaagcatcaacgtaatcccaataggtataacctaccggatcaaatggaactgagaatctctttcctttgttcaagtccgaaccaaagtgtcttggttgaagaacttttagtatttggatggttgagtgggtgtttaaggtttggtcttttgggtctttgaagtgtttgatagatactgagtttgaatctaccaaaatcaattcataaaaagttcttgtcttcaggatggtggttggtttgtagtgaaatcctggtgggaaagccttggccgtcgccttgaagggatttttgtcccaaaattcaggttccatctgcaaaacagttaacaatttatttttataaatataattgttagtttgtttggtaggtggtgtttgggctttggctaaaggtagttttcctttagtattggtggctgttttggtcattgacgcattttggatcattgtttgtaaatttgattcagattcatcatcagattctgaggcaatgtctgcccaagattttttgattatttttggaaatttggtcagacccatgtcttgaagggcctgaagggtttcaattggccaagcatagtcggccgatgtttgtttggcggttgccggtttgggagattcctgagtggatggctcaggtttgattgaggcaatctgggttgatgacccttctaagttggttttctgggtagatgacccagcctgggttggtgacccagaagaggtagatgatttcttcatggttggttctggaagagccagcctggctcctttgcctgtactccttcctccccgtagggagattcccgatgccttaggaggcattaccacttttctgtaagaattcacgggtaaggtagtcaggtagtgaatttgaggtgcccttgatgtattctatgtcaaaatcaaagacacttaaaattgcttgccatcgtgcaaaaatttgttttgaggcaaggtttttaacatctttttgtaaaatatctttggctgatttacaatcaaccctgattaaaaaattttggtttaataaatctgattggaatttggaaatgcacaaaacaattgctaaaacttcttttttaacagttgaatattttaattgcgcaggattccaatgttttgatgtatatgcaatgacatga

SEQ ID NO: 12477 - DNA, 1176 bp, Glycine max
  Gm_smallRNAprecursor_5310
gggtattttggtgccaaaacaccttagtccaagcatcaacgtaatcccaataggtataacctaccggatcaaatggaactgagaatctctttcctttgttcaagtccgaaccaaagtgtcttggttgaagaacttttagtatttggatggttgagtgggtgtttaaggtttggtcttttgggtctttgaagtgtttgatagatactgagtttgaatctaccaaaatcaattcataaaaagttcttgtcttcaggatggtggttggtttgtagtgaaatcctggtgggaaagccttggccgtcgccttgaagggatttttgtcccaaaattcaggttccatctgcaaaacagttaacaatttatttttataaatataattgttagtttgtttggtaggtggtgtttgggctttggctaaaggtagttttcctttagtattggtggctgttttggtcattgacgcattttggatcattgtttgtaaatttgattcagattcatcatcagattctgaggcaatgtctgcccaagattttttgattatttttggaaatttggtcagacccatgtcttgaagggcctgaagggtttcaattggccaagcatagtcggccgatgtttgtttggcggttgccggtttgggagattcctgagtggatggctcaggtttgattgaggcaatctgggttgatgacccttctaagttggttttctgggtagatgacccagcctgggttggtgacccagaagaggtagatgatttcttcatggttggttctggaagagccagcctggctcctttgcctgtactccttcctccccgtagggagattcccgatgccttaggaggcattaccacttttctgtaagaattcacgggtaaggtagtcaggtagtgaatttgaggtgcccttgatgtattctatgtcaaaatcaaagacacttaaaattgcttgccatcgtgcaaaaatttgttttgaggcaaggtttttaacatctttttgtaaaatatctttggctgatttacaatcaaccctgattaaaaaattttggtttaataaatctgattggaatttggaaatgcacaaaacaattgctaaaacttcttttttaacagttgaatattttaattgcgcaggattccaatgttttgatgtatatgcaatgacatgatct

SEQ ID NO: 12478 - DNA, 1129 bp, Glycine max
  Gm_smallRNAprecursor_5311
ctgcaaaacagttaacaatttatttttataaatataattgttagtttgtttggtaggtggtgtttgggctttggctaaaggtagttttcctttagtattggtggctgttttggtcattgacgcattttggatcattgtttgtaaatttgattcagattcatcatcagattctgaggcaatgtctgcccaagattttttgattatttttggaaatttggtcagacccatgtcttgaagggcctgaagggtttcaattggccaagcatagtcggccgatgtttgtttggcggttgccggtttgggagattcctgagtggatggctcaggtttgattgaggcaatctgggttgatgacccttctaagttggttttctgggtagatgacccagcctgggttggtgacccagaagaggtagatgatttcttcatggttggttctggaagagccagcctggctcctttgcctgtactccttcctccccgtagggagattcccgatgccttaggaggcattaccacttttctgtaagaattcacgggtaaggtagtcaggtagtgaatttgaggtgcccttgatgtattctatgtcaaaatcaaagacacttaaaattgcttgccatcgtgcaaaaatttgttttgaggcaaggtttttaacatctttttgtaaaatatctttggctgatttacaatcaaccctgattaaaaaattttggtttaataaatctgattggaatttggaaatgcacaaaacaattgctaaaacttcttttttaacagttgaatattttaattgcgcaggattccaatgttttgatgtatatgcaatgacatgatcttggccatggactctttgtttgaggatgccaccataacctatgtctgaagcatcagtttcgacaattttaaatgcctgtggaataggaagatacagacatttaatggattggactttgactttgatttctttaaccgtttgtgtatggaggtcagtccaaggaggcggatttttcttcagcctatcatgtaatggcttgacaatattatttaaataggggacaaattctcctacgtaatttagacaacctagaaatctttgtaactgggttttgtctaagatttggttggggaa

SEQ ID NO: 12479 - DNA, 1115 bp, Glycine max
  Gm_smallRNAprecursor_5312
acaatttatttttataaatataattgttagtttgtttggtaggtggtgtttgggctttggctaaaggtagttttcctttagtattggtggctgttttggtcattgacgcattttggatcattgtttgtaaatttgattcagattcatcatcagattctgaggcaatgtctgcccaagattttttgattatttttggaaatttggtcagacccatgtcttgaagggcctgaagggtttcaattggccaagcatagtcggccgatgtttgtttggcggttgccggtttgggagattcctgagtggatggctcaggtttgattgaggcaatctgggttgatgacccttctaagttggttttctgggtagatgacccagcctgggttggtgacccagaagaggtagatgatttcttcatggttggttctggaagagccagcctggctcctttgcctgtactccttcctccccgtagggagattcccgatgccttaggaggcattaccacttttctgtaagaattcacgggtaaggtagtcaggtagtgaatttgaggtgcccttgatgtattctatgtcaaaatcaaagacacttaaaattgcttgccatcgtgcaaaaatttgttttgaggcaaggtttttaacatctttttgtaaaatatctttggctgatttacaatcaaccctgattaaaaaattttggtttaataaatctgattggaatttggaaatgcacaaaacaattgctaaaacttcttttttaacagttgaatattttaattgcgcaggattccaatgttttgatgtatatgcaatgacatgatcttggccatggactctttgtttgaggatgccaccataacctatgtctgaagcatcagtttcgacaattttaaatgcctgtggaataggaagatacagacatttaatggattggactttgactttgatttctttaaccgtttgtgtatggaggtcagtccaaggaggcggatttttcttcagcctatcatgtaatggcttgacaatattatttaaataggggacaaattctcctacgtaatttagacaacctagaaatctttgtaactgggttttgtctaagatttggttggggaa

SEQ ID NO: 12480 - DNA, 1071 bp, Glycine max
  Gm_smallRNAprecursor_5313
taagttggttttctgggtagatgacccagcctgggttggtgacccagaagaggtagatgatttcttcatggttggttctggaagagccagcctggctcctttgcctgtactccttcctccccgtagggagattcccgatgccttaggaggcattaccacttttctgtaagaattcacgggtaaggtagtcaggtagtgaatttgaggtgcccttgatgtattctatgtcaaaatcaaagacacttaaaattgcttgccatcgtgcaaaaatttgttttgaggcaaggtttttaacatctttttgtaaaatatctttggctgatttacaatcaaccctgattaaaaaattttggtttaataaatctgattggaatttggaaatgcacaaaacaattgctaaaacttcttttttaacagttgaatattttaattgcgcaggattccaatgttttgatgtatatgcaatgacatgatcttggccatggactctttgtttgaggatgccaccataacctatgtctgaagcatcagtttcgacaattttaaatgcctgtggaataggaagatacagacatttaatggattggactttgactttgatttctttaaccgtttgtgtatggaggtcagtccaaggaggcggatttttcttcagcctatcatgtaatggcttgacaatattatttaaataggggacaaattctcctacgtaatttagacaacctagaaatctttgtaactgggttttgtctaagatttggttggggaatttgctagcaaactctattgacctttcgattggaatgattgtaccttgatatatattgtgaccaaggaattgaattcgagtttagaaaaaaatgatttttgatttggagactattttgatttggagactgccaaaccattttgtttgatgatatgtatgaaggtttggagatgtttgaaatgttggtcaatgttttgggaaaagattaaaacatcatctatgtagacaatgacaaattttgaatagggattaaaaatatcgttcataattttttgaaattctgaaggggcattcttcagtcc

SEQ ID NO: 12481 - DNA, 1073 bp, Glycine max
  Gm_smallRNAprecursor_5314
taagttggttttctgggtagatgacccagcctgggttggtgacccagaagaggtagatgatttcttcatggttggttctggaagagccagcctggctcctttgcctgtactccttcctccccgtagggagattcccgatgccttaggaggcattaccacttttctgtaagaattcacgggtaaggtagtcaggtagtgaatttgaggtgcccttgatgtattctatgtcaaaatcaaagacacttaaaattgcttgccatcgtgcaaaaatttgttttgaggcaaggtttttaacatctttttgtaaaatatctttggctgatttacaatcaaccctgattaaaaaattttggtttaataaatctgattggaatttggaaatgcacaaaacaattgctaaaacttcttttttaacagttgaatattttaattgcgcaggattccaatgttttgatgtatatgcaatgacatgatcttggccatggactctttgtttgaggatgccaccataacctatgtctgaagcatcagtttcgacaattttaaatgcctgtggaataggaagatacagacatttaatggattggactttgactttgatttctttaaccgtttgtgtatggaggtcagtccaaggaggcggatttttcttcagcctatcatgtaatggcttgacaatattatttaaataggggacaaattctcctacgtaatttagacaacctagaaatctttgtaactgggttttgtctaagatttggttggggaatttgctagcaaactctattgacctttcgattggaatgattgtaccttgatatatattgtgaccaaggaattgaattcgagtttagaaaaaaatgatttttgatttggagactattttgatttggagactgccaaaccattttgtttgatgatatgtatgaaggtttggagatgtttgaaatgttggtcaatgttttgggaaaagattaaaacatcatctatgtagacaatgacaaattttgaatagggattaaaaatatcgttcataattttttgaaattctgaaggggcattcttcagtccga

SEQ ID NO: 12482 - DNA, 1178 bp, Glycine max
  Gm_smallRNAprecursor_5315
tggttggttctggaagagccagcctggctcctttgcctgtactccttcctccccgtagggagattcccgatgccttaggaggcattaccacttttctgtaagaattcacgggtaaggtagtcaggtagtgaatttgaggtgcccttgatgtattctatgtcaaaatcaaagacacttaaaattgcttgccatcgtgcaaaaatttgttttgaggcaaggtttttaacatctttttgtaaaatatctttggctgatttacaatcaaccctgattaaaaaattttggtttaataaatctgattggaatttggaaatgcacaaaacaattgctaaaacttcttttttaacagttgaatattttaattgcgcaggattccaatgttttgatgtatatgcaatgacatgatcttggccatggactctttgtttgaggatgccaccataacctatgtctgaagcatcagtttcgacaattttaaatgcctgtggaataggaagatacagacatttaatggattggactttgactttgatttctttaaccgtttgtgtatggaggtcagtccaaggaggcggatttttcttcagcctatcatgtaatggcttgacaatattatttaaataggggacaaattctcctacgtaatttagacaacctagaaatctttgtaactgggttttgtctaagatttggttggggaatttgctagcaaactctattgacctttcgattggaatgattgtaccttgatatatattgtgaccaaggaattgaattcgagtttagaaaaaaatgatttttgatttggagactattttgatttggagactgccaaaccattttgtttgatgatatgtatgaaggtttggagatgtttgaaatgttggtcaatgttttgggaaaagattaaaacatcatctatgtagacaatgacaaattttgaatagggattaaaaatatcgttcataattttttgaaattctgaaggggcattcttcagtccgaatggcatcacgttccattcatattgcccgaaaggtacagtaaacgttgttttgtacctatctgattcttggatctggatttgccaaaatccagatttcatatcaaattttgagaatatctttgcagaatttaatctgttaagaaaatcttttttttttggaataggatatcta

SEQ ID NO: 12483 - DNA, 1213 bp, Glycine max
  Gm_smallRNAprecursor_5316
aaggtttttaacatctttttgtaaaatatctttggctgatttacaatcaaccctgattaaaaaattttggtttaataaatctgattggaatttggaaatgcacaaaacaattgctaaaacttcttttttaacagttgaatattttaattgcgcaggattccaatgttttgatgtatatgcaatgacatgatcttggccatggactctttgtttgaggatgccaccataacctatgtctgaagcatcagtttcgacaattttaaatgcctgtggaataggaagatacagacatttaatggattggactttgactttgatttctttaaccgtttgtgtatggaggtcagtccaaggaggcggatttttcttcagcctatcatgtaatggcttgacaatattatttaaataggggacaaattctcctacgtaatttagacaacctagaaatctttgtaactgggttttgtctaagatttggttggggaatttgctagcaaactctattgacctttcgattggaatgattgtaccttgatatatattgtgaccaaggaattgaattcgagtttagaaaaaaatgatttttgatttggagactattttgatttggagactgccaaaccattttgtttgatgatatgtatgaaggtttggagatgtttgaaatgttggtcaatgttttgggaaaagattaaaacatcatctatgtagacaatgacaaattttgaatagggattaaaaatatcgttcataattttttgaaattctgaaggggcattcttcagtccgaatggcatcacgttccattcatattgcccgaaaggtacagtaaacgttgttttgtacctatctgattcttggatctggatttgccaaaatccagatttcatatcaaattttgagaatatctttgcagaatttaatctgttaagaaaatcttttttttttggaataggatatctaatccattgtaatgcttgatttaatggtttgtaatttatgactaagcggagtgttccacgctcaatctcagattgtttgttaacataaaaagccgcacaagaccatgggcttttgcttttccggattaggcctttatcaagcaaatccttgatttccttttgatagtattgaagaagttcttcattcatttggattggtctggcttttgtgggaatttgtttttccctaaagtctttctcataagggagat

SEQ ID NO: 12484 - DNA, 1080 bp, Glycine max
  Gm_smallRNAprecursor_5317
gatgtttgaaatgttggtcaatgttttgggaaaagattaaaacatcatctatgtagacaatgacaaattttgaatagggattaaaaatatcgttcataattttttgaaattctgaaggggcattcttcagtccgaatggcatcacgttccattcatattgcccgaaaggtacagtaaacgttgttttgtacctatctgattcttggatctggatttgccaaaatccagatttcatatcaaattttgagaatatctttgcagaatttaatctgttaagaaaatcttttttttttggaataggatatctaatccattgtaatgcttgatttaatggtttgtaatttatgactaagcggagtgttccacgctcaatctcagattgtttgttaacataaaaagccgcacaagaccatgggcttttgcttttccggattaggcctttatcaagcaaatccttgatttccttttgatagtattgaagaagttcttcattcatttggattggtctggcttttgtgggaatttgtttttccctaaagtctttctcataagggagatcgacaatatgtttctttctgtcccaaaatgcatgtggcaattcagaacaaacggtcgattcaatatgatttaataaagattgaattctttcttttacttggggttttcccagttgtatctgaatattattaaaagatacttcttcttttaagaagttaatttgattaatcttattttctataagatttatatttctagaaattggtttagtagaaaaattaaatgtaatttttcttcctaaataatttgttgttattccttcattagatatttggatgggaaacagggctctaatgaagggcgttcctaagattacttcattcttaaggttttttaccagaagaaagtttgtgttaatcttaagaccttggttttcaatgattacatttgatagcttaaaattaatttttaattttgagccgtttgccgtacttaatttttctgaggttttctcaaagaattttgtaggaattaatccttctaaaatgcagtttgaatcagcccctgtatcaaatagggcca

SEQ ID NO: 12485 - DNA, 1046 bp, Glycine max
  Gm_smallRNAprecursor_5318
acacggacaaataggaagtaagaatgcagtatgattgatgaaatgaaaatataaacttgaaaacagatataaagggcacaccggagaccggcttacaaaccccaggttttcataaacaaagaaaccgaagcggcggcagagccgcacaggatcggtgaagggagaagagagaaggatgaaaaatagaaatttattgaatctagaaagaagcgcttacaaaaatcttgtttcagagcacctctcttccgaaacctgaaaaatggctaaatgaaagggtgcctcacaacatgcttgaggactccttatatagccaaaaatctaagaccggtagttgccggtagttttgaccgagactatttgactatttgttacaagacaagtagttttgaccgggactttaatggctacaggacaggtagtattgtccagcattaattacacattaattacaaacagacggttttgtgaccgaaattaaatttaatctaaacagataccaaaacaatcatcttcgttttggtaaaagggatcttcttcgtcttcttcagcagaacttgtttcttccttctttgaggatgaagcttcttcttcctgttgtaacatttgtagaacttccttcagatttttagctaagacctcctttgatgtcgatcctgctaaaaatgctgccagatgagacttttggttcaaaaacacagaagtctctggatcagctgctttgaggaattctagatgggattggaaccatagttttacttgttctgcatccgctttggatgagtcaaattgtgtccaccattttacaaatgcgtgtctttgtagtgatggatattggtttgtctttttagtcttgctgtaacgatattgccatgagaatatccatgacagtgcaaagcttgaaaagtatttaagatctgctggaattcgtgattcctgcgaattgtattgtttcttaaattgggaaaatccttgttggaccgtttctgggaatatctctgggattggtccaaagaagtcccaccattgcaaaaaccaattgggaaaat

SEQ ID NO: 12486 - DNA, 1173 bp, Glycine max
  Gm_smallRNAprecursor_5319
tgcagtatgattgatgaaatgaaaatataaacttgaaaacagatataaagggcacaccggagaccggcttacaaaccccaggttttcataaacaaagaaaccgaagcggcggcagagccgcacaggatcggtgaagggagaagagagaaggatgaaaaatagaaatttattgaatctagaaagaagcgcttacaaaaatcttgtttcagagcacctctcttccgaaacctgaaaaatggctaaatgaaagggtgcctcacaacatgcttgaggactccttatatagccaaaaatctaagaccggtagttgccggtagttttgaccgagactatttgactatttgttacaagacaagtagttttgaccgggactttaatggctacaggacaggtagtattgtccagcattaattacacattaattacaaacagacggttttgtgaccgaaattaaatttaatctaaacagataccaaaacaatcatcttcgttttggtaaaagggatcttcttcgtcttcttcagcagaacttgtttcttccttctttgaggatgaagcttcttcttcctgttgtaacatttgtagaacttccttcagatttttagctaagacctcctttgatgtcgatcctgctaaaaatgctgccagatgagacttttggttcaaaaacacagaagtctctggatcagctgctttgaggaattctagatgggattggaaccatagttttacttgttctgcatccgctttggatgagtcaaattgtgtccaccattttacaaatgcgtgtctttgtagtgatggatattggtttgtctttttagtcttgctgtaacgatattgccatgagaatatccatgacagtgcaaagcttgaaaagtatttaagatctgctggaattcgtgattcctgcgaattgtattgtttcttaaattgggaaaatccttgttggaccgtttctgggaatatctctgggattggtccaaagaagtcccaccattgcaaaaaccaattgggaaaattgtaaattgtgttggtcttgaaatatatcagccatgaatgtttgaagcgggtattttggtgccaaaacaccttagtcatcaacgtaatcccaataggtataacctactggatcaaatggaactgaaaatctctttcctttgttcaagtccg

SEQ ID NO: 12487 - DNA, 1158 bp, Glycine max
  Gm_smallRNAprecursor_5320
gaaatgaaaatataaacttgaaaacagatataaagggcacaccggagaccggcttacaaaccccaggttttcataaacaaagaaaccgaagcggcggcagagccgcacaggatcggtgaagggagaagagagaaggatgaaaaatagaaatttattgaatctagaaagaagcgcttacaaaaatcttgtttcagagcacctctcttccgaaacctgaaaaatggctaaatgaaagggtgcctcacaacatgcttgaggactccttatatagccaaaaatctaagaccggtagttgccggtagttttgaccgagactatttgactatttgttacaagacaagtagttttgaccgggactttaatggctacaggacaggtagtattgtccagcattaattacacattaattacaaacagacggttttgtgaccgaaattaaatttaatctaaacagataccaaaacaatcatcttcgttttggtaaaagggatcttcttcgtcttcttcagcagaacttgtttcttccttctttgaggatgaagcttcttcttcctgttgtaacatttgtagaacttccttcagatttttagctaagacctcctttgatgtcgatcctgctaaaaatgctgccagatgagacttttggttcaaaaacacagaagtctctggatcagctgctttgaggaattctagatgggattggaaccatagttttacttgttctgcatccgctttggatgagtcaaattgtgtccaccattttacaaatgcgtgtctttgtagtgatggatattggtttgtctttttagtcttgctgtaacgatattgccatgagaatatccatgacagtgcaaagcttgaaaagtatttaagatctgctggaattcgtgattcctgcgaattgtattgtttcttaaattgggaaaatccttgttggaccgtttctgggaatatctctgggattggtccaaagaagtcccaccattgcaaaaaccaattgggaaaattgtaaattgtgttggtcttgaaatatatcagccatgaatgtttgaagcgggtattttggtgccaaaacaccttagtcatcaacgtaatcccaataggtataacctactggatcaaatggaactgaaaatctctttcctttgttcaagtccg

SEQ ID NO: 12488 - DNA, 1031 bp, Glycine max
  Gm_smallRNAprecursor_5321
acaagtagttttgaccgggactttaatggctacaggacaggtagtattgtccagcattaattacacattaattacaaacagacggttttgtgaccgaaattaaatttaatctaaacagataccaaaacaatcatcttcgttttggtaaaagggatcttcttcgtcttcttcagcagaacttgtttcttccttctttgaggatgaagcttcttcttcctgttgtaacatttgtagaacttccttcagatttttagctaagacctcctttgatgtcgatcctgctaaaaatgctgccagatgagacttttggttcaaaaacacagaagtctctggatcagctgctttgaggaattctagatgggattggaaccatagttttacttgttctgcatccgctttggatgagtcaaattgtgtccaccattttacaaatgcgtgtctttgtagtgatggatattggtttgtctttttagtcttgctgtaacgatattgccatgagaatatccatgacagtgcaaagcttgaaaagtatttaagatctgctggaattcgtgattcctgcgaattgtattgtttcttaaattgggaaaatccttgttggaccgtttctgggaatatctctgggattggtccaaagaagtcccaccattgcaaaaaccaattgggaaaattgtaaattgtgttggtcttgaaatatatcagccatgaatgtttgaagcgggtattttggtgccaaaacaccttagtcatcaacgtaatcccaataggtataacctactggatcaaatggaactgaaaatctctttcctttgttcaagtccgaaccaaagtgtcttggttgaagaacttttagtatttggatggttgagtgggtgtttaaggtttggtcttttggatctttgaaatgtttgatagatactgagtttgaatctaccaaaatcaattcataaaaagttcttgtcttcaggatagtggttggtttgtagtgaaatcctggtgggaaagccttggccgtcgccttgaagggattt

SEQ ID NO: 12489 - DNA, 1031 bp, Glycine max; identical to SEQ ID NO: 12488
  Gm_smallRNAprecursor_5322

SEQ ID NO: 12490 - DNA, 1114 bp, Glycine max
  Gm_smallRNAprecursor_5323
ggactttaatggctacaggacaggtagtattgtccagcattaattacacattaattacaaacagacggttttgtgaccgaaattaaatttaatctaaacagataccaaaacaatcatcttcgttttggtaaaagggatcttcttcgtcttcttcagcagaacttgtttcttccttctttgaggatgaagcttcttcttcctgttgtaacatttgtagaacttccttcagatttttagctaagacctcctttgatgtcgatcctgctaaaaatgctgccagatgagacttttggttcaaaaacacagaagtctctggatcagctgctttgaggaattctagatgggattggaaccatagttttacttgttctgcatccgctttggatgagtcaaattgtgtccaccattttacaaatgcgtgtctttgtagtgatggatattggtttgtctttttagtcttgctgtaacgatattgccatgagaatatccatgacagtgcaaagcttgaaaagtatttaagatctgctggaattcgtgattcctgcgaattgtattgtttcttaaattgggaaaatccttgttggaccgtttctgggaatatctctgggattggtccaaagaagtcccaccattgcaaaaaccaattgggaaaattgtaaattgtgttggtcttgaaatatatcagccatgaatgtttgaagcgggtattttggtgccaaaacaccttagtcatcaacgtaatcccaataggtataacctactggatcaaatggaactgaaaatctctttcctttgttcaagtccgaaccaaagtgtcttggttgaagaacttttagtatttggatggttgagtgggtgtttaaggtttggtcttttggatctttgaaatgtttgatagatactgagtttgaatctaccaaaatcaattcataaaaagttcttgtcttcaggatagtggttggtttgtagtgaaatcctggtgggaaagccttggccgtcgccttgaagggatttttgtcccaaaattcaggttccatatgcaaaacagttaacaatttatttttataaatataattgttagtttgtttggtaggtggtgtttgagctttggcta

SEQ ID NO: 12491 - DNA, 1146 bp, Glycine max
  Gm_smallRNAprecursor_5324
tacaggacaggtagtattgtccagcattaattacacattaattacaaacagacggttttgtgaccgaaattaaatttaatctaaacagataccaaaacaatcatcttcgttttggtaaaagggatcttcttcgtcttcttcagcagaacttgtttcttccttctttgaggatgaagcttcttcttcctgttgtaacatttgtagaacttccttcagatttttagctaagacctcctttgatgtcgatcctgctaaaaatgctgccagatgagacttttggttcaaaaacacagaagtctctggatcagctgctttgaggaattctagatgggattggaaccatagttttacttgttctgcatccgctttggatgagtcaaattgtgtccaccattttacaaatgcgtgtctttgtagtgatggatattggtttgtctttttagtcttgctgtaacgatattgccatgagaatatccatgacagtgcaaagcttgaaaagtatttaagatctgctggaattcgtgattcctgcgaattgtattgtttcttaaattgggaaaatccttgttggaccgtttctgggaatatctctgggattggtccaaagaagtcccaccattgcaaaaaccaattgggaaaattgtaaattgtgttggtcttgaaatatatcagccatgaatgtttgaagcgggtattttggtgccaaaacaccttagtcatcaacgtaatcccaataggtataacctactggatcaaatggaactgaaaatctctttcctttgttcaagtccgaaccaaagtgtcttggttgaagaacttttagtatttggatggttgagtgggtgtttaaggtttggtcttttggatctttgaaatgtttgatagatactgagtttgaatctaccaaaatcaattcataaaaagttcttgtcttcaggatagtggttggtttgtagtgaaatcctggtgggaaagccttggccgtcgccttgaagggatttttgtcccaaaattcaggttccatatgcaaaacagttaacaatttatttttataaatataattgttagtttgtttggtaggtggtgtttgagctttggctaaaggtagttttcctttagtattggtggctgttttggtcattgacg

SEQ ID NO: 12492 - DNA, 1146 bp, Glycine max; identical to SEQ ID NO: 12491
  Gm_smallRNAprecursor_5325

SEQ ID NO: 12493 - DNA, 1147 bp, Glycine max
  Gm_smallRNAprecursor_5326
tacaggacaggtagtattgtccagcattaattacacattaattacaaacagacggttttgtgaccgaaattaaatttaatctaaacagataccaaaacaatcatcttcgttttggtaaaagggatcttcttcgtcttcttcagcagaacttgtttcttccttctttgaggatgaagcttcttcttcctgttgtaacatttgtagaacttccttcagatttttagctaagacctcctttgatgtcgatcctgctaaaaatgctgccagatgagacttttggttcaaaaacacagaagtctctggatcagctgctttgaggaattctagatgggattggaaccatagttttacttgttctgcatccgctttggatgagtcaaattgtgtccaccattttacaaatgcgtgtctttgtagtgatggatattggtttgtctttttagtcttgctgtaacgatattgccatgagaatatccatgacagtgcaaagcttgaaaagtatttaagatctgctggaattcgtgattcctgcgaattgtattgtttcttaaattgggaaaatccttgttggaccgtttctgggaatatctctgggattggtccaaagaagtcccaccattgcaaaaaccaattgggaaaattgtaaattgtgttggtcttgaaatatatcagccatgaatgtttgaagcgggtattttggtgccaaaacaccttagtcatcaacgtaatcccaataggtataacctactggatcaaatggaactgaaaatctctttcctttgttcaagtccgaaccaaagtgtcttggttgaagaacttttagtatttggatggttgagtgggtgtttaaggtttggtcttttggatctttgaaatgtttgatagatactgagtttgaatctaccaaaatcaattcataaaaagttcttgtcttcaggatagtggttggtttgtagtgaaatcctggtgggaaagccttggccgtcgccttgaagggatttttgtcccaaaattcaggttccatatgcaaaacagttaacaatttatttttataaatataattgttagtttgtttggtaggtggtgtttgagctttggctaaaggtagttttcctttagtattggtggctgttttggtcattgacgc

SEQ ID NO: 12494 - DNA, 1147 bp, Glycine max; identical to SEQ ID NO: 12493
  Gm_smallRNAprecursor_5327

SEQ ID NO: 12495 - DNA, 1241 bp, Glycine max
  Gm_smallRNAprecursor_5328
tacaggacaggtagtattgtccagcattaattacacattaattacaaacagacggttttgtgaccgaaattaaatttaatctaaacagataccaaaacaatcatcttcgttttggtaaaagggatcttcttcgtcttcttcagcagaacttgtttcttccttctttgaggatgaagcttcttcttcctgttgtaacatttgtagaacttccttcagatttttagctaagacctcctttgatgtcgatcctgctaaaaatgctgccagatgagacttttggttcaaaaacacagaagtctctggatcagctgctttgaggaattctagatgggattggaaccatagttttacttgttctgcatccgctttggatgagtcaaattgtgtccaccattttacaaatgcgtgtctttgtagtgatggatattggtttgtctttttagtcttgctgtaacgatattgccatgagaatatccatgacagtgcaaagcttgaaaagtatttaagatctgctggaattcgtgattcctgcgaattgtattgtttcttaaattgggaaaatccttgttggaccgtttctgggaatatctctgggattggtccaaagaagtcccaccattgcaaaaaccaattgggaaaattgtaaattgtgttggtcttgaaatatatcagccatgaatgtttgaagcgggtattttggtgccaaaacaccttagtcatcaacgtaatcccaataggtataacctactggatcaaatggaactgaaaatctctttcctttgttcaagtccgaaccaaagtgtcttggttgaagaacttttagtatttggatggttgagtgggtgtttaaggtttggtcttttggatctttgaaatgtttgatagatactgagtttgaatctaccaaaatcaattcataaaaagttcttgtcttcaggatagtggttggtttgtagtgaaatcctggtgggaaagccttggccgtcgccttgaagggatttttgtcccaaaattcaggttccatatgcaaaacagttaacaatttatttttataaatataattgttagtttgtttggtaggtggtgtttgagctttggctaaaggtagttttcctttagtattggtggctgttttggtcattgacgcattttggatcattgtttgtaaatttgattcagattcatcatcagattctgaggcaatgtctgcccaagattttttgattatttttggaaatttg

SEQ ID NO: 12496 - DNA, 1241 bp, Glycine max; identical to SEQ ID NO: 12495
  Gm_smallRNAprecursor_5329

SEQ ID NO: 12497 - DNA, 1133 bp, Glycine max
  Gm_smallRNAprecursor_5330
tcatcttcgttttggtaaaagggatcttcttcgtcttcttcagcagaacttgtttcttccttctttgaggatgaagcttcttcttcctgttgtaacatttgtagaacttccttcagatttttagctaagacctcctttgatgtcgatcctgctaaaaatgctgccagatgagacttttggttcaaaaacacagaagtctctggatcagctgctttgaggaattctagatgggattggaaccatagttttacttgttctgcatccgctttggatgagtcaaattgtgtccaccattttacaaatgcgtgtctttgtagtgatggatattggtttgtctttttagtcttgctgtaacgatattgccatgagaatatccatgacagtgcaaagcttgaaaagtatttaagatctgctggaattcgtgattcctgcgaattgtattgtttcttaaattgggaaaatccttgttggaccgtttctgggaatatctctgggattggtccaaagaagtcccaccattgcaaaaaccaattgggaaaattgtaaattgtgttggtcttgaaatatatcagccatgaatgtttgaagcgggtattttggtgccaaaacaccttagtcatcaacgtaatcccaataggtataacctactggatcaaatggaactgaaaatctctttcctttgttcaagtccgaaccaaagtgtcttggttgaagaacttttagtatttggatggttgagtgggtgtttaaggtttggtcttttggatctttgaaatgtttgatagatactgagtttgaatctaccaaaatcaattcataaaaagttcttgtcttcaggatagtggttggtttgtagtgaaatcctggtgggaaagccttggccgtcgccttgaagggatttttgtcccaaaattcaggttccatatgcaaaacagttaacaatttatttttataaatataattgttagtttgtttggtaggtggtgtttgagctttggctaaaggtagttttcctttagtattggtggctgttttggtcattgacgcattttggatcattgtttgtaaatttgattcagattcatcatcagattctgaggcaatgtctgcccaagattttttgattatttttg

SEQ ID NO: 12498 - DNA, 1249 bp, Glycine max
  Gm_smallRNAprecursor_5331
tcatcttcgttttggtaaaagggatcttcttcgtcttcttcagcagaacttgtttcttccttctttgaggatgaagcttcttcttcctgttgtaacatttgtagaacttccttcagatttttagctaagacctcctttgatgtcgatcctgctaaaaatgctgccagatgagacttttggttcaaaaacacagaagtctctggatcagctgctttgaggaattctagatgggattggaaccatagttttacttgttctgcatccgctttggatgagtcaaattgtgtccaccattttacaaatgcgtgtctttgtagtgatggatattggtttgtctttttagtcttgctgtaacgatattgccatgagaatatccatgacagtgcaaagcttgaaaagtatttaagatctgctggaattcgtgattcctgcgaattgtattgtttcttaaattgggaaaatccttgttggaccgtttctgggaatatctctgggattggtccaaagaagtcccaccattgcaaaaaccaattgggaaaattgtaaattgtgttggtcttgaaatatatcagccatgaatgtttgaagcgggtattttggtgccaaaacaccttagtcatcaacgtaatcccaataggtataacctactggatcaaatggaactgaaaatctctttcctttgttcaagtccgaaccaaagtgtcttggttgaagaacttttagtatttggatggttgagtgggtgtttaaggtttggtcttttggatctttgaaatgtttgatagatactgagtttgaatctaccaaaatcaattcataaaaagttcttgtcttcaggatagtggttggtttgtagtgaaatcctggtgggaaagccttggccgtcgccttgaagggatttttgtcccaaaattcaggttccatatgcaaaacagttaacaatttatttttataaatataattgttagtttgtttggtaggtggtgtttgagctttggctaaaggtagttttcctttagtattggtggctgttttggtcattgacgcattttggatcattgtttgtaaatttgattcagattcatcatcagattctgaggcaatgtctgcccaagattttttgattatttttggaaatttggtcagacccatgtcttgaagggcctgaagggtttcaattggccatgcatagtcggccgatgtttgtttggcggttgccggtttgggagattcctgagtggatggctca

SEQ ID NO: 12499 - DNA, 1152 bp, Glycine max
  Gm_smallRNAprecursor_5332
ggatgaagcttcttcttcctgttgtaacatttgtagaacttccttcagatttttagctaagacctcctttgatgtcgatcctgctaaaaatgctgccagatgagacttttggttcaaaaacacagaagtctctggatcagctgctttgaggaattctagatgggattggaaccatagttttacttgttctgcatccgctttggatgagtcaaattgtgtccaccattttacaaatgcgtgtctttgtagtgatggatattggtttgtctttttagtcttgctgtaacgatattgccatgagaatatccatgacagtgcaaagcttgaaaagtatttaagatctgctggaattcgtgattcctgcgaattgtattgtttcttaaattgggaaaatccttgttggaccgtttctgggaatatctctgggattggtccaaagaagtcccaccattgcaaaaaccaattgggaaaattgtaaattgtgttggtcttgaaatatatcagccatgaatgtttgaagcgggtattttggtgccaaaacaccttagtcatcaacgtaatcccaataggtataacctactggatcaaatggaactgaaaatctctttcctttgttcaagtccgaaccaaagtgtcttggttgaagaacttttagtatttggatggttgagtgggtgtttaaggtttggtcttttggatctttgaaatgtttgatagatactgagtttgaatctaccaaaatcaattcataaaaagttcttgtcttcaggatagtggttggtttgtagtgaaatcctggtgggaaagccttggccgtcgccttgaagggatttttgtcccaaaattcaggttccatatgcaaaacagttaacaatttatttttataaatataattgttagtttgtttggtaggtggtgtttgagctttggctaaaggtagttttcctttagtattggtggctgttttggtcattgacgcattttggatcattgtttgtaaatttgattcagattcatcatcagattctgaggcaatgtctgcccaagattttttgattatttttggaaatttggtcagacccatgtcttgaagggcctgaagggtttcaattggccatgcatagtcggccgatgtttgtttggcggttgccg

SEQ ID NO: 12500 - DNA, 1077 bp, Glycine max
  Gm_smallRNAprecursor_5333
tcctttgatgtcgatcctgctaaaaatgctgccagatgagacttttggttcaaaaacacagaagtctctggatcagctgctttgaggaattctagatgggattggaaccatagttttacttgttctgcatccgctttggatgagtcaaattgtgtccaccattttacaaatgcgtgtctttgtagtgatggatattggtttgtctttttagtcttgctgtaacgatattgccatgagaatatccatgacagtgcaaagcttgaaaagtatttaagatctgctggaattcgtgattcctgcgaattgtattgtttcttaaattgggaaaatccttgttggaccgtttctgggaatatctctgggattggtccaaagaagtcccaccattgcaaaaaccaattgggaaaattgtaaattgtgttggtcttgaaatatatcagccatgaatgtttgaagcgggtattttggtgccaaaacaccttagtcatcaacgtaatcccaataggtataacctactggatcaaatggaactgaaaatctctttcctttgttcaagtccgaaccaaagtgtcttggttgaagaacttttagtatttggatggttgagtgggtgtttaaggtttggtcttttggatctttgaaatgtttgatagatactgagtttgaatctaccaaaatcaattcataaaaagttcttgtcttcaggatagtggttggtttgtagtgaaatcctggtgggaaagccttggccgtcgccttgaagggatttttgtcccaaaattcaggttccatatgcaaaacagttaacaatttatttttataaatataattgttagtttgtttggtaggtggtgtttgagctttggctaaaggtagttttcctttagtattggtggctgttttggtcattgacgcattttggatcattgtttgtaaatttgattcagattcatcatcagattctgaggcaatgtctgcccaagattttttgattatttttggaaatttggtcagacccatgtcttgaagggcctgaagggtttcaattggccatgcatagtcggccgatgtttgttt

SEQ ID NO: 12501 - DNA, 1174 bp, Glycine max
  Gm_smallRNAprecursor_5334
tgaagcgggtattttggtgccaaaacaccttagtcatcaacgtaatcccaataggtataacctactggatcaaatggaactgaaaatctctttcctttgttcaagtccgaaccaaagtgtcttggttgaagaacttttagtatttggatggttgagtgggtgtttaaggtttggtcttttggatctttgaaatgtttgatagatactgagtttgaatctaccaaaatcaattcataaaaagttcttgtcttcaggatagtggttggtttgtagtgaaatcctggtgggaaagccttggccgtcgccttgaagggatttttgtcccaaaattcaggttccatatgcaaaacagttaacaatttatttttataaatataattgttagtttgtttggtaggtggtgtttgagctttggctaaaggtagttttcctttagtattggtggctgttttggtcattgacgcattttggatcattgtttgtaaatttgattcagattcatcatcagattctgaggcaatgtctgcccaagattttttgattatttttggaaatttggtcagacccatgtcttgaagggcctgaagggtttcaattggccatgcatagtcggccgatgtttgtttggcggttgccggtttgggagattcctgagtggatggctcaggtttgattgaggcaatctgggttgatgacccttctaaattggttttctgggtagatgacccagcctgggttggtgacccagaagaggtagatgatttcttgatggttggctctggaagagccagcctggctcctttgcctgtactccttcctccccgtagggagattcccgatgccttaggaggcattaccacttttctgtaagaattcacgggtaaggtagtcaggtagtgaatttgaggtgcccttgatgtattctatgtcaaaatcaaagacacttaaaattgcttgccatcgtgcaaaaatttgttttgaggcaaggtttttaacatctttttgtaaaatatctttggctgatttacaatcaaccctgattaaaaatttttggtttaataaatccgattgaaatttggaaatgcacaaaacaattgctaaaacctcttttttaacagttgaatattttaattgtgcaggattccaatgttttgatgtatatgcaatgacatga

SEQ ID NO: 12502 - DNA, 1173 bp, Glycine max
  Gm_smallRNAprecursor_5335
gaagcgggtattttggtgccaaaacaccttagtcatcaacgtaatcccaataggtataacctactggatcaaatggaactgaaaatctctttcctttgttcaagtccgaaccaaagtgtcttggttgaagaacttttagtatttggatggttgagtgggtgtttaaggtttggtcttttggatctttgaaatgtttgatagatactgagtttgaatctaccaaaatcaattcataaaaagttcttgtcttcaggatagtggttggtttgtagtgaaatcctggtgggaaagccttggccgtcgccttgaagggatttttgtcccaaaattcaggttccatatgcaaaacagttaacaatttatttttataaatataattgttagtttgtttggtaggtggtgtttgagctttggctaaaggtagttttcctttagtattggtggctgttttggtcattgacgcattttggatcattgtttgtaaatttgattcagattcatcatcagattctgaggcaatgtctgcccaagattttttgattatttttggaaatttggtcagacccatgtcttgaagggcctgaagggtttcaattggccatgcatagtcggccgatgtttgtttggcggttgccggtttgggagattcctgagtggatggctcaggtttgattgaggcaatctgggttgatgacccttctaaattggttttctgggtagatgacccagcctgggttggtgacccagaagaggtagatgatttcttgatggttggctctggaagagccagcctggctcctttgcctgtactccttcctccccgtagggagattcccgatgccttaggaggcattaccacttttctgtaagaattcacgggtaaggtagtcaggtagtgaatttgaggtgcccttgatgtattctatgtcaaaatcaaagacacttaaaattgcttgccatcgtgcaaaaatttgttttgaggcaaggtttttaacatctttttgtaaaatatctttggctgatttacaatcaaccctgattaaaaatttttggtttaataaatccgattgaaatttggaaatgcacaaaacaattgctaaaacctcttttttaacagttgaatattttaattgtgcaggattccaatgttttgatgtatatgcaatgacatga

SEQ ID NO: 12503 - DNA, 1176 bp, Glycine max
  Gm_smallRNAprecursor_5336
gaagcgggtattttggtgccaaaacaccttagtcatcaacgtaatcccaataggtataacctactggatcaaatggaactgaaaatctctttcctttgttcaagtccgaaccaaagtgtcttggttgaagaacttttagtatttggatggttgagtgggtgtttaaggtttggtcttttggatctttgaaatgtttgatagatactgagtttgaatctaccaaaatcaattcataaaaagttcttgtcttcaggatagtggttggtttgtagtgaaatcctggtgggaaagccttggccgtcgccttgaagggatttttgtcccaaaattcaggttccatatgcaaaacagttaacaatttatttttataaatataattgttagtttgtttggtaggtggtgtttgagctttggctaaaggtagttttcctttagtattggtggctgttttggtcattgacgcattttggatcattgtttgtaaatttgattcagattcatcatcagattctgaggcaatgtctgcccaagattttttgattatttttggaaatttggtcagacccatgtcttgaagggcctgaagggtttcaattggccatgcatagtcggccgatgtttgtttggcggttgccggtttgggagattcctgagtggatggctcaggtttgattgaggcaatctgggttgatgacccttctaaattggttttctgggtagatgacccagcctgggttggtgacccagaagaggtagatgatttcttgatggttggctctggaagagccagcctggctcctttgcctgtactccttcctccccgtagggagattcccgatgccttaggaggcattaccacttttctgtaagaattcacgggtaaggtagtcaggtagtgaatttgaggtgcccttgatgtattctatgtcaaaatcaaagacacttaaaattgcttgccatcgtgcaaaaatttgttttgaggcaaggtttttaacatctttttgtaaaatatctttggctgatttacaatcaaccctgattaaaaatttttggtttaataaatccgattgaaatttggaaatgcacaaaacaattgctaaaacctcttttttaacagttgaatattttaattgtgcaggattccaatgttttgatgtatatgcaatgacatgatct

SEQ ID NO: 12504 - DNA, 1129 bp, Glycine max
  Gm_smallRNAprecursor_5337
atgcaaaacagttaacaatttatttttataaatataattgttagtttgtttggtaggtggtgtttgagctttggctaaaggtagttttcctttagtattggtggctgttttggtcattgacgcattttggatcattgtttgtaaatttgattcagattcatcatcagattctgaggcaatgtctgcccaagattttttgattatttttggaaatttggtcagacccatgtcttgaagggcctgaagggtttcaattggccatgcatagtcggccgatgtttgtttggcggttgccggtttgggagattcctgagtggatggctcaggtttgattgaggcaatctgggttgatgacccttctaaattggttttctgggtagatgacccagcctgggttggtgacccagaagaggtagatgatttcttgatggttggctctggaagagccagcctggctcctttgcctgtactccttcctccccgtagggagattcccgatgccttaggaggcattaccacttttctgtaagaattcacgggtaaggtagtcaggtagtgaatttgaggtgcccttgatgtattctatgtcaaaatcaaagacacttaaaattgcttgccatcgtgcaaaaatttgttttgaggcaaggtttttaacatctttttgtaaaatatctttggctgatttacaatcaaccctgattaaaaatttttggtttaataaatccgattgaaatttggaaatgcacaaaacaattgctaaaacctcttttttaacagttgaatattttaattgtgcaggattccaatgttttgatgtatatgcaatgacatgatcttggccacggactctttgtttgaggatgccaccataacctatgtctgaagcatcagtttcgacaattttaaatgcctgtggaataggaagatacagacatttaatggattggactttgactttgatttctttaaccgtttgtgtatggaggtcagaccaaggaggcggatttttcttcagcctatcatgtaatggcttgacaatattatttaaataggggacaaattctcctacgtaatttagacaacctagaaatctttgtaactgggttttgtctaagatttggttggggaa

SEQ ID NO: 12505 - DNA, 1115 bp, Glycine max
  Gm_smallRNAprecursor_5338
acaatttatttttataaatataattgttagtttgtttggtaggtggtgtttgagctttggctaaaggtagttttcctttagtattggtggctgttttggtcattgacgcattttggatcattgtttgtaaatttgattcagattcatcatcagattctgaggcaatgtctgcccaagattttttgattatttttggaaatttggtcagacccatgtcttgaagggcctgaagggtttcaattggccatgcatagtcggccgatgtttgtttggcggttgccggtttgggagattcctgagtggatggctcaggtttgattgaggcaatctgggttgatgacccttctaaattggttttctgggtagatgacccagcctgggttggtgacccagaagaggtagatgatttcttgatggttggctctggaagagccagcctggctcctttgcctgtactccttcctccccgtagggagattcccgatgccttaggaggcattaccacttttctgtaagaattcacgggtaaggtagtcaggtagtgaatttgaggtgcccttgatgtattctatgtcaaaatcaaagacacttaaaattgcttgccatcgtgcaaaaatttgttttgaggcaaggtttttaacatctttttgtaaaatatctttggctgatttacaatcaaccctgattaaaaatttttggtttaataaatccgattgaaatttggaaatgcacaaaacaattgctaaaacctcttttttaacagttgaatattttaattgtgcaggattccaatgttttgatgtatatgcaatgacatgatcttggccacggactctttgtttgaggatgccaccataacctatgtctgaagcatcagtttcgacaattttaaatgcctgtggaataggaagatacagacatttaatggattggactttgactttgatttctttaaccgtttgtgtatggaggtcagaccaaggaggcggatttttcttcagcctatcatgtaatggcttgacaatattatttaaataggggacaaattctcctacgtaatttagacaacctagaaatctttgtaactgggttttgtctaagatttggttggggaa

SEQ ID NO: 12506 - DNA, 1071 bp, Glycine max
  Gm_smallRNAprecursor_5339
taaattggttttctgggtagatgacccagcctgggttggtgacccagaagaggtagatgatttcttgatggttggctctggaagagccagcctggctcctttgcctgtactccttcctccccgtagggagattcccgatgccttaggaggcattaccacttttctgtaagaattcacgggtaaggtagtcaggtagtgaatttgaggtgcccttgatgtattctatgtcaaaatcaaagacacttaaaattgcttgccatcgtgcaaaaatttgttttgaggcaaggtttttaacatctttttgtaaaatatctttggctgatttacaatcaaccctgattaaaaatttttggtttaataaatccgattgaaatttggaaatgcacaaaacaattgctaaaacctcttttttaacagttgaatattttaattgtgcaggattccaatgttttgatgtatatgcaatgacatgatcttggccacggactctttgtttgaggatgccaccataacctatgtctgaagcatcagtttcgacaattttaaatgcctgtggaataggaagatacagacatttaatggattggactttgactttgatttctttaaccgtttgtgtatggaggtcagaccaaggaggcggatttttcttcagcctatcatgtaatggcttgacaatattatttaaataggggacaaattctcctacgtaatttagacaacctagaaatctttgtaactgggttttgtctaagatttggttggggaatttgctagcaaactctattgacctttcgattggaatgattgtaccttgatatatattgtgaccaaggaatcgaattcgagtttggaaaagattgatttttgatttggagactgccaaaccattttgtttgatgatatgtatgaaggtttggagatgtttgaaatgttggtcaatgttttgggaaaagattaaaacatcatctatgtagacaatgacaaattttgaataaggattaaaaatatcgttcataattttttgaaactctgaaggggcattcttcagtccgaatggcatcacgttcc

SEQ ID NO: 12507 - DNA, 1073 bp, Glycine max
  Gm_smallRNAprecursor_5340
taaattggttttctgggtagatgacccagcctgggttggtgacccagaagaggtagatgatttcttgatggttggctctggaagagccagcctggctcctttgcctgtactccttcctccccgtagggagattcccgatgccttaggaggcattaccacttttctgtaagaattcacgggtaaggtagtcaggtagtgaatttgaggtgcccttgatgtattctatgtcaaaatcaaagacacttaaaattgcttgccatcgtgcaaaaatttgttttgaggcaaggtttttaacatctttttgtaaaatatctttggctgatttacaatcaaccctgattaaaaatttttggtttaataaatccgattgaaatttggaaatgcacaaaacaattgctaaaacctcttttttaacagttgaatattttaattgtgcaggattccaatgttttgatgtatatgcaatgacatgatcttggccacggactctttgtttgaggatgccaccataacctatgtctgaagcatcagtttcgacaattttaaatgcctgtggaataggaagatacagacatttaatggattggactttgactttgatttctttaaccgtttgtgtatggaggtcagaccaaggaggcggatttttcttcagcctatcatgtaatggcttgacaatattatttaaataggggacaaattctcctacgtaatttagacaacctagaaatctttgtaactgggttttgtctaagatttggttggggaatttgctagcaaactctattgacctttcgattggaatgattgtaccttgatatatattgtgaccaaggaatcgaattcgagtttggaaaagattgatttttgatttggagactgccaaaccattttgtttgatgatatgtatgaaggtttggagatgtttgaaatgttggtcaatgttttgggaaaagattaaaacatcatctatgtagacaatgacaaattttgaataaggattaaaaatatcgttcataattttttgaaactctgaaggggcattcttcagtccgaatggcatcacgttccat

SEQ ID NO: 12508 - DNA, 1178 bp, Glycine max
  Gm_smallRNAprecursor_5341
tggttggctctggaagagccagcctggctcctttgcctgtactccttcctccccgtagggagattcccgatgccttaggaggcattaccacttttctgtaagaattcacgggtaaggtagtcaggtagtgaatttgaggtgcccttgatgtattctatgtcaaaatcaaagacacttaaaattgcttgccatcgtgcaaaaatttgttttgaggcaaggtttttaacatctttttgtaaaatatctttggctgatttacaatcaaccctgattaaaaatttttggtttaataaatccgattgaaatttggaaatgcacaaaacaattgctaaaacctcttttttaacagttgaatattttaattgtgcaggattccaatgttttgatgtatatgcaatgacatgatcttggccacggactctttgtttgaggatgccaccataacctatgtctgaagcatcagtttcgacaattttaaatgcctgtggaataggaagatacagacatttaatggattggactttgactttgatttctttaaccgtttgtgtatggaggtcagaccaaggaggcggatttttcttcagcctatcatgtaatggcttgacaatattatttaaataggggacaaattctcctacgtaatttagacaacctagaaatctttgtaactgggttttgtctaagatttggttggggaatttgctagcaaactctattgacctttcgattggaatgattgtaccttgatatatattgtgaccaaggaatcgaattcgagtttggaaaagattgatttttgatttggagactgccaaaccattttgtttgatgatatgtatgaaggtttggagatgtttgaaatgttggtcaatgttttgggaaaagattaaaacatcatctatgtagacaatgacaaattttgaataaggattaaaaatatcgttcataattttttgaaactctgaaggggcattcttcagtccgaatggcatcacgttccattcatattgcccgaaaggtacaggaaacgttgttttgtacctatctgattcttggatttggatttgccaaaatccagatttcatatcaaattttgaaaatatctttgcagaatttaatctgttaagcaaatcttttttgtttggaataggatatctaatccattgtaatgcttg

SEQ ID NO: 12509 - DNA, 1080 bp, Glycine max
  Gm_smallRNAprecursor_5342
gatgtttgaaatgttggtcaatgttttgggaaaagattaaaacatcatctatgtagacaatgacaaattttgaataaggattaaaaatatcgttcataattttttgaaactctgaaggggcattcttcagtccgaatggcatcacgttccattcatattgcccgaaaggtacaggaaacgttgttttgtacctatctgattcttggatttggatttgccaaaatccagatttcatatcaaattttgaaaatatctttgcagaatttaatctgttaagcaaatcttttttgtttggaataggatatctaatccattgtaatgcttgatttaatggtttgtaatttatgactaagcggggtgttccacgctcaatctcagattgtttgttaacataaaaagccgcacaagaccatgggcttttgcttttccggattaggcctttatcaagcaaatccttgatttccttttgacagtattgaagaagttcttcattcatttggattggtctggcttttgtgggaatttgtttttccctaaagtctttctcataagggagatcgacaatatgtttctttctgtcccaaaatgcatgtggcaattcagaacaaacggtcgattcaatatgatttaataaagattgaattctttcttttacttggggttttcccagttgtatctgaatattattaaaagatacttcttcttttaagaagttaatttgattaatcttattttctataagatttatatttctggaaattggtttagtagaaaaattaaatataatttttcttcctaaataatttgtggttattccttcattagatatttggatgggaaacagggctctaatgaagggcgttcctaagattacttcattcttaaggttttttatcaaaagaaagtttgttttaatcttaagaccttggttttcaattattgcatttgatagcttaaaattaatttttaattttgagccgtttgccgtacttaatttttctgaggttttctcaaagaattttgtaggaattaatccttctaaaatgcagtttgaatcagcccctgtatcaaatagggcca

SEQ ID NO: 12510 - DNA, 1076 bp, Glycine max
  Gm_smallRNAprecursor_5343
ccatctttcgggaagagttacttcatcccattttatttttctcgggagagacacgttagcctttgtcatatcagtgataaacaaggttgtttctcctttttgaggttttaacaggactctagatgcacaagtattcatgaccttgtactggatcctataaattaaggctgctgggattgatccttctttcatgtcaaggccatgaaagtgaatgtttaagaatagagagtcaagaatgtttctgtccatcagactcactgttttttttggataacaattaaaatatattggaccttgtcctaggctggtttcgactgttccaattagggagtcttcaaattgattatgcctaatatctcttagacacattaaaactgctgcatctatgcccatatcaattaagggcttgatggctacttgtacacaaccgatgtgtagatatttatacttacggctatgttcataaattgaagtttttgaaagtagatgaaattcttcccctatatcttgtcctagaggaatattgttttttactgttttgattatgtaatcaaagttgtgtttgtctttaattgtttcaggaacgtatagttgatcctgagggatttctggaatgttccagtcatccatgttttgattaatatcttcgaatcggacttcctcatcgaagagattgtgttttggggcgacctcttgggtctggttatcttgatcatttaagagattggtgtttcttgaagaagatgaagtggaggaatttgagcgaaaagagatacgggaaaaggatcgcaataatctagacatgattaaaacattctctaatatctttgccttcatttggttccataggaatctttccataaggctatatgttacagaacttcttggatctgaataaatgaaaaagaagattttttttttcacagacaatatagtttgaacattactcctatagccaccagtatattatgtctcaatattttatttgaacaatacaccttagccttactgccctttctcatccacgggacttactgctacagtatcattcaactaaaatatcagactgctgtgct

SEQ ID NO: 12511 - DNA, 1159 bp, Glycine max
  Gm_smallRNAprecursor_5344
ccatctttcgggaagagttacttcatcccattttatttttctcgggagagacacgttagcctttgtcatatcagtgataaacaaggttgtttctcctttttgaggttttaacaggactctagatgcacaagtattcatgaccttgtactggatcctataaattaaggctgctgggattgatccttctttcatgtcaaggccatgaaagtgaatgtttaagaatagagagtcaagaatgtttctgtccatcagactcactgttttttttggataacaattaaaatatattggaccttgtcctaggctggtttcgactgttccaattagggagtcttcaaattgattatgcctaatatctcttagacacattaaaactgctgcatctatgcccatatcaattaagggcttgatggctacttgtacacaaccgatgtgtagatatttatacttacggctatgttcataaattgaagtttttgaaagtagatgaaattcttcccctatatcttgtcctagaggaatattgttttttactgttttgattatgtaatcaaagttgtgtttgtctttaattgtttcaggaacgtatagttgatcctgagggatttctggaatgttccagtcatccatgttttgattaatatcttcgaatcggacttcctcatcgaagagattgtgttttggggcgacctcttgggtctggttatcttgatcatttaagagattggtgtttcttgaagaagatgaagtggaggaatttgagcgaaaagagatacgggaaaaggatcgcaataatctagacatgattaaaacattctctaatatctttgccttcatttggttccataggaatctttccataaggctatatgttacagaacttcttggatctgaataaatgaaaaagaagattttttttttcacagacaatatagtttgaacattactcctatagccaccagtatattatgtctcaatattttatttgaacaatacaccttagccttactgccctttctcatccacgggacttactgctacagtatcattcaactaaaatatcagactgctgtgcttccagaaaatactgttcaaacacatactgtttaaattaaaattactgtacatgcttcagatccataagttcagttaacatatg

SEQ ID NO: 12512 - DNA, 1056 bp, Glycine max
  Gm_smallRNAprecursor_5345
cgtatagttgatcctgagggatttctggaatgttccagtcatccatgttttgattaatatcttcgaatcggacttcctcatcgaagagattgtgttttggggcgacctcttgggtctggttatcttgatcatttaagagattggtgtttcttgaagaagatgaagtggaggaatttgagcgaaaagagatacgggaaaaggatcgcaataatctagacatgattaaaacattctctaatatctttgccttcatttggttccataggaatctttccataaggctatatgttacagaacttcttggatctgaataaatgaaaaagaagattttttttttcacagacaatatagtttgaacattactcctatagccaccagtatattatgtctcaatattttatttgaacaatacaccttagccttactgccctttctcatccacgggacttactgctacagtatcattcaactaaaatatcagactgctgtgcttccagaaaatactgttcaaacacatactgtttaaattaaaattactgtacatgcttcagatccataagttcagttaacatatgcccttacagacactattcctacttccccatcaggctctgataccagaggtcagcggagtaggatcacacggacaaataggaagtaagaatgcagtatgattgatgaaatgaaaatataaacttgaaaacagatatcaagggcacaccggagaccggcttacaataacttttaataaattattacatcattcaataacttttaattgaataatattttcttaaaactcactattggattgaaagttcctttcacataaactatatgtacaaaatttcatattaatccaaaattatttactacctcattcatacaaattggcgtaatataaatttttcatcatataccagaatatgcactatttgattatcaacttattgatgttcaattttgataaaatttaacatagacaatcttggcaatatgctgatatagttcaacagttggatcgataaaaattacattttatatgaagttattaaa

SEQ ID NO: 12513 - DNA, 1153 bp, Glycine max
  Gm_smallRNAprecursor_5346
cgtatagttgatcctgagggatttctggaatgttccagtcatccatgttttgattaatatcttcgaatcggacttcctcatcgaagagattgtgttttggggcgacctcttgggtctggttatcttgatcatttaagagattggtgtttcttgaagaagatgaagtggaggaatttgagcgaaaagagatacgggaaaaggatcgcaataatctagacatgattaaaacattctctaatatctttgccttcatttggttccataggaatctttccataaggctatatgttacagaacttcttggatctgaataaatgaaaaagaagattttttttttcacagacaatatagtttgaacattactcctatagccaccagtatattatgtctcaatattttatttgaacaatacaccttagccttactgccctttctcatccacgggacttactgctacagtatcattcaactaaaatatcagactgctgtgcttccagaaaatactgttcaaacacatactgtttaaattaaaattactgtacatgcttcagatccataagttcagttaacatatgcccttacagacactattcctacttccccatcaggctctgataccagaggtcagcggagtaggatcacacggacaaataggaagtaagaatgcagtatgattgatgaaatgaaaatataaacttgaaaacagatatcaagggcacaccggagaccggcttacaataacttttaataaattattacatcattcaataacttttaattgaataatattttcttaaaactcactattggattgaaagttcctttcacataaactatatgtacaaaatttcatattaatccaaaattatttactacctcattcatacaaattggcgtaatataaatttttcatcatataccagaatatgcactatttgattatcaacttattgatgttcaattttgataaaatttaacatagacaatcttggcaatatgctgatatagttcaacagttggatcgataaaaattacattttatatgaagttattaaatggtgttatattacatcggtgtaatttgatctcatatacatacatacatacatatatatatatatatatatatatatatatatatatatatatatat

SEQ ID NO: 12514 - DNA, 1049 bp, Glycine max
  Gm_smallRNAprecursor_5347
tagttgatcctgagggatttctggaatgttccagtcatccatgttttgattaatatcttcgaatcggacttcctcatcgaagagattgtgttttggggcgacctcttgggtctggttatcttgatcatttaagagattggtgtttcttgaagaagatgaagtggaggaatttgagcgaaaagagatacgggaaaaggatcgcaataatctagacatgattaaaacattctctaatatctttgccttcatttggttccataggaatctttccataaggctatatgttacagaacttcttggatctgaataaatgaaaaagaagattttttttttcacagacaatatagtttgaacattactcctatagccaccagtatattatgtctcaatattttatttgaacaatacaccttagccttactgccctttctcatccacgggacttactgctacagtatcattcaactaaaatatcagactgctgtgcttccagaaaatactgttcaaacacatactgtttaaattaaaattactgtacatgcttcagatccataagttcagttaacatatgcccttacagacactattcctacttccccatcaggctctgataccagaggtcagcggagtaggatcacacggacaaataggaagtaagaatgcagtatgattgatgaaatgaaaatataaacttgaaaacagatatcaagggcacaccggagaccggcttacaataacttttaataaattattacatcattcaataacttttaattgaataatattttcttaaaactcactattggattgaaagttcctttcacataaactatatgtacaaaatttcatattaatccaaaattatttactacctcattcatacaaattggcgtaatataaatttttcatcatataccagaatatgcactatttgattatcaacttattgatgttcaattttgataaaatttaacatagacaatcttggcaatatgctgatatagttcaacagttggatcgataaaaattacattttatatgaagttatt

SEQ ID NO: 12515 - DNA, 1052 bp, Glycine max
  Gm_smallRNAprecursor_5348
tagttgatcctgagggatttctggaatgttccagtcatccatgttttgattaatatcttcgaatcggacttcctcatcgaagagattgtgttttggggcgacctcttgggtctggttatcttgatcatttaagagattggtgtttcttgaagaagatgaagtggaggaatttgagcgaaaagagatacgggaaaaggatcgcaataatctagacatgattaaaacattctctaatatctttgccttcatttggttccataggaatctttccataaggctatatgttacagaacttcttggatctgaataaatgaaaaagaagattttttttttcacagacaatatagtttgaacattactcctatagccaccagtatattatgtctcaatattttatttgaacaatacaccttagccttactgccctttctcatccacgggacttactgctacagtatcattcaactaaaatatcagactgctgtgcttccagaaaatactgttcaaacacatactgtttaaattaaaattactgtacatgcttcagatccataagttcagttaacatatgcccttacagacactattcctacttccccatcaggctctgataccagaggtcagcggagtaggatcacacggacaaataggaagtaagaatgcagtatgattgatgaaatgaaaatataaacttgaaaacagatatcaagggcacaccggagaccggcttacaataacttttaataaattattacatcattcaataacttttaattgaataatattttcttaaaactcactattggattgaaagttcctttcacataaactatatgtacaaaatttcatattaatccaaaattatttactacctcattcatacaaattggcgtaatataaatttttcatcatataccagaatatgcactatttgattatcaacttattgatgttcaattttgataaaatttaacatagacaatcttggcaatatgctgatatagttcaacagttggatcgataaaaattacattttatatgaagttattaaa

SEQ ID NO: 12516 - DNA, 1046 bp, Glycine max
  Gm_smallRNAprecursor_5349
ggagtaggatcaaacggacaaataggaagtaagaatgtagtatgattaatgaaatgaaaatataaacttgaaaacagatatcaaggtcacaccggagaccggcttacaaaacccaggttttcataaacaaagaaaccgaagcggcggaagagccgcacaggatcggtgaagggagaagagagaaggatgaaaaatagaaatttattgaatctagaaagaagcgcttacaaaaatcttgtttcagagcacctctcttccgaaacctgaaaaatgactaaatgaaagggtgcctcacaacatgctagaggactccttatatagccaaaaatctaagaccggtagttgccggtagttttgaccgggactatttgactgtttgttacaagacaagtagttttgaccgggactttaatgactacaggacaggtagtattatccagcattaattacaaacagacggttttgtgaccgaaattaaatttaatctaaacagataccaaaacaatcatcttcgttttggtaaaagggatcttcttcgtcttcttcagcagaacttgtttcttccttctttgaggatgaagcttcttcttcctgttgtaacatttgtagaacttccttcagatttttagctaagacctcctttgatgtcgatcctgctaaaaatgctgccagatgagacttttggttcaagaacacagaagtctctggatcagccgctttgaggaattctggatgggatttgaaccataattttacttgttctggatccgctttggatgagtcaaattgtgtccaccattttacaaatgcgtgtctttgtagtgatggatattgatttgtcttttcagtcttgctgtagcgatattgccatgagaatatccatgacagtgcaaagcttgaaaagtatttaagatctgctggaattcgtgattcctgcgaattgtattgtttcttaaattgggaaaatccttgttggaccgtttctgggaatatctctgggattggtccaaagaagtcccaccattgcaaaaaccaattgggaaaat

SEQ ID NO: 12517 - DNA, 1031 bp, Glycine max
  Gm_smallRNAprecursor_5350
tttgttacaagacaagtagttttgaccgggactttaatgactacaggacaggtagtattatccagcattaattacaaacagacggttttgtgaccgaaattaaatttaatctaaacagataccaaaacaatcatcttcgttttggtaaaagggatcttcttcgtcttcttcagcagaacttgtttcttccttctttgaggatgaagcttcttcttcctgttgtaacatttgtagaacttccttcagatttttagctaagacctcctttgatgtcgatcctgctaaaaatgctgccagatgagacttttggttcaagaacacagaagtctctggatcagccgctttgaggaattctggatgggatttgaaccataattttacttgttctggatccgctttggatgagtcaaattgtgtccaccattttacaaatgcgtgtctttgtagtgatggatattgatttgtcttttcagtcttgctgtagcgatattgccatgagaatatccatgacagtgcaaagcttgaaaagtatttaagatctgctggaattcgtgattcctgcgaattgtattgtttcttaaattgggaaaatccttgttggaccgtttctgggaatatctctgggattggtccaaagaagtcccaccattgcaaaaaccaattgggaaaattgtaaattgtgttggtcttgaaatatatcagccatgaatgcttgaagcgggtattttggtgccaaaacaccttagtccaagcatcaacgtaatcccaataggtataacctaccggatcaaatggaactgaaaatctcttccctttgtttaagtctgaaccaaagtgtcttggttgaagaacttttagtatttggatggttgagtgggtgtttaaggtttggtcttttggatctttgaaatgtttgatagatactgagtttgaatctaccaaaatcaattcataaaaagttcttgtcttcaggatggtggttggtttgtagtgaaatcctggtgggaaagccttggccgtcgccttgaagg

SEQ ID NO: 12518 - DNA, 1031 bp, Glycine max; identical to SEQ ID NO: 12517
  Gm_smallRNAprecursor_5351

SEQ ID NO: 12519 - DNA, 1114 bp, Glycine max
  Gm_smallRNAprecursor_5352
agttttgaccgggactttaatgactacaggacaggtagtattatccagcattaattacaaacagacggttttgtgaccgaaattaaatttaatctaaacagataccaaaacaatcatcttcgttttggtaaaagggatcttcttcgtcttcttcagcagaacttgtttcttccttctttgaggatgaagcttcttcttcctgttgtaacatttgtagaacttccttcagatttttagctaagacctcctttgatgtcgatcctgctaaaaatgctgccagatgagacttttggttcaagaacacagaagtctctggatcagccgctttgaggaattctggatgggatttgaaccataattttacttgttctggatccgctttggatgagtcaaattgtgtccaccattttacaaatgcgtgtctttgtagtgatggatattgatttgtcttttcagtcttgctgtagcgatattgccatgagaatatccatgacagtgcaaagcttgaaaagtatttaagatctgctggaattcgtgattcctgcgaattgtattgtttcttaaattgggaaaatccttgttggaccgtttctgggaatatctctgggattggtccaaagaagtcccaccattgcaaaaaccaattgggaaaattgtaaattgtgttggtcttgaaatatatcagccatgaatgcttgaagcgggtattttggtgccaaaacaccttagtccaagcatcaacgtaatcccaataggtataacctaccggatcaaatggaactgaaaatctcttccctttgtttaagtctgaaccaaagtgtcttggttgaagaacttttagtatttggatggttgagtgggtgtttaaggtttggtcttttggatctttgaaatgtttgatagatactgagtttgaatctaccaaaatcaattcataaaaagttcttgtcttcaggatggtggttggtttgtagtgaaatcctggtgggaaagccttggccgtcgccttgaagggatttttgtcccaaaattcaggttccatctgcaaaacagttaacaatttatttttataaatataattgttagtttgtttggtaggtggtgtttgagcttt

SEQ ID NO: 12520 - DNA, 1146 bp, Glycine max
  Gm_smallRNAprecursor_5353
actttaatgactacaggacaggtagtattatccagcattaattacaaacagacggttttgtgaccgaaattaaatttaatctaaacagataccaaaacaatcatcttcgttttggtaaaagggatcttcttcgtcttcttcagcagaacttgtttcttccttctttgaggatgaagcttcttcttcctgttgtaacatttgtagaacttccttcagatttttagctaagacctcctttgatgtcgatcctgctaaaaatgctgccagatgagacttttggttcaagaacacagaagtctctggatcagccgctttgaggaattctggatgggatttgaaccataattttacttgttctggatccgctttggatgagtcaaattgtgtccaccattttacaaatgcgtgtctttgtagtgatggatattgatttgtcttttcagtcttgctgtagcgatattgccatgagaatatccatgacagtgcaaagcttgaaaagtatttaagatctgctggaattcgtgattcctgcgaattgtattgtttcttaaattgggaaaatccttgttggaccgtttctgggaatatctctgggattggtccaaagaagtcccaccattgcaaaaaccaattgggaaaattgtaaattgtgttggtcttgaaatatatcagccatgaatgcttgaagcgggtattttggtgccaaaacaccttagtccaagcatcaacgtaatcccaataggtataacctaccggatcaaatggaactgaaaatctcttccctttgtttaagtctgaaccaaagtgtcttggttgaagaacttttagtatttggatggttgagtgggtgtttaaggtttggtcttttggatctttgaaatgtttgatagatactgagtttgaatctaccaaaatcaattcataaaaagttcttgtcttcaggatggtggttggtttgtagtgaaatcctggtgggaaagccttggccgtcgccttgaagggatttttgtcccaaaattcaggttccatctgcaaaacagttaacaatttatttttataaatataattgttagtttgtttggtaggtggtgtttgagctttggctaaaggtagttttcctttagtattggtggctgttttggtcat

SEQ ID NO: 12521 - DNA, 1146 bp, Glycine max; identical to SEQ ID NO: 12520
  Gm_smallRNAprecursor_5354

SEQ ID NO: 12522 - DNA, 1147 bp, Glycine max
  Gm_smallRNAprecursor_5355
actttaatgactacaggacaggtagtattatccagcattaattacaaacagacggttttgtgaccgaaattaaatttaatctaaacagataccaaaacaatcatcttcgttttggtaaaagggatcttcttcgtcttcttcagcagaacttgtttcttccttctttgaggatgaagcttcttcttcctgttgtaacatttgtagaacttccttcagatttttagctaagacctcctttgatgtcgatcctgctaaaaatgctgccagatgagacttttggttcaagaacacagaagtctctggatcagccgctttgaggaattctggatgggatttgaaccataattttacttgttctggatccgctttggatgagtcaaattgtgtccaccattttacaaatgcgtgtctttgtagtgatggatattgatttgtcttttcagtcttgctgtagcgatattgccatgagaatatccatgacagtgcaaagcttgaaaagtatttaagatctgctggaattcgtgattcctgcgaattgtattgtttcttaaattgggaaaatccttgttggaccgtttctgggaatatctctgggattggtccaaagaagtcccaccattgcaaaaaccaattgggaaaattgtaaattgtgttggtcttgaaatatatcagccatgaatgcttgaagcgggtattttggtgccaaaacaccttagtccaagcatcaacgtaatcccaataggtataacctaccggatcaaatggaactgaaaatctcttccctttgtttaagtctgaaccaaagtgtcttggttgaagaacttttagtatttggatggttgagtgggtgtttaaggtttggtcttttggatctttgaaatgtttgatagatactgagtttgaatctaccaaaatcaattcataaaaagttcttgtcttcaggatggtggttggtttgtagtgaaatcctggtgggaaagccttggccgtcgccttgaagggatttttgtcccaaaattcaggttccatctgcaaaacagttaacaatttatttttataaatataattgttagtttgtttggtaggtggtgtttgagctttggctaaaggtagttttcctttagtattggtggctgttttggtcatt

SEQ ID NO: 12523 - DNA, 1147 bp, Glycine max; identical to SEQ ID NO: 12522
  Gm_smallRNAprecursor_5356

SEQ ID NO: 12524 - DNA, 1247 bp, Glycine max
  Gm_smallRNAprecursor_5357
actttaatgactacaggacaggtagtattatccagcattaattacaaacagacggttttgtgaccgaaattaaatttaatctaaacagataccaaaacaatcatcttcgttttggtaaaagggatcttcttcgtcttcttcagcagaacttgtttcttccttctttgaggatgaagcttcttcttcctgttgtaacatttgtagaacttccttcagatttttagctaagacctcctttgatgtcgatcctgctaaaaatgctgccagatgagacttttggttcaagaacacagaagtctctggatcagccgctttgaggaattctggatgggatttgaaccataattttacttgttctggatccgctttggatgagtcaaattgtgtccaccattttacaaatgcgtgtctttgtagtgatggatattgatttgtcttttcagtcttgctgtagcgatattgccatgagaatatccatgacagtgcaaagcttgaaaagtatttaagatctgctggaattcgtgattcctgcgaattgtattgtttcttaaattgggaaaatccttgttggaccgtttctgggaatatctctgggattggtccaaagaagtcccaccattgcaaaaaccaattgggaaaattgtaaattgtgttggtcttgaaatatatcagccatgaatgcttgaagcgggtattttggtgccaaaacaccttagtccaagcatcaacgtaatcccaataggtataacctaccggatcaaatggaactgaaaatctcttccctttgtttaagtctgaaccaaagtgtcttggttgaagaacttttagtatttggatggttgagtgggtgtttaaggtttggtcttttggatctttgaaatgtttgatagatactgagtttgaatctaccaaaatcaattcataaaaagttcttgtcttcaggatggtggttggtttgtagtgaaatcctggtgggaaagccttggccgtcgccttgaagggatttttgtcccaaaattcaggttccatctgcaaaacagttaacaatttatttttataaatataattgttagtttgtttggtaggtggtgtttgagctttggctaaaggtagttttcctttagtattggtggctgttttggtcattgacgcattttggatcattgtttgtaaatttgattcagattcatcatcagattctgaggcaatgtctgcccaagattttttgattatttttggaaatttgg

SEQ ID NO: 12525 - DNA, 1247 bp, Glycine max; identical to SEQ ID NO: 12524
  Gm_smallRNAprecursor_5358

SEQ ID NO: 12526 - DNA, 1072 bp, Glycine max
  Gm_smallRNAprecursor_5359
gcttcttcttcctgttgtaacatttgtagaacttccttcagatttttagctaagacctcctttgatgtcgatcctgctaaaaatgctgccagatgagacttttggttcaagaacacagaagtctctggatcagccgctttgaggaattctggatgggatttgaaccataattttacttgttctggatccgctttggatgagtcaaattgtgtccaccattttacaaatgcgtgtctttgtagtgatggatattgatttgtcttttcagtcttgctgtagcgatattgccatgagaatatccatgacagtgcaaagcttgaaaagtatttaagatctgctggaattcgtgattcctgcgaattgtattgtttcttaaattgggaaaatccttgttggaccgtttctgggaatatctctgggattggtccaaagaagtcccaccattgcaaaaaccaattgggaaaattgtaaattgtgttggtcttgaaatatatcagccatgaatgcttgaagcgggtattttggtgccaaaacaccttagtccaagcatcaacgtaatcccaataggtataacctaccggatcaaatggaactgaaaatctcttccctttgtttaagtctgaaccaaagtgtcttggttgaagaacttttagtatttggatggttgagtgggtgtttaaggtttggtcttttggatctttgaaatgtttgatagatactgagtttgaatctaccaaaatcaattcataaaaagttcttgtcttcaggatggtggttggtttgtagtgaaatcctggtgggaaagccttggccgtcgccttgaagggatttttgtcccaaaattcaggttccatctgcaaaacagttaacaatttatttttataaatataattgttagtttgtttggtaggtggtgtttgagctttggctaaaggtagttttcctttagtattggtggctgttttggtcattgacgcattttggatcattgtttgtaaatttgattcagattcatcatcagattctgaggcaatgtctgcccaagattttttgattatttttggaaatttgg

SEQ ID NO: 12527 - DNA, 1124 bp, Glycine max
  Gm_smallRNAprecursor_5360
ccttcagatttttagctaagacctcctttgatgtcgatcctgctaaaaatgctgccagatgagacttttggttcaagaacacagaagtctctggatcagccgctttgaggaattctggatgggatttgaaccataattttacttgttctggatccgctttggatgagtcaaattgtgtccaccattttacaaatgcgtgtctttgtagtgatggatattgatttgtcttttcagtcttgctgtagcgatattgccatgagaatatccatgacagtgcaaagcttgaaaagtatttaagatctgctggaattcgtgattcctgcgaattgtattgtttcttaaattgggaaaatccttgttggaccgtttctgggaatatctctgggattggtccaaagaagtcccaccattgcaaaaaccaattgggaaaattgtaaattgtgttggtcttgaaatatatcagccatgaatgcttgaagcgggtattttggtgccaaaacaccttagtccaagcatcaacgtaatcccaataggtataacctaccggatcaaatggaactgaaaatctcttccctttgtttaagtctgaaccaaagtgtcttggttgaagaacttttagtatttggatggttgagtgggtgtttaaggtttggtcttttggatctttgaaatgtttgatagatactgagtttgaatctaccaaaatcaattcataaaaagttcttgtcttcaggatggtggttggtttgtagtgaaatcctggtgggaaagccttggccgtcgccttgaagggatttttgtcccaaaattcaggttccatctgcaaaacagttaacaatttatttttataaatataattgttagtttgtttggtaggtggtgtttgagctttggctaaaggtagttttcctttagtattggtggctgttttggtcattgacgcattttggatcattgtttgtaaatttgattcagattcatcatcagattctgaggcaatgtctgcccaagattttttgattatttttggaaatttggtcagacccatgtcttgaagggcctgaagggtttcaattggccaagcatagtcggccgatgtttgtttggcggttgccggtttggga

SEQ ID NO: 12528 - DNA, 1130 bp, Glycine max
  Gm_smallRNAprecursor_5361
ccttcagatttttagctaagacctcctttgatgtcgatcctgctaaaaatgctgccagatgagacttttggttcaagaacacagaagtctctggatcagccgctttgaggaattctggatgggatttgaaccataattttacttgttctggatccgctttggatgagtcaaattgtgtccaccattttacaaatgcgtgtctttgtagtgatggatattgatttgtcttttcagtcttgctgtagcgatattgccatgagaatatccatgacagtgcaaagcttgaaaagtatttaagatctgctggaattcgtgattcctgcgaattgtattgtttcttaaattgggaaaatccttgttggaccgtttctgggaatatctctgggattggtccaaagaagtcccaccattgcaaaaaccaattgggaaaattgtaaattgtgttggtcttgaaatatatcagccatgaatgcttgaagcgggtattttggtgccaaaacaccttagtccaagcatcaacgtaatcccaataggtataacctaccggatcaaatggaactgaaaatctcttccctttgtttaagtctgaaccaaagtgtcttggttgaagaacttttagtatttggatggttgagtgggtgtttaaggtttggtcttttggatctttgaaatgtttgatagatactgagtttgaatctaccaaaatcaattcataaaaagttcttgtcttcaggatggtggttggtttgtagtgaaatcctggtgggaaagccttggccgtcgccttgaagggatttttgtcccaaaattcaggttccatctgcaaaacagttaacaatttatttttataaatataattgttagtttgtttggtaggtggtgtttgagctttggctaaaggtagttttcctttagtattggtggctgttttggtcattgacgcattttggatcattgtttgtaaatttgattcagattcatcatcagattctgaggcaatgtctgcccaagattttttgattatttttggaaatttggtcagacccatgtcttgaagggcctgaagggtttcaattggccaagcatagtcggccgatgtttgtttggcggttgccggtttgggagattcc

SEQ ID NO: 12529 - DNA, 1087 bp, Glycine max
  Gm_smallRNAprecursor_5362
tcctgctaaaaatgctgccagatgagacttttggttcaagaacacagaagtctctggatcagccgctttgaggaattctggatgggatttgaaccataattttacttgttctggatccgctttggatgagtcaaattgtgtccaccattttacaaatgcgtgtctttgtagtgatggatattgatttgtcttttcagtcttgctgtagcgatattgccatgagaatatccatgacagtgcaaagcttgaaaagtatttaagatctgctggaattcgtgattcctgcgaattgtattgtttcttaaattgggaaaatccttgttggaccgtttctgggaatatctctgggattggtccaaagaagtcccaccattgcaaaaaccaattgggaaaattgtaaattgtgttggtcttgaaatatatcagccatgaatgcttgaagcgggtattttggtgccaaaacaccttagtccaagcatcaacgtaatcccaataggtataacctaccggatcaaatggaactgaaaatctcttccctttgtttaagtctgaaccaaagtgtcttggttgaagaacttttagtatttggatggttgagtgggtgtttaaggtttggtcttttggatctttgaaatgtttgatagatactgagtttgaatctaccaaaatcaattcataaaaagttcttgtcttcaggatggtggttggtttgtagtgaaatcctggtgggaaagccttggccgtcgccttgaagggatttttgtcccaaaattcaggttccatctgcaaaacagttaacaatttatttttataaatataattgttagtttgtttggtaggtggtgtttgagctttggctaaaggtagttttcctttagtattggtggctgttttggtcattgacgcattttggatcattgtttgtaaatttgattcagattcatcatcagattctgaggcaatgtctgcccaagattttttgattatttttggaaatttggtcagacccatgtcttgaagggcctgaagggtttcaattggccaagcatagtcggccgatgtttgtttggcggttgccggtttggga

SEQ ID NO: 12530 - DNA, 1174 bp, Glycine max
  Gm_smallRNAprecursor_5363
cgggtattttggtgccaaaacaccttagtccaagcatcaacgtaatcccaataggtataacctaccggatcaaatggaactgaaaatctcttccctttgtttaagtctgaaccaaagtgtcttggttgaagaacttttagtatttggatggttgagtgggtgtttaaggtttggtcttttggatctttgaaatgtttgatagatactgagtttgaatctaccaaaatcaattcataaaaagttcttgtcttcaggatggtggttggtttgtagtgaaatcctggtgggaaagccttggccgtcgccttgaagggatttttgtcccaaaattcaggttccatctgcaaaacagttaacaatttatttttataaatataattgttagtttgtttggtaggtggtgtttgagctttggctaaaggtagttttcctttagtattggtggctgttttggtcattgacgcattttggatcattgtttgtaaatttgattcagattcatcatcagattctgaggcaatgtctgcccaagattttttgattatttttggaaatttggtcagacccatgtcttgaagggcctgaagggtttcaattggccaagcatagtcggccgatgtttgtttggcggttgccggtttgggagattcctgagtggatggctcaggtttgattgaggcaatctgggttgatgacccttctaaattggttttctgggtagatgacccagcctgggttggtgacccagaagaggtagatgatttcttgatggttggctctggaagagccagcctggctcctttgcctgtactccttcctccccgtagggagattcccgatgccttaggaggcattaccacttttctgtaagaattcacgggtaaggtagtcaggtagtgaatttgaggtgcccttgatgtattctatgtcaaaatcaaagacacttaaaattgcttgccatcgcgcaaaaatttgttttgaggcaaggtttttaacatctttttgtaaaatatctttggctgatttacaatcaaccctaattaaaaatttttggtttaataaatccgattgaaatttggaaatgcacaaaacaattgctaaaacttcttttttaacagttgaatattttaattgtgcaggattccaatgttttgatgtatatgcaatgacatga

SEQ ID NO: 12531 - DNA, 1173 bp, Glycine max
  Gm_smallRNAprecursor_5364
gggtattttggtgccaaaacaccttagtccaagcatcaacgtaatcccaataggtataacctaccggatcaaatggaactgaaaatctcttccctttgtttaagtctgaaccaaagtgtcttggttgaagaacttttagtatttggatggttgagtgggtgtttaaggtttggtcttttggatctttgaaatgtttgatagatactgagtttgaatctaccaaaatcaattcataaaaagttcttgtcttcaggatggtggttggtttgtagtgaaatcctggtgggaaagccttggccgtcgccttgaagggatttttgtcccaaaattcaggttccatctgcaaaacagttaacaatttatttttataaatataattgttagtttgtttggtaggtggtgtttgagctttggctaaaggtagttttcctttagtattggtggctgttttggtcattgacgcattttggatcattgtttgtaaatttgattcagattcatcatcagattctgaggcaatgtctgcccaagattttttgattatttttggaaatttggtcagacccatgtcttgaagggcctgaagggtttcaattggccaagcatagtcggccgatgtttgtttggcggttgccggtttgggagattcctgagtggatggctcaggtttgattgaggcaatctgggttgatgacccttctaaattggttttctgggtagatgacccagcctgggttggtgacccagaagaggtagatgatttcttgatggttggctctggaagagccagcctggctcctttgcctgtactccttcctccccgtagggagattcccgatgccttaggaggcattaccacttttctgtaagaattcacgggtaaggtagtcaggtagtgaatttgaggtgcccttgatgtattctatgtcaaaatcaaagacacttaaaattgcttgccatcgcgcaaaaatttgttttgaggcaaggtttttaacatctttttgtaaaatatctttggctgatttacaatcaaccctaattaaaaatttttggtttaataaatccgattgaaatttggaaatgcacaaaacaattgctaaaacttcttttttaacagttgaatattttaattgtgcaggattccaatgttttgatgtatatgcaatgacatga

SEQ ID NO: 12532 - DNA, 1176 bp, Glycine max
  Gm_smallRNAprecursor_5365
gggtattttggtgccaaaacaccttagtccaagcatcaacgtaatcccaataggtataacctaccggatcaaatggaactgaaaatctcttccctttgtttaagtctgaaccaaagtgtcttggttgaagaacttttagtatttggatggttgagtgggtgtttaaggtttggtcttttggatctttgaaatgtttgatagatactgagtttgaatctaccaaaatcaattcataaaaagttcttgtcttcaggatggtggttggtttgtagtgaaatcctggtgggaaagccttggccgtcgccttgaagggatttttgtcccaaaattcaggttccatctgcaaaacagttaacaatttatttttataaatataattgttagtttgtttggtaggtggtgtttgagctttggctaaaggtagttttcctttagtattggtggctgttttggtcattgacgcattttggatcattgtttgtaaatttgattcagattcatcatcagattctgaggcaatgtctgcccaagattttttgattatttttggaaatttggtcagacccatgtcttgaagggcctgaagggtttcaattggccaagcatagtcggccgatgtttgtttggcggttgccggtttgggagattcctgagtggatggctcaggtttgattgaggcaatctgggttgatgacccttctaaattggttttctgggtagatgacccagcctgggttggtgacccagaagaggtagatgatttcttgatggttggctctggaagagccagcctggctcctttgcctgtactccttcctccccgtagggagattcccgatgccttaggaggcattaccacttttctgtaagaattcacgggtaaggtagtcaggtagtgaatttgaggtgcccttgatgtattctatgtcaaaatcaaagacacttaaaattgcttgccatcgcgcaaaaatttgttttgaggcaaggtttttaacatctttttgtaaaatatctttggctgatttacaatcaaccctaattaaaaatttttggtttaataaatccgattgaaatttggaaatgcacaaaacaattgctaaaacttcttttttaacagttgaatattttaattgtgcaggattccaatgttttgatgtatatgcaatgacatgatct

SEQ ID NO: 12533 - DNA, 1129 bp, Glycine max
  Gm_smallRNAprecursor_5366
ctgcaaaacagttaacaatttatttttataaatataattgttagtttgtttggtaggtggtgtttgagctttggctaaaggtagttttcctttagtattggtggctgttttggtcattgacgcattttggatcattgtttgtaaatttgattcagattcatcatcagattctgaggcaatgtctgcccaagattttttgattatttttggaaatttggtcagacccatgtcttgaagggcctgaagggtttcaattggccaagcatagtcggccgatgtttgtttggcggttgccggtttgggagattcctgagtggatggctcaggtttgattgaggcaatctgggttgatgacccttctaaattggttttctgggtagatgacccagcctgggttggtgacccagaagaggtagatgatttcttgatggttggctctggaagagccagcctggctcctttgcctgtactccttcctccccgtagggagattcccgatgccttaggaggcattaccacttttctgtaagaattcacgggtaaggtagtcaggtagtgaatttgaggtgcccttgatgtattctatgtcaaaatcaaagacacttaaaattgcttgccatcgcgcaaaaatttgttttgaggcaaggtttttaacatctttttgtaaaatatctttggctgatttacaatcaaccctaattaaaaatttttggtttaataaatccgattgaaatttggaaatgcacaaaacaattgctaaaacttcttttttaacagttgaatattttaattgtgcaggattccaatgttttgatgtatatgcaatgacatgatcttggccatggactctttgtctgaggatgccaccataacctatgtctgaagcatcagtttcgacaattttaaatgcctgtggaataggaagatacagacatttaatagattggactttgaatttgatttctttaaccgtttgtgtatggaggtcagaccaaggaggcggatttttcttcagcctatcatgtaatggcttgactatattatttaaataggggacaaattctcctacgtaatttagacaacctagaaatctttgtaactgggttttgtctaagatttggttggggaa

SEQ ID NO: 12534 - DNA, 1115 bp, Glycine max
  Gm_smallRNAprecursor_5367
acaatttatttttataaatataattgttagtttgtttggtaggtggtgtttgagctttggctaaaggtagttttcctttagtattggtggctgttttggtcattgacgcattttggatcattgtttgtaaatttgattcagattcatcatcagattctgaggcaatgtctgcccaagattttttgattatttttggaaatttggtcagacccatgtcttgaagggcctgaagggtttcaattggccaagcatagtcggccgatgtttgtttggcggttgccggtttgggagattcctgagtggatggctcaggtttgattgaggcaatctgggttgatgacccttctaaattggttttctgggtagatgacccagcctgggttggtgacccagaagaggtagatgatttcttgatggttggctctggaagagccagcctggctcctttgcctgtactccttcctccccgtagggagattcccgatgccttaggaggcattaccacttttctgtaagaattcacgggtaaggtagtcaggtagtgaatttgaggtgcccttgatgtattctatgtcaaaatcaaagacacttaaaattgcttgccatcgcgcaaaaatttgttttgaggcaaggtttttaacatctttttgtaaaatatctttggctgatttacaatcaaccctaattaaaaatttttggtttaataaatccgattgaaatttggaaatgcacaaaacaattgctaaaacttcttttttaacagttgaatattttaattgtgcaggattccaatgttttgatgtatatgcaatgacatgatcttggccatggactctttgtctgaggatgccaccataacctatgtctgaagcatcagtttcgacaattttaaatgcctgtggaataggaagatacagacatttaatagattggactttgaatttgatttctttaaccgtttgtgtatggaggtcagaccaaggaggcggatttttcttcagcctatcatgtaatggcttgactatattatttaaataggggacaaattctcctacgtaatttagacaacctagaaatctttgtaactgggttttgtctaagatttggttggggaa

SEQ ID NO: 12535 - DNA, 1080 bp, Glycine max
  Gm_smallRNAprecursor_5368
gatgtttgaaatgttggtcaatgttttgggaaaagattaaaacatcatctatgtagacaatgacaaattttgaataaggattaaaaatatcgttcataattttttgaaattctgaaggggcattcttcagtccgaatggcatcacgttccattcatattgcccgaaaggtacagtaaacgctgttttgtacctatctgattcttggatttggatttgccaaaatccagatttcatatcaaattttgaaaatatctttgcagaatttaatctgttaagcaaatcttttttgtttgggataggatatctaatccattgtaatgcttgatttaatggtttgtaatttatgactaagcggggtgttccacgctcaatctcagattgtttgttaacataaaaagtcgcacaagaccatgggcttttgcttttccggattaggcctttatcaagcaaatccttgatttccttttgacaatattgaagaagttcttcattcatttggattggtctggcttttgtgggaatttgtttttccctaaagtctttctcataagggagatcgacaatatgcttctttctgtcccaaaatgcatgtggcaattcagaacaaacggtcgattcaatatgatttaataaagattgaattctttcttttacttggggttttcccagttgtatctgaatattattaaaagatacttcttcttttaagaagttaatttgattaatcttattttctataagatttatatttctagaaattggtttagtagaaaaattaaatataatttttcttcctaaataatttgtggttattccttcattagatatttggatgggaaacagggctctaatgaagggcgttcctaagattacttcattcttaaggttttttaccagaagaaagtttgtgttaatcttaagaccttggttttcaattattgcatttgatagcttaaaattaatttttaattttgagccgtttgccgtacttaatttttctgaggttttctcaaagaattttgtaggaattaatccttctaaaatgcagtttgaatcagcccctgtatcaaatagggcca

SEQ ID NO: 12536 - DNA, 1159 bp, Glycine max
  Gm_smallRNAprecursor_5369
ccatctttcgggaagagttacttcatcccattttatttttcttgggagagacacgttagcctttgtcatatcagtgataaacaaggttgtttctcctttttgaggttttaacaggactctagatgcacaagtattcatgaccttgtactggatcctataaattaaggctgctgggattgatccttctttcatgtcaaggccatgaaagtggatgtttaagaacagagagtcaagaatgtttctgtccatcaaactcactgttttgtttggataacaattaaaatatattggaccttgtcctaggctggtttcgactgttccaattagggagtcttcaaattgattatgcctaatatctcttagacacattaaaactgctgcatctatgcccatatcaattaagggcttgatggctacttgtacacaaccgatgtgtaaatatttatacttacggctatgttcataaattgaattctttgaaagtagatgaaattcttcccctatatcttgtcctagaggaatattgttttctactgttttgattatgtaatcaaagttgtgtttgtctttaattgtctcaggaacgtatagttgatcctgagggatttctggaatgttccagtcatccatgttttgattaatatcttcgaatcggacttcctcatcgaagagattgtgttttggggcgacctcttgggtctggttatcttgatcatttaagagattggtgtttcttgaagaagatgaagtggaggaattcgagcgaaaagaaatacgggaaaaggatcgcaataatctagacatgattaaaacattctctaatatctttgccttcatttggttccataggaatctttccataaggctatatgttacagaacttcttggatctgaataaatgaaaagaagatttttttttcacagacaatatagtttgaacattactcctatagccaccagtatattatgtctcaatattttatttgaacaatacaccttagccttactgccctttctcatccacgggacttactgctacagtatcattcaactaaaatatcagactgctgtgcttccagaaaatactgttcaaacacatactgtttaaattaaaattactgttcaaacacacacatatatatatatatatatatatata

SEQ ID NO: 12537 - DNA, 1077 bp, Glycine max
  Gm_smallRNAprecursor_5370
gcttgacttcagtttcagtaaaggaaaaaaaagtcgggtaatgtcataccttctcagatctatacatcaatttgttgcttcttatctaatttataaaaaacaagagcctaataaagtccattaccctgttccttgcaatcatgtatcattctttttatatgatcgttaacaaggtaagacaaagttggaaataatgacagtaaaaatagcattcttgttggtatttcttgtttactataatagcagaactttcaataaatagatgataaactaagtgattttagtaataataacctcatcaagttgttcaagttcacttttacccatgaacagagtttcgttggcaattaattcagccattatgcaacccactgaccacatgttaattttctgttgagtattctttagcacccagcaaaagttcaggcaatgttgttaatggcggatggcggttcatgacggaaagtcaaaaatccgccataaaaatatggcggatggcgtagcggaaaatggcggatgtcatgacggacacaaaaaaaaaaaacatatatataaactcattgaaattgaaaaaaacaaaggattgcattcaaataaactaaaaaagtttcatgagttcatacaataatcaagtaccaacaccaaataaactcattaaagagttcaaaataagaaaatgataaaaacataatgcaaagtgcaaagtgaaggttgaggctctaatcatcttctccaatcccaacataatcatcttcgttgttatcatatggtaatggagcatctccctctccctcttccccatcagacgcctcaaaattgaccatgatttcttcttcttcagattcaacatcaatattctcctcaacatctagatcctcatcattttcttggactgctttttgcttccttgatgaagatccaacaaccattgcctgttttttagaagtttgggcagcaacaacacttgttttttgctttttctgcctagtatacatcctacactctccaacccccgaagcctgatacacagttgcccaatttagagcatcatcatcttcaaataccaaatcatttcca

SEQ ID NO: 12538 - DNA, 1190 bp, Glycine max
  Gm_smallRNAprecursor_5371
tttgtagaaataatttaaggtcaacacgaatttttttatagaattgttattaagtaaatgtgatttttagaggaatgtgatttttgtatggatatatatatatatatatatatatatatatatatatatatatatatatatatatatatatatatatatatatatcccaaaccggcaaccgccaaacaaacatcggccgactatgcatgaccaattgaaacccttcaggcccttcaagacatgggtctaaccaaatttccaaaaataatcaaaaaatcttgggcagacattgcctcagaatctgatgatgaatctgaatcaaatttacaaacaatgatccaaaatgcatcaatgacagaaacaactaccaatcctaaagggaaactacctttagccaaagctcaaacaccacctaccaaacaaactaacaattatattaataaaaataaatttgtaactgttttgcacatggaacctgaattttgggacaaaaatcccttcaaggcgacggccaaggctttcccaccaggatttcactacaaaccaaccaccatcctgaagacaagaactttttatgaattgatttgggtagattcaaattcagtatttatcaaacatttcaaagacccaaaagaccaaacattaaacacccactccacaatccaaatactaaaagttcttcaaccaagacactttggttcggacttgaacaaaggaaagagattttcagttccatttgatccggtaggttatacctattgggattatgttgatgcttggactaaggtgttttggcaccaaaatacccgcttcaagcattcatggctgatatatttcaagaccaatacaatttacaattttcgcaattggtttttgcaatggtgggacttctttggaccaatcccagagatattcccagaaacagtccaacaaggatttgctcaatttgagagacaataaaattcgcaggaatcacgaattccagcagatcttaaatacttttcaagctttgcattgtcatggatcttctcatggcaatatccttacagcaagactgaaaagacaaaccaatatccatcactacaaagacacacatttgtaaaatggtggacacaatttgactcatccaaagcagatccagaacaagtaaaagtctggttccaatcccatccagaattcctcaaagcagc

SEQ ID NO: 12539 - DNA, 1171 bp, Glycine max
  Gm_smallRNAprecursor_5372
tcccaaaccggcaaccgccaaacaaacatcggccgactatgcatgaccaattgaaacccttcaggcccttcaagacatgggtctaaccaaatttccaaaaataatcaaaaaatcttgggcagacattgcctcagaatctgatgatgaatctgaatcaaatttacaaacaatgatccaaaatgcatcaatgacagaaacaactaccaatcctaaagggaaactacctttagccaaagctcaaacaccacctaccaaacaaactaacaattatattaataaaaataaatttgtaactgttttgcacatggaacctgaattttgggacaaaaatcccttcaaggcgacggccaaggctttcccaccaggatttcactacaaaccaaccaccatcctgaagacaagaactttttatgaattgatttgggtagattcaaattcagtatttatcaaacatttcaaagacccaaaagaccaaacattaaacacccactccacaatccaaatactaaaagttcttcaaccaagacactttggttcggacttgaacaaaggaaagagattttcagttccatttgatccggtaggttatacctattgggattatgttgatgcttggactaaggtgttttggcaccaaaatacccgcttcaagcattcatggctgatatatttcaagaccaatacaatttacaattttcgcaattggtttttgcaatggtgggacttctttggaccaatcccagagatattcccagaaacagtccaacaaggatttgctcaatttgagagacaataaaattcgcaggaatcacgaattccagcagatcttaaatacttttcaagctttgcattgtcatggatcttctcatggcaatatccttacagcaagactgaaaagacaaaccaatatccatcactacaaagacacacatttgtaaaatggtggacacaatttgactcatccaaagcagatccagaacaagtaaaagtctggttccaatcccatccagaattcctcaaagcagctaatcaagaaacttctgtgtttttgaaccaaaagtctcatctggcagcatttttagcaggatcgaaatcaaaggaggtcctagctaaaaatctaaaggaagttctacaaatgttacagcaggaagaagaaggttcatcctcaaag

SEQ ID NO: 12540 - DNA, 1166 bp, Glycine max
  Gm_smallRNAprecursor_5373
ccaaaccggcaaccgccaaacaaacatcggccgactatgcatgaccaattgaaacccttcaggcccttcaagacatgggtctaaccaaatttccaaaaataatcaaaaaatcttgggcagacattgcctcagaatctgatgatgaatctgaatcaaatttacaaacaatgatccaaaatgcatcaatgacagaaacaactaccaatcctaaagggaaactacctttagccaaagctcaaacaccacctaccaaacaaactaacaattatattaataaaaataaatttgtaactgttttgcacatggaacctgaattttgggacaaaaatcccttcaaggcgacggccaaggctttcccaccaggatttcactacaaaccaaccaccatcctgaagacaagaactttttatgaattgatttgggtagattcaaattcagtatttatcaaacatttcaaagacccaaaagaccaaacattaaacacccactccacaatccaaatactaaaagttcttcaaccaagacactttggttcggacttgaacaaaggaaagagattttcagttccatttgatccggtaggttatacctattgggattatgttgatgcttggactaaggtgttttggcaccaaaatacccgcttcaagcattcatggctgatatatttcaagaccaatacaatttacaattttcgcaattggtttttgcaatggtgggacttctttggaccaatcccagagatattcccagaaacagtccaacaaggatttgctcaatttgagagacaataaaattcgcaggaatcacgaattccagcagatcttaaatacttttcaagctttgcattgtcatggatcttctcatggcaatatccttacagcaagactgaaaagacaaaccaatatccatcactacaaagacacacatttgtaaaatggtggacacaatttgactcatccaaagcagatccagaacaagtaaaagtctggttccaatcccatccagaattcctcaaagcagctaatcaagaaacttctgtgtttttgaaccaaaagtctcatctggcagcatttttagcaggatcgaaatcaaaggaggtcctagctaaaaatctaaaggaagttctacaaatgttacagcaggaagaagaaggttcatcctca

SEQ ID NO: 12541 - DNA, 1169 bp, Glycine max
  Gm_smallRNAprecursor_5374
ccaaaccggcaaccgccaaacaaacatcggccgactatgcatgaccaattgaaacccttcaggcccttcaagacatgggtctaaccaaatttccaaaaataatcaaaaaatcttgggcagacattgcctcagaatctgatgatgaatctgaatcaaatttacaaacaatgatccaaaatgcatcaatgacagaaacaactaccaatcctaaagggaaactacctttagccaaagctcaaacaccacctaccaaacaaactaacaattatattaataaaaataaatttgtaactgttttgcacatggaacctgaattttgggacaaaaatcccttcaaggcgacggccaaggctttcccaccaggatttcactacaaaccaaccaccatcctgaagacaagaactttttatgaattgatttgggtagattcaaattcagtatttatcaaacatttcaaagacccaaaagaccaaacattaaacacccactccacaatccaaatactaaaagttcttcaaccaagacactttggttcggacttgaacaaaggaaagagattttcagttccatttgatccggtaggttatacctattgggattatgttgatgcttggactaaggtgttttggcaccaaaatacccgcttcaagcattcatggctgatatatttcaagaccaatacaatttacaattttcgcaattggtttttgcaatggtgggacttctttggaccaatcccagagatattcccagaaacagtccaacaaggatttgctcaatttgagagacaataaaattcgcaggaatcacgaattccagcagatcttaaatacttttcaagctttgcattgtcatggatcttctcatggcaatatccttacagcaagactgaaaagacaaaccaatatccatcactacaaagacacacatttgtaaaatggtggacacaatttgactcatccaaagcagatccagaacaagtaaaagtctggttccaatcccatccagaattcctcaaagcagctaatcaagaaacttctgtgtttttgaaccaaaagtctcatctggcagcatttttagcaggatcgaaatcaaaggaggtcctagctaaaaatctaaaggaagttctacaaatgttacagcaggaagaagaaggttcatcctcaaag

SEQ ID NO: 12542 - DNA, 1107 bp, Glycine max
  Gm_smallRNAprecursor_5375
aaccggcaaccgccaaacaaacatcggccgactatgcatgaccaattgaaacccttcaggcccttcaagacatgggtctaaccaaatttccaaaaataatcaaaaaatcttgggcagacattgcctcagaatctgatgatgaatctgaatcaaatttacaaacaatgatccaaaatgcatcaatgacagaaacaactaccaatcctaaagggaaactacctttagccaaagctcaaacaccacctaccaaacaaactaacaattatattaataaaaataaatttgtaactgttttgcacatggaacctgaattttgggacaaaaatcccttcaaggcgacggccaaggctttcccaccaggatttcactacaaaccaaccaccatcctgaagacaagaactttttatgaattgatttgggtagattcaaattcagtatttatcaaacatttcaaagacccaaaagaccaaacattaaacacccactccacaatccaaatactaaaagttcttcaaccaagacactttggttcggacttgaacaaaggaaagagattttcagttccatttgatccggtaggttatacctattgggattatgttgatgcttggactaaggtgttttggcaccaaaatacccgcttcaagcattcatggctgatatatttcaagaccaatacaatttacaattttcgcaattggtttttgcaatggtgggacttctttggaccaatcccagagatattcccagaaacagtccaacaaggatttgctcaatttgagagacaataaaattcgcaggaatcacgaattccagcagatcttaaatacttttcaagctttgcattgtcatggatcttctcatggcaatatccttacagcaagactgaaaagacaaaccaatatccatcactacaaagacacacatttgtaaaatggtggacacaatttgactcatccaaagcagatccagaacaagtaaaagtctggttccaatcccatccagaattcctcaaagcagctaatcaagaaacttctgtgtttttgaaccaaaagtctcatctggcagcatttttagcaggatcgaaatcaaaggaggtcctagcta

SEQ ID NO: 12543 - DNA, 1107 bp, Glycine max; identical to SEQ ID NO: 12542
  Gm_smallRNAprecursor_5376

SEQ ID NO: 12544 - DNA, 1108 bp, Glycine max
  Gm_smallRNAprecursor_5377
aaccggcaaccgccaaacaaacatcggccgactatgcatgaccaattgaaacccttcaggcccttcaagacatgggtctaaccaaatttccaaaaataatcaaaaaatcttgggcagacattgcctcagaatctgatgatgaatctgaatcaaatttacaaacaatgatccaaaatgcatcaatgacagaaacaactaccaatcctaaagggaaactacctttagccaaagctcaaacaccacctaccaaacaaactaacaattatattaataaaaataaatttgtaactgttttgcacatggaacctgaattttgggacaaaaatcccttcaaggcgacggccaaggctttcccaccaggatttcactacaaaccaaccaccatcctgaagacaagaactttttatgaattgatttgggtagattcaaattcagtatttatcaaacatttcaaagacccaaaagaccaaacattaaacacccactccacaatccaaatactaaaagttcttcaaccaagacactttggttcggacttgaacaaaggaaagagattttcagttccatttgatccggtaggttatacctattgggattatgttgatgcttggactaaggtgttttggcaccaaaatacccgcttcaagcattcatggctgatatatttcaagaccaatacaatttacaattttcgcaattggtttttgcaatggtgggacttctttggaccaatcccagagatattcccagaaacagtccaacaaggatttgctcaatttgagagacaataaaattcgcaggaatcacgaattccagcagatcttaaatacttttcaagctttgcattgtcatggatcttctcatggcaatatccttacagcaagactgaaaagacaaaccaatatccatcactacaaagacacacatttgtaaaatggtggacacaatttgactcatccaaagcagatccagaacaagtaaaagtctggttccaatcccatccagaattcctcaaagcagctaatcaagaaacttctgtgtttttgaaccaaaagtctcatctggcagcatttttagcaggatcgaaatcaaaggaggtcctagctaa

SEQ ID NO: 12545 - DNA, 1108 bp, Glycine max; identical to SEQ ID NO: 12544
  Gm_smallRNAprecursor_5378

SEQ ID NO: 12546 - DNA, 1102 bp, Glycine max
  Gm_smallRNAprecursor_5379
cggcaaccgccaaacaaacatcggccgactatgcatgaccaattgaaacccttcaggcccttcaagacatgggtctaaccaaatttccaaaaataatcaaaaaatcttgggcagacattgcctcagaatctgatgatgaatctgaatcaaatttacaaacaatgatccaaaatgcatcaatgacagaaacaactaccaatcctaaagggaaactacctttagccaaagctcaaacaccacctaccaaacaaactaacaattatattaataaaaataaatttgtaactgttttgcacatggaacctgaattttgggacaaaaatcccttcaaggcgacggccaaggctttcccaccaggatttcactacaaaccaaccaccatcctgaagacaagaactttttatgaattgatttgggtagattcaaattcagtatttatcaaacatttcaaagacccaaaagaccaaacattaaacacccactccacaatccaaatactaaaagttcttcaaccaagacactttggttcggacttgaacaaaggaaagagattttcagttccatttgatccggtaggttatacctattgggattatgttgatgcttggactaaggtgttttggcaccaaaatacccgcttcaagcattcatggctgatatatttcaagaccaatacaatttacaattttcgcaattggtttttgcaatggtgggacttctttggaccaatcccagagatattcccagaaacagtccaacaaggatttgctcaatttgagagacaataaaattcgcaggaatcacgaattccagcagatcttaaatacttttcaagctttgcattgtcatggatcttctcatggcaatatccttacagcaagactgaaaagacaaaccaatatccatcactacaaagacacacatttgtaaaatggtggacacaatttgactcatccaaagcagatccagaacaagtaaaagtctggttccaatcccatccagaattcctcaaagcagctaatcaagaaacttctgtgtttttgaaccaaaagtctcatctggcagcatttttagcaggatcgaaatcaaaggaggtcctagc

SEQ ID NO: 12547 - DNA, 1098 bp, Glycine max
  Gm_smallRNAprecursor_5380
caagacatgggtctaaccaaatttccaaaaataatcaaaaaatcttgggcagacattgcctcagaatctgatgatgaatctgaatcaaatttacaaacaatgatccaaaatgcatcaatgacagaaacaactaccaatcctaaagggaaactacctttagccaaagctcaaacaccacctaccaaacaaactaacaattatattaataaaaataaatttgtaactgttttgcacatggaacctgaattttgggacaaaaatcccttcaaggcgacggccaaggctttcccaccaggatttcactacaaaccaaccaccatcctgaagacaagaactttttatgaattgatttgggtagattcaaattcagtatttatcaaacatttcaaagacccaaaagaccaaacattaaacacccactccacaatccaaatactaaaagttcttcaaccaagacactttggttcggacttgaacaaaggaaagagattttcagttccatttgatccggtaggttatacctattgggattatgttgatgcttggactaaggtgttttggcaccaaaatacccgcttcaagcattcatggctgatatatttcaagaccaatacaatttacaattttcgcaattggtttttgcaatggtgggacttctttggaccaatcccagagatattcccagaaacagtccaacaaggatttgctcaatttgagagacaataaaattcgcaggaatcacgaattccagcagatcttaaatacttttcaagctttgcattgtcatggatcttctcatggcaatatccttacagcaagactgaaaagacaaaccaatatccatcactacaaagacacacatttgtaaaatggtggacacaatttgactcatccaaagcagatccagaacaagtaaaagtctggttccaatcccatccagaattcctcaaagcagctaatcaagaaacttctgtgtttttgaaccaaaagtctcatctggcagcatttttagcaggatcgaaatcaaaggaggtcctagctaaaaatctaaaggaagttctacaaatgttacagcaggaagaagaaggttcatcctca

SEQ ID NO: 12548 - DNA, 1099 bp, Glycine max
  Gm_smallRNAprecursor_5381
caagacatgggtctaaccaaatttccaaaaataatcaaaaaatcttgggcagacattgcctcagaatctgatgatgaatctgaatcaaatttacaaacaatgatccaaaatgcatcaatgacagaaacaactaccaatcctaaagggaaactacctttagccaaagctcaaacaccacctaccaaacaaactaacaattatattaataaaaataaatttgtaactgttttgcacatggaacctgaattttgggacaaaaatcccttcaaggcgacggccaaggctttcccaccaggatttcactacaaaccaaccaccatcctgaagacaagaactttttatgaattgatttgggtagattcaaattcagtatttatcaaacatttcaaagacccaaaagaccaaacattaaacacccactccacaatccaaatactaaaagttcttcaaccaagacactttggttcggacttgaacaaaggaaagagattttcagttccatttgatccggtaggttatacctattgggattatgttgatgcttggactaaggtgttttggcaccaaaatacccgcttcaagcattcatggctgatatatttcaagaccaatacaatttacaattttcgcaattggtttttgcaatggtgggacttctttggaccaatcccagagatattcccagaaacagtccaacaaggatttgctcaatttgagagacaataaaattcgcaggaatcacgaattccagcagatcttaaatacttttcaagctttgcattgtcatggatcttctcatggcaatatccttacagcaagactgaaaagacaaaccaatatccatcactacaaagacacacatttgtaaaatggtggacacaatttgactcatccaaagcagatccagaacaagtaaaagtctggttccaatcccatccagaattcctcaaagcagctaatcaagaaacttctgtgtttttgaaccaaaagtctcatctggcagcatttttagcaggatcgaaatcaaaggaggtcctagctaaaaatctaaaggaagttctacaaatgttacagcaggaagaagaaggttcatcctcaa

SEQ ID NO: 12549 - DNA, 1244 bp, Glycine max
  Gm_smallRNAprecursor_5382
caagacatgggtctaaccaaatttccaaaaataatcaaaaaatcttgggcagacattgcctcagaatctgatgatgaatctgaatcaaatttacaaacaatgatccaaaatgcatcaatgacagaaacaactaccaatcctaaagggaaactacctttagccaaagctcaaacaccacctaccaaacaaactaacaattatattaataaaaataaatttgtaactgttttgcacatggaacctgaattttgggacaaaaatcccttcaaggcgacggccaaggctttcccaccaggatttcactacaaaccaaccaccatcctgaagacaagaactttttatgaattgatttgggtagattcaaattcagtatttatcaaacatttcaaagacccaaaagaccaaacattaaacacccactccacaatccaaatactaaaagttcttcaaccaagacactttggttcggacttgaacaaaggaaagagattttcagttccatttgatccggtaggttatacctattgggattatgttgatgcttggactaaggtgttttggcaccaaaatacccgcttcaagcattcatggctgatatatttcaagaccaatacaatttacaattttcgcaattggtttttgcaatggtgggacttctttggaccaatcccagagatattcccagaaacagtccaacaaggatttgctcaatttgagagacaataaaattcgcaggaatcacgaattccagcagatcttaaatacttttcaagctttgcattgtcatggatcttctcatggcaatatccttacagcaagactgaaaagacaaaccaatatccatcactacaaagacacacatttgtaaaatggtggacacaatttgactcatccaaagcagatccagaacaagtaaaagtctggttccaatcccatccagaattcctcaaagcagctaatcaagaaacttctgtgtttttgaaccaaaagtctcatctggcagcatttttagcaggatcgaaatcaaaggaggtcctagctaaaaatctaaaggaagttctacaaatgttacagcaggaagaagaaggttcatcctcaaagaaggaagaaacaagttctgctgaagaagaagaagaagaccccttttaccaaaacgaagatgattgttttggtatctgtttagattaaatttaatttcggtcacaaaaccgtctgtttgtaattaatgtgtaattaatgctgga

SEQ ID NO: 12550 - DNA, 1146 bp, Glycine max
  Gm_smallRNAprecursor_5383
aatgatccaaaatgcatcaatgacagaaacaactaccaatcctaaagggaaactacctttagccaaagctcaaacaccacctaccaaacaaactaacaattatattaataaaaataaatttgtaactgttttgcacatggaacctgaattttgggacaaaaatcccttcaaggcgacggccaaggctttcccaccaggatttcactacaaaccaaccaccatcctgaagacaagaactttttatgaattgatttgggtagattcaaattcagtatttatcaaacatttcaaagacccaaaagaccaaacattaaacacccactccacaatccaaatactaaaagttcttcaaccaagacactttggttcggacttgaacaaaggaaagagattttcagttccatttgatccggtaggttatacctattgggattatgttgatgcttggactaaggtgttttggcaccaaaatacccgcttcaagcattcatggctgatatatttcaagaccaatacaatttacaattttcgcaattggtttttgcaatggtgggacttctttggaccaatcccagagatattcccagaaacagtccaacaaggatttgctcaatttgagagacaataaaattcgcaggaatcacgaattccagcagatcttaaatacttttcaagctttgcattgtcatggatcttctcatggcaatatccttacagcaagactgaaaagacaaaccaatatccatcactacaaagacacacatttgtaaaatggtggacacaatttgactcatccaaagcagatccagaacaagtaaaagtctggttccaatcccatccagaattcctcaaagcagctaatcaagaaacttctgtgtttttgaaccaaaagtctcatctggcagcatttttagcaggatcgaaatcaaaggaggtcctagctaaaaatctaaaggaagttctacaaatgttacagcaggaagaagaaggttcatcctcaaagaaggaagaaacaagttctgctgaagaagaagaagaagaccccttttaccaaaacgaagatgattgttttggtatctgtttagattaaatttaatttcggtcacaaaaccgtctgtttgtaattaatgtgtaattaatgctgga

SEQ ID NO: 12551 - DNA, 1144 bp, Glycine max
  Gm_smallRNAprecursor_5384
tgatccaaaatgcatcaatgacagaaacaactaccaatcctaaagggaaactacctttagccaaagctcaaacaccacctaccaaacaaactaacaattatattaataaaaataaatttgtaactgttttgcacatggaacctgaattttgggacaaaaatcccttcaaggcgacggccaaggctttcccaccaggatttcactacaaaccaaccaccatcctgaagacaagaactttttatgaattgatttgggtagattcaaattcagtatttatcaaacatttcaaagacccaaaagaccaaacattaaacacccactccacaatccaaatactaaaagttcttcaaccaagacactttggttcggacttgaacaaaggaaagagattttcagttccatttgatccggtaggttatacctattgggattatgttgatgcttggactaaggtgttttggcaccaaaatacccgcttcaagcattcatggctgatatatttcaagaccaatacaatttacaattttcgcaattggtttttgcaatggtgggacttctttggaccaatcccagagatattcccagaaacagtccaacaaggatttgctcaatttgagagacaataaaattcgcaggaatcacgaattccagcagatcttaaatacttttcaagctttgcattgtcatggatcttctcatggcaatatccttacagcaagactgaaaagacaaaccaatatccatcactacaaagacacacatttgtaaaatggtggacacaatttgactcatccaaagcagatccagaacaagtaaaagtctggttccaatcccatccagaattcctcaaagcagctaatcaagaaacttctgtgtttttgaaccaaaagtctcatctggcagcatttttagcaggatcgaaatcaaaggaggtcctagctaaaaatctaaaggaagttctacaaatgttacagcaggaagaagaaggttcatcctcaaagaaggaagaaacaagttctgctgaagaagaagaagaagaccccttttaccaaaacgaagatgattgttttggtatctgtttagattaaatttaatttcggtcacaaaaccgtctgtttgtaattaatgtgtaattaatgctgga

SEQ ID NO: 12552 - DNA, 1057 bp, Glycine max
  Gm_smallRNAprecursor_5385
atttcaagaccaatacaatttacaattttcgcaattggtttttgcaatggtgggacttctttggaccaatcccagagatattcccagaaacagtccaacaaggatttgctcaatttgagagacaataaaattcgcaggaatcacgaattccagcagatcttaaatacttttcaagctttgcattgtcatggatcttctcatggcaatatccttacagcaagactgaaaagacaaaccaatatccatcactacaaagacacacatttgtaaaatggtggacacaatttgactcatccaaagcagatccagaacaagtaaaagtctggttccaatcccatccagaattcctcaaagcagctaatcaagaaacttctgtgtttttgaaccaaaagtctcatctggcagcatttttagcaggatcgaaatcaaaggaggtcctagctaaaaatctaaaggaagttctacaaatgttacagcaggaagaagaaggttcatcctcaaagaaggaagaaacaagttctgctgaagaagaagaagaagaccccttttaccaaaacgaagatgattgttttggtatctgtttagattaaatttaatttcggtcacaaaaccgtctgtttgtaattaatgtgtaattaatgctggaccatacaacctgtcctctagccattaaagtcccggtcaaaactacttgtcttgtaacaagcagtcaaatagtcccggtcaaaactaccggcaactaccggtcttaggtttttggctatataaggagtcctcaagtagtgttcaaactaaattgttcgcaaaaaaaagaaaaactttttcatttattcagatccaagaagttctgtaacatatagccttatggaaatatttctatggaaccaaatgaaggcaaagatattagagaatgttataatcatgtctagactattgcgctatttttcccgtatctcttttcgatcaaattcttcttcttcatcttcttcaagaaattccaatttattaagtgatcaagataaccagacccaagaggtcgcccccaaacacaatctct

SEQ ID NO: 12553 - DNA, 1064 bp, Glycine max
  Gm_smallRNAprecursor_5386
atttcaagaccaatacaatttacaattttcgcaattggtttttgcaatggtgggacttctttggaccaatcccagagatattcccagaaacagtccaacaaggatttgctcaatttgagagacaataaaattcgcaggaatcacgaattccagcagatcttaaatacttttcaagctttgcattgtcatggatcttctcatggcaatatccttacagcaagactgaaaagacaaaccaatatccatcactacaaagacacacatttgtaaaatggtggacacaatttgactcatccaaagcagatccagaacaagtaaaagtctggttccaatcccatccagaattcctcaaagcagctaatcaagaaacttctgtgtttttgaaccaaaagtctcatctggcagcatttttagcaggatcgaaatcaaaggaggtcctagctaaaaatctaaaggaagttctacaaatgttacagcaggaagaagaaggttcatcctcaaagaaggaagaaacaagttctgctgaagaagaagaagaagaccccttttaccaaaacgaagatgattgttttggtatctgtttagattaaatttaatttcggtcacaaaaccgtctgtttgtaattaatgtgtaattaatgctggaccatacaacctgtcctctagccattaaagtcccggtcaaaactacttgtcttgtaacaagcagtcaaatagtcccggtcaaaactaccggcaactaccggtcttaggtttttggctatataaggagtcctcaagtagtgttcaaactaaattgttcgcaaaaaaaagaaaaactttttcatttattcagatccaagaagttctgtaacatatagccttatggaaatatttctatggaaccaaatgaaggcaaagatattagagaatgttataatcatgtctagactattgcgctatttttcccgtatctcttttcgatcaaattcttcttcttcatcttcttcaagaaattccaatttattaagtgatcaagataaccagacccaagaggtcgcccccaaacacaatctcttcaatga

SEQ ID NO: 12554 - DNA, 1059 bp, Glycine max
  Gm_smallRNAprecursor_5387
tttcaagaccaatacaatttacaattttcgcaattggtttttgcaatggtgggacttctttggaccaatcccagagatattcccagaaacagtccaacaaggatttgctcaatttgagagacaataaaattcgcaggaatcacgaattccagcagatcttaaatacttttcaagctttgcattgtcatggatcttctcatggcaatatccttacagcaagactgaaaagacaaaccaatatccatcactacaaagacacacatttgtaaaatggtggacacaatttgactcatccaaagcagatccagaacaagtaaaagtctggttccaatcccatccagaattcctcaaagcagctaatcaagaaacttctgtgtttttgaaccaaaagtctcatctggcagcatttttagcaggatcgaaatcaaaggaggtcctagctaaaaatctaaaggaagttctacaaatgttacagcaggaagaagaaggttcatcctcaaagaaggaagaaacaagttctgctgaagaagaagaagaagaccccttttaccaaaacgaagatgattgttttggtatctgtttagattaaatttaatttcggtcacaaaaccgtctgtttgtaattaatgtgtaattaatgctggaccatacaacctgtcctctagccattaaagtcccggtcaaaactacttgtcttgtaacaagcagtcaaatagtcccggtcaaaactaccggcaactaccggtcttaggtttttggctatataaggagtcctcaagtagtgttcaaactaaattgttcgcaaaaaaaagaaaaactttttcatttattcagatccaagaagttctgtaacatatagccttatggaaatatttctatggaaccaaatgaaggcaaagatattagagaatgttataatcatgtctagactattgcgctatttttcccgtatctcttttcgatcaaattcttcttcttcatcttcttcaagaaattccaatttattaagtgatcaagataaccagacccaagaggtcgcccccaaacacaatctcttca

SEQ ID NO: 12555 - DNA, 1060 bp, Glycine max
  Gm_smallRNAprecursor_5388
tttcaagaccaatacaatttacaattttcgcaattggtttttgcaatggtgggacttctttggaccaatcccagagatattcccagaaacagtccaacaaggatttgctcaatttgagagacaataaaattcgcaggaatcacgaattccagcagatcttaaatacttttcaagctttgcattgtcatggatcttctcatggcaatatccttacagcaagactgaaaagacaaaccaatatccatcactacaaagacacacatttgtaaaatggtggacacaatttgactcatccaaagcagatccagaacaagtaaaagtctggttccaatcccatccagaattcctcaaagcagctaatcaagaaacttctgtgtttttgaaccaaaagtctcatctggcagcatttttagcaggatcgaaatcaaaggaggtcctagctaaaaatctaaaggaagttctacaaatgttacagcaggaagaagaaggttcatcctcaaagaaggaagaaacaagttctgctgaagaagaagaagaagaccccttttaccaaaacgaagatgattgttttggtatctgtttagattaaatttaatttcggtcacaaaaccgtctgtttgtaattaatgtgtaattaatgctggaccatacaacctgtcctctagccattaaagtcccggtcaaaactacttgtcttgtaacaagcagtcaaatagtcccggtcaaaactaccggcaactaccggtcttaggtttttggctatataaggagtcctcaagtagtgttcaaactaaattgttcgcaaaaaaaagaaaaactttttcatttattcagatccaagaagttctgtaacatatagccttatggaaatatttctatggaaccaaatgaaggcaaagatattagagaatgttataatcatgtctagactattgcgctatttttcccgtatctcttttcgatcaaattcttcttcttcatcttcttcaagaaattccaatttattaagtgatcaagataaccagacccaagaggtcgcccccaaacacaatctcttcaa

SEQ ID NO: 12556 - DNA, 1060 bp, Glycine max; identical to SEQ ID NO: 12555
  Gm_smallRNAprecursor_5389

SEQ ID NO: 12557 - DNA, 1063 bp, Glycine max
  Gm_smallRNAprecursor_5390
tttcaagaccaatacaatttacaattttcgcaattggtttttgcaatggtgggacttctttggaccaatcccagagatattcccagaaacagtccaacaaggatttgctcaatttgagagacaataaaattcgcaggaatcacgaattccagcagatcttaaatacttttcaagctttgcattgtcatggatcttctcatggcaatatccttacagcaagactgaaaagacaaaccaatatccatcactacaaagacacacatttgtaaaatggtggacacaatttgactcatccaaagcagatccagaacaagtaaaagtctggttccaatcccatccagaattcctcaaagcagctaatcaagaaacttctgtgtttttgaaccaaaagtctcatctggcagcatttttagcaggatcgaaatcaaaggaggtcctagctaaaaatctaaaggaagttctacaaatgttacagcaggaagaagaaggttcatcctcaaagaaggaagaaacaagttctgctgaagaagaagaagaagaccccttttaccaaaacgaagatgattgttttggtatctgtttagattaaatttaatttcggtcacaaaaccgtctgtttgtaattaatgtgtaattaatgctggaccatacaacctgtcctctagccattaaagtcccggtcaaaactacttgtcttgtaacaagcagtcaaatagtcccggtcaaaactaccggcaactaccggtcttaggtttttggctatataaggagtcctcaagtagtgttcaaactaaattgttcgcaaaaaaaagaaaaactttttcatttattcagatccaagaagttctgtaacatatagccttatggaaatatttctatggaaccaaatgaaggcaaagatattagagaatgttataatcatgtctagactattgcgctatttttcccgtatctcttttcgatcaaattcttcttcttcatcttcttcaagaaattccaatttattaagtgatcaagataaccagacccaagaggtcgcccccaaacacaatctcttcaatga

SEQ ID NO: 12558 - DNA, 1056 bp, Glycine max
  Gm_smallRNAprecursor_5391
caagaccaatacaatttacaattttcgcaattggtttttgcaatggtgggacttctttggaccaatcccagagatattcccagaaacagtccaacaaggatttgctcaatttgagagacaataaaattcgcaggaatcacgaattccagcagatcttaaatacttttcaagctttgcattgtcatggatcttctcatggcaatatccttacagcaagactgaaaagacaaaccaatatccatcactacaaagacacacatttgtaaaatggtggacacaatttgactcatccaaagcagatccagaacaagtaaaagtctggttccaatcccatccagaattcctcaaagcagctaatcaagaaacttctgtgtttttgaaccaaaagtctcatctggcagcatttttagcaggatcgaaatcaaaggaggtcctagctaaaaatctaaaggaagttctacaaatgttacagcaggaagaagaaggttcatcctcaaagaaggaagaaacaagttctgctgaagaagaagaagaagaccccttttaccaaaacgaagatgattgttttggtatctgtttagattaaatttaatttcggtcacaaaaccgtctgtttgtaattaatgtgtaattaatgctggaccatacaacctgtcctctagccattaaagtcccggtcaaaactacttgtcttgtaacaagcagtcaaatagtcccggtcaaaactaccggcaactaccggtcttaggtttttggctatataaggagtcctcaagtagtgttcaaactaaattgttcgcaaaaaaaagaaaaactttttcatttattcagatccaagaagttctgtaacatatagccttatggaaatatttctatggaaccaaatgaaggcaaagatattagagaatgttataatcatgtctagactattgcgctatttttcccgtatctcttttcgatcaaattcttcttcttcatcttcttcaagaaattccaatttattaagtgatcaagataaccagacccaagaggtcgcccccaaacacaatctcttca

SEQ ID NO: 12559 - DNA, 1056 bp, Glycine max; identical to SEQ ID NO: 12558
  Gm_smallRNAprecursor_5392
